United States Patent Application Publication US 2011/0014706 A2 - sequence listing, part 39

SEQ ID NO: 106597 - DNA, 453 bp, Arabidopsis thaliana columbia
gtagtaactgcagatggaatacacacgcaggagtgagagagcacgaaagaggagctataaacaggagggtattaggagtagacgcgggcatgctcaacagagaagagagagaccaaaccaaggcagtagagaatgaagcgtgagagaagtgctgctggctggagaaagtgaaccatggattgccacaggactgaacggacaagatcgagaggatgacgtagggccataacaagacatgccacgaacaaaagtacagcagacatgctcaagaacaacggttgggaccagacggagacagaagacgaagatgtcgattgggaaaggactctctacgtccgaaagctcactcaaatcaatcacaatgacagttcagatgagtacgatgaatacaggacggccatgaacgactttgggccgagactggagaataccgctgaggagaaagtgaagcta

SEQ ID NO: 106598 - DNA, 574 bp, Arabidopsis thaliana columbia
  unsure (1)..(574): unsure at all n locations
aattaaccgggtccgagcgccacgcgtcncnngcttcttcnntccaatcannatctcagnnagatttttaaataatgtaatatggcaacaannnaccctaaagtcggtacggcgtacattgtaccgnntcggtggcagagatccgtccggatcgtattcgtgggatggagctttnntacgccgacaccaactnaccagaaacncnngccgagagatttcaagaggcacgtcttgtactcgtgacgagaggagtgaatnncggtaaaccaaggtagagccacttacatctanncaaaggatcaangnnctttcaccgagtggatnntccgaaattcatggtgtcaacggagggtggatttcacnnagctcgggaatgggtacccggagggtgaagtcttatctatgtganntcgaagttcaaaagacccgagaactttatcaaagaaacatacanggacgcaggtgattttgtctatggcttaacgctggttgcgaacccacgaatggatctcagttttttattttgtactgagaaagacttcgtggctcgatgggaaacatgttgtgtttggtc

SEQ ID NO: 106599 - DNA, 346 bp, Arabidopsis thaliana columbia
  unsure (1)..(346): unsure at all n locations
gaacgacccacgcgnccgccggggaggaaaccacagcgngggaggagaatatatttttagccaccaccacccccacgaagcggggggcgtaaatttaggcaaggggcagacccccacggcccaagccaccaaggtcgcaccattcaccggctagaagacaaccgctaattacccgggcacccgcacggacaacaacgacattacttccatcacaagcaacggaggaagagtcagcagcacgaaggagcggccaccaatcggaaagaagaagatcgagactctataatacctaaccgaacaaagcgacgtagaaacggctaaagaaggagacaaccaaagccgaaac

SEQ ID NO: 106600 - DNA, 470 bp, Arabidopsis thaliana columbia
  unsure (1)..(470): unsure at all n locations
atttcccccaaattgggaatccaaaaccctagataacttcatgagagaattcttctccatctgaatgcatatgtcaaagctaatgaccagaaccagcggatcatcaagccccaacacgattccagaccaaatcgaatcaccaacaagctcaagatcggtgacgcagacgacaaacggatcgcaccaattcgtgatacaaggatacagtttagctaaaggaattggtgtagggaaacacatagcaagtgataatttctccgtaggaggttatcaatggactatcttcgtctaccctgacggtaaaaatccagaggataactcttcttacgtctctgtgttcatcgttttggctagtgaatgtactgaagttagagcgctttttgagctttctcttgttgatcaaagtggtaaagggaagcataaggttcatagccattttaatcgntcacttgatggtggtccttatacgc

SEQ ID NO: 106601 - DNA, 471 bp, Arabidopsis thaliana columbia
gccccacgcttccgctctgctcaaatggcgatggcggctctaacaataacttcttctgctataactctcctcaacaggcctttcttacctaaccggtgttccttcttctcctctgattcacaatctcctcttctccgattctctgcttctacctctgttcgttctcgttttccatccgcagccataagcgccgttgctcccaaatcggacataaataaaaatgaaactccaaagatcgaaatagaggaaactcaagtgttcgcgtgtcctgtttgctacgaaccacttatgaggaaaggaccttcaggtatcaacctacaagcaatctacaggtctggattcaagtgtggacaatgtaacaagacatattctagcaaagatgaatacttggatcttactgtcactgctgatttggatgattataatgaagtcaaacccattactaccgagctctttcggagtccattagta

SEQ ID NO: 106602 - DNA, 394 bp, Arabidopsis thaliana columbia
  unsure (1)..(394): unsure at all n locations
ccgatttgaggttgacttgagcgagaatccgganacttactaggagtattnaaggctcctgagaattccctgtttttgcgtcaagttttcatttttctgagtgttaataaatttagaatcattagtgcagcagatagagagagagtgtgtaaatctgaggaagactctctgtggatttgattcgtctttgtgagtcaggaatctgtttgatgaaattcccctgtggagagttttaggattttagaaaatgtgtaaagcggagaagtttctttatcacaggaaactctgggagatgaaggttaagtttctaggagatagtaagattgacaagcttaagaactccttggttttgaggtctcgtatgagcttatggatgattcgagctatgactata

SEQ ID NO: 106603 - DNA, 462 bp, Arabidopsis thaliana columbia
  unsure (1)..(462): unsure at all n locations
ctcttaggttggtcaatcagaatcaagncttttttgnnttccaattcgatttggattttggtgtcgtcttcttcttcttcttcttctcgagattgcgtattttgagcgatgcgggaagtggaaacaacggcaatcacagcagctcctccacaattctctcaaatgtttcagaaattagccatggccgtcaagaccaagacctacgagttcttcaccgaagacgataatgagagaaccgatgctgagggtttctctcttctcgattcctccgaggattttatcaccgatcagaaagtcgtcgttcttaaacccgataagcctcttcttagtgcttcttctccgggatctcctattgaatctccggtgaacgatgttcagacgaagaatttgggtgtggtaagtgttgttaaacctaatcaaaagaagctttctcaggttaggaaattggatacacagatggga

SEQ ID NO: 106604 - DNA, 419 bp, Arabidopsis thaliana columbia
gaattcttcttcttaattgagaaacaacaataagttgaataacgtaaattcaaaactctgctgatcattcaaaaccagaaactgtgaccggaaaagaatcagagaagtaaagaaaaacagaacaaaattaaaacagaatttcttctctaatccattacgccggcgatttcggcggcgtaggagatgaaagttcgtaggaaacttggtggtggttgcggcggagacgtcgttgtttcatggcggacgttcttttggttcgcgattctgtttgtcttctccttcgatctcttctccaccatgtttatttttaaggggaagtttcgtccggtggttcgttcgacgataagcttctcaacggctgatacggcaagggcggttttccgagagtctatatcgacttctccggcggttacgattcg

SEQ ID NO: 106605 - DNA, 485 bp, Arabidopsis thaliana columbia
  unsure (1)..(485): unsure at all n locations
aaaaaccagttcgccccacgcgtccggccggttacacgacgccggannccccccgcagtaatctggaattcagaggntngaagccttgggggtgtttggtgactcaggcggccagtctgggtgcgaatcgtagaaccagaatcgctcgcggtggacgaatcgcctgtgaggctcaggacaccactgccgccgccgtcgaagtaccaaatctgtctgattcagaatggcaaacaaaggttctggaatcagatgtcccagatctggtcgagttctgggcaccatggcgtggaccttgccgtatgattcaccccataggtgaccagctagccaaagatttcgcagggaagttcaaattctacaaaatcaacactgacgagagcccaaatacagcaaaccgttacgggatacgaagcgttccaacagtaatcatgttcaaaggcggtgagaagaaagatagcatcattggagctgtgcctagagagacg

SEQ ID NO: 106606 - DNA, 441 bp, Arabidopsis thaliana columbia
  unsure (1)..(441): unsure at all n locations
gaattaaccgggnccgacccccacgcgtcncccgaattaagtctggccccttcaatgggcttnnncttcagcagacatcnncatctgtcntcncggnnttctccccatttcgttgctgtgagccattatanntccataacgcagtcagtgctctnnctcgttatggggctcctnnggatccccatctnnccgtcgtatttctctttcccnnccgtcaaggtgnnntcccgccccgtggcgcctctccnnngttaaatnncggggttggatcccgagnnccagacggnnaggaaaaccctcatgaacccnntcgtagtnncgaagaaatcacccggcggcngccgtgggatgaaaccacgagnngcggagaccggttcccggcaagggatcannagctgaaccgtnngtggatctaagagtgggtaccatgtgcccttagcg

SEQ ID NO: 106607 - DNA, 340 bp, Arabidopsis thaliana columbia
  unsure (1)..(340): unsure at all n locations
cgtaaacccnncttaatcnncgattttcaccccttgcnnataagctctaatggcngnnaagcatctttcttcgacantnncttcgtcgagaacatcnnctcatggtccccagagatanngaagganngattcttcnntagtcaagaaagatgacccccactttggagacgtgttaggcgnnattggnngtttcggaaaaggtcttcaaagctttgaaatgctacccgacgtgttgcgtgatccctgaatnnntcggaagaaattcgaaaccccttagggggtcaatgaagattgatgaattagcgagaaagatgacccgatgatgaagaagggaaatgta

SEQ ID NO: 106608 - DNA, 440 bp, Arabidopsis thaliana columbia
  unsure (1)..(440): unsure at all n locations
cttattgtcgcggtggtaaagagagtgangtacgntatcaaactntaggatnctncttacttggggtcattatgggagagagctgatcacctctgaacttgcttttcggattttgtcaattttgagcgaagaacagttcttaccaaataaaaacggaggaatcctgaaaaacacattagacaaactagtcataaaaatggttcctatagaaaacccgaatggtcgcaaacgtgttgaatctggagatctttgtgaacgaagaaatggaagaggagttgacctgaaccgaaattggggtgttgactggggcaagaaagaaaaggattatgatccatctgaagagaatccaggaactgctccgtttagtgagcccgaaactcaaataatgcggaagctagccatatcatttgatccttacatatggataaatgtgcattctg

SEQ ID NO: 106609 - DNA, 449 bp, Arabidopsis thaliana columbia
  unsure (1)..(449): unsure at all n locations
gggtcgcccacgcgtcgaaaaacaaagattttgattncatnaaatgattaatataatcttagccaacacttctgtcggctcttcattctctctttctaaacgttacttcaattggaagaagaagaaagttcaagaagacgacgacgaagaagaggaagaagaagaagacgattacaaccacaacgagaaaaaagtcttgacccgtttcaatttctcctctgacccgacccgaccggatcagttcaatgcccaacagataatgaagaaaaaaaagaaaaagactctcgaaaagatccgttacgctctcgggttctctaactcgggtctgggtttccgggtcgtgggtacgttattcggtaaccgtcgtggacacgtgtacttcgccgtacaagatgacccgactcgtttacctgcggtgttgatccagttaccgactccaacgagcgttc

SEQ ID NO: 106610 - DNA, 260 bp, Arabidopsis thaliana columbia
  unsure (1)..(260): unsure at all n locations
ggccgggcacgcgacccgacacgaagcaaagcttgcaaacaaagcgaattggttgattatctgcagacacaannnccgggcagggccattctcccccggtgtcgcccccctttctccaccggaaaatcaccagcaactttctccgtcgtagctatggctccccagaaaaaggtgaacaaatatgatgccaagtggaagaaacaatggtacggagctggattgtttttcgaagggagtgagcaaataaacgttgatgtttt

SEQ ID NO: 106611 - DNA, 362 bp, Arabidopsis thaliana columbia
  unsure (1)..(362): unsure at all n locations
cggaatnccgggcgaccacgcgtccgggaaaggctctgtgctgcaacatctccgtttgaatatctccggcgattcagccttctgtggggtggtcacgctctgaatcaactcaacctgcacgtatggaggaatctggattcgagagcacaactatttccgatgtcatgaaatccaaaggcaaaagtgctgatggatcttggctttggtgtactactgatgacactgtttatgatgctgttaaatccatgacacaacacaatgttggtgccttggtggttgtgaaacctggtgagcaacaagctcttgctggtatcattacagagagagattatctacggaagatcattgtgcaagggagatca

SEQ ID NO: 106612 - DNA, 479 bp, Arabidopsis thaliana columbia
  unsure (1)..(479): unsure at all n locations
accggaaatgaccggccggaccgacgcgtccgcggacgcgtgggttttaatggatggggctattacatactctctcttnggannnncaaaacaaaggaatcttaaatccagactttaaccatgacggatacaatgtctgctcatatggatcgacataataagcttgattatgacggctcagaggatgaaaagaaaacaaagctttgttccctcaagaagaaagcaatcaatgcctccaacaaattcaaacactccttcaccaagagaactcgaaggaacagccgagtcatgtctgtctctattgttgacgatattgatcttgaagagcttcaagctgttgacgctttccgtcaagctcttatcctagacgagcttctcccttccaaacacgatgatcatcacatgatgctgaggtttctgagggcaaggaagtttgatcttgagaaagcaaagcaaatgtggactgatatgatccattg

SEQ ID NO: 106613 - DNA, 367 bp, Arabidopsis thaliana columbia
cttgtgggctatctcacccaaataccgactacatatatatcaatgtggctatgatggaaaaagaagtagggaatgatcatctagctctaaggtacctgcatgaagctctaaagagcaataaaagattgctaggagctgaccatattcagactgcggcaagctatcatgcaatagcagtggctctctctttcatggaagcacattcattgagtgtgcaacatgaacaaactacacttcagatacttactgcaaaacttggagcagatgaccttcgtacacaggatgctgctgcatggctcgaatattttgaatcaagagccatagagcagcaggaagcaggccgaaatggaatcccaaagcctgatgc

SEQ ID NO: 106614 - DNA, 520 bp, Arabidopsis thaliana columbia
  unsure (1)..(520): unsure at all n locations
cacaaggtccaagcaccgaaaacaaggcgnnctagactagacttttatcaacaaanccagatttntgagctggagggtaatactttgagaagggagaagaaacaatgctcgaaccactagacccatagaaggggatctttgaagcgagcgtactctnnaatgatggcgaggatctcctaaagaccgtaacgatagttttgcacaattaggnnnaccagcttctctgcacctgtgttccaatgaatcgaaaagggcttttgaaaggccggtantgaatggtggctcgcttcaaacttctcacatnggaagcctatgaatacccatcaagagacanctcgacaancctccgctctgctatgcatnnaataccggcattctcgcttgctgtcaatgcttgatanctaaggggctctgagattcgtacctggttctcatgaaagatngggaacccctatacatactgaaaggaaggtcaaagagattactnataacncacttgatttatgacatttcaagggag

SEQ ID NO: 106615 - DNA, 329 bp, Arabidopsis thaliana columbia
  unsure (1)..(329): unsure at all n locations
cgcttaaaggattcgaacttttgcgagtacagagtagagtganattggttttncgggtttanngaatcaggaacgtgcggtgttgaagtatagggtctcttgagtcgagcagacgatangnntagaaatggttgagaatcccctttctctgtagaaatcgcnnaaaatgcgnntctcggannatctcgctttgttacctttcgaatnnctcgannagaagaagaaactccagacccgactcantnntcgcttaccctcntnnctttcgaggagttttcatatnnnctcgagtcgnntctggaaatgcccttctgtnntcgaaaccatca

SEQ ID NO: 106616 - DNA, 409 bp, Arabidopsis thaliana columbia
  unsure (1)..(409): unsure at all n locations
gatagattgtgtggttaaggcnngtataaatcctttgatcatacgnncanngnncagggcggctttgtccgattctggtggagaacttgcacgtnccataatgcatgatgctgttcgtgttatcattggccgaaaaaacacagcatctgaaaccgtcaagcaaaagctggtttttgctggaagtgaagaagggaaacttcttgctcttcgccaaagctttgcagagagtctgaatccaccggtactgatctttgtacaaagcaaagaacgagcaaaagaactctatgatgaactgaaatgtgaaaacatcagagccggagtcatccattccgatctccctccgggagagcgggaaaatgcagttgatcaatttagagcgggagaaaaatgggttttgatagccactgat

SEQ ID NO: 106617 - DNA, 416 bp, Arabidopsis thaliana columbia
  unsure (1)..(416): unsure at all n locations
tcaataaaatttttttagaggaagncnaaagggtcggggttttttgcagattaaaaagcctcacatgtaaaagaagtttcatcaaccaaccatctgtacatggagttttattgaaaaaaacttggatatttttaaaggcagaatatcacattgatttgcaaactataacatagaccaggcttgttcaaggggataaacaagatggctcacatccactcccatgttgcggatattggaatgcgctcctgagtacaccaatccatgacgcgcctaaccacctcatcaaaaccagcactgattaacgggtagctggaagcaagccccaccctgcactaggggaacttctgactgacgaggaccagattattgttaaaagtcttagctttgttaagttgaagatcccaaaatgttaaatt

SEQ ID NO: 106618 - DNA, 278 bp, Arabidopsis thaliana columbia
accggcctggaagaccgaccgacccacgcgtacgagaacccaactatctgcaaacccgcttttataatcttcctggaccgccactggcagagaagggtctgaagcgggctggagtggcccgtcgcggctgcattactagccatggatcacgtctctgcttcagttccgatcataatgcctcatgggatcctacctaactgctgtaaggccagggatgcctacctcacacaagttcttacttacccttctggcttttccggcctttggctaagaaatgg

SEQ ID NO: 106619 - DNA, 293 bp, Arabidopsis thaliana columbia
  unsure (1)..(293): unsure at all n locations
cggttgaatacaggnggagnncggtttaatcattagaatgtgcacgcaagaaaggcgaggcatgagtgggatcccttgcgtttcggttagcgctaccggtttagctagaatgcacactaaaccagaagtaatgtttggattaatcaacggtgcagaaaaacaagaaatatggagttatttagagtctgctaaagatatgaaagaactaattcgtatcggaagacatcctaattcatggaatgaagtctcttgtttcagcattgagtggaagggttcgaaagagtggtatctga

SEQ ID NO: 106620 - DNA, 312 bp, Arabidopsis thaliana columbia
  unsure (1)..(312): unsure at all n locations
cttcggttttagccgctgcagtgcacgaggataacatagaaaacggaagaggaagacnaagagcggagcgagagaagcaacgagggggcgctcaattggaaacaaaaatggcgacagacacgagcaacgagggcgagaaccgaagaagaaaacgtcgagcaaatcgatgcagagcttgtcctctcaatcgaaaagcttcaagagatccaagacgacctcgagaagataaatgaaaaggctagtgatgaagtgttggaagtggagcagaaatataatgtgataaggaaacctgtttatgacaaggcgaacgag

SEQ ID NO: 106621 - DNA, 347 bp, Arabidopsis thaliana columbia
  unsure (1)..(347): unsure at all n locations
gaaaacccgggcccgacccacngcgnccgcacacgtggggaggtagaggaccnnngactacaataaagatcggagaaccggcancaancncagggaaggaagaagcaccacgaacgggcacggaccaaagcacaacacaggctcttggtaaggctccgaagggaatgtgagagggcaaagagagctctaagtagacagcaccaagtccgtgtagagatcgagacaccctatgacggcgccgacacttcagagccacacaccagagctcgcaacgaggagcgtaacaaagaaacgggcaggaagaccaagggacccagagaagacagccaagcaagaagccccgcaac

SEQ ID NO: 106622 - DNA, 354 bp, Arabidopsis thaliana columbia
  unsure (1)..(354): unsure at all n locations
gacgagcaaagaaccctacagctaaaagnaataatctatggcgattatctctgagatggaggaggcgagaccctcgatggtgcctttcaccgcaagttttgatccttcaaacccaatagcgtttttggagaaagttcttgatgttatcgggaaagagagcaattttctgaagaaagacactgctgagaaggagatcgtggctgctgttatggctgcgaagcagaggttgagggaagcggagaagaagaagttggtgaaagagagtgttaagtccatggaggttgagaagccaaagaaagattgcttgaaacccacggagctggagatgccttaggaggagagtttgattgcgac

SEQ ID NO: 106623 - DNA, 429 bp, Arabidopsis thaliana columbia
aatttcaatctcgaaaggctctccaatgtggtaatacacttgatctgtgtattaatatagtggatattgaatcacttgaacaattgatccctcgtctcactcaactggttcgggggggggtgggcctaaatccagaggtgggggtggcaggtttattttaatggtaggtcaaaaaggtgggtcccagataaagccggtcactggaatgctgctgagacttttggttcctgttgccaaagaggagaaaagttctgctgcaaaacgtgccttttcgagtgcttgcggcattgtattgaagtattctagcccctctcaagctcaaagcttaatcgaagaaactgcagctctgcactctggtgatagaagctcccagatcgcatgtgcgagtctgttcaaaagcttctcatctacagctgctgatattatgag

SEQ ID NO: 106624 - DNA, 480 bp, Arabidopsis thaliana columbia
  unsure (1)..(480): unsure at all n locations
ccggccggaancccggccgaccacgcgtccgaaaaaaaatctatcaaaaggaagaaaaataaagttcngttggattgcagagatttaaaaagaaaatggagggtttgattccatttttgtacaaagccattgttatgtataaaagagaaggaagcttttcgtcggttttgctcagcgatcatcactctccttctaacgccggttattacatgcgactttctggcgactcgtctagtaggtttcgaacgtccgatctccgacgatttgggacggaccgttttggaatgctcgaaacgacgccgtcatcttcgccttctcgtgtttccactaggaacatcaccaaacgtacgtaaggacgactgatgatcgatatacatacgtaaagatatgattgtggtaatttgaaattaaaaattggtatatacttacggtccaccttaaattattatacttgctaggtaaactaatggttgttaaaat

SEQ ID NO: 106625 - DNA, 460 bp, Arabidopsis thaliana columbia
  unsure (1)..(460): unsure at all n locations
atctggaccgtacgatactccgattacccaattattgctttaacataggggtacatctgtgagcttcacattccatcttcccccaatctcctatttgtgtcttcttcgagtttatatatagagagatagagattggagagcgagcgagacaaatcagaagagagagatttagatattgtagagtgagattctaaagagagagagagagagagatatggctagtggaatcgctcgtggtcgtttagctgaagagaggaaatcgtggaggaagaatcatcctcatggttttgtggcaaagccggagacggggcaggatggaactgtgaatctaatggtgtggcattgcactatacctggtaaagctgggactgattgggaaggtggattctttccattaacgatgcacttcagtgaggattatccgagcaaacctncgaaatgtaaatttccacaagggttt

SEQ ID NO: 106626 - DNA, 431 bp, Arabidopsis thaliana columbia
cagcatcgagccacgcgctcctgaattttaatattcacagaagatggattacttgaagcataaagtcgatcccgcttttgttatggaacgccgtgccatgaagagagactatgaggaattcaaagtaaagataaatgcattggtttctgtatcacagaaagttcctgaagatggttggactatgcaagatggaactccttggcctggaaacaatgtccgggaccatccaggaatgattcaggttttcctgggacacagcggagtttgtgatatggatggaaatgagttacctcgtttggtgtatgtttctcgtgagaagcgaccgggatttgatcaccataagaaggctggagctatgaattccttgatccgggtatctgctgttctctcaaatgctccttaccttcttaatgtggactgtgatcattaca

SEQ ID NO: 106627 - DNA, 383 bp, Arabidopsis thaliana columbia
  unsure (1)..(383): unsure at all n locations
ggaaggcccggcccgacccacgcgtccgctgcaatctgtctctcgnaatctcttttcattcttttgtccgaaccttaactgattttcggtttcctgagacagatttctagtgtgaagaatcatttcgagccatgtctccggctaaagtctcttcctttgaccaaaacattgaagaagctcattcagtgagtagtccaagacgagttttaagcttctcgaagagaaataagcaaaagcctggtttccaagatacagacagtagaaggtcatcttcatttagagcatcagaagtgcatggacctaaaccctcagaggtgtacggtttcgtaggatcgatatcgactgttgttgccacagtcatcttcttggtatgggcatatgtt

SEQ ID NO: 106628 - DNA, 443 bp, Arabidopsis thaliana columbia
  unsure (1)..(443): unsure at all n locations
actatggatggtgtcagatccgngtccgacggttagatcttccgtcctgataacttcgtatttggtcaatccggtgccggtaacaattgggctaaaggacactacactgaaggtgctgagcttatcgattccgttctcgatgttgttcgtaaggaagctgagaattgtgactgcttgcaaggattccaagtgtgtcactcattaggaggaggaactggatctggaatgggaacgttgttgatttcaaagattagggaagagtatccagataggatgatgctgacgttttctgtattcccatcaccgaaagtgtcagacactgttgttgagccttataatgcaactctctctgttcatcagcttgtggagaatgcagatgagtgtatggttcttgacaatgaagctctctatgacatttgcttcagaactcttaagctcaccac

SEQ ID NO: 106629 - DNA, 239 bp, Arabidopsis thaliana columbia
  unsure (1)..(239): unsure at all n locations
agagccaacaacgcccggaggcctgagacaagaagacagcccaccccaacaagaagangncggcgaagcctacgggtaacttgtcggatgagaatccaaatctgaataaacacattggatgtatgaatgggatctttcaggtgctttaccgggaacaatatccaccgagacgtgtcaccggagatgagctcaagtctattccttcaggcaaagcaagtgacaatgtcggtgataccaac

SEQ ID NO: 106630 - DNA, 220 bp, Arabidopsis thaliana columbia
  unsure (1)..(220): unsure at all n locations
cgctggcaccgncgnagnanncgncttccgtcccctctcccancggagcgnnncnanagggggcaccttaaggagncagagacgtgcccgccacaagaacagcnaggcagaagaagagaaaccagagagagnaanggagaaccnggaagaacngaaaanncnggccgagcagaggncgcancaaggaanagaananccncagaagaaacccaccgaacag

SEQ ID NO: 106631 - DNA, 454 bp, Arabidopsis thaliana columbia
atcatgggagatccaatgaggaaggaagtggggtcggttttttagaaaaccgagacggcaaagcgagaattcaaatctttgtctcagagctgccagaagaaggtttcatataatcagtctttattaacaatcctgcttctttttacctctacaactcttttatatccatcaatactcacaccagatgataaataaatgacaggagagggaatacaaagagatacatgaggctttcgacgaaaagaacaaagagaaagcacaccttgtttcaatcttaatggagctactagctgaaagtgaaagagtaagggtgaagaagctggaagagatcaacaagactattgggtccttgcgataatcaattctaccttttacatgggaactgtttgaggttttggatcatttatggattaaagttcctctactgaagtgtgagaaaaggtgtaaaagaatg

SEQ ID NO: 106632 - DNA, 426 bp, Arabidopsis thaliana columbia
  unsure (1)..(426): unsure at all n locations
gcgagatcgcagctccaatgctacggcgagtcctccctctgtttcgacgggcacgatctactcggagaatgtagtcgtcgtgacaaaccaatcgaacggatgaaagcaatggtgacgtggtacatctcaacactccggcctttgatctttggcttggctccatacaatcctgtcatcggcgaaactcaccacgtgtccaatggtcacattaacgttctcgcagagcaaatatcgcatcatccaccagtttctgctcttcatgcaactcacgagaaagaaaacgtagacgttttgttatgtcaatatttcacgcctaaatttcgtggtgcttacgtggacgttgaggtgaagggtaaaagagtggtgaaacttctgaatcacatagagactnacgaaatgaaccaaccaaaacttctcatgacggtt

SEQ ID NO: 106633 - DNA, 416 bp, Arabidopsis thaliana columbia
  unsure (1)..(416): unsure at all n locations
gaagaattgtttactaagctgaaactcagacaatcaattgagttataganacaannggcacatcggaaactggaaactgcttctctgaagcataagagataagaccaatatataagccaaaattttgaattactaattgaaaaatatgacttttctctgctaaattgctacgacattaggctgcttctgtgacttcgacgagccttccacgaacccacttcttcgttacgtttcctgattccaaagatgcagccttttcgtcaatcccgtggtaaccatttggaagaggatgattctcagcaagactgatagctccattagactctgctggtggatggactctcgttccgtttggttgcccaactatcccgagtttgatatcttctctacctccttgggatgtgttggatttcata

SEQ ID NO: 106634 - DNA, 348 bp, Arabidopsis thaliana columbia
gttaacagatcgactccaccggggagtttactagcttccacggctaggaagcaggctaatagaaaaagcattgatcagaagaaaaccagtctaacagcatcacttacaaaaccaaacgtgaggagaagattggaatggaaagctggaggagctagtattcccactggtgtgtctcttgaagacgaacaacattgtgatcatgacgagaatgcgaaggaaacgagtcattctagtcacaatacggtgcagaagttaggaggtgtttccagttctcttaatggcaatatcccaccatccggtgctacaatggtaacagggcatcacgtcttgtctgaaaacccaatagta

SEQ ID NO: 106635 - DNA, 443 bp, Arabidopsis thaliana columbia
  unsure (1)..(443): unsure at all n locations
caaaattttgattagaaaaaaaaanaaactccatccccattataannnagggncaaaaaaagagcatccaccattaatacaggtgaaacccaactttctctccccttttttcttacaagtttgaatatcaaagtacggtctcttttttttctatataatagttatttaatcaaccatacacattcatcaaatccatatttcatgcagctgttacatttttattatatgtcctcttacttccttttgagtgtgtatatgtgcttaattatattccctcatcacaacctcaatctcaatctcaatcatgtctccaaatctcaatcatgcttcttccactttgattcttatctatctggatcacaattctattcatatcctttaatcaaaatcatatcatagcttcttttttttatattactaatcttgatgaagatcaccaaaac

SEQ ID NO: 106636 - DNA, 379 bp, Arabidopsis thaliana columbia
attttgatactttgttaaaggcactaatgaagaagcagtatctgaaatctggatctgggacaaggaaggaaaaggacaaggcgaagaggtggttcttggataacggaagcatcttcttaagagaacttgtagctgattgtaacggtaaatccattcctattcgcagtttttctcctgagcagatattgaaagccaccaacaatttcgattctagctgttttgtctcgcaagatgtatactataaatggtatagaggtgaaattgaagatagatcttacatgatcaagagattctcagaggatgagattacaggaaaacgacatagagtttaagaagtttacaacgacaatgtctagtctgctcggatgaacaatcacag

SEQ ID NO: 106637 - DNA, 424 bp, Arabidopsis thaliana columbia
  unsure (1)..(424): unsure at all n locations
gaaaaccgggccggcccacgcgtccgagaaaatcaaagcagcagttaaggccgtcctttcttattagcaccccaaggaagangaggagaggaattctgaagcgtctagggcgccaccaaagctagagacagacgtggagatcaaggcttcggctgataagtttcaccacatgttcgctgggaaaccacaccatgtctccaaagcaagtccaggcaacattcagggatgtgatctgcacgaaggcgactggggcacagtcggctctatcgtcttctggaattacgtacatgatggggaggcaaaggtggcgaaggagaggatcgaggcggtggatccagataagaacttgatcacgtttagggttatagaaggtgatctgatgaaagagtacaagagcttcttgctcaccatccaggtgacccct

SEQ ID NO: 106638 - DNA, 395 bp, Arabidopsis thaliana columbia
  unsure (1)..(395): unsure at all n locations
acgaaacaagcaaaacaaggcncagccttgctccttatttatnagaaganacaaaggagccaggcatcctcagagacgaggagcgcccccaccattcctgaatcacaagtttctgcatcactaccatgttttcaggcgagcgctgacgggataagaccacggaagagcttacctgaagccaggaagagagacatcttctatggagaagatgacgtggcagacttgcaggctagagaagaggaagcggaacaagacacggtcatgaaagcttatagaaagaacgaaactatgaaatctatccaagatacgagacgaagacaaagaaggctcgttaagcntcgaatgttaagactccctcaaactcattttctctagagatcggaactaaaaacccc

SEQ ID NO: 106639 - DNA, 385 bp, Arabidopsis thaliana columbia
  unsure (1)..(385): unsure at all n locations
gaaaaaaacaaacancnagaaacaaacttcctccttattctgccgnnnncnagnacaagagggatttttataaatattcgacgccccacacaagcgngnnnntaatccctctctgatttaattttgtttcctagtctttaaagatccatggcagccatagatatgttcactagcaacacagatccttttcaagaagagctcatgaaagcacttcaaccttataccaccaacactgattctccttctcctacgtatgcaaacacagtctccggtttcaatcaaaccacatctatcggactaaaccagctcacaccctaccaaacccaccaaaaccaaaaccagcttaaccagaaaccttacataatctcttcaaagctaaccccaa

SEQ ID NO: 106640 - DNA, 367 bp, Arabidopsis thaliana columbia
  unsure (1)..(367): unsure at all n locations
aagacgcggggacaaagacacagagaaagactcctttttttaaancgaaagcagagaaaaggggggagtgtttgaagacatgaagctcaccgcgctagagcgcattgtgttcatggagggtgtcatggactgtccagagacaatcatagcaactgaggacaaactttctggaggagaagctgctgtaacgagcgatgcagtacagcttatgtcatgcacaacaccaatgctcacatgagtaccaccgtccaaagagtgctgccgcaaaccgaacgagcaacagccgagtaacaggacatatatgaaagatccaagatacaggcaacatcatcgggctgcaaatgcttataaaacactagcaacttgt

SEQ ID NO: 106641 - DNA, 265 bp, Arabidopsis thaliana columbia
  unsure (1)..(265): unsure at all n locations
caccaccacnccgaagaagctttttaaaagatgaggagggccccccaccnccccaccacnacccacaaacaggaccaaaaacctagagaaagctggacaaaacacacgcataacccgacacctcaaaaacacaggagacaccaacacaactctacagacaactaaacaacaacgaccatgaaagcactatatacgcaccgacagactccaaacacaccagacccaaaagccaggaccctacaaatcgctacaccacacgagcaac

SEQ ID NO: 106642 - DNA, 438 bp, Arabidopsis thaliana columbia
  unsure (1)..(438): unsure at all n locations
agaagcaattgaaacgcaaaaggaattccgtgattatatgttncaagcnannnatnagagggggaattcttaatttgaaccatgtcctgtaattatttggcaggcttttgagccccctatagacttgagtaaacacatgcgcgagccaataacaggagcactgtctatggaggagctccaaagggaggaacatcatcatgatcattccctcaagaatgcagagataagactcaataacaagacatgtgaatttgatggaggccacttaaatcatgaccatggcagtgtaccattttcatctcatgattggttggattcttcagtacaggcgcatgttcctctggttgatgtaaataaggtatgctttttcacttttactatggntgattatattagatttttttcatcctagcaactcataatttgtgaaaagctatt

SEQ ID NO: 106643 - DNA, 192 bp, Arabidopsis thaliana columbia
  unsure (1)..(192): unsure at all n locations
aaaaaagaganngnnncnngagaagaaggagttacaaaacgaagggggcccccccacccgnggngnagngnnncgggtttagcgaagcaaaagcacaagcacaagcgcaagcgccaggaaacacaggcaaagcgacccaccggacgacaaaggaaacaacaacggccacaaccccagagcaagaaccaacaa

SEQ ID NO: 106644 - DNA, 179 bp, Arabidopsis thaliana columbia
  unsure (1)..(179): unsure at all n locations
aaaacccaaaaagcnnccgcgtcgactcttcaaaggaggcgccagcggggggggaagcagacagcgaancggggccggagagcaggagcaacagaaatcggcaccggacggcggcaaacaggtcccgaggccgagccgggaaaagggggaccccgggagagaggcccccctcccctccc

SEQ ID NO: 106645 - DNA, 281 bp, Arabidopsis thaliana columbia
  unsure (1)..(281): unsure at all n locations
ngcgaggacgcgagggccaanccaggcagctcctccaaaaataagaagacagancnancaacggggagcaaccagagcaagnaggagcccccccccaccccggccaagaactagaggtctgagaaaggcgaaggcaacaggaagacgaaccacacgaaaccccgacgcacccccaatgaacccggcagctggaccacaagtggaagaatcctcaccggagagcgggcaatcggtgacaaccccgaccggggaccccggacaccggatcagtcagcaacagc

SEQ ID NO: 106646 - DNA, 432 bp, Arabidopsis thaliana columbia
  unsure (1)..(432): unsure at all n locations
cganaggagattagccggnacganncgaccctcgtcatttttaacncgccncannnnaccggggggctgtcttataggagcaaagcgccccaccacgcctttcgtactcaaaatagctatatagatattgtttagcagagaggaggaagatagtgaaatgagtaggctatcttttcgaccccgtccactggacatacacaagaagctcccaattttaaagacttttaaagactttgaagacgaagataatccttcttccattactagaaactctcagtagctgcgtatatctgccgtacaggttgttgacaatgaggtgcatcctccagagcctatgaagaaactgatatcggaaatcccaacacctcactatcttgttgttgaacatatgaaagagactactctaggacttttaatcagcctgcttcatat

SEQ ID NO: 106647 - DNA, 386 bp, Arabidopsis thaliana columbia
  unsure (1)..(386): unsure at all n locations
caaaataacgttttttnnnagacaactcgctcccttttgcatgctagctctagataacaggcgtattctcaagctatgggtatgcagctattaccacgtcaagtcctttgtcgataggggtaactttgagctctcctggtggatcatatgagcttggtttcttcagttctaacaactctgggaatcagtatgttggaatctggttcaagaaagtcactcctcgggttattgtttgggtggctaacagagaaaagccagtctctagtactatggcgaatctcacaatcagcagcaatggaagtcttatcttgcttgatagcaaaaaagatctggtgtggtcatcttgaggagatcccacatctaacaaagtgtcgtgctgagctttt

SEQ ID NO: 106648 - DNA, 248 bp, Arabidopsis thaliana columbia
  unsure (1)..(248): unsure at all n locations
aagagccagatgctaagcgaganaaatttggtcctgttttnganncgggagccgcaagggcggcaccttaaacagagncagcgaccgcacacaaagcgccnanccngaaaccaccnnccaccgccaaacnaagcacagaaacgccagcacccgaggcaaaaaacgggaagcaaagaccaganncgnggaccacaaggnagaacgccccnangggaaanagggacaaggcggacaaccgcaccacgacc

SEQ ID NO: 106649 - DNA, 377 bp, Arabidopsis thaliana columbia
  unsure (1)..(377): unsure at all n locations
cagatgaccgcattagctgntataaagctcactccccctggttgggtaggncttctgcaaagcacaatattagagagtgtgggatgcccctggttcaatcgttcagaggcaaaggatcgtgaaattgtagcaaaaaagttaagggaccatgtccaaggagctgacagtaatcctcttctcatatttcccgaagggacatgtgtaaataataattacacagtgatgtttaagaagggtgcttttgaataggactgcactgtttgtccaattgcaattaaatacaacaagatttttgttgacgccttctggaatagcagaaaacaatcatttactatgcacttgctgcaactcatgacatcaatggcctgttggatgtg

SEQ ID NO: 106650 - DNA, 239 bp, Arabidopsis thaliana columbia
  unsure (1)..(239): unsure at all n locations
gcccaagcncaaaggggaagagagagaccaaaccacggcgctaaacaaggaagccagggagaaacggggcgnccacgagacagacaaccaaggagaaccacaagacccaanggacaagaccgagacgaagacaaaggaccacgacaagacacgccaagaacaaaagnncaaagacacgcacaaggccaaagggacggagaaccccaagacagaaggcgaagaaaggcgaggggaaagca

SEQ ID NO: 106651 - DNA, 283 bp, Arabidopsis thaliana columbia
  unsure (1)..(283): unsure at all n locations
gcggctgctcccaagggcagaggcggcaccctcttcttctgagagaacncgactacaggcgcggagtcttctccgactgattcacccgcgaagaaagacctcaggtggagaaaatgcaagcagcacacagcttcaaagccgtatagagaagcattccaatgagggtgatgaagatgctatacccggggtgattgaagcacttctacagagaagactcggtgtctaacacccagagactgatgatgcattgtgggcaaaaaatgagcctctacctttcaaagat

SEQ ID NO: 106652 - DNA, 338 bp, Arabidopsis thaliana columbia
  unsure (1)..(338): unsure at all n locations
gagaacaanaggagcacagaagcnnangncngngaccactcaaacaaggcgaggcgngcnnagaagaacacagcncgagcagaacgggcancncgcgaagacccagcagatagggaaccggcacggaacgaacacaagagggccacacaagagaccgaccaanncgcggcggaggcagcgctatcccagaaccctggtaaaacccgggacgacattcttgccgacttctataacaagaggcaggacgattacttgggtgctaataaaaggatcctccatcaatcaacatccgacattcctggcaatgtagagaatgtcaagaagctttaggatcaccc

SEQ ID NO: 106653 - DNA, 312 bp, Arabidopsis thaliana columbia
  unsure (1)..(312): unsure at all n locations
gctgaacttatccgncacccgganattccgtccattgcccaagaagaacnagananaggggggggccgtgacaggccngggagggcatcacacatcgctcagcttccttaccttcaggcggttatcaaagagaatttcaggcttcatccaccaacaccactctcgttaccacacatcgcgtcagagagctgtgagatcaacggctaccatatcccgaaaggatcgactctattgacgaacatatgggccatagcccgtgacccggatcaatggtccgacccgttagcatttaaacccgagagattcttaccc

SEQ ID NO: 106654 - DNA, 297 bp, Arabidopsis thaliana columbia
cgatactctacttttttatgaatccttcaatcgttctaacggaaccaacacaacaacagatggtgttgtagaaagaaaaaacagcaatggcttcacaaaccaaactcaagaaacctaattctcattttagcctttgtactttcctcttcttcaccgtcctctttaccataccggctctctttctcctccgcacctccacttgctcctcctccaccgctgcagtctcctcctcctcctctgacacaaaccagccaccgtggtctggcgacctccaaaccgcccaatttgcctggaacc

SEQ ID NO: 106655 - DNA, 154 bp, Arabidopsis thaliana columbia
acaacggcgatgatcttttgatccttcatgtggttggtggagcctagcctcaggttttgaccttagaggatcacttatatctcttcaagcgtaagtttcgggaaggtctacgcttacaacaaggatcatgactttagattcttggttaacaaag

SEQ ID NO: 106656 - DNA, 332 bp, Arabidopsis thaliana columbia
  unsure (1)..(332): unsure at all n locations
caaccaaccccattgagcactnaagcnctattaatanccatgaatcctnctncttcttcggcgcagcatcatcatcgtcatcgtcttcttcctcatcgccgacctcactctggattccgattctctcatcgccgttcctagtttcaccttcctcgtcgcttcttccggcgatgaaagcggctcttcataccggagacgccagagcttggaggtattagggttttcttttcggaatttctcattgattttgctatggcggaagagaatcgtaaggatcgaggtgtttcttctactgttgcgattccttctggtttgaaccggatcaaaactcg

SEQ ID NO: 106657 - DNA, 409 bp, Arabidopsis thaliana columbia
  unsure (1)..(409): unsure at all n locations
cggacgcgtgggcgagcaggttggngactggttcatagtgaaggcgtcagngncttccccgaaatatggatgggaagacattactcgaaatagtattggcgttatgcacagcttagatgaagatggtgatgtgggtatagctttctgtttcaggagtaaacctttttcatgttctgtgacagatgttgaaaaggttacgccctttcatgtgggacaagagattcatatgacaccatcaatcacccaaccacgacttggatggtcaaatgagactccagcaactattggtaaagtaatgagaatcgacatggacgggactctgagtgtaagtttctgaaatggatcaatttccctggattcattggggctgcctcagctttttgttttcagcatatatttaaaatcgagg

SEQ ID NO: 106658 - DNA, 352 bp, Arabidopsis thaliana columbia
  unsure (1)..(352): unsure at all n locations
ccggncggaaaaccgggccgacccacgcgccggaaaaaccccaaaaaaaacacccttgatggcgataaaacccagaaanccagaggggaattttatgcaaccccagcgccaccctcacaaaaactccacattcttccgacaatctatgagaaaggaagagaaatggatcaacaaggacaatcatcagctatgaactataggccaaacccatatcaaaccaacaccatgaccactacaccaaccgcgtcagaccatccagcataccatcagaaccaccagcaacaacaacaacagctcactcaacagcttcaatcttgctgggagactcaactcaaagagaatgagaaaacca

SEQ ID NO: 106659 - DNA, 317 bp, Arabidopsis thaliana columbia
  unsure (1)..(317): unsure at all n locations
ggccggcccacgcgtccgctcaagcagaaanncganggggaaggacgcataatttgttgggaagggcaaaggaaaacaaggagctttacagaagaagcggggccaccacaaaggaaaagcacgaaaagcngcaaanggnccagggacacgcacacangcgaaagcaagacacgcaccgngcgagaagcaaggaaagaacaacgaggcccacaaaaagaagcaggacgggngggngagcaacggagacaaggaaacacccgcagaggacgcaaagacagcagcaaagaacccagagcgaccaacagggaaaaaacgga

SEQ ID NO: 106660 - DNA, 390 bp, Arabidopsis thaliana columbia
gctaatcagaagcgttccacaagaaggatgtttggtctccgtgtttggaacgtatgggaaacatggatgtcctctagagtttgctctttttggaccaaagttcatggccaagaatttgtatcaactctctccggtccaagtaagactccacgcctaataaaaacaaaaatgggattgcttgtaatcaatcctttattgattgttgttgtgacgggttaggatcttgaattggcgaaaatgttggtgagagtaaaccccatcattacaaataatctggcagggacaagaagctttagtgaggaagggtacggtaccgttacacgtatatatattgtatgtggagaggacatggcggtacccgaggattaccagtggtggatgatcaagaac

SEQ ID NO: 106661 - DNA, 437 bp, Arabidopsis thaliana columbia
atcattttcagctcattactcacctctacatactctctgtggccaaaaataaacagagacatatcagactaaggagtatttaataagcatcatctaacaacaggccaagaagcaaaaaattgaaaaaacttgtgtaaaaagcatgcagcgaaacagagttcttgcgttcttgttgctagcagctcagctcttggtgaagatacctgaaacgtgtgcaaaatttcccgcacttatcgtatttggtgactcaactgttgattcaggcaacaacaaccagatttctactgttctgaagagcaatttccagccatatggccgggattactttgacggcaaagcgactgggagattttcaaatggccggattgcaccagacttcatttctgaaggtttgggactcaagaacgcagtccctgcctacctagatccagcataca

SEQ ID NO: 106662 - DNA, 335 bp, Arabidopsis thaliana columbia
  unsure (1)..(335): unsure at all n locations
agaaagcagacacacacagcaaaacacggcatacatgatcaaccncgacagcacaccacngggcggcgccaagggcgagcggcgcgcccaacaaccggaccggagccgaaagcgaagaagaagacgccagcaaccccggaggaacaagacagagaggccagaaggaggaacagcaagcacaacaccaaagagcgagccagacaaggacgagcaagcaaangaggcaaggacgaggnggggggcccgcccccgacgaagagcacgaaagcgagggcccccagcagggacaccagcaaccccagcagcgcgcgaacgaggcccgccaggaagagcca

SEQ ID NO: 106663 - DNA, 404 bp, Arabidopsis thaliana columbia
  unsure (1)..(404): unsure at all n locations
aaaaccgggccgacccacgcgnccgaacacaccatcncaaacatttcncctttggttattttccccacngcncacnnacaccggccgggcctatgaaaaggccacgcgcccccccacaacaccgaccaaggaacnaacaacgnncacacggcnaaaccccagaggccgncgccacacgaccaccacccnaacnggaacgacgcaacacgcagaacaagcaccgacgcagccgaaaagcncaacaccaacaagaacgcgaaacaaggaaacacaacacggcaaacacaagaagaagccgacccgcacaagacacaaccagaagaaagcaccgcgaaaccggagcaccganacgagcnacacaccacgcgaacaccccccacccaaggacccgaccaacacaccgc

SEQ ID NO: 106664 - DNA, 193 bp, Arabidopsis thaliana columbia
tctccggtgttgaatcatttctcaatacttattttatttctcctcctttctttttcaagactcataaaaaaaaggcgtgaggcgtgatgatatttataccaaaccatgtgtgacaaatggtacccggtttggtgaaggctggattttgcatgagatagatgctcccagggctgttttttccaatgattgatgg

SEQ ID NO: 106665 - DNA, 392 bp, Arabidopsis thaliana columbia
  unsure (1)..(392): unsure at all n locations
aaacagagaggcggcgacggagccattttgtaatttagccggcgaacgannataaggagggggatagtctctagacggatatgcacgaaccaagcatcgatacagataaactcagctacgagattttctctattcttgagagcaaatttcttttcgggtacgacgactcgaaacccgaacccgcgaattcggttgttgctgggtcgattaagaaccagagaggtaaaatctgtattctgagtatcgatggaggtggaatgagagggatcttacccggtaaggctttggcttatctagaacacgctctgaaatctaaatcgggtgacccgaatgcccgaatcgcctgatactttgacgtatcccgcgggtccggtataggtgggatttacaca

SEQ ID NO: 106666 - DNA, 417 bp, Arabidopsis thaliana columbia
  unsure (1)..(417): unsure at all n locations
tttcaatgcctggggaggagctaanganggaagttacttttattggagncatgaccttttagttggacgaaagattctcgctgtggaacgaattccaagatttcaacattcgatgattcttgaaggaggcagcatccatgtcgatggggaaggaacctgccttgtcacagaagagtgtctcttgaacaaaaaccgaaaccctcatatgagtaaagagcaaatagaggaagaacttaagaagtacctcggagtacaatcatttatctggcttcctcgtggtctttacggggatgaggacacaaatggtcacattgataacatgtgctgcttcgctagaccgggagttgtgttattgtcttggacagacgatgaaaccgatcctcaatacgaaaggtctgtggaagctctttcgggttt

SEQ ID NO: 106667 - DNA, 344 bp, Arabidopsis thaliana columbia
  unsure (1)..(344): unsure at all n locations
gaaaccgggcgccacgcgtcgtaaacagaataaanaaaacatttagttgattaagccgcnnngcgaagagcaggcgcgacttacagagcnctaggagggccacccgaaancaancaccggaaaacaagaccatacnncaccgccgcgacagctgccggcggaaccgcaactccgacaccaccgcaganaacgccgacggacccacaaaacacacaccgagcancaccgcaaccgaaaggggacgggccncaaaaaggaccccgcaaccaaacggcgcccccggggaaacaccaccaggccgcgacaccngggcacaggcgcggaaacggcgcgagccagaaaaa

SEQ ID NO: 106668 - DNA, 228 bp, Arabidopsis thaliana columbia
accgggccgagccacgcgaccgagagaagaaagaagccggaccaccattcgataaagcaaccgagaaagagcaaaagagcacgcagaaagaagaaagaagggccggcccaccacaccatagccaaagctaaggaaagcccaaagacagagccccaagagcaacataccaaaggggatgagaagggaaaaggcaccgagacacaaggaccggacagaaaagaagacaaa

SEQ ID NO: 106669 - DNA, 366 bp, Arabidopsis thaliana columbia
  unsure (1)..(366): unsure at all n locations
ccaccgtcgtccgatcttcgcataaaactatgttcgtttttgggncaagaataggcggctccttattcactttcatggcggcttctctcgtgccggcgcggacctactcttcaatggacgctttgctggatgggctcaggtttgtactagcgataacgacgtgaggaaacgggtatgagaagtctatgacgccattgaaagcctctcagcttgctcagactgccgcgtctcgagatcttcaggatagaggttggcagatctctgttctgcaacttgccagatggtcaggctattctactggggatctatacagtnttcagaggccgactcatttcttgtacgcgctggtcaaagctggctacacag

SEQ ID NO: 106670 - DNA, 385 bp, Arabidopsis thaliana columbia
  unsure (1)..(385): unsure at all n locations
accaatttccatatcacaaagaaaagacaagatgancttgaagacaacgccggagctctggaaaggaaatggagtgttccgtacggatcatctcggagaaaaccgaatggttagtcgatcaaaccggctaggtgatggatcaaaccgtttccctagaaccggtacaatccattgccaacggttaagcatagcaaagaccggtttgcatcgtgagacgaaggctcgagccatacttagccctgtgtccgatccggccgcttccatagcccaaaagcgagtattcacctttggaaaaggaagaagcgaaggcaacaagggcatgaagtccttgttgggagggaaaggagccaacctggcggagatggctagcataggcttgtcggtg

SEQ ID NO: 106671 - DNA, 447 bp, Arabidopsis thaliana columbia
  unsure (1)..(447): unsure at all n locations
gngtaagggcctngacggagacgaaattagatgagattcctaaggaccacgggcngcaaagaccggaacttgtttctcatttagctttgctttcctaggtttcaatctggtttatgaatgtatgaatatttgaaataataatagtttcaccattattttttttgttataacaagcaaaagtcatggtggtggaggtgaattgaccaatggcttatgtatcactcaaagcacaatgccttttacccacttacaatggctaactatttaagctagtcattagtttctttttcttattattttactttgtatcatggaactatgtaagaattttaacaaggccttgttcttttggagattgccagctaccagtatgagaaattttagatgttttcttcacgttgataaaattgtttagttagcacaatgttaacttacctcatttttttt

SEQ ID NO: 106672 - DNA, 440 bp, Arabidopsis thaliana columbia
  unsure (1)..(440): unsure at all n locations
atcagatcttgcgtgagctcagcagggaatggcttggatacactnangannngctgnccaaagatggcaattacttctgcgatgtattatgtgaccgccttggtgtgccaaagatcccaggttgggtgaatcgttttgctcatgctggcgacacagccttggaagtagcaggaaacacagcaatgcgggtaaagcaagccaaaactgaacttgtttcagccagtaaagtggcttatcgcttcctttcgaatgttacctcaaacataaccaatggttcaaatggctccagtggctctccacagcggccaggaactctcaacaattcagacaatgggagctttagattgcaaggtagtttggttgaaaggtatacttaacactgccaaacccttcacaagtacagagataggggaacaaagagggagattcacatcatacaa

SEQ ID NO: 106673 - DNA, 360 bp, Arabidopsis thaliana columbia
aaaacagaaccagaggggggtttttttatcaagccccaccactaggcatcataaccacagttcatgctgatggagaggtaagggttgctttctttggattgcctgggttgtggagaggagatccagcagacttggaagtggagcctatgtttgaggttggagaatgggtaagacttagagaaggtgtttcttgatggaaatctgttggaccaggaagtgttggtgtagtgcatggagtaggatatgagggagacgagtgggatggaaccactttcgtttcattttgtggcgagcaagaaagatgggcggtgcccacttcacaccttagagaaagcaaagaagcttgtgggtggacaaaaa

SEQ ID NO: 106674 - DNA, 308 bp, Arabidopsis thaliana columbia
  unsure (1)..(308): unsure at all n locations
ggcccagcacaagaacaacngacccaagcacgagacaccaacggtcgcaacagaggaagcaccagcgacgacaacagaagacacggaacgagcgagggaaagacaccacgaggaagaaggaagaggaagggaaaccacaagagacaacgacgcgcgaggccgagcccgaacaaaaggcacagatccccgaaccggaggcagccgcagagcacgaggaagagaaggagaacaagaaaaccacggcgagagagagccacaagaaaagacccggggaagaagagaagaaacaagcccagcggcaacaaaaa

SEQ ID NO: 106675 - DNA, 457 bp, Arabidopsis thaliana columbia
  unsure (1)..(457): unsure at all n locations
gacccagcgcgaccggacaaaggagactcgctcaacncngncggaaatatttttgtatgtaagngaaagannggngaagagggcgttttttttgtgtagctgggtatgcgcggccggaccaaaacaatggcnnagtgattgcnattgaaatggtcccagacccgttgaagtanngcggttggttggagtatctctgtacccaaacgtatcaaacgcttgggaacaagtgacccacgcttccgaatttaccgnnggcctggtcttggatgaatgttgtgaaagcaaatgccgtggcaaggaacccttcgtctttagtaactcgatgttgaagaaacaattgttagggaaagctgatatttgtgatttgtnttctgtccaacacacccgacttaagacctagagggcctttggtggctgggaaaagcttgcggaatcttacgtacctgggaagagcgct

SEQ ID NO: 106676 - DNA, 423 bp, Arabidopsis thaliana columbia
  unsure (1)..(423): unsure at all n locations
gaaaaaccgggccgacccacgcgnccgaacatggcaaagcnnccaggccncatttaaatgntttatcnncgnccgcngngccacggccggcttttttttgagcttgcaacactcttcgcctgngctnntcttcctggtgtcgcggaaagagatttgagcccagttccttcttcatctttaaaaccaacgtggaatttggattctcttcaccaggattccgtagacgaggtcaaaacttctaaccctggtacagtcaaacctgaagaactacccatctgctcatttgctgctgctggtgattgcccacgtgggaatgaatgccctcacattcatggaactatttgcccaacttgtgggaaatgttgcttgcattctttcagacccgacttaagagaagagcacaagaaagtttgtgaaataaag

SEQ ID NO: 106677 - DNA, 443 bp, Arabidopsis thaliana columbia
  unsure (1)..(443): unsure at all n locations
cttgtctccatgtaaaaaacctccgncgnctttttcttccttctttataaccctaaaccaaaaaccctcatttccttcaatcttgttactcacatggcgctaaggagattatcaaagtctgtttcgtcagccatcaaagctcaatacactctctcgagaccctctcctctcctccgntctcgctctctctcttcctctcctcactacacctctattggccggccaacaaattcattcatcggaaaaatcaataactcttctatcactcatgcgactactactcatggtcaactcttccctctttcttttccgcgacgcttttgtactaccacagctcaggttaatcaaaatgagtttacggagatggcatgggaagggcttatcaacgcctttgacgcggctcgtgaatcgaaacaacagattgtggaatctgaacatttgtt

SEQ ID NO: 106678 - DNA, 457 bp, Arabidopsis thaliana columbia
  unsure (1)..(457): unsure at all n locations
cgggccgccccacgcgtccggaagcttaagggtcttcgagctgggctcntgcattatttctatctgggnnncttctaatcgcgggctctttctacggcactgaggttctatctccaacttcactcaatgacccatttagatactctggcgattccattgctactgctgctccaagaatcaccattttcacttctctcaatgtctcctccttggaagaaaatagccaagctttacttgctcttcgttcatggctcgctttgtcttcccaaatcactgttgttttattcactcaacacaacaacaacaacaacaacaacaacaacaaccactcttctgattcttcttcattcaccgacaaatttggttctcgtcttcctcttgattccaccaatgatttcacgtttcttggaactccatgtttacattcgatgatgtcgagaattgaagcttatcaatc

SEQ ID NO: 106679 - DNA, 438 bp, Arabidopsis thaliana columbia
  unsure (1)..(438): unsure at all n locations
gaaacaatggagatttctccttactgtctgctttctcttcttcccattttcctcctctctgggttctccctttcatatgatggatttgatggtcacgcagcaacaagcagagctcttcttcagacaaggacaacctgcaaagaagattttgctaacaagaactacacaatcataacaagcagatgcaaaggaccaaattatccggcaaatgtgtgttgctccgccttcaaggactttgcttgcccttttgcagaagttcttaacgacgaaaagaacgattgtgcctccacaatgttcagctacatcaacctttacggtcgttatcctcctggaatctttgccaacatgtgtaaagagggcaaagaaggtcttgactgcactgatgtcacccagtccgcatccgcaacttctgattctatcccacgtgcctncacaact

SEQ ID NO: 106680 - DNA, 439 bp, Arabidopsis thaliana columbia
  unsure (1)..(439): unsure at all n locations
atcaattactctactctcgtttctctctctcncntcagnctataagaaccataattacggattttgaaatttggggattctatgagattcttcttcctctttggttaaaaacctggagattatcgttttccaattctagccttttcttctccccttaatatcttctctctgattctcttccgtttcgttttctctattccccgagatcttttggttaaaggaagataaagtttgaaacttttttattgtttcactaggcttgcgttaatggcgacagttgtgtgatggtccagagttagcaagttttacttactcgtttggttaaaaggacagagagtagagggaaaaaggctttgttactgttttttttcgtctgcacattactatggagtttctcggcgacagtcaaaatcacgatagctctgaaacagagaagaag

SEQ ID NO: 106681 - DNA, 442 bp, Arabidopsis thaliana columbia
gcttgcagcaaaccctggtattattgctgttattaacaagcatcgttggagagtagggattatgactgaacttgctccagttggttatgttggtgttagtccacgatgccttctggggtttaacaagaatcaaggagaggagatttctctacgccttcggactgatgatctcaagggattcagaaagtatcagagcataaaaaagactctattgcatgagcttgctcacatggtatacacggagcatgatgagaaattttatgctcttgatagccagttgaacaaagaagctgaaagcttagattggactaaatcaaggggtcacactttgaatggaacaaaatttatcaatgacgatgatgaggaagactacttcttcgatgaaaatgaaactgtttctcaaaggcttggtggaaaccagtccgataatcttggaaatgct

SEQ ID NO: 106682 - DNA, 407 bp, Arabidopsis thaliana columbia
gctgaaactctcttgctcttgcttctaaaatcagttctttgagactttgatcacacagttagcaaaatcataatctcttctttcctggttttttttttttttcttcttcttcttcccgtttcacgaaacaagaagttttttttgggaaagccgttgacttgactttttctttggggtgttgtgtgggagcttatagtatggtaccataagtgggagcttatagtttggggtgttgtgtgggagcttatagtatgaggaaaaatgttagatttgaagaatgcttcactgattttttaccataagtatgtcaactggattaagcttaagtagctatggtttttactatgttcatgtggggatctcttttcctctctgtctacttcaatcctggatgacttgcgattttt

SEQ ID NO: 106683 - DNA, 490 bp, Arabidopsis thaliana columbia
  unsure (1)..(490): unsure at all n locations
cgnntccgctcgcttttttttccccatnnttcaactttttttttttcctcntttcagtgcnnactaggaaaccaaaaaagagacccaatgtatctatttagttcgagtgcggcatccgagagnnaagctcgannaaatggcgcctgnngcgttcgatgaggtnntcgggcgtcccccgttcattatttactgaganngagcaagatnncaaaagactcnngtcttagagggaatcgatgctttcagaaaggccaatatcnnngccgctggtaaannngccgtggcttcgganntccttcganntcctctcnnttggacccaaaaggaanntggataagatgncttcaaaggacnnctgacggagacccatcaccatcacnaaacgatggttgctacccgatattggaagcgaaatggatgttggacaaccccagattggcgannaactaatgtgtggaacctgtccgcggagtcaagggatttatgaaat

SEQ ID NO: 106684 - DNA, 319 bp, Arabidopsis thaliana columbia
  unsure (1)..(319): unsure at all n locations
gtaaaatactgggagaaagacagagagagatagatagtgattgcaanttaacaaaggagaaagaaaacaagtgttactggatttgccagcaacaggactgtgacacatgatttggccataggaaaaagcatttcttcttgaggaaaaatgaggaaacatggatggcagcttccataccatcctcttcaggtggtggctgttgctgtgttcttggctttagggtttgctttctatgtcttctttgcttcatttggtgggaagaagattcatcagtacattgcgatgggcattttcactcctctgaatacttgtgtggttt

SEQ ID NO: 106685 - DNA, 421 bp, Arabidopsis thaliana columbia
gactagttctgggtcgctcggcgtttcggtaactgtattgacctcttctggtgatctctggtatctcggtggcgagtggaggcgtgatgttgcatttgcaggatttgaagttccgatacaaatggacatttcggcggagaagatgatatttggagtggctggtattgatcctcagagaagagatgagttgatcaaggtgttggatatcgacatctcatggagactgcacaaggtatccgatggccaaagaagacgtgtacagatctgtatgggactcctgaagccattcaaggttctccttttggatgaaataactgttgatcttgacgttctcgctagagcagaccttttgaagtttctgagaaaggaatgtgaagaacgaggagcaaccataatctacgcttctcatatattcgatggc

SEQ ID NO: 106686 - DNA, 273 bp, Arabidopsis thaliana columbia
  unsure (1)..(273): unsure at all n locations
ctggaatctagagagaaaaaacaagcaaataattttctccgaacncgagcgcgaaaagcggcagattgctatacaagcggaggcgcccaacaacgctccgaacgcgaaacaaatcggctttggaggagccgagttatctttgaacaacaacaatggcgctaccgaaatcaagataacgaacagacttatcttgacaataatccccagttgcacaaagatatcaaccaacaaacttatgctccatgaaccagcatctatcaacatcaaacaata

SEQ ID NO: 106687 - DNA, 406 bp, Arabidopsis thaliana columbia
cggacgcgtgggcggacgcgtggggtctatttgtgattctctcatcttcttttgttttgcttcacatcgttcacatcaattagtttctatcagctccagcaaatggttagtgtgttcatcagctaaaatcattaaggattgcgttacttcttcttcaggaaggactagaaatgagaaagagttgattactccatattgagtgtgaagatgacgaggtggtctatgtctatgcactgcacattgttcttgctatttctgttgaggctcacttgtatattctcagattccgattatttgatgggtcttggaagctatgacatcacaggacctgcagctgatgttaacatgatgggttatgctaacatggaacaagtagcatctggtgttcacttcaggctcagagctc

SEQ ID NO: 106688 - DNA, 367 bp, Arabidopsis thaliana columbia
atcgacgctctattctccaacaaaagatcaatcgtgctattcagctcccgcctccaacgggactcccgttgcgtgaaatacatggccacactccacgctcaaatccccggatgaaacatgactcacgcgccacgacctgtgggatcaagcacgtcacacgcgcttgatctatgtcaaggaagcgctgcatacttcacgcgcctcggtgtcggcacatgcggcgagataggtttacatggtgcgcgacaccgtgagcgacatataatggctacagagcgctcattgtcacagaagctgctctcaatccgacccgagatgctacccggggagattcacgacctatgccacattcccgtgttctgtacct

SEQ ID NO: 106689 - DNA, 406 bp, Arabidopsis thaliana columbia
gagctctctctctctttctctctactttttggattttttctttctcctttttcttcaacgagagtatctttttcactttactcttcactccatcaatatcacactcttcttgctactatctctctttgctttgtacaaagccaacactcgtctttttgttctaatttgcatctgataatgttggcctcgctgatcatcttcgttgctcttctctgcaatgtgactgtcataagtggcttaaacgacgaaggctttgcgctcttaacgtttaaacaaagcgttcacgatgatcctacaagttctcttaacaattggaactcatcagacgagaacgcctgttcgtggaacggtgtaacttgcaaagaactcaaggtggtgtctctaagcattcccaggaagaatcttt

SEQ ID NO: 106690 - DNA, 427 bp, Arabidopsis thaliana columbia
  unsure (1)..(427): unsure at all n locations
gtttttctttgttgcgtatctgnacttagttttcatatcataaaaataaaacatatctttagctgatgttgtcttcttcttgataaacagattttctacagctttttttctttctaatttaataattcttgagactttttaaaaccctctgcgaaacagatgattcgagttttggtttcttcatctgtgttttgattttttcgtcttttattcttagtcaaacacataaatttcttttactactcttcgtagatgacttctcatgttccaaaacatcctcgtaaatcctttgaagatatggtgaagaatcttaaagtggatcctcttgctaaggtcactgcctccaccacttccatggtttctgcaaaagagaataagaatcagtcagaggcagagccatcatattatgaaactcttgagacatatc

SEQ ID NO: 106691 - DNA, 378 bp, Arabidopsis thaliana columbia
ggaagaccaaaaaccgacgattcaagtcggatacggttactgtatcaggttctcgagagggtcttctccgttacatcgaggataagttcccagagccgcgtttgatgatttggaagtttaatctggaaggcttcgacgaagcgactccattgatagtgaagatgatttggcttcagcataggagtatgttgtggcatatggagaggatgttgagatggtcggaggatctggcggcgcgtggaggtaaaaaagcggtggatccgtctgtgggaacaccgaagatggagattaggaaatttgcaaagagttatactcatttacaggagcttatgctcgaacatgctcaaatggaagagagaatcttgttccctgttcttg

SEQ ID NO: 106692 - DNA, 445 bp, Arabidopsis thaliana columbia
  unsure (1)..(445): unsure at all n locations
gacaagcaaagcttaaagctgaaagcgggaaaatcacttcttattatatagcagcccactgcgagtgattctgacgatatcacctgtggctcctgacaacgcccccgnaacttactggttattttgtgtgttttagcttgtgaaattcaaagtgaagatcaagaaattcgtctattccaaaaaaatcgtataatcgaattcaatagcatggttggtattttctccaggttttctgttgttagaggcagccatagacgaacacagagtgccatcgatggcagggaagtattgtctccaagatctgatcttgctccggcaactaataccacaaccactgaaactcatgggatcgaagtagcaacagagtttaaaccggtggatcacccgatggagcccttagacaacgatcaaccgatccaatgtccactcccagagccatccattc

SEQ ID NO: 106693 - DNA, 391 bp, Arabidopsis thaliana columbia
  unsure (1)..(391): unsure at all n locations
aaaacaagtttcatgtttgaatgggcgatcnagtaactgtgctgctccagagggggcactcaagtcttctcggaaaagatttatagtattcgatcagtcgggagagcagactcgtttgttacaatgtggatttcctctgcggtttccttcttctatggatgcagagcgagggaacattctcggtgccctacacccagagaaagggtttagtaaagatcatgccattcaagaaaagatattgcaacatgaagatcatgaaaatggcgaagaagactcggaaatgcacgaagacactgaggaaatcaacgcgttactgtattctgatgatgacgataatgatgattgggaaagtgatgatgaagtaatgagcactggtcactctccattcaca

SEQ ID NO: 106694 - DNA, 433 bp, Arabidopsis thaliana columbia
  unsure (1)..(433): unsure at all n locations
gaggaacaacaacaatcttctaacgaacaagtanatgtatgtctatcttaaaacggcgtcgcatccagcaaaaagcatcgctaaagctactctgttcctcgtcacctctctcttcatatctgctggtctcttagacttattgggttgtttcgatttcacaacttttacaggtctgaagcaggtaacaactagtatcagaaaatcaccaatcacaagccaaagattccctaaccaatgcggcgtcgttcagaaccaaactcaattatttccccaaaatggctcctcgagaaacaacgacaaacccagaagcagccattcaagaatatccacgtgtccttcttacttccgttggatccacgaagatctacggccatggaaagagacaggtgtaacgagagggatgcttgagaaagccaggaggacggcgcatttc

SEQ ID NO: 106695 - DNA, 431 bp, Arabidopsis thaliana columbia
gagtgactctagcgctttctctcgtcgctagtacttttttcatctttgaccctaaaacttggcaaatttcgagctttcaggtgtaatccattatgatgttgctgctaatcccgtagaaatcagaaagtagccatccttgaagcaaaacatagcccacacgctggggattgctcaaattcggagaattctgccggcattgagactttggtcattagaaaaattgaatgataaggatacacgacaggcatggagtgcaacaaagacgaggcgacgagggcgaaagaaattgcccagaacaagctcaaaatgaaagacattgccggggctaagaaacttgccttgaaagctcaaaatctgtatccagagatagaaggtgtttctcagatgttagcaaccttggatgtgtatatcgctgcagaaaacaaagtaaa

SEQ ID NO: 106696 - DNA, 434 bp, Arabidopsis thaliana columbia
gaaaaacctttccaaaaatggcaaagatccgtaacttagtcttcttcttaggggtattagcggcttttacactctccagtttcccggtaactgtttccggcgagccccctatcttattcactttcggcgactcttcctacgatgtgggcaacacgaagttcttctcgtcggagttcgatccagccaccacgtggccttacggcgattccatcgatgatccctccggtcgttggtctgacggccacattgtcccagatttcgtcggtcgattgattggtcatcgtgaaccgattcctccggtacttgatccaaaagctgatctttctcgtggagcaagctttgccattgctggagcagttgttcttggatctcaatctactactgcatccatgaattttggacaacagatatcgaagtttttagagttacataag

SEQ ID NO: 106697 - DNA, 304 bp, Arabidopsis thaliana columbia
  unsure (1)..(304): unsure at all n locations
gtatctgtttatggtgtagactactctgagtangttctaagcgtagccttctaatcgcctcttgaactaggttgcttagtacagtacatatgggagatttagcccagaattttgatcaggaagaaacctctagctgcttttgtaatggatatccaatactgtggcactcctttggttttgtaaggtttgaacccaatctatgcatttttggtgtttccaaagtgcatcgattggaaacaggccataagtaaataactaaaatcggttcatggtaaaaaaaaaaaatttggataaataataaaaa

SEQ ID NO: 106698 - DNA, 230 bp, Arabidopsis thaliana columbia
  unsure (1)..(230): unsure at all n locations
aagaaaaccaaagcagcagnnanggtccgcgttgcatcaaagcaccccaagnaagaggagaggaagaagacggaggcgcccagccagnccccgaagcnagagacagacgaggagancaaggcnncggcagaaaaganncaccacacgnccgcagggaaaccacaccaggncnccaaagcaaggccaggcaacanncagggaagagancngcacgaaggcgacaggggcac

SEQ ID NO: 106699 - DNA, 441 bp, Arabidopsis thaliana columbia
  unsure (1)..(441): unsure at all n locations
gaaaagaggaaggnaagagagaagtgcaagcttcttcttctnaggnccgnnaacggagaggagaagatctagaaaaggccagcccagaacaagaagangngcaggaagcatctgaagaagctggctgggttcaaggactttctgaacttaatgagataaatgagcatgcagattctcatgctgaaatgcttgaatatgaccgaagtgaaacagattcaaataattctagggagagatttgatcaaacacaggaacaagcagaagaaactatgatcgattggagtatagatactgacaccagcaggtcatcttttgaaatgagacaaggtgattcatatattgaggaggttggcatagagcaacatcgcagngatcaattccctgaaaagctagnngctgcagtacacggaagacacattgagaaaagatctgatcgatcaa

SEQ ID NO: 106700 - DNA, 295 bp, Arabidopsis thaliana columbia
  unsure (1)..(295): unsure at all n locations
ggccgacgacgcgagcggaaagaaagcaaagaacacnagctcgtacgctgctngaganggaaggnaaagaagaagaagagagagtgagaganaacaagaccccccacaacaaccganaggnccaacggcncagacggacaaagacnacaaggagccaccaccagcgccacnnnncgagccaggcgagcggagcacgngagccagcaacagagccgaaaacgccggaggcacagccaccnaccagggggaagacacaacaagaaagacagagacgggagagaagagagcaccaaac

SEQ ID NO: 106701 - DNA, 110 bp, Arabidopsis thaliana columbia
  unsure (1)..(110): unsure at all n locations
aaccaaacccggccgacgacgaanancnngnnccagaaaccaaaccggcagggcgnncaaagncgnnaaccgaagaagacgcagcaaccgacgggacgaaccaacgacga

SEQ ID NO: 106702 - DNA, 228 bp, Arabidopsis thaliana columbia
  unsure (1)..(228): unsure at all n locations
acgcgnncgacgcgacagatcgaacnaacgacgccggngttggccgttcnttttacncgccgnngcagcggcngcaaggaaggggacccgggaggccccccacaccagcnccaanncaagccggnncacagcccggnncgganncggaaccaagaaagcancncccaaaaaggcnaagacggnnancncagaccggccccnaaggnncccaggcgcaaaancacccga

SEQ ID NO: 106703 - DNA, 263 bp, Arabidopsis thaliana columbia
  unsure (1)..(263): unsure at all n locations
ggcgccacgcgncgggacgcggggcccaaagaaaaacaagtggngttttgttncacnccncncnaggncaacgaaaccncagagacggcccgcaccccccccccaaggcgcagccancnccgcagcnccaaacnccaacggncncaaaccacgancnnncnccgnncgcgccacaaccgcaggnnacgacnagaacgcnnncacgnncgacccgancaaggaancgancgggncacgngagangacgagaagggacaagacgg

SEQ ID NO: 106704 - DNA, 256 bp, Arabidopsis thaliana columbia
  unsure (1)..(256): unsure at all n locations
acgcgccaaggcgaaacaccccaggacctggttctaagaggagccaggganagagagagacagcccccgcccacccagcagcacacagggaagancaaaggancaagncagaaagagaaacagcaacacaaagcnccagcggcgcaggcagnaagagacaacgacncagacaacaanncagaagccaaggcggggncaagaanncacaagccgcgagggaccaaaccagcgcaaagaagaaacgaaacacccgaga

SEQ ID NO: 106705 - DNA, 171 bp, Arabidopsis thaliana columbia
  unsure (1)..(171): unsure at all n locations
tctctgtagaggcaggnggaaaggtctgctaagaaagactcacacccaacgaaatgtcaaagatctagtgaatttctgagatggatatgccctgaacctcaacaaaagtcgagggactattacagacgtaacgggatcagatgatcagtgaatatttgagcatttctaggg

SEQ ID NO: 106706 - DNA, 162 bp, Arabidopsis thaliana columbia
  unsure (1)..(162): unsure at all n locations
gggccgaccacgcgagcgangagccagacgcgcaaacagactgagccctgcccgancgannngnnanaaaagggagaaggaaagacgagaananacacaaccccnccgagaaaagagaaaccgagacgncaacaagganagacgacacagaagaagcaagag

SEQ ID NO: 106707 - DNA, 234 bp, Arabidopsis thaliana columbia
  unsure (1)..(234): unsure at all n locations
aaccaaaacccnaaaaccnaaacnnncagagccaccancacnnncaccaacccnanccacgaccaagacgacgangagcncgaccagcncgacccaccggagannacagannccgnagagaaaggganaaaagggcnaagancancagagagacccancnncgaaagcaaaggagaaaccaacncnaaacccgaagaagcnacgagcaagcgagaagaagaggacgaagaagaa

SEQ ID NO: 106708 - DNA, 207 bp, Arabidopsis thaliana columbia
  unsure (1)..(207): unsure at all n locations
agggccgacccacgcgnccggaaagcgaaggaganaccgaancagcnaggcctgagactccggctcngcggnnnngcnnagcgaacaaggggagggacaagagacgcnccaaccacacgcnngnacangnagncaggacncaccgaggagcagaaganaaagcnnnccgnggggnnnancaagagcagganganacagggagaaccg

SEQ ID NO: 106709 - DNA, 143 bp, Arabidopsis thaliana columbia
  unsure (1)..(143): unsure at all n locations
agggccgacccacgcggccggggagacattataanaaaaagatttttngggttgtttatacaagaacccancacgagaagaggagccggacaggacccaagaggcccacccgaaggccaggcaganggngaaggcagcaaccg

SEQ ID NO: 106710 - DNA, 251 bp, Arabidopsis thaliana columbia
  unsure (1)..(251): unsure at all n locations
ccacgcccaaancnccaacaactgtttttccgtctcttgcagncnccaaaaaggccggacacgaaacctccgccgagnccagggcacccccaagagccgagncacgnancccncgagnnccaggaggaggaacccaccgagccggncaagcagcgnncggaaacaagagncgaggaggncgnaagggggcnccgaccaagaacnggagacgcaggcaccgncgagncaangncaacaagaagaggcacgcg

SEQ ID NO: 106711 - DNA, 219 bp, Arabidopsis thaliana columbia
  unsure (1)..(219): unsure at all n locations
cggacgcgagggcncaacgancatcggacttgatgaagcgngaaggcaaacaacgcgggggggagaggacnaaccggacccggcccccgacacngaanccaaggccggaancgaagngggncaacccnnagacnncacggccaaccgcaggagnannaaccaaagagacancaaagccgaccaancacncgaaanncaccgggaaaaggggncaagcaa

SEQ ID NO: 106712 - DNA, 393 bp, Arabidopsis thaliana columbia
  unsure (1)..(393): unsure at all n locations
annagcgccattagagaacagagaaaaaaacttaatggtctttttagccgccgggaacaaggacgccttgggaacttccggggccccctccacccccaagaaacnccactttttctcaacaacccaccgtcccaaatccctctccttcaccaaaaccgcaatccgcgccgagaaaacagattcctccgccgccgctgctgcagcccccgccacgaaagaagctcccgagggattcacgccaccgcagctagacccaaacacaccgtctccgatcttcgctggaagcaccggtggtcttctacgtaaagcgcaagtggaagagttctacgttatcacgtggaactcaccgaaagaacagatctttgagatgccgacaggaggagcagcgatcat

SEQ ID NO: 106713 - DNA, 264 bp, Arabidopsis thaliana columbia
  unsure (1)..(264): unsure at all n locations
gaanaccagggccgacccacgcggccgcaggggagggaagagaagggaggtgcaaccctcggagccacgnnnaacccacagaacccgggggagggggagcgggccccggccccacccccgaccganccnggggacagaaacnggcaagccgccggaacgggaggccaagcaccaagaggccaacccccaaaaaagccaagccaaggggagggccaaccaacccaaccgaccaaccacggcggggccggaaaacccgccaaaaag

SEQ ID NO: 106714 - DNA, 152 bp, Arabidopsis thaliana columbia
  unsure (1)..(152): unsure at all n locations
agcaaaaacccccccagaaganagccgngaagcncaacgaggcgacgaanangaggaancgagnccncncnagaaggngaacgagaaagacggcaagaccagcncgaaaagagangccaaggcggcgccncnggagccnccncccgcggcgg

SEQ ID NO: 106715 - DNA, 212 bp, Arabidopsis thaliana columbia
  unsure (1)..(212): unsure at all n locations
anngagcattcagccaataagaggcacaagttgacgcttccagagcacnggangccacaaaggccagggagcggangganaaggccaccccancccagnangcagngaaaganganganncaagaggaaaagganacagnccngaaagacggcgaganaggncaccnganaggagaaggcgancaccaagnccnnacagaagagaaagggga

SEQ ID NO: 106716 - DNA, 215 bp, Arabidopsis thaliana columbia
  unsure (1)..(215): unsure at all n locations
aagaaacaaanaggaggaancncaanncncgaancagacancncggagaagagananggcgacagagncancggaancggaagaagaaggaaagannagnggaggaaaccanaagcnaancanagacgacgancnaagagagaaggggaaaaacgcagcnaggagcgggagcncnnagaagcccggcaaaggcgncaccacncnccgcgacgaca

SEQ ID NO: 106717 - DNA, 176 bp, Arabidopsis thaliana columbia
  unsure (1)..(176): unsure at all n locations
cgaccanacccgnccacaagccgaccacanagnaaccaaagcagncaagaaagccaagncaaacgaccaaacngncccngcngcgcnnnagaggangcannnccacgacggggncgncagaggaagagaaggcncagnncncnaagacncnaaggggaagaacaaagcagagaaag

SEQ ID NO: 106718 - DNA, 268 bp, Arabidopsis thaliana columbia
  unsure (1)..(268): unsure at all n locations
ggagcaggaaagaagnagganatctctcccctccgtgaagagaaaggnaacaagggggagaggagccgagaancgcaacgccggccacccgccagcgnngaaancgncgangagaacaaaaagcnggacaaggaaaggcgncagcgncaannagaagnnganagcnncagaaaggagnncaacaagcnncaaaagcaaggggcgcagcncaaaannaaaaaagaagaagcgagggagannanncaacaaacggagaaaaacaaacaag

SEQ ID NO: 106719 - DNA, 148 bp, Arabidopsis thaliana columbia
  unsure (1)..(148): unsure at all n locations
ctgccggctctctcaaacgcgcgtctcaagctcnctttagccaaggccaccggcggagatggagacgctgagaagcagcaagcgcccaccaacgaagncaagcncnncaaccgcaggaccaaagacgacgnnacggncacagacanca

SEQ ID NO: 106720 - DNA, 277 bp, Arabidopsis thaliana columbia
  unsure (1)..(277): unsure at all n locations
gccggcagccaccgnagncccagctgagactcttgacggcaagccaaaaaacggcggaagagannccgcggnagnagcagcaccaccggncgccgcggnaggcncggcctnnagggacaaagagganaagcactgngaaggctgcgctaagaagataaagcgaaaggtaagcactttgagggagagaaagaagtgacggcagatactggggggaaaaagcttnaggaggcggaaagatagaccagtgatccccaggagaagtggaggagaaaccaag

SEQ ID NO: 106721 - DNA, 149 bp, Arabidopsis thaliana columbia
ataccctcttcttccccaaatctctctggttaaattccgaatgggaaacctggggggaggtctttttccctttgaaatggcggaaattgggtccttcctaaaccaaaaccagcccttttggttttccccggttttggcgggggggggtt

SEQ ID NO: 106722 - DNA, 402 bp, Arabidopsis thaliana columbia
cacgaacgaagccacgaacttgggtctttggctcttctttgtgtcaatgtctccgtgtgagaatagaagactccatcgcttcttcaacttcaagatggcaaagtgagaaagataccttcttttcttcttatgccacagcttaaagttgcatcctttaaatatcagattgctactgtctcatttggttggaggaaagaataggcgatgagcagaaccgttgctgaccatcttgcgtagagctggctgtgacattgtagaggctctacaagccggtgctttgactttctggagaataaaatggactcttttttcaaaaactcatatctggacccaaaggctgtgcgtgcccagcttcctaagagggctgatcttgcggctccttctgaaccgatgaccgttgcg

SEQ ID NO: 106723 - DNA, 344 bp, Arabidopsis thaliana columbia
gccgcgtggggtcgttgatcccaaatttgttctgaacaatttcgattttgaattcgcgctgagtgatgaacggcgcttctccggctcattcattggtttcgacgaccgccgtagctggtggaggtggaagcagtggcgccgccgctggtctagacgatttccattttccaccggatattccctcaatgcaagagcgaaaagacgaagctatgcgtgttttgaaagctgatttgatgactgaacttgacaaagaggttaagtctttggaagaagatagttggatgttcgaaggtcctcgttctcgaatccatcttatatccagaagaggtaattttctaaagaaa

SEQ ID NO: 106724 - DNA, 407 bp, Arabidopsis thaliana columbia
agaagttattgttccccaccttattactgctaagtcgaaatctttctttcttcttctgtgccttcttttaagtgctttgcctctctcattctccttcttcctcctctggttctttgttggtcttaacctaaaaaaagattgaagttgcaagtaacagaggagctggctcagatctggttctaaagcgagaggaagagattttgagttgaggaaaaatgggtaaaggagagttcattgagatcccaacctggggtcttaaagtggacatacactgtgattgcttgaagccggaaggtcagaaaatcttgcagaaaatcgaaggtgttttcacgaccaagattgactcatagcaagggaaagtgactgtctctgggagcgtagatccctcagttctcatcaagaagctc

SEQ ID NO: 106725 - DNA, 410 bp, Arabidopsis thaliana columbia
gaaaaaaggaacagactttttacttgtgcctttgaccaagaaccacaaagaggaggaaatcaaatggtttttgggagtttgatggattgattgattattcagcaaatcccacagaagaaatcagaagctgcttcttattttttggtcacgaccagtcttaatcaaagtagttcgtctcctacttgttattaaaagtgtatatttctgttgggagtttctgttctcctaccacctcattgacctttaatgatggactcatagtttggtgccaagtgacccaaaaaaaaaaaaaaaaaaagtcgatcttgaagatttcatactttttctggcaattctgtttggtttcagaggaaggagtcaaaacaatggggatcgtttcagaagaagccattgatgaattccaagagctg

SEQ ID NO: 106726 - DNA, 407 bp, Arabidopsis thaliana columbia
gaagaagcaaaaagagtcatattcgttgaaaacatcattcactcttctctgcgtctccttctttcacccgaaattgtctctgacaccgttttgattcagccatggctaatgctgcgttaggaatggcagtccatgatgactgcaagctaagatttctggaactgaaggcgaaaaggacacaccgtttcattgtctacaagattgaggagaagcagaagcaagtgattgttgagaaagttggtgaacctattctaacttacgaggactttgcagcaagtcttccagctgacgaatgccgatacgccatttatgatttcgactttgtcactgcagagaattgccagaagagcaagattttcttcattgcatggtgtcccgacgtagcaaaggtgagaagcaagatgatc

SEQ ID NO: 106727 - DNA, 405 bp, Arabidopsis thaliana columbia
  unsure (1)..(405): unsure at all n locations
gtcccagccaccaaatcgtatatgggattacttggatagtgtgacatcacaattgctaacagttctgagaaaaggaatgctcactcaggatgtccagcaagataaactcgttgagttctgtgtgaccatagctgaacataaccttgactttgctatgaatcacatgttactagaactgttaaagcaagatagtccaagcgaagcaaagattattggtctccgtgctttacttgcccttgttatgtcgccttcaagccagtatgttgggttggagatatttaagggtcatgggataggccattacataccaaaggtgaaagcagcaattgagtcaattntaagatcctgccacaggacctacagtcaagctcttctaacatcatcgaggactacaatcgatgctgt

SEQ ID NO: 106728 - DNA, 406 bp, Arabidopsis thaliana columbia
caacactaagcaaaaaagaaaagctcaagccgagagagacaatggcatcaacattcacgagctcaagcagtgttcttaccccaacaacattccttggccagactaaagcctcaagctttaacccccttcgtgatgttgtctctctcggatctcccaagtacactatggtctgttttctttttggtcttaatctcgtcatattaaaggtgtttcatctttcttcttgagtttgtgtctgactttcacgtaaaatgtctatgtgaagggaaatgatctttggtatggacctgacagagtgaagtacttaggacccttttccgttcaaactccgtcttacctcaccggagaattccctggcgattatggttgggacaccgccggtttatccgcagaccctgaagccttt

SEQ ID NO: 106729 - DNA, 282 bp, Arabidopsis thaliana columbia
tttgatcaaacaccggagcacagtatatgttggaccatttcttgagttccttctggtcctggcacaaagattctgggatggccttggaagaggggagtacaccggattggaaaactgcacccaagtatctacttgcttacactagcatatcgtaccctagatcttgaaagatttaatagagaaggaaacggtccatatttggatatcctttaagcacggtcttcttaaacactgaattgccgttatagaagggggaggaaaaaaaaagacccctgtatcctt

SEQ ID NO: 106730 - DNA, 398 bp, Arabidopsis thaliana columbia
gcgttaagctacagataactccaagattcgggtctttgtttgttttgaagatcagggtcattttacgataattccggtactcgttattgtgtatatatatctctttcccggaaatttcggttcttgttgtacaaaaactccaaaaaaacgcataaaaaatattctgtaaatggttgaaattctctgggaatttcaacgggtcttgtggtatcatgtcacagaagagagagtttgaagaagggaaaggtcgaattgagggcggctcatccgaagacaagcgtagaagattcaaaagtgtggttcatgaggtaatgagattacaaaccgtcaaacattttctcgaacctgttctcgagcccttaattcgtaaagtgggcaaagaagaagttgattaactc

SEQ ID NO: 106731 - DNA, 289 bp, Arabidopsis thaliana columbia
  unsure (1)..(289): unsure at all n locations
tttttcgaaccccggcgaagctcaatatcttggtctnttctaccagagcaagggataagctgagttcattaagccactttccttttcnctctacgtcaccagttttgacaagtcatgaggtgttaaagagaaggctcccaatattgtgttgcctctagttggatatccaaaggcattcgctttgtggcttttaggtggcatagatctttagctcttagtttactagtactatgctggaatctcagggaggacatattatatccggcggtganctttggtttgttcttgg

SEQ ID NO: 106732 - DNA, 487 bp, Arabidopsis thaliana columbia
  unsure (1)..(487): unsure at all n locations
cgctcttcntctctctctctttcttttttagagtnctcgtgaagggctatagtctgaatagaatggacgaagaggatgagttagaccggagggaaggatgtcgcctcttccggcaaggagactatcttatgatcccatccgtccttgtgaaagacccgttcgagagtgaagagatagctcaaagaaagtggnntccttctacatgagctatgtcatcgctagtagttcataagctatctttgctttctttctatatcgtgactagttttagacaagtnncatcggctttaaagagccaagactagatattcatatcgccggcgagcgtgagtcttggtgccaagtagtcggcccttcctagagcattctcttaggagcctttgagtggcatagatanttcaatcctcgtctacctgcacttgccggcattctctggtgagacaacatcatatcccgcggttgacgtttgggctattcctagctagca

SEQ ID NO: 106733 - DNA, 382 bp, Arabidopsis thaliana columbia
cggacgcgtgggctcgaagaaattgattcatcacgaagcgaaatcatacaaagatctagaagaaggaaacaacaatttcaagagacatggcaggcaaaggtggaaaaggactcgtagctgcgaagacgatggctgctaacaaggacaaagacaaggacatgaagaaacccatctctcgctctgctcgtgctggtattcagtttccagttggacgaattcacaggcaactgaagacccgagtctcggcacatggcagagttggtgccactgcagccgtctacacagcttcaatcctggagtatctgacagcagaggttcttgagttggctgggaatgcgagcaaggatctcaaagtgaagaggataacgccaaggcatcttgc

SEQ ID NO: 106734 - DNA, 311 bp, Arabidopsis thaliana columbia
catctgagaatttccaaaaaattgcctctttatctccgcatatctccttatgcggcggctttatctcccactaccgggggatatgatccatcaaggaaacagcgcccgattccctacttcggggtcccgacgactaacatagctttatgatttttgaattctaggagaagcggagattactctgtagtgtaggtgtaagacacatacagctgatgtcatcgatgatcaggtgacgggagtggattgggtctcttcccggccacacgtcaacgccgcccaggaatgcgctgactctacagacatgtacgctc

SEQ ID NO: 106735 - DNA, 360 bp, Arabidopsis thaliana columbia
tgttactctttttagattccgttgttgttctacattgtagatcctttcttcttttgttttgattcactgcttttagggtttccttctccagaaactttgattctttcgtttttgtcggtgattgtgtcttaattctgagtgtgcatatgagagtataagctcgaaattgactcgtggagctcatgcactgagctatagagtgttgtttgattctgcgattaagtatcactttcttcagatttatcttgatttctatgttgattgaatcgaggaaggaatctttttttctctcatcttcgttagcttcactattgatgtttactactacatattgttgttttaggcagttttgctttgtac

SEQ ID NO: 106736 - DNA, 405 bp, Arabidopsis thaliana columbia
ctccatctgaaattctttgaagacaaacgcccacaacacggttgtagttatgcttgtagtttgatctatttccctaatatgacgatccgaaagaagggtgacgatcacttgggtgtgatatgtaaccctagcacagggcagtatgggtatgtgatcttaccacctttactggatttcaagagcgtgccttacggtaaatttttagggtttgatccgattgacaagcaattcaaggtattaatcccgatattcgattttgataaacatcaaacggatcatcatattcttacattaggagctgaaacagttgggtggaggaagatccaatctcccttacgctatcttcctcatagtaatggaacaatttgcatcaatgggattttgtattacctagctaaaattaat

SEQ ID NO: 106737 - DNA, 397 bp, Arabidopsis thaliana columbia
tttgattttttttggtgattggctcaacctcaaatttcaactttgaattggttttaaccattttctggtcccagggggtttctttgtttctgccaaataaaaaaaacctttcctttcctctctcggtttggaatttccataaatcaattatctgcctcctggggttttttgacacctcaagttgtcttcttgttcaaagttctgcaataaattttaataatggataagtttagagttctttttcctttgttcctacctaccatcctttacattgaatacgttgaagttgtggcctttgtctccattccactcccacttccacttttttttttgtcagatattggatctcgttcaggtcaaatgttgatttcagctgaaaaaggagagatcttgatcc

SEQ ID NO: 106738 - DNA, 329 bp, Arabidopsis thaliana columbia
ggtgggtttttttttattttggttggtttttttttttttttattttttttttttttttatataaattacattttcataaatcagacatttgacaatccgattgaaattgtctcattaagagaaaaagaacaccgccctttggtaatttaatgggccgagtttattcattagaatgttttaaaaaaaaaattaaacttcggtgaaacttgggggcttgtatgcaataaaactgttgcattggacttttccggttttttccaatcccattatcctaattaaggcccccgggtactccttttttcttttttaaatttctttaaaactttagc

SEQ ID NO: 106739 - DNA, 302 bp, Arabidopsis thaliana columbia
atctttttttattttctggattcttattgttctttttcggggaatttaggtaatgtgtttgtccattttggtggggtttgggaaatttaaaatttgtgtttttttttgggtcggattctcaaaaatctgattttgaggagaaaatcctcgtggaagaaacttgattcaaatcttctttactggtaaaaatatattcttctcaattcctcattttctgttggtggaagttggatttttgcatttaattgctgttaaagaaaataggggcaagatctgagatctctgggtgttccatgcaaaac

SEQ ID NO: 106740 - DNA, 446 bp, Arabidopsis thaliana columbia
  unsure (1)..(446): unsure at all n locations
cgggggggacccacgcgtccgttctttttcatttcctcccatcaacctttttatttggtcctccggtgggggggggggtgctattttcaaaagatcggttttgcccaattgggttcttcttggtaacccttcttcttctttggaatgggttcttctggggaaccaaacattcttggtacttgtggggcctgctttatccggacgcatactggtggtcaacttcttaaaaatgggtttaagggttcgatcatcgataattttggtaactctgttatcgaaactggtggtagagtttagggagcttgttgggccctgatctctccaaaaaagcttcgacttcaaatctggggtgaatctaaagaanacaaagggggaacaattggagaaactatttctcccaagcagaagaatttggatgcctgtggattcatttttgcggggtcttt

SEQ ID NO: 106741 - DNA, 405 bp, Arabidopsis thaliana columbia
  unsure (1)..(405): unsure at all n locations
acactctactaccaacgttcatgccttactgcggtgactgngttgattgcaaatgggacaaaagcaacttatgtagcaaatttcctttcaaggtatccccttggatgccaagatacgataattccagcagattcaccgacctcaatggcgaaactctctttcatttcttgaacgtctccagcttcagcgaatacacggttcttgatgtcgctaacgttgttaagattgattcttcgattcctcctagtcgtgcttgcctcctaagctgcggagtctccaccggtgttggtgctgcttgggagaccgccaaagttgaaaaaggatcaaccgttgtgattttcggacttggttctatcggattagcggttgcagagggtgcgagactttgtggtgcctctagaatca

SEQ ID NO: 106742 - DNA, 405 bp, Arabidopsis thaliana columbia
  unsure (1)..(405): unsure at all n locations
gagcccttgaagataacttgggattcttcggagatggattgtgagtttgaccagggggaaaatggtgagaaaatctctgttagaaaaaggtttatggagagtactaaactcagtgcgtctcgggttctcgatacgttacagcaagattgtcccggtttcaatacgaaatcagctttagatgaattgaatgtttcaatctcagggctattagtgagagaggttcttgttgggatcttaagaactctgagctttgataataaaacaaggtgtgctaagctcgcttacaagngctttgtgtggtgtggtggacaagagaatttcaggcacactgcgaattgttatcatttacttatgaagatatttgctgaatgtggtgagtataaagccatgtgcaggctaattgat

SEQ ID NO: 106743 - DNA, 276 bp, Arabidopsis thaliana columbia
cggcaggcccgggccagacctacccgaacggagcggctccaaaacttggagttccgttaggaggtctccgtccaggggcgatgaggctgcttccgttcttgggtttctttggccccccccacgttcttggttttttccggtatggggggcggctattggaccaccaaaaaggggggtggggggggttccaaggggggggatgaaccctgggttggttttaaagctattggccctgggggttttggctggggtttggggttttatgggcctaattat

SEQ ID NO: 106744 - DNA, 422 bp, Arabidopsis thaliana columbia
  unsure (1)..(422): unsure at all n locations
gacggagacgtacgcattcttgtgttacataacattgaaatctactaganggagaagcccaaaccgnggggtaggtactcgtaagccgacttgtcccataaaaaaaacattttttccaatttgttattacaaaatgtacctttttatcatggaatctttgcagttcattctgatattcctcaagttttttattataaagattcgtgttatttaacgatatctcactagttcagtcaatatatgtccatctacctgctatttctgctgatattttctgaattttccctatgacagattgtaactgctttactctatcgtttttcctaaaccttatttcacgcaatgctagctcaatataatccagctgcttcctcagagttccttcctttttcttctgctgttaagagaatgacaacaaaatt

SEQ ID NO: 106745 - DNA, 229 bp, Arabidopsis thaliana columbia
aagagacctactcactacatattgtttatcctgaccgtctcgcgagagacagatcgattgacggatttggagagtcttgatccgactttaacagagatgggatgagcgggtacttactgaaagatatgctagcgtgtgacacatatcacgggggaaaagcacgcatattgcaaacaaaggcggatgcaccacaccaatatggaagagatggtttatcagaactcgctcc

SEQ ID NO: 106746 - DNA, 381 bp, Arabidopsis thaliana columbia
aagagacctagccagttagctccgctgcgcctctggctatagcgagacacagagagcttgatggatctggagagctcttctatgcccttaacagtgaagagattatgcgatgtgcccctttcaagatatgctagcgctacacaaacctcacggctggactccatcatcctggttacgaaggtggaagaaccgacgagctattcagagcttgttattgctgaatgctctggatgagtgtctaaatatttgtcctggatctttgcttgtgctgaatcgagacgaacggtgaattctatacgcttttgacagtgccggatcttcggatagtgacttccccatcttcggattcttgtgatagtcaagcttatattgtccgggaat

SEQ ID NO: 106747 - DNA, 346 bp, Arabidopsis thaliana columbia
caattcgacctcaattgaaattagggtttctctgcaactccacaaacagactcttaacaaaacttcgattcccaatttcaacaatggcttgcgtaaacgaaccatcacctaaactccaaaagctcgaccgaaacggaatccatggcgattcatcaccatcaccattcttcaaagtgaagaaactctccgagaaagctgttataccaacacgcggctcaccactctccgctggatacgatctctcaagtgcggtggattcaaaagttccagcgagaggtaaagcgcttatcccaacggatctaaatatcggtgttcccgaaggaacttacgcgagaattgcgccgag

SEQ ID NO: 106748 - DNA, 190 bp, Arabidopsis thaliana columbia
gacagacctagacctctctgcttgtttttgtgcatgctctctctatcactatcctgtctgattctagtgttgggctgatcctctgcgtactctggacttgtcctgtcttcagataaaacaagtactgcatatcgaagatcagatgtcataacgatagctacgtgtggttaaggcaaaacaggttacgtca

SEQ ID NO: 106749 - DNA, 386 bp, Arabidopsis thaliana columbia
ataaaaaaaaaaaaaacacaaaaaagtttcaatggccgcctcaacaatggctctctcctcccctgctttcgccggaaaggctgtgaacctttcccctgcggcatcagaagtccttggaagcggccgtgtgacaatgaggaagactgttgccaagccaaagggtccatcaggcagcccatggtacggatccgaccgagtcaagtacttgggtccattctctggcgagtcacccagctaccttaccggagagttccctggagactacggatgggacacagctggtctatccgctgaccccgagacattcgcaaggaaccgggagctagaagttatccacagcaggtgggccatgctcggagccctaggctgcgtcttccctgagcttt

SEQ ID NO: 106750 - DNA, 411 bp, Arabidopsis thaliana columbia
gacagaaaatgaaaaatttaaaatggagttttctattgcattttgtaagctgagaacaactaagttaaagggaaagcaaaaatgggctgcatcggtgttgtgaatgtaacaagcataaatccatatctcacaagaagatcaaacaaaccctacaattcaagaagaccatcatccatggctgctgcgattagagctgagtctactgagaaattagggattacaattgaaaagaatcctcctgagtccaaactaacccaactcggtgttcgtagttggcccaagtggggttgtcctccaagcaagtttccatggacttacagtgcaaaggagacttgttatttactacaaggaaaagtgaaagtgtaccctaatggatccgatgaaggcgtagagatcgaagcaggcgacttt

SEQ ID NO: 106751 - DNA, 417 bp, Arabidopsis thaliana columbia
ctcttccacgatttctgctccgaggtggctcgtgatctcaacgccatcgtcgtatctccttcgtaccgattagctccagagcatcgattaccggcggcgtatgacgacggagttgaggcgttggattggattaaaacctccgacgatgagtggatcaaatctcacgccgatttctcaaatgtgtttcttatgggaactagcgccggagggaatttggcttacaacgtcggactaagatccgtcgattccgtctccgatctgagtccgttacagatccgtggattgattctacaccatccattcttcggcggagaagagcgaagtgaatctgagattagacttatgaacgatcaggtttggcctcccatagtcaccgatgtaatgtgggatctgtctcttcccgtcggcgttgaccga

SEQ ID NO: 106752 - DNA, 416 bp, Arabidopsis thaliana columbia
attttagaatctaagcttcccggttagtactacccttaaataaactaagtttcatgtctgaacttgactaccaggttcccactgcctttgatccgtttgctgatgcgaatgttgaggactcaggtgccggaacaaaagaatacgttcatattcttgtccagcagcgaaatggtaggaaaagcttgacaaccgtacagggcctgaagaaagagtacagctataccaagatacttaaggacctcaagaaagagttttgctgcaacggcactgtggttcaggattcacaactcggacaggttatacagcttcaaggtgaccaacgtaagaacgtctgcacattccttgtccaggctggtttggtgaagaaggataacatcaagatccatggtttctaagctatctagtggatcatatta

SEQ ID NO: 106753 - DNA, 320 bp, Arabidopsis thaliana columbia
  unsure (1)..(320): unsure at all n locations
nntccgcggaccgcccgtgggtccaacctacccttcctttggagtgatgcaggannagattctcttccctnngttgcttnnaaataaaannaaagcaaanngtgcgtgnnngtttctcttcttcnnttttgctttggcnnccttaaatnngaattatggcnnaagagaaggtntatgaattgtagataccatgggnnggctttcttaatataccattttctaaatatatgaaanaatgtaantgtattagatgacccattgtgtagcttctttttcttccatgctnttttaagggacccttgtctttggttgcccannaa

SEQ ID NO: 106754 - DNA, 418 bp, Arabidopsis thaliana columbia
ccctacttctccgatacaaccaaaacctaaaattaatttattcccattatcaacccatatgtttatggggttttgatgatcaaccattttgcaacacttttagatttgcggaaaaaccaaagagttgaagtgaaagaacaaagatggctagcttgaaactgggttccaaatctgaagtctttcatcttagtggtcacacatggctttgcaagactggtcttaagcccgatgttatgatccaagtcgtagacgaaagcttccatctccataagtttcctttgttgtcaagaagtggatatctagaaactctgttcagcaaagcctctgagacaacttgtgttgctcagcttcatgacattcccggtggtcctgaaacattcttgcttgtagctaagttttgttacggtgtaagaattga

SEQ ID NO: 106755 - DNA, 503 bp, Arabidopsis thaliana columbia
  unsure (1)..(503): unsure at all n locations
cgtnnccggttagcctctnncccgtgacgatgtacatgtgaccgtnnctctggtgattaccctccggcccaaaagtgattaccatcannactacaccgnntcctcatgcctccaacancctgacaannccaacctnngctggctcctctggctttccacctnncggagtcttaaaggtnngatgctaaccgaggttggtaggagggtaggagaccggtgcccaagaaatgggtgaataatgcttggagaggggagatatgtcttgtcagtggaaatctaaataaccaatatcatatnggttgttgagtgagtcccagactggtgagaaattttgaaatcataacnnaggtggttgggtttgatnatctaataggaaaatacggttattgtgaaacgccgttttgtgtcagaaagagggatgatactctatgattggtgtgcgttagcaaagttcgtatttcttagaacaagccatggaaacctattcacgaggaaagtttata

SEQ ID NO: 106756 - DNA, 417 bp, Arabidopsis thaliana columbia
caaaaagaaagagacacaaagagcgagagagggagagagatggaggtaatgcgagttcttcacatgaacaaaggaaacggtgaaacgagttatgccaagaactccaccgctcagagtaacataatatctctaggcagaagagtaatggacgaggccttgaagaagttaatgatgagcaattcagagatttcgagcattggaatcgccgacttaggctgctcctccggtccgaacagtctcttgtccatctccaacatagttgacacgatccacaacttgtgtcctgacctcgaccgtcctgtccctgagctcagagtctctctgaacgacctccctagcaatgacttcaactacatatgtgcttctttgccagagttttacgaccgggttaataataacaaggagggtttagggttc

SEQ ID NO: 106757 - DNA, 416 bp, Arabidopsis thaliana columbia
gctaaccatagaatacatggacttggcggaacagtctctgcaagctctcaaaaagatatctcaggagcacccaactgcctgtttgcgagctggtgctcttatggctgtgctctcgtatctggatttcttctccactggtgttcagcgcgtagcactatctactgctgccaacatgtgcaaaaaactaccttctgatgcatctgattatgttatggaagctgtacctttgctgacaaacctacttcagtatcatgattcgaaggttttggaatatgcttctatctgtctgactcgaattgctgaagcatttgcaccgtatcccgagaaattagatgaattatgtaaccatggcctggtgacgcaagctgcgtctcttatttccacgagcaattcaggaggtgggcaagcatctctta

SEQ ID NO: 106758 - DNA, 506 bp, Arabidopsis thaliana columbia
  unsure (1)..(506): unsure at all n locations
ccgtccgcttcacaacctttaggctcttgaagtcctagtatagtgtgttcaaaccctnntccccctcttaatttcaatggtgnngtgaaatgtnnnttgagtttgtttgtcttctttgggaggggcaaaactttcttggttcgagaatgtaacctgcttcttgaatgcccaattaaaaacaagtttcaaagaaccgcaccaagcttgacttggagtgggggatcccttgtttaacctaaaaaattacctcgtgggtctggaaatttccttgctcttgaaaggcccccgaattccgtgtaagtcgcttttgaacttaaattaaatatggggaggtttcaggtttcgcttagcaancctgcagttgctaaaattaaaccagcaattgtccctcccatttgggcttgggaaaacaaattctcttctcggggtaggtttaccctgactttcagtttcacttcaaacccggctggaatcnattgcacttntgaaagaccaatctttttcag

SEQ ID NO: 106759 - DNA, 416 bp, Arabidopsis thaliana columbia
attcaattttagggaattcaatcccattgcttcttcttctcttggtgattcgcctcttctcttgtgtgaatccctttcacgatctttggcacagctcactggtgatctggagtgaagtctcggtctcttgtcttcctcttggtgattttcttcttatcacacaaagatattggagctcttgggatttctctttccctcaagcagtctccatgtcttctccgcatcttctctgtgagcctccctcacgtctcttccggttgtcgatgcagccttcttcagcttcctctctctcatgtacaatctcaagaagaacaaagatcaaagacaaagaacaaagaaggaaaaagcttcttgaagaataaactctcgtttcttctctttctctctagaactccctttgtgtcttgtctcacacc

SEQ ID NO: 106760 - DNA, 422 bp, Arabidopsis thaliana columbia
ggtccggattatcgacccggttgaagctttacaggacccgacgtttctgcacaaaaggagagaataaactcgagaagacggaatctagcgttgcgcatcacagcgacactgaatctagtgtttctcgctacgatgagacctataagaaactcgataagctcgatttcgttaccgctgcgaagatcttgttcactgaaccacccaagaagaacaaatttgggtttgattggcatgtggtgcaattcatcatcgtctgcttgccatctgtagctgggtatctggttgctcaatatgctcgccggaaaatgaagatcatggatgctgaacttggagagaagaaaaggaaagaagaagaaaagaaagagaaagaagaagctgaacaaaaggcattacaagtagaggcagcaaccaagtctcacgaa

SEQ ID NO: 106761 - DNA, 421 bp, Arabidopsis thaliana columbia
gtcaggacacaacaaagcagttagctatgcgaagttcttggataatgaaactcttgtaacagcatcaactgataacacgttaaagctttgggatcttaagaaaaccactcacggtggcctctcaacaaatgcttgcagcttaacttttggcggccatacaaatgagaagaactttgttggtttgtctacttctgatggatatatagcttgtggctctgagacaaatgaggtttatgcctatcaccggtctcttcccatgccaattacctcgtacaagtttggttctattgatccaatatcaggtaaggagatagaggaggacaacaacctgttcgtttcaagcgtttgctggagaaaaagatcgaatatggttgtttcagctagctcaaatgggtcaatcaaagttctacagttggtctgg

SEQ ID NO: 106762 - DNA, 331 bp, Arabidopsis thaliana columbia
ttttcctacgcccgcgaccatcaccgtggtcaacctgcttcaatcctcgctaaagagttgctcaacggacccagtgttgctgctgtccgatgtgcggagatttgtttgtctggcgcatcggctcggcagaagatgaagtacatgaggtttcctaggaaacgcatgcacactacaccttctcatggtcctatgcattgccgtgctccgtctgagatcttctggcgtaccgctcgcgggatgattccacacaagaccaagcgtggtgctgctgctcttgcacgtttgaaggacaaagacgacatttcaaatgttcgtcgcgaagtccagatta

SEQ ID NO: 106763 - DNA, 417 bp, Arabidopsis thaliana columbia
ggttatggtccggttggcctccttaatttcctggggaaaatttcaaccaggcttcagcgaagacgaatttacattggacacaaacttctggagagaacaagtgaatcagtactgggagttgatgaatgttaataagactgaagtgcgaaatgtgatggacacaaatgcattcattggtggatttgccgcagccatgaactcatatcccctttgggtcatgaacgttgtacctgctacaatgaacgataccttatccggaatttaccagaggggcttaaccggtgcttatcatgattggtaagcgaatacgatctctttctcaaattttcatcctttctcacttaagcttagcaccgatagtaaaactagttcctcataggtgtgagccattctcaacatatccccgtacttacgatc

SEQ ID NO: 106764 - DNA, 280 bp, Arabidopsis thaliana columbia
  unsure (1)..(280): unsure at all n locations
aaaaaacagataagtaacatagagatctcntcttattagnccgtgtgcctggttcttagctttacactagcggtagaagcatgccgtgtctntgcaacacaggtagattagcggattctttatcccttagcttattcctacagtgacttcataggcggaccagtgtcccaatccctctagctgcatacgagtctcacatacatctcatagagtcagagctcaatacttctagtggaccagtcagagggagtctagtcagttagcatcaatatctagctat

SEQ ID NO: 106765 - DNA, 313 bp, Arabidopsis thaliana columbia
aacatacagagcactctatatgtgaattgaagagtgtgtcattcgaaaggggaacagaatacaggaatggctagctgtactatctccaattacaccatctgcgtctttgggacggatctccgtagaaagcacaccaaggccatatttactacggtgactgacttgcctacaatgggtcagaattacaggagagtgtgggattgcaaacggagacaactgcaaggatacatgtcagtcacaaggaccagagtgtcaggtgcagcaacagctggtccgacaggcgtgacaagcattagctctatggctacaagtg

SEQ ID NO: 106766 - DNA, 413 bp, Arabidopsis thaliana columbia
tattagtcgcttatttttcatttccgtagtaaaaaccaaaaatcataatgacacaatatataaaattaatgacaccaatacaaaacacgaaacggaagaatcttcgttcctctttaccgtccggccgagaaaagcctaatcacatctttctcctctattcttctttttaaaacatgagatctctctctcttctcatcaccattgatctctggttttcataatctattctttgattcttattctatctctgaattttgatttgttcttcgggggagatagggttttacaattctcaggccggttcttgagatggaggagaacacggcggtggctgcggcggagagaagatcaggttgagagctatagagtgtaatgtttggtagacgtggcttgtggtccaagaaatctaccgc

SEQ ID NO: 106767 - DNA, 323 bp, Arabidopsis thaliana columbia
gtggcgtggaaagcccgtcttcatcaggcgaagaacagaagatgacatcaagctggccaatagtgtggatgttggatccctgagggacccacaagaagactcggttagagtcaagaatccagaatggttgatcgtggttggagtatgcactcatttggggtgcatccccttgcctaatgctggtgattatggtggttggttttgattgtgtaacggtttatttaatcttatattttggtattatttttgtaaggacctaaaacttttactttcttttatgttcttttactttatgattattgtgtattttttcatttaattta

SEQ ID NO: 106768 - DNA, 408 bp, Arabidopsis thaliana columbia
caaaaccatcacagcaaaaaaaactcactccctagaaaagtttgaaaatggcgaaggcagataagaaaccagcggagaagaaaccggcagagaaaactccggcagccgaaccagcagcagcggcagagaagaaaccaaaagccggaaagaaactcccgaaggaaccagccggcgccggagacaagaagaagaagagatcaaagaagaacgttgagacatacaagatctacatcttcaaggtgttgaagcaagttcatccagatatcggaatctccagcaaagccatgggaatcatgaacagtttcatcaatgatatctttgagaaacttgctggtgagtcttcgaagcttgcgaggtacaacaagaagccgacgattacttctagggagattcagactgcggtgagac

SEQ ID NO: 106769 - DNA, 410 bp, Arabidopsis thaliana columbia
caacgaagaagcttcagtgccaacgtattggctgcaacgccatgttcaccgatgacgacaatcctcaaggttcttgtcaatttcatgcttccgtacgtcttcttctctccccatctttaatcgattcttctctttcttttctaagtcttcgatagtttctgataaacccatagagtagcttttgaatttgattttatgatgtgaggttacgaatttcgatttttgatcatgagaagatgattacgcaagtgtttaattaggttttggattagctgattgattacatgtagatttcatttagttgtaagtaagtaagctttgaacacagctttgattgtctaattgtcaaattttaactaagttgtttgcttgcaacctatgaattctgtgagactgtgagcttattagaa

SEQ ID NO: 106770 - DNA, 409 bp, Arabidopsis thaliana columbia
ctctggatttgggaaagcaactctgtcgatggatgaatctcttttcgaaacttctgggtgatatgctcaatgtgagtgaaattgttcttcgaatttgttgaatttcgtccattgtgtgaaattgcagacgcgtcttgtagtttgattgtgaaacttaattttgtaggcttctttgagttacttcgttggaattttggagttaggctttttacatgtttaatctttaatcgagtggttggtagaataagcggatctcactataatgctttttgatcatcgcaagcctcatgagattgtatacaacttgaagaagctttgattgatttgcatttgcaggttgattatctgtggaaaatgatggtcttcttagcatgatcaaggtgtctgacttgtgaagttttgtagatga

SEQ ID NO: 106771 - DNA, 167 bp, Arabidopsis thaliana columbia
gtttctttagtcttcaattcccgattacagctctggatcaggtggcactatccacagatcttcaggagcttttggtctaagcacaccttctctaaaaactccgctcccaatatcaagcccctctgccgttcgattttgatgtccgacatggtcatacaaagcaacgt

SEQ ID NO: 106772 - DNA, 391 bp, Arabidopsis thaliana columbia
cggacgcgtgggatcccgggatgattcaagtgtatctcggcaaagaaggagcattcgacattgatggtaacgaattgccacgtctcgtgtatgtatcaagagagaagcgtcctggttacgcacaccacaagaaagctggagccatgaatgcaatggttcgagtctctgcagtactcactaatgctccattcatgcttaatctcgactgtgaccattacatcaacaacagtaaagccataagagaatcaatgtgctttctaatggatccacagcttggtaaaaagctctgttatgtccaattcccacaaagattcgacggaatcgatcttaacgatcgatacgccaacagaaacatcgtcttcttcgatataaacatgagaggcttagatgg

SEQ ID NO: 106773 - DNA, 410 bp, Arabidopsis thaliana columbia
  unsure (1)..(410): unsure at all n locations
gaagaattaaacacaaaaatgtgggttaaagttttctcttttttaatccttatgataacaatggtggttattggtgttagcaaagaatattgtgatgacaaacagtcatgtcaaaactttttgttggagcttaaggcgggttcatcgtcactctcggagattagacgtcgtgacttattgatcatcgttttgaagaattccgtacggaggatcgacatggttatgattggtgtgatggatgatacaaaacaacatgaggagatggagaatgatttgcttggtgtgaaggaggacacaaaactatttgaggagatgatggagtcgacaaaagataggatgatccgttcggtggaggaactcttaggaggagaatttcctaatcgtggatcttacgagaacgtncacacttg

SEQ ID NO: 106774 - DNA, 250 bp, Arabidopsis thaliana columbia
tcccgatcgaccacgcgtccgcaagctataagatacttgagtaatcttaaccactgtaaataaaggctctaaaacacagacaaagttttggtcattgaaggtactgagagatgcttatgctgctgctgtgatgtactggattgccttcttgctgtttcctgtcttggtagtttttttgtttttgatcttttttttgttacactttttattattttttttggtgtttttattttttattttgtattttatg

SEQ ID NO: 106775 - DNA, 323 bp, Arabidopsis thaliana columbia
  unsure (1)..(323): unsure at all n locations
agagtccatcgattgttcacaggaaatgcttctaagtgtgtcttgtcttatctggttcgtggtggtgagtttgttacaaaaaaatctattttccctagttgagatgggaattgaactatctgttgttatgtggattttattttcttttttctctttagaaccttatggttgtgtcaagaagtcttgtgtactttagttttatatctctgttttatctcttctattttctttaggatgcttgtgatgatgctgttnaaaaaaataaaaaataaataaaatatattaattattaataataaaaaaaatattaaaaaatatntttt

SEQ ID NO: 106776 - DNA, 402 bp, Arabidopsis thaliana columbia
gcggtcgcgtgggcgagactaagatggtatttacctgtgaagcaacggggccatgaccgacagcgccggcaaacggagcttcactctggaaagtcgaagataatcggatctctcttcataaatcactcgacactccaatcacaaccgcttctcacgcttttgatcatgtgttcgacgaaagttctacgaatgctagtgtctacgagcttcttactaaggatatcatacatgccgctgttgagggttttaatggcaccgtcacaggtcctaggccgacctgactagtgcagccgcgaacgctgctgactcaacgactgctactacaccctttctgggactggttcgagatgtgtctgaaagaatacatatgatatctgatcgtgagtttctcatccgggtttc

SEQ ID NO: 106777 - DNA, 364 bp, Arabidopsis thaliana columbia
agccgataaggcatgtgtgtttttcaaagttttgattactttatgttattcttgttgtgtgtttggtttcattggtgcttttatatgcacaagcaggttaagcttaaagtccactgtgtgaacgtcctctaggctattgacgtgaagaaaacgggggatttcaactcaaattgttgcgttggacagacgacagattccagaagcttttggtaagtgaatttttaatttggaaaattgatatattatataattaatgttttaaaaatgacttttgaaaaattcaaataaaaaaaaataaattaatgttaaaaaaaataaggttacccaaaagtgaaaaagatggtttttgcctgataaaagcttt

SEQ ID NO: 106778 - DNA, 286 bp, Arabidopsis thaliana columbia
actcgtcccgcgtcggcactaccacactgggttggcctatactagtattcagttaccattttcaccaatgatatctttttgatcagaagagtgttggtgaagaagatgttagaatctggtcttgggatttagatgactacacctgctcagtgatcataaggcggatggggactggcttgatatggtcttcttctccattaatggtgtagcgtccaacgcatggtgcacctagcggtcatgttgccaggttttcaactggagagaacactacttgcagttcacctta

SEQ ID NO: 106779 - DNA, 341 bp, Arabidopsis thaliana columbia
  unsure (1)..(341): unsure at all n locations
cgggatgaccgcacgcgtcccgctcgtctcgtggacgcgtgggcgagacgaatatggaaaagatctgtgtcgcagtcagggtaagaccgccggcgccggaaaacggagcttcactctggaaagtcgaagataatcggatctctcttcataaatcactcgtcactccaatcacaaccgccaatcacgctgctgagcgtagctacggcggatgctcgacaagtgctaccgtcgccaagcttaaggctgccgtcattaggcacggcaggattgaggggaacttcgtgaggggatggcatggtcggcaggactctcctcttgatgccgntgccattaacgactct

SEQ ID NO: 106780 - DNA, 399 bp, Arabidopsis thaliana columbia
gtggaggtcttccacacctccagagcctggatttctcttacaattcaatcaacggaaccatcccagacagtttctccaacctttcatctctagtttcactaaatctcgaaagcaaccacctcaaaggcccaatcccagatgccattgatagacttcacaacctgacagagcttaacctgaagagaaacaagatcaatgggccaatcccagaaacaatagggaacatatctggaatcaaaaagcttgatctgtcagaaaacaacttcacaggtccaatcccgctctcactagtccacctggcgaagctttcttcattcaacgtcttctacaacaccctctctggtcctgttccacctgtcctctccaagaagttcaactcaagctcttttttggggcaca

SEQ ID NO: 106781 - DNA, 372 bp, Arabidopsis thaliana columbia
gaaagatgaaaatgcatcttattctctcgatagttttggcaattatactcgcttcctccgttgcagaagcttttctcgatgaaaaaactcaacaaagggtcaacggaatctgcaagcagacaatggataccagattttgcagtagtctcttgatcaagaacctgaatacttttcccgcaagtaacaaagaaatcatgaacgtgacagtaagcgaagctgaaaggttcgcggccaacacttatttcttcatcagcacgcttctcaggaatgctggagacgagaggcctgatcttcaagcgtgcgccgaagcttacgccattgtgaactcggcgttcacgaaagctgtaaccttcttcaagcaagcttactaca

SEQ ID NO: 106782 - DNA, 350 bp, Arabidopsis thaliana columbia
tcttagcccttttaaaccataaccaaactattagtctactcatccaacgaggaccatgggggtaaattctcggacggcaaagctaatatcacgcgagctaggcgttaccagaattaccatccgtcggcaaatcatggtgttacgcagttctcagatctgactcggtctgagttccgtaagaagcacttgggggttagaagaggctttaaactttctaaagatgcccacaaggctcccatactatctatcgaagatatatcggagaaactctttacttggatggcagcttacctggtgactattgaaaccacccctttggtctttcagacccagaaggtactggaggattc

SEQ ID NO: 106783 - DNA, 318 bp, Arabidopsis thaliana columbia
cctgcgtgtgcactgtaggtgaattatgctttttttggccgatcggatacgagttcatgaatatgtgattgataagaagatgccgcagaatctactggaggaaagcatacgaccttcgtggacgatgagaagggcagcgcgtgtggctacgtaagtagggtgttacgacctgctggtgttgatgatgggatcggcggggctgctatgtatgagaaagtgcgtgccggttatgatcatcggatggctgaagatcttcacgacggaggagattgtgcgaccgttcaagatgacaagggagcagctggattgacagtctat

SEQ ID NO: 106784 - DNA, 335 bp, Arabidopsis thaliana columbia
cgagcaataatgagggtttctcaatctctaatcccttttgccataattgctttggtcctttcctttgtcaatgcttatgatccaagtccactccaagacttctgtgttgccattgatgacctaaaaggcggttttgtaaagacccggagcgagtcgatgcaaaagattttttcttctcaggtctcaatgtgcccgggaacaccaataatcaagttggctctaatgtgaccactgttaatgttgatcagatccccgggctaaacaccatgggaatatcattggtccgcatagactacgcaccgcatggccaaaatccaccttacacgcaccctcgt

SEQ ID NO: 106785 - DNA, 443 bp, Arabidopsis thaliana columbia
  unsure (1)..(443): unsure at all n locations
ccggnncggaaattccggggcggccccacccgtccgatcgattttttccaacttcaataaaggggaaccaacgtaaccctaattttgctttctcctctttgttcagaaaattttccctttactctcaaattccttttcgatttccctctcttaaacctccgaaagctcacatggcgtctcgaaactatcggtgggagctcttcgcagcttcgttaaccctaaccttagctttgattcacctggtcgaagcaaactccgaaggagatgctctctacgctcttcgccggagtttgacagatccagaccatgtcctccagagctgggatccaactcttgttaatccttgtacctggttccatgtcacctgtaaccaagacaaccgcgtcactcgtgtggatntgggaaattcaaacctctctggacatcttgcgcctgagcttggg

SEQ ID NO: 106786 - DNA, 348 bp, Arabidopsis thaliana columbia
agacattctcgtgagggttcattctgaatgtctaacaggggacatatttgggtctgcaaggtgtgattgcgggaaccagctagcactctcgatgcagcagatcgaggctactggtcgcggtgtgctggtttacctacgtggacatgaaggaagagggatcggtttaggacacaagcttcgagcttacaatctgcaagatgctggtcgagacacggttgaagctaatgaggaattaggacttcctgttgattctagagagtatggaattggtgcacaggtattaaccaagatcacattatcatccaaaaaagacaacaattttttttccgggtattttactaaatcttc

SEQ ID NO: 106787 - DNA, 372 bp, Arabidopsis thaliana columbia
ggtttttcaagccaagggttcattttttacaacccatgagaattctttggccaaacacgtctaacatctttttgaattcaccccaaactcaaatcctaccctaaaattcggatttttcttcttcttgcttttctaagttaggatcgacatttttatcctccgaaagattcgtgcttttttctctctgtagattacgattggtttgtagatttaagaaaaacaaaaagatgagttttagggatgataatacggaagagggaaagaaatgatcttcggcgaccgttcttacacacaggaagttggtatcggatgggttcgagacaatctagtatgttggaatcgtctcaagttattcgagacagctcaatttct

SEQ ID NO: 106788 - DNA, 282 bp, Arabidopsis thaliana columbia
cgccaagaaggccgcttgtgtttcataactaggttgacatattcgaccattgcgtaactgagggacaaacaataacgctaaccacgtttatggaacacacggaggacaccaattcatgtccgcgccgataggtggaagaccagggttgatgagattcatccaaggcctgattccagctgttgactacccgtacacgattgtaaccgatcgagctttagctagacgaggcgccgtcactgcagctcattctgaagacatccgttcgacatgggatactgcttg

SEQ ID NO: 106789 - DNA, 421 bp, Arabidopsis thaliana columbia
gtcgaatgcacattggtgtagcgcaaaatccaatgcatgtgcagtatgaagatcacggtttgcaccatatcgacaatgaaaacagtatgatggatgaccatgctgatggtgggatggatgaaggagtggagacagacattccttctcaccctggaaactcagctgataatcgtggtgaagttgtagaccgtggaattgaaaatggagatcaattgacattgtccttccagggacaagtttatgtttttgaccgtgtctcgcctgagaaggttcaagctgtgcttttgttacttggtggaagggaagtaccacatacactcccaacaaccctaggatcaccttatcagaacaataggggtctatctggtactcctcaacggcttaacggttcgcagcggttagcttttttgctcaggtttag

SEQ ID NO: 106790 - DNA, 423 bp, Arabidopsis thaliana columbia
ggaacgattagtatataatctagggcggaggtgtttacaaagtcacagacatacttctttgtttagattgtgaaaaccattagtgcgacatctatagtaaagggtatagcttgaaagcaggttaacattggtaccatgagcgatcagatataggcacttgataaacgatgagtggattcaagccagacacttaaccgggctcaagctgaaaaagaagaaggaatcatccttctcactgatacattacacatcattgactcacgcgtatgttacacactcccacaaagtagaaggactaagaggcatagtaacagcttcgttcaagctacgagtcaacaacacacgtttttgcctatggagtggatcttttttacacaaggcttgcttcttaaaagacctactactcattaaccgacgatttta

SEQ ID NO: 106791 - DNA, 167 bp, Arabidopsis thaliana columbia
tccggccaggactcctttacaaattctaacttgcagttatgggtaaagagaagtttcacattaacattgtggccatgggtcatgtggattctggaaaatcgaccacacctggtcacttgatctataagctgggtggtattgacaagcgtgtcatcgagaggttcgag

SEQ ID NO: 106792 - DNA, 422 bp, Arabidopsis thaliana columbia
  unsure (1)..(422): unsure at all n locations
ggtgcttcttatgattatggtgacaacaaaggatttagctcatatccctctgagggtaagcagatgtcagggacggttccgtcttcgataccggtttcgtatggtagctttcaaggaactactaagaagattgatattccgaatatgagagttggtgttatcattggtaaaggtggagagactattaagtatcttcagcttcagtctggagctaagattcaggttactagagatatggatgcagaccctaattgtgctactaggactgttgacctaactggtacccctgatcagatctcaaaggctgaacagttgatcactgacgttcttcaagaggctgaggcaggcaatacagctggttcaggtggaggaggcngccgtaggatgggtggacaagcaggggctgatcaatttgtatgaaa

SEQ ID NO: 106793 - DNA, 426 bp, Arabidopsis thaliana columbia
ggcggatcatctcttactctctctttctcaatctctctctctcaatctcatactgatcccaaacactatccatggattaccaaatctcactaatcctagccaccagcataagctccatcttcctcttgcttatcgtcttcaccgtcgttatgatcgtatgtcgccgtcgtcctccaatccaaaaccatcctcgccggaatcgtaacttccccgaccccgatcccgatctaaacacggaaacagtaaccgaaagcttcgatccatcaatctgtgaaatatccatggcggaactcactatagcaactaaaaacttctcatcggatcttatcgtcggcgaccgaagtttcggtcttgtttattgagctcaactcttaaaccgcgtcgtagtcgccgttaaaaagctcgatcacgacgctttacaaggat

SEQ ID NO: 106794 - DNA, 315 bp, Arabidopsis thaliana columbia
aatgaatccggtggaaaaccacggggccacagttctggtttgggcgccacctgttttggtagctatgattaacgacgcagatctgatcaaggctaagtacgatctgagctcactgaaaacggtgaggtgtggtggagcgccgctgagcaaggaggtgacggaagggtttctagagaaatatccgacggttgatatactgcaggggtatgctatgacggaatccaacggcggaggggctttcacgaattcagcggaggagagccggagatatggcacggcggggacgttgacgtctgatgtggaagccaagatcgt

SEQ ID NO: 106795 - DNA, 299 bp, Arabidopsis thaliana columbia
  unsure (1)..(299): unsure at all n locations
gtcttctcctctgtgttggctcatttacatgggtagatttagttttcgagggttttatggcgaagttcgcgatgttctgttaattgcaatgnctttcttcctttttttttttttttttttttttgggattcaattccaattttccagtgtgatttgatctgaactcgaattcaaattcagtgctactgagttatgttaaaaccattgtccattgatttttttatgttgaaattgaaaaaagggtataccattcccttgtattaagatttgtctttcttagggaatgttttacatttttt

SEQ ID NO: 106796 - DNA, 485 bp, Arabidopsis thaliana columbia
gactatgatgacttagcccagaggacacgagtgctcagcgaaatggctttaaagttcatgaagcttgccaaaaagttctcacttgcggtcgtgttactaaaccaggtgaccacaaagtttagtgaaggctcgtttcaactagcgcttgctttaggcgatagctggtctcattcgtgcaccaaccgagtcattctgtattggaatggtgatgagcgttacgcatatatcgataagtccccttcacttccttcagcttcggcttcatacactgtaaccagtagaggtctaagaaactcatcctcgagtagcaagcgagtcaagatgatgtaatgacacaccacgacacagtcacaaggacatgagtaagctttctccggtttagttttggttcagttcttgattccattaaactgcatgagtatttttcggcccaattgtttcataaagcccaaatgggcaaatattcggtacaaaagaaggtcata

SEQ ID NO: 106797 - DNA, 303 bp, Arabidopsis thaliana columbia
ggcccaacccacccgtcttttagactttgagaccagcgagaacgtatgtattggttacctcgatgacgtacgtaacagtagatccgttagaaggttcggcagagaatccctacacagactagccgagcgagaaccatgtctatcatgaccccagtggacaaaacatcccaattgtagtagtgtatccgagactgctgatctactcgcgaacattaccgttggggcaactcgatcttgaagacactatgggtctgtggttggacagcatcaacatctgtaaccaccttcgatcatggccggttg

SEQ ID NO: 106798 - DNA, 466 bp, Arabidopsis thaliana columbia
  unsure (1)..(466): unsure at all n locations
gaggaggaggatctagagttttaagagctagaggtagtagtagaggaagaggaaggggtgttttagtaattccccatgtagcttcagattttaggaactattcgacctcttcgttggattctcatgtaaatgataagagctttgagagtatgtttgtgaagccacttgnttttaaggaagtggaaaaaactgaagggataccgaaaagggaaaggggtaatgtaggaggaggaaaagatgctaattttggaaatgtgggtgtaagaaaggaaacagaacggtgtttgagtcagactgaggttgagaaggaggcgtggaagctgcttcgtggtgccgtggtgaactactgtgggttccctgtggggactgtagcggctaatgatccaggggatacgcagactttgaactatgatcaagtgtttattcgtgattttgttccttcggcgtatgcgtttatgcttgatgg

SEQ ID NO: 106799 - DNA, 402 bp, Arabidopsis thaliana columbia
gttttagacgaataagtaattagatctgatacaattctttctccagtgtcttattgtgttgttgatcaatccttgagttgttcaatttaaggattcgaacatatttctctacattgctgttatcttgaagctgaaggtgttcctgttgcattgttttaatgagttattcttcatcatgatctttgtgctattgagttagatatcagataagggttctcagttctcatagttttgtatttccttagaaaatatcacatctttgtgttatcttactgttacctgtctgttctctaaggtttctaagattctaatagggttttacttatgcatcttgaagagtatattaagtattaaccttcactagatgcttagtatgccaatgcctattcttctgtaggtttc

SEQ ID NO: 106800 - DNA, 375 bp, Arabidopsis thaliana columbia
aaaaaaaactcttcttttttctatctttcacgcgttgaagattcttgattttctttcttctccttccttacacgaccactgatatgtgtcggtgactgaaaccatctgttctcttttgcctctgatttatcgatatgttttaaagaaaaacggtgtttgaaacttttgtaatttaaggttcatcaaatactcagatcttgtctgagaaataagctgaatctgaaaatgggttgttaaatcatcttttgtatcttctatgggttcacagttagctatctagtacagttacggccaagtctcttagtgaaaacactaatatcacacagtagatctggatgaccagaccaatttgtctacagcacacatcatgacata

SEQ ID NO: 106801 - DNA, 459 bp, Arabidopsis thaliana columbia
tcgccgcgaccggacggatggccgaccacgcgaccgcgcttttggccgtggagtccagcggaaactagatatggttaatcaagatgggacgagaaacactaaacccgtgagaaggtctgtcagagactccaaatacagaccacccggaaaaaagagtcctccagcagcatcgttgaacaagaaccgggtcactcgtagtagtgtatccgagactgctgataaactcgcaaacatgaccattggagcaactggatctcgaagacactctgtgtctgtggttggacagcatcaacagctgaaaccacctccgatgaaggcaggttgggtaggagaaacacgtgacatgttccttagaccaacacaacccaccaccaatggctactttaggaaagtcgccggatgacccctaaaccaatagttactcaagcatgcctgttctgagcaaatcttttactttat

SEQ ID NO: 106802 - DNA, 454 bp, Arabidopsis thaliana columbia
cttcttcatcttccaatttccacaaccatttctcacttcgtcttcctcgtcggtgatttctagggttttgttcttcatctttcaatctcaaccgagaagaacaaatccttcttctgagaaattaacgcttgcaaatggcgaggaagatgtctcttgaagcttttgtgtcaacaatggctccacttatagacatggagaaagaagctgagatctcaatgtctttaacctccggtgcttcaaggaacattgaaactgctcagaagaaaggcacaacgattctcaatttgaaatgtgttgatgttcaaacaggtctaatgggtaaatctcttattgagtttcaatccaacaaaggagatgtgcttcctgctcacaagtttggtaaccatgatgttgttgttttgaaactcaacaaatctgatcttggttcgtctcctcttgcgcaaggagttgttta

SEQ ID NO: 106803 - DNA, 511 bp, Arabidopsis thaliana columbia
  unsure (1)..(511): unsure at all n locations
acgtcgtccgaaacgaggagacacataaaaatgntctgagaatcatgattcggtccaagnctttgtncctgatatttttgaggaaagatcatncgaaaggcttgacgctctctangatttttacccgagcaaaanattgtttcgctcagattggtaccttccgtttggaaaacatgctgtaaacgcggcctctgcgtccatggncggatcatatatagagcaaagtattatattagtacttcattgatgttgttcgatcccgacgaagacaagatttataagaatcttgtcggagtttctgacgagagctatcgtttggctagctctggaaactggctcttgatggcagattctcgtcttgatttctatattgttaacctgttaacgggcaaaaggatcaatcttccaccaatggagtctaaaattcgtggtgcacaagcgagatttgtgcaaagcaaatatttttacaagtcgaggtacatttgctttgacaaattgaaatctattcgta

SEQ ID NO: 106804 - DNA, 413 bp, Arabidopsis thaliana columbia
ccaaaatctccatttctctctcgctctcgctcaatctctcttcacaatgtcgacagtttcttcagatcctgctcatgcgaagaaatcgagaaacagtagaaaagcgttaaagcaaaagaatgagatcgtcgagtcatcaccggtctcagacaaggggaaagaaacgaagtcgtttgagaaagatctgatggagatgcaagcgatgttggagaagatgaagatcgagaaggagaaaactgaggatttgttgaaggagaaggacgagatcttgaggaagaaggaagttgaacaggaaaaacttaagacggagctgaagaaactgcagaagatgaaggaattcaagcctaacatgacttttgcttttagtcaatctttggcacaaactgaagaagaaaagaagggaaagaagaaga

SEQ ID NO: 106805 - DNA, 484 bp, Arabidopsis thaliana columbia
atctttcccaaagcacaatctatcatataaccacataaatggttagtcagaaagagaccgtgtgtgtaaccggcgcttcgggtttcatcggttcatggctagtgatgcgattactagaacgtggttactttgttcgtgccaccgttcgagatcccggtaatttgaagaaagtacaacatcttcttgatttgccaaacgccaagacgctactcactttatggaaggctgatttatctgaggaaggaagctacgatgatgccataaacggatgtgacggtgttttccacgtggcaacacccatggattttgaatcaaaagatcctgagaacgaagtgataaagccgacagtgaatggaatgttggggataatgaaagcatgtgttaaggcaaagaccgtacgaagattcgtatttacttcatctgccggaaccgttaatgtagaagaacatcagaagaatgtctatgatgaaaatgattggagtga

SEQ ID NO: 106806 - DNA, 394 bp, Arabidopsis thaliana columbia
aaagcatgagggggcaaactccatttaaccataaaaccagatcatccacaccaaataaaaaaaagccaagtcctttaattaaaataaacacatgatccaaatctttaaaattttttcaacctcaattccaaaccaagatccaccaatgaatttttataaaaaaaaaaatcaaatcaggatctgcacttaaatgaaatgcctttaataacaagttggtggtaaaaaccccaaaaacctgctccaataaatggtcccacccaaaatatccattggtcgtcccaagcgtggtccttgtttaaaataattccacctccatttttccacccacccaaacttattttttggtccttttacaaaccccaaattcccaaatttaataccaccttcctttttt

SEQ ID NO: 106807 - DNA, 473 bp, Arabidopsis thaliana columbia
gtgatttctcgtcgcaacgtttcttcttgattagctcaagttcaatcccccttaacttaagcgggtgacagttttgaaaaggggcgtcttaaggctgttcatgtcgatcaagtacataacagcaaacgtagtggacagaaacaacgggagaatagtgacgacagcttcaaccgtagagcacacgatcaagaactccctagagtgtggccgtacttgcaatgctaaggcggcggctatcgtaggagaggttttagcaatgaggctgaaagtggaagggcttcaggatgggcaaggaagaggaatacatgctgatgtcaagaaagaaatcgaaaagaaagggtttaagagtcgaactaaagtatgggctgttattaactctcttagaaacaatggtgttacactcattcttgacgatgatgatgatgatgatgagtatcgtgatcgttcttttgagggtcatcggtgaattcaca

SEQ ID NO: 106808 - DNA, 352 bp, Arabidopsis thaliana columbia
gtttgcatacacttgtatatatttatattaacagttcaaaattcttcgaaattgtccccagctcgcagcatataaaaaatgtcttggataaatactattatctggagcttctactacaaccttatcgacatttaattccatccattctaaaaaactgtattttgatgctactttttcatttgcatctgagtgtgtatagatcctgaggaattttgatgtgttgttgaatcggaaggaatttagatcggagtagtcggagatgtctgacatttctgctgacggtggttttttgtcggcagaacaagctacaacgcctgttgcgattccgacgccgtatccgtcattgacggtg

SEQ ID NO: 106809 - DNA, 479 bp, Arabidopsis thaliana columbia
atggaaaatggtgaggtcaaaggggttcgacaactatgacttgaagagtgaaagccgatgcgggcttgcccgatccagaattactgacgaggaccatcctttaagcctagggaaggcgagtatctggaatacatacttccaggatacggagaccatagaacaaatagacagagatgtcaagcgtacacatccagacataccctttttctccggtgaatcatcgtttgcgcgttctaatcaggaatctatgaagaatatattacttgtatttgcgaagttaaaccaaggcatcagatatgttcaagggatgaacgaaattttagcacctatcttttatgtattccgtaacgaccctgatgaagatagttcagtaagtagactctttttgtttcggtgataccctttaaccaactttcaatgataacgtacacagttttaaggtaacagtgctagtctggaccctcaataatttcaagata

SEQ ID NO: 106810 - DNA, 317 bp, Arabidopsis thaliana columbia
agaaaacatacacaaatagcaaaacatggctaacaagctcttcctcgtctgcgcaactctcgccctctgcttcctcctcaccaacgcttccatctaccgcaccgttgtcgaattcgaagaagatgacgccagcaaccccgtaggtccaagacagagatgccagaaggagtttcagcaatcacaacacctaagagcttgccagagatggatgagcaagcaaatgaggcaaggacgtggtggtggtccttccctcgacgatgagttcgatttcgagggcccccagcagggataccagctactccagcagtgctgcaacg

SEQ ID NO: 106811 - DNA, 362 bp, Arabidopsis thaliana columbia
gttggttgggtgatttaagaagaatgggtcagatccagtactccgacaaatatttggaggatactttcaaatacaggcccgttgtactttcttccggaggtgctaacctttaactaaaaatggattcttcggaagggaatgggggcatcgagtgacaaagtcgggatggttcatacgccatcatgcctgaccacaatatgctcttagaggctttactaccacaggcccagctagattgtagtgagatatgcaaatctcctatcttgttatgctctcgaaacaggtttaaaactacttgatgttgtcctgagttttttatggtcatgatttctcaggggatatggagttgtagacactttatg

SEQ ID NO: 106812 - DNA, 320 bp, Arabidopsis thaliana columbia
  unsure (1)..(320): unsure at all n locations
gtttggacatacacacaaaaataaaaaagactttatatttatttactttttaatcacacggattaactcccgcgaagtatgggcggcggcttcatcttctttctccatcatcagaattttccttaaatgggagaaacccaaccaaacttccatcttctcccgtctcggggtttcctctctggcttttattgctgggaatggggaattctcaccgctcttttggtttttaggtggcggatcttttttccttgactttctatttcccaactttccttttcttttttgggattagaatatttntaagtttatttttctggggg

SEQ ID NO: 106813 - DNA, 425 bp, Arabidopsis thaliana columbia
  unsure (1)..(425): unsure at all n locations
gggaattacttagaaatggagagggaagaagaaaacataagtggtaacaagaaatcttcaactaaaacaaaactctctaatttcttctggcatggtggttctgtctacgatgcttggtttagttgtgcttcaaatcaggtggcacaagttctgttgacattaccatactcgttctcacaacttgggatgatgtcgggaattttgtttcaactcttttatggattaatgggaagttggactgcttatctcattagtgttctttacgttgaatatcgaactcgtaaagaacgagaaaaattcgatttccgtaaccacgttattcaggttttattccacctctaattcttgtgactcgntataattttttatttttttggtggtattattgaattttaactttttggttttttttggttgtgtaaaaa

SEQ ID NO: 106814 - DNA, 253 bp, Arabidopsis thaliana columbia
aaaacaagaaaaacacgggaaattttatcatcggcgattatggaataattcgcatagttaaaaaaaggcgccggacttttagtcactgaaacccatagagcccaccaaccttcctactctgtgttgcgacgaccgaactcttcgaggtttctttctccacatcactaatctaaagaagttatgcgctgatttcaattgcattgaacaccacgaaggtaaattcttctatatgggtggtactgcacctgcttat

SEQ ID NO: 106815 - DNA, 431 bp, Arabidopsis thaliana columbia
atgaagaggagtttcattggctgataaagtactcgcctctgcacaatgtgaagaggccatgggagcaacaaaccgatcacttagttcagtatccatcaactatgctactgactgctgatcacgatgacagagttgtgccacttcactctttgaagttgcttgctgtccgtttccagactttatttctttaatgtttaatttattttcaatcttaccttaaatagccagcagattgttaaaactcgtatgtatacatctgcagacgttgcagcacgtgctgtgcacaagcttagacaatagtcctcagatgaaccccataattggtcgtattgaagtcaaggctggccatggtgctggtcgcccaacccaaaagatgattgatgaagcggctgatcggtattcgttcatggcaaagatggtgaatgcttcat

SEQ ID NO: 106816 - DNA, 266 bp, Arabidopsis thaliana columbia
gtttaaagaaaaagctcatatcctcatacgtttaatactgcttcgatcatacctgcgagaaacatcgtcgacggtggagcgcaatactaggcctattattccaacatacttcagggggagctcgatgagtcatatttgactttgatcttaaagtgattctgctcaggctgactaatgggattcaacatgagcactgaccatggcgcagccacttcatccagactaattggcgcttgcaaaggtcatgcttgctgactacctgtcgc

SEQ ID NO: 106817 - DNA, 302 bp, Arabidopsis thaliana columbia
aattctgtttgcacttagaatggcggatcattcgtgggataaaactgtggaagaagcagtgaatgtgcttgaatccaggcaaattcttcgatctttgaggcccatttgcatgtctaggcaaaacgaagaagaaatagtgaaaagcagagccaatggaggagacgggtacgaggtgttcgacggtttgtgtcaatgggatcggacttcagttgaggggtctgtctcgattcctacatttcagaaatggcttcacgatgaacccagcaacgggacggttcatttctttcctgatattttttttt

SEQ ID NO: 106818 - DNA, 436 bp, Arabidopsis thaliana columbia
  unsure (1)..(436): unsure at all n locations
aaaactcccaaattaattttgcttaagcagcagcagaagaagaagcatggcggaacaagaattacagagaatcaatgagaagaagccatggcaagttctcgagttctacagtggaatcggtggaatgagatactctttaatggcgtcaggcatcgtctcagaagtagtagaagcttttgagatcaatgattctgctaatgatgtttatcaacataatttcaaacatcgtccctatcaggggaatattcagagtctcactgctgctgatttagataagtataatgcagatgcttggcttctttctcctccttgtcaaccttatactagacaaggccttcagaaacactctggtgatgctcgggctntttcgtttctcaggattcttgagcttataccgcatacaacaaagcctncacaaatgttatttgtagagaat

SEQ ID NO: 106819 - DNA, 350 bp, Arabidopsis thaliana columbia
actggtcgtaggccgccagcgtagagtatagaggatccaagactactgcctgcggcatgctacgtcatatatagtgtatagtgaaaccaaaatacaggccactggccgacaacgtacaacctggggactgggaaaaccctcgcaacacaaaactcaagcagcacatagcacattcgccagttggcagctgacctaataggcaagaggcgagcaccgatcgcaacagctaacaattgtgcatggtgaatggcacacgcgacgcaccctgtcattaagcattaagcgcgtggggtgtactcgcaacgcgcacggtgaactttacagttgccaagggcctagtgctcgcgctt

SEQ ID NO: 106820 - DNA, 297 bp, Arabidopsis thaliana columbia
cacgcgtccgttcaaatgctcgaaaaccgagctaggaacgataaagatgacacgaaattagtctctagggggatgtatgacgatggggacgatagcgttcttacaaaagaagaaaaagatgtgaggcttcataggaagatagatgcaatgatcaaaagagaacggtccatggcctatgcttattgttaccagttatggaaaaacagtccaaagtctgctcaggacattagaacaagtgggttcccactttggtggaactgggtggaccggtagaagaatcaaaacctttctgttagg

SEQ ID NO: 106821 - DNA, 443 bp, Arabidopsis thaliana columbia
  unsure (1)..(443): unsure at all n locations
gtctgttcctaaacattttggaacgtcctgttcccgtagaaggccagcctgaagaccctgagcttagaaaatcctggggatggtggaaggccaagaagtggattgctcatatcttaaacaggctatacactcggtttggagatctgaaactccagaatccagataacaaagcctttgctcaaatgttccagataaactatgcagccaagatattagagtgccacctgaaattgttgaatgccattcgtataggtggatatcttccggatagagtcatcaacctaattcttcaatatctaagcaacagtatctcgaagagtagcatgtacaacttactgcagccccaccttaacactctcctatttgaaatagttttcccacttatgtgtttcaatgataatgatcaaatgctttgngatgaagacccgcatgagtatgtaagg

SEQ ID NO: 106822 - DNA, 441 bp, Arabidopsis thaliana columbia
gttagtcaccaaaaaaaaaaaaaaaacacaaaaagtttcaatggccgcctccacaatggctctctcctcccctgccttcgccggaaaggctgtgaacctttcccccgcggcatctgaagtcctcggaagcggccgtgtgacaatgaggaagactgttgccaagccaaagggtccatcaggcagcccatggtacggatccgaccgagtcaagtacttgggtccattctctggcgagtcaccgagctaccttaccggagagttccccggagactacggatgggacaccgctggactttcagctgatcccgagacattcgcaaggaaccgtgagctagaagttatccacagcaggtgggctatgctcggagccctaggctgcgtcttccctgagcttttggctaggaacggagtcaagttcggagaggcggtttggttcaaggc

SEQ ID NO: 106823 - DNA, 358 bp, Arabidopsis thaliana columbia
gtaacggaatctattgaacttatcacacgctgaatcggcgaagaagaatcaacgatgactgacacaaacatgcatgtggtattgaaaaactacaaagagtggtttccctgaagaatccgattctgatttcaaaaccaccaccgcttacataaaactttctggagggtctaactcaactgctggtagaataatctctacttgatatgcgatccttacatgaggattctcatgtggaaacctgatactttcactggtgctcttgctcaagcttacgctgctcaggaggcaatctctgcgtatggtgagtctagagttatagaatcgagccatgcagattacatgaaacgtgacttactct

SEQ ID NO: 106824 - DNA, 218 bp, Arabidopsis thaliana columbia
gatctattcactctcttggtgagctacttctttcacggtcaaaatttccactatagacgactctggcgacggcctttgtaaccgaatcaagagatgacaagtgatacatggcgcggctcgtcttataagcacaccgttacgaatgggaagtcatattgatggcaaaggcacatctatgcgggagcgcactggtgctcaatcttaaactacgtgatcga

SEQ ID NO: 106825 - DNA, 303 bp, Arabidopsis thaliana columbia
gaatctcccaaaggatcttagaagagatatcaaacgtcatctctgtctcgcgttagtccgaagagttccattgtttgagaatatggatgagaggctgttagatgcaatctgtgagaggcttaagccatgtctgttcactgagaagtcgtacttggttcgtgagggagatccagtcaacgagatgctcttcattatccgtggtaggctcgaaagtgtaaccactgatggcggtagaagcggattctacaaccggagtttacttaaagaaggagatttctgcagaggcggggccaccgcatgctc

SEQ ID NO: 106826 - DNA, 475 bp, Arabidopsis thaliana columbia
  unsure (1)..(475): unsure at all n locations
ggaaattccccgggtgcgacgccacgcccgtccggttacctgggtgtcactgnntcccttctnntgggttgtacctnntcccaagtcaagggcgtttcaagagtccgtgcgcgtgttttatttagagtgcnnaagtagcgataccaatctctctgnnagggaatcaaacttctgcnttaggctggtacctctaggagggttcaaatgattnnntcttggagttatatnnntcgtctatnntaaaaagganngtttgtgtaagnnnaaagcttactcctcaggcaccccactcaaagaagaaattcttgaggatgtagaaaaaccagacccacttttggaaagagaaggaaggtgctttctctggaaagatttggattgaatagnnnacttttgtcaagaatattgatatnatccaagannagcgctcttataagctacccatttcttgaagcttgannagctgctgtcaaggtct

SEQ ID NO: 106827 - DNA, 432 bp, Arabidopsis thaliana columbia
caaaaaaaaaaaaagtacatttcctttttttttgttcttaaatttttctgtggttccggtcaccgcagctctgtcatcatcttcttcttcttcatttaccaatctgaaatctactcagattctttgtgattttctccttaaaatctcgatctgtatcgtacagtgacttgtgaaattaggatcgttgtgtctgtgttttctggttacagtttgtaaaatttgaatatttgtgtgtgaagtcagattcagtttcgtgagctgttcggatttggtttgggggtatatatatagcgttgtgtgatctatttggggggttttggtttccctttttttctctcttgtgaattcgtttattggtgtatcgtcggcccgagtttatcggaactccgggtctgacgtgagttttccaaatggcggcgtcagagagatcga

SEQ ID NO: 106828 - DNA, 312 bp, Arabidopsis thaliana columbia
aaaaaaaaaaacacaaaaaaagtttcaatggccgcctcaacaatggctctctcctcccctgctttcgccggaaaggctgtgaacctttcccctgcggcatcagaagtccttggaagcggccgtgtgacaatgaggaagactgttgccaagccaaagggtccatcaggcagcccatggtacggatccgaccgagtcaagtacttgggtccattctctggcgagtcacccagctaccttaccggagagttccctggagactacggatgggacacagctggtctatccgctgaccccgagacattcgcaaggaac

SEQ ID NO: 106829 - DNA, 347 bp, Arabidopsis thaliana columbia
caccggttagacacttcgtaaaccgaaccactttgatccatggaggattacatgttttagggattccaccagctgatgatgtgtaaactgatattttacaactaaatcaagaagccggtgtacaacaactcacacggccttatatatttacaacctcaaaacgaatgaagaaaggagggaacatcgagctgcgtccagtggtagaggttaacccatgattcacgcattgtggttcacactcagacttctgtttgatttgtgaatgatgggttccgatgggcgtaatattggcagaaattagttaaaaggcacccttattcaaggagctacttttgatgttcaagccc

SEQ ID NO: 106830 - DNA, 449 bp, Arabidopsis thaliana columbia
gtcttttcctcttaattttttctaggaaaattctcaaatccatctctgtttacaacagaactacttccaaagttgatgagaccgtcgaacgagccaaaaaggaaggcaatcttcctctttacggcttccatgaccccgagtcttttgtcaagtccattcagaagccacgcgttattatcatgcttgttaaggctggttctcccgttgaccagaccatcaagaccctctctgcttatttggagaaaggtgactgtatttgtcgaaggtggtaatgtatggtttgagaactctgagtggagagaaattgccttttttttataacgttttttttttttttgttttgtttagcttttttatattttttttatattatttatatttgattaatttttttatctcatattttctatatattattatttttatttattttagattttttttttttt

SEQ ID NO: 106831 - DNA, 423 bp, Arabidopsis thaliana columbia
gtcatctgccatagattcacaagctgtgtaatattccacagcatcactatcatccctctctatgtcatctgccattgtgtcactatcatccctctttatgtcatctgatacaggtaaatcctctgccatgattgtagacgttacacgctttcttttcgtcttcttcttcaaattttctcggctaggaagcccagcaagatcagtgttgcgtggtgcaggttgtactgctttactggagccaacacctggcaagaaactggatacactaaaatcattgctgttcccatttgccataagtgatttccaggaagacttttgggaccaggaaatattgtcgattgactgctcaagatcttttgttctgctcggttcatccgatgatttatctggtaccacttcagaaggcttcttctttccacgtat

SEQ ID NO: 106832 - DNA, 332 bp, Arabidopsis thaliana columbia
agaaaacatacacaaatagcaaaacatggctaacaagctcttcctcgtctgcgcaactctcgccctctgcttcctcctcaccaacgcttccatctaccgcaccgttgtcgaattcgaagaagatgacgccagcaaccccgtaggtccaagacagagatgccagaaagagtttcagcaatcacaacacctaagagcttgccagagatggatgagcaagcaaatgaggcaaggacgtggtggtggtccttccctcgacgatgagttcgatttcgagggcccccagcagggataccagctactccagcagtgctgcaacgagcttcgccaggaag

SEQ ID NO: 106833 - DNA, 389 bp, Arabidopsis thaliana columbia
caatctcttgtgaaggctttgttgaagaacacgaacaatccgagattagcatggagaatcttcaagaggatattctcttctccttcagaagaaagccatggcatttctttagatgcgactcctacaatcgctcgtatcctggttcgagccaaaatgcacgaagaaatccaagagcttcacaatcttatactctcttcttcaatccaaaagacgaaactttcgtctcttctctctgttgtatccatcttcgcgaaatcgaatcacattgataaggcgtttccgcagtttcagttagtacggtcgcggtttcctgagaacaaacctagcgtttatctgtataatttgttgcttgaaagttgcataaaggaacgacgtgtggagttcgtttc

SEQ ID NO: 106834 - DNA, 384 bp, Arabidopsis thaliana columbia
caataacaacaattcgcaatgatttgagccaaatctaaagggtacaaattcttaatttcaaagtcaatcaacaacatcgaaggaggtttttttttggaagaagaacttgaatgtgaatttttatggagttgatgaaattgttcttctagatgtttgttttggggatatgaacaaagaagaatctgagtttaatacactatgtggaaacagattctgagtaagcttcctaagaagtcttcttctaagaaccattcttcttcatctagttccacttcaaaaagtagtgataatggcgccagtaaatcgggtaattctcaaacccagaacgttcctcctgtaaaaccttttgttgattaagggtttaaagaagggaattggaaggga

SEQ ID NO: 106835 - DNA, 405 bp, Arabidopsis thaliana columbia
cccacgcgtccgcccacgcgtccgagcgcgaggagcttccacgtgttactacacgaatcttgtttagtaaaaagcgcagctgcaaaaaaaatcgagtagagaagaagtaggcagacaaagaagaagaagaagaagttctcggcgtgcttcaatggcgatatcagtagcagcttcgtcctctatggccgtgatggttccacgtgttcccgccgtatccacccgttgctccgccgtcccttatcttcctcctcgctcctttggccgatcctctttcaccgttccgttgaagcttgtttcaggtgacggatttatttacataatctctctttctgggttcaatggaatctatacattcccgagaaattgtctgaattgtcacaaattgcctcaaattagaatattccg

SEQ ID NO: 106836 - DNA, 337 bp, Arabidopsis thaliana columbia
gagagagagactccattgttgttttgttttcactgaacttctcctcaaacaagagtggcgacgacggttacactcaaatacttcaccggtacttcgtaattatcaacgtagcatacatacttagtctctcatgttccgtcatcactttctctacctcaacgacggacctttcttcgagtaactcgtacctgagccactttcaaacttttcaaccgttaactccgtgttgccgtcattgattgtggaccagcaggcggtgcagcttgtgagtctttagcacatggaggaatcgtgacgattctaatctagtcgatgatggacaattgcaagcctttgc

SEQ ID NO: 106837 - DNA, 415 bp, Arabidopsis thaliana columbia
cagatctcgttaaacctagaaacctcgagaaaaaccgtatcaatggcgccgaaagcagagaagaagcccgctgagaagaaaccagcttccgagaagccggtggaggagaaatcaaaagccgagaaagctccggcggagaagaaaccaaaggccggaaagaagctcccgaaggaagctggtgccggaggcgacaagaagaaaaagatgaagaagaagagtgtcgagacttacaagatctacatcttcaaggtgcttaagcaagttcatcccgatatcggaatctccagcaaagcgatggggatcatgaacagtttcattaacgatatcttcgagaagcttgctcaagaggcgtcgaagcttgcgaggtacaataagaaacctacgatcacttctcgggagattcagactgctgtga

SEQ ID NO: 106838 - DNA, 406 bp, Arabidopsis thaliana columbia
cttcggtcgatacaagactctaagtgtcgcggtcatcgcatgttttcttggatcatttgtgatactattgactgcagcagtgccacaactgcatccagctgcatgtggaacagcggcggatagcatatgtaacgggccaagtggaggccagatagcgtttctactgatgggtctcgggttccttgtagtgggagcgggcggtattagaccgtgtaacttagcttttggggctgatcagtttaacccgaaaagcgaatcagggaaaagagggattgacagtttctttaattggtatttctttaccttcactttcgcgcagatcctgtcgctgactctagtcgtctacgttcagtctaatgtcagttggacgatcggtctaaccatccctgccgttctaatgtttttg

SEQ ID NO: 106839 - DNA, 407 bp, Arabidopsis thaliana columbia
ctcggcatttggtgaatcactatgacaggctgagacaagaagtcgaagctcaggcaactgatgtactgaggagaagatcaaagttgaaggaatctgatatttctgaagaagcctacataaaacttaagaattctgaatcgagattggctgagctcaaatcaagtatgaaaactcttggtaaagaagctactaaggccatgttggaagtcgacgatcagcagcagaacgtaacttctcagcgcctccgtgctctggttgaagctgaaagatcatatcatcgtaatgctcttgatatcctcgacaagctacattccgagatgattgctgaggaagaagctataggatcatcaccaaagtcactacctttacatatagaggatagtgcttctcttccccaacaagaaccg

SEQ ID NO: 106840 - DNA, 408 bp, Arabidopsis thaliana columbia
caaaaacagttgggggaagaagaagaagatgaaacgacgaagaacccttttataaagtctcaatcttctaatccaagatctgccctttttcagattctatctcaaagctttcctcgatcttgtgatgtattgaagccggagactgagagagatgttgtgcttcaaaggctcggttaagcggaagaagcaatccggttctgttccggtttatctgaatgtctacgatctaactcctatgaatgcttatggttattggcttggacttggtgtttttcattctggtgttgaagttcatggagttgaatatgcatttggagcacatgaatcatcaagcacaggtatttttgaagtggaaccaaagaagtgtcctggtttcacgtttaggaaatcgattcttgtggggaaaac

SEQ ID NO: 106841 - DNA, 409 bp, Arabidopsis thaliana columbia
ttaattattatcatacaataacagcgtttcaccattctcttttcaatattttcagttactttctataagaaccattcacttattcttttttctctctatctgtgattatggcttcctctatttccgctgctgaagtgaaagttgtcccagaagagtataatttcttgcaaaaacatgtcgccttcttcgacagaaacaaagatggtatcgtttatccctcggagacatttcaaggatttagagcaatcggatgtggatatttgttgtcaacattcgctgctgttttcatcaacatcagtctcagcagcaaaactcgtccggggaaaggattctcattctcgtttccgatagaggttaagaatgtccgcctagggatacatagcagcgattcaggcgtttacgacaagga

SEQ ID NO: 106842 - DNA, 399 bp, Arabidopsis thaliana columbia
atttaacctctttcctttttttcttgttttcagactcaaaaactccaaccaaaatttgcttattgttgtatagattgaactttgcacttagctcccaaagtccaacacccgattaaaaactcccataaagagctaaacacgaaacctaatttctccctacacacatctcaaatctctccaattttgttcaaagctcgaattctgttcaaagctcggatttttaattgcttcaatgggtgagaaagattcagaaacagctccgatttgggggaaaactcgagagagagagaggagcaacaacaacaatatacagccaatggatttagagtcgtcctcttctgtatctgggcaacaacgatcgttgactcagagtcgaagttcttatgaagaacgaggtag

SEQ ID NO: 106843 - DNA, 406 bp, Arabidopsis thaliana columbia
aaaatctctaatagattatcctaagatcaaacaatggcaacaaacgcttgcaaattcctttgcctagttctcttatttgcctttgtcacccaagggtatggggatgattcttattctctcgagagcttatctgtgatacaatcgaagaccgggaacatggttgagaacaaaccggagtgggaagtgaaagtgctgaattctagtccctgctatttcactcacacaacgttgtcatgtgtccgtttcaaatcggtcacacccatcgacagtaaggttctatctaaatccggtgacacgtgtctcctcggcaacggcgactctatccatgatatcagtttcaaatacgtatgggacacaagcttcgacctcaaagttgtcgacggctacatcgcttgctcttaaaccc

SEQ ID NO: 106844 - DNA, 404 bp, Arabidopsis thaliana columbia
ggaaaattcttcgcagcttgagagtaccagggacctaattatgggtgcagcaaatactaatgaagggagaggtttaggatccggcttgtttggttctgctaaggtttctgcggctgttcggatctctaagaaaccaagcagtggtttaggagctttgctgggaaatgcagcctccaagaagaaatctcgaactgatgagaaggtgaaggaagatgtgaagctcgaacagataagatcatctgtaaacctgtcattccattcgtttacagagaaagttcctgactcaaagtcaacttctgaaacatctccgaaagtttatgggaagcctgaagagatgtccagtactatgccagcctctgtttccaaggaagatggtgtgaaagagttgaaagatgattcagaag

SEQ ID NO: 106845 - DNA, 281 bp, Arabidopsis thaliana columbia
tgttgtttttttttttttttttttttgttttttttttttttttttttttttttttttaaaacttataaaaagattccaataaacgtaaaactttgaacaataaaagaaaaagaaaaaaccctattttccgaaacatacaataaaaaggaagtacccctgagaagaggtccggtctaacacaaaaagccaaataaagaggcttggaaattattgagacctatgttttatggaaaggccaagaactttttaatggaaaatattattttgtaaacaagtttgaa

SEQ ID NO: 106846 - DNA, 407 bp, Arabidopsis thaliana columbia
cttaaatacaccacatctgtcatatccgacggccaccatccacggccatccacaagccgcgggacacaacgtctatacattcgtctcaacacattacatttcctaagctcacatatccactccttaaacaaaacactctctttaaacccgaggatacttccggcaactcgaaaacgttaccgccatagaaacaacaattcatcttcttatttcgatttcacatacgctggaatcgaatccgcttgccaacacgtttcagaggtcgcggcttaccgtttgattttcctcgattcaaactctgttttgtacgagagcctctacgtaggagaagttgcgaacgcgaggatcagaccagcgttacgaatcatgaaacagaacttaacattgatgtcagcgattcttgcgga

SEQ ID NO: 106847 - DNA, 309 bp, Arabidopsis thaliana columbia
aaaaataaaaaaaaaaaaaacaaaccataaatttaaaaaaaaaaaaaaaaaaaaaaaaaggagaggtgggttacaggaaaaaaaggctacacacgcacttgtgtggggggccagtttcttattttgtttcgcccgattgacagttatttggctgagaaccagtttgggtgtgcctcacaaaagaagagtttctctgatgttaaagctgctgcgactccacctgtcaagcaaggagccgactttcttgaaggtggtacacaaatgcttatatgccaggctgtggttgcagcttgcataggggccaatttt

SEQ ID NO: 106848 - DNA, 434 bp, Arabidopsis thaliana columbia
tgccgtttcgttttttcctttctcattcaattcaagaagaagaagaaaatctccgcccaaaaagtttcttcctttgaagtctttaagccctaatctatcactgtctgtgaatcaacgcctccctgcgtttgtttctcagttgaaaaaaaaaagataatgatcgcaaaaaacttcctccttttgctctgtttcattgccttggtgaacgttgaatcgagccctgatgaggcggtcatgatagctctgagagactccttgaagctatctggaaatccaaactggtccgggtcggatccttgtaagtggtctatgttcataaaatgcgacgcaagcaatcgggtcaccgcgatccaaatcggggacagaggaatctcaggaaagctacctcctgatctcggaaagctaacatctttgacgaagttcgaggtcatgag

SEQ ID NO: 106849 - DNA, 426 bp, Arabidopsis thaliana columbia
atttatttatgtttctgtatttaaaaattcgtttttttctgtcaatcatactgttttgtctcagaataaaaaaaaaaaaccttcactgttttgtgtggtgtggttacgaagaaagaactcttctccttctccttcttattctttctcttcttcttctctctctctctctctctgagtgtctggttacatttggcgcgaaaagttcttcactttatagcttttttatctctttaattatccgacagcttcgttacaaataaagatgtcagtggtaacaatcttgatactggcattaaccaagtgtattcccatttacgcaaacgttcacggcgccgggaaaatatgcgacgaacttggccggcgatcattgagtacaagaccacacagtgtctccattacagattttggagctgttggagatggcaa

SEQ ID NO: 106850 - DNA, 281 bp, Arabidopsis thaliana columbia
gagagtacgtatcgtaggtatcgtgtattggctgcgactacaaaacctcaccattttcagagatctctcctgtctccgccgcgtgtttccgcgcgaacgatatttggaatctgcgccgtcatgtttcacaaatcccctcaatggtctacaatgctcggcgggggcttaggggtgccaagtgaacggtgtgtttgcgaggcccattgtttataggaacgggcattctgctgaccagcgagcccaggaaacctcatcacatacttagctggaactttggggat

SEQ ID NO: 106851 - DNA, 429 bp, Arabidopsis thaliana columbia
cgacgcgctaatcatcattctaaatggaaggaagctatacaatgaggaactgagacgcagagttgaagctgaagagatgttggggaaagagaaagaagaacacgagagaactaagaaggagatcgaagaagtgcgagccattgttcaggatggtatgcagctgtacaacgagcagctgagacataggaaagagatggaggaatctatgaagagacaagaggaagagcttgagaagacaaagaaggagaaggaagaagcgtgcatgataagcaagaacttgatgcagctatatgaagacgaggtgaggcagaggaaagaggcagaggagttggtgaagagaagaagagaggagctagagaaagtgaagaaggagaaggaagaagcttgctctgtaggacaaaacttcatgaggttgtatgaagaagaagc

SEQ ID NO: 106852 - DNA, 150 bp, Arabidopsis thaliana columbia
caggtataaaccgaaggcaatgttatatctttcaggctagcctacaatattggctggggaaggagctgtaaacgttgcacctgaagcggtctctagagcagggtttcttactagttcatagaggagaatcacaaggactgcagcttgtaa

SEQ ID NO: 106853 - DNA, 418 bp, Arabidopsis thaliana columbia
agcaatcatgggaaagtaaataacagagagcggttattgatgccaaaaagagagtcaatgcttccgagagaatgggagaggaacaatgatgagccatacaaagccagagtagtttccattcacacaggagaaatgactcagatggattggtttgacatggaactccctaaggctgaagttttgatactacacttctcttctgacaagtatgtattgcctcctttcattgctaagatgggcaagcttacagcgctcgtgatcatcaacaatggtatgtctcctgcgcgtctacatgacttctccatctttaccaatttggccaaactcaagagtctctggcttcagagggttcatgtccctgaactctctagcagtacagtgcccttgcaaaacctccacaagctgtctctcatattct

SEQ ID NO: 106854 - DNA, 395 bp, Arabidopsis thaliana columbia
gtgccaacaacaaaccaaaaccgttcctttctttttccatttttcttgtttttttttgttttgtttttggagttgtgtttcacctgttgttggttctttagttcgtcttctgggttaaacaaagaagatcggttctgtttttatttttattttgaaacaagaagaagaaagcaagctacgatgatgtttcttgctgacgccaatagataaagacacgacttttacaaagcttaggacctgcattctcaccgtaattagctcttcttctcaatttctccaaataaatttgtgtgtttttaaagtgtgtggtgcaagttatcaaaaaatgtcgatctttctgcaagaactggacgagaccattcaccgtatgacaacaacttctatttgtttctggt

SEQ ID NO: 106855 - DNA, 416 bp, Arabidopsis thaliana columbia
tctctttctactcgtgactgatgaagagaaacagagagcataactttatatccagccgattttttttcaaatttcttaccttttgctctcactaaagccatgttcttacctttatagtgagtgttatctaaactcttttgggtcttttgcaaaagaaaccagttttcaaagttcaaaattttgtttttaaaaatggagaatttagtgaagagctgcgcagggatcgagaagaaaagaagcaatttgactccatcgatggaagatatacttacagagtcaaaggagagaagcagcactagcggagcgagctacgaaagctccttcaccaccaccgtcgcttcgtcttctccaccaccaccaccgtcgcagattctgggttggccgattagaaaagcttcatttcggaaaaattcgaa

SEQ ID NO: 106856 - DNA, 310 bp, Arabidopsis thaliana columbia
aaaaatacatcgtgcattcactatttatagtcttaaagaagaccagaattgcaaaggggtcaccaaagaatcagagatgggtgatattcaaagaaatgtgataaaaattggatgaaaagttggtcttccccctaatgttgaaactattggaagagctctgttttgctccttcttcttgctttttttttggcatgattacatggtgctcagattcaactggaatggaacacagtattaatggtgcccaaagttttgctaattagggtacctgattaagcattattatgacagataatatcatagttagatc

SEQ ID NO: 106857 - DNA, 421 bp, Arabidopsis thaliana columbia
ctgaaatcaccatgagtatggaagcaacggagtctacaagatctctctgacgacgccgattacgccgcttctcaacaacaaggatcggctagtatgatgcgtagcgatagcggaaagagaagtttacaaagtgaacacgaagacgctgtattgatttatttgaaagataacgttgcaattcatcctacacagttcgcatctgagaggattagtggtagattgaagttgactaagcaagactctgttctctttctgtcgtggattccgtacaagggacaaacatcaaatgcaaagctatcagagaaagacaggagtctttataccatcaccgcggttctcgttactgaagtgaggtccattaggagacacactcctgctctcggatggcagtatgtaattgttggcctgtcttctggacttg

SEQ ID NO: 106858 - DNA, 348 bp, Arabidopsis thaliana columbia
ttttattttattttcttcaaaagaaaacagaaatatagacaagttattgtttttcattgcatggaccggagagccaaactgacgaaagtttggtcctcatgaaccccaaaggtagaaccaatctcaaccgttcaatcatcggtggtcatgatcattgcttgattctacaacctccttcttttctggtacttcttttcaagcaccgggggtttaaaatcctcgggggttaaggcaattaacgggggttaaaacgtttccgaagatggttttgggttggaccaaccaatggcattactaatgaccgtcctcgcaagggtttcctccttcctggggttttcttaagctata

SEQ ID NO: 106859 - DNA, 328 bp, Arabidopsis thaliana columbia
ctcacgtgtgggtctacgcttttggttttgttagatgggactcctttccaaggaaaggatcagagacgatgtgaaaccaatctatcacatctattcatggcctcaagcctacatttacgcacatcacggaatctatgtttgcactggacaagtcaaccattttactcgtggagatggtcaccagactggaactggggctttcttggacaacatcactgggagttcatctgacaacaatggggacagcccatgtcctgattagggagaccgatccaatcctggtggtggtgtatgttcctgccttggctgttttcttgccggatgtgtt

SEQ ID NO: 106860 - DNA, 420 bp, Arabidopsis thaliana columbia
gaaaccgtcaccctaccagtagtctcgacatcatgaaagttccagaagagctcacaagtgattctctacgagatgtcgatgacatatctttgagattctccacagaaggagatttcactctcaacggagaactagatgcaggtaccagacagaagaaactagtcgatgccataagtcaaatgaattcaatgaaaggttgctcagctgctatctacagccctggtagaaggcagatgctctttgtggttgctgttgattcctatgatgacaacggaaacatcaaagcgaatttgaacgaaatcatcaagaatatgataaaagctgcagatttgacatcgggtaaaggaaaaataggttttgtgctagcctcaggttcaagcttacaagaagttgtggatattacgcaaaaaaacctgatta

SEQ ID NO: 106861 - DNA, 177 bp, Arabidopsis thaliana columbia
  unsure (1)..(177): unsure at all n locations
cggaatnntcccgggtcggacccacgcccgtccgattccgaatttttattctttaattcaggccggtaaataaatggggagaaaggcganttcgagagacaaccgtncgttcttcttgggagcatcnntccgaccttnncttcttcttcttcgcacacattacgaggcgcttctcta

SEQ ID NO: 106862 - DNA, 424 bp, Arabidopsis thaliana columbia
aaaaaaaagaaaacacaaaaacaaagattataatggcttcctcaaccatggctttgtcctcccctgccttcgccggaaaggctgtgaagcctgccgcatcagatgtcctcggaagcggccgtgtgaccatgaggaagactgtcgccaagccaaagggtccatcaggcagcccatggtacggatctgaccgagtcaagtacttgggtccattctccggcgagcccccgagctaccttaccggtgagttccccggtgactacggatgggacaccgctggtctatccgccgacccagagaccttcgccaggaaccgtgagctagaagttatccacagcagatgggccatgctcggagccctaggctgcgttttccctgagctattggctaggaacggagtgaagttcggagaagcggtttggttcaa

SEQ ID NO: 106863 - DNA, 417 bp, Arabidopsis thaliana columbia
  unsure (1)..(417): unsure at all n locations
cgaagcaggattcagcgacggaggaggagaaaatgtgatcggaaaggattcgttctccgttgaacagagtggtgattgctactctcgcaacaatcacccatattttgatcttcttctccagaatctcccattccagtttctgcatctgtgtagaggttagcttctcgaaccctagatgagacaatgtgtcgacgatgatctttttgcgaaacttcttgtagattttaacacaatccttctcgtaaccagaggagatcatgcaatttgctatcatcttcaaatcaacaatagcatcagaattccctcctcctcctatgtctntacctaattccgatgaggattcagagtaaagctctccatctgatgaagaatccgaagcggttccacttgatctcgaaggtatgttggattcagaag

SEQ ID NO: 106864 - DNA, 147 bp, Arabidopsis thaliana columbia
gattataatctctacaacacttccatttttttgctcttaaatctacttaacctcggcctcacctaagccacgggggggactatccaacaattcatatggatcgttaaattattaaatgtattttatttacaatgcctggacactacc

SEQ ID NO: 106865 - DNA, 405 bp, Arabidopsis thaliana columbia
tcgatctctctttcatatacaccatattaaacgaaccagttaattatgggtttaatgtccgggaaggtgtgtgtgtttatctttgtattcgctctagtcgctgaattttcgttcggaaatgttgaggttaacgacgacaaacactttttccacaaacctcgtccatttttacacaaacctcgtccattcctccacaagcatggcatttacaagaaaggtttcggtaagggtttgggcggtggaggcggtctatgcggcggaggtggtctaggaggcggtggtggcctaggaggcggtggaggtttaggcggtggtggaggtttaggcggcattggtggtggaggaggtcttggaggaggttatgttggttggggccattacttgatgagtggtgaggctcatgct

SEQ ID NO: 106866 - DNA, 407 bp, Arabidopsis thaliana columbia
tttctctcttctctctctcctacggctgttgaaaccaatggcatttctccacttcgccggaatttcgatcggaagatgaatcgtctccttcgtctctcttcgcttaatcgtcgatcttcttctgtcgccgtctaattgcaaatccaaatcgttttttgtatggtatagagatttggtgaagaactagacgcagcttagaggaagcttttatatttattgaagcttagggggaaacaatgtcaacaaagggagaacatcatacagttccactttctgtgttgcttaaacgtgaatcagctaatgaaaagatagacaatcctgaacttatacacggccagcacaaccaaagcaagaaaggagaggattttactcttgttaaaacagagtgtcaacgtgttatgggcgat

SEQ ID NO: 106867 - DNA, 414 bp, Arabidopsis thaliana columbia
gtacaaggaaaaagagagtgagcattctagtttggtggagttacataagacccatgagagagaatcatcaagtcaggtgaaagaattagaagcacacatagaatcatcagagaagttggttgcagatttcacccaaagcctgaacaatgcagaggaagagaaaaaactgctatctcagaaaatagcagaactctctaacgagattcaagaggcgcagaacaccatgcaagaactcatgtctgagtctgggcagttgaaagagagccacagtgtgaaagagcgagaacttttcagtttgagggacatccatgagattcatcaaagagactcatccaccagagcaagtgaattagaagctcaactggagtcctcaaaacagcaggtctcagatttgagtgcgagtctgaaagctgc

SEQ ID NO: 106868 - DNA, 404 bp, Arabidopsis thaliana columbia
atacagtggagatagtggccagaaagttcctttttcagaggcaaccggcaacgtaaccactccttacctgctgcggctcacaaacttaatccaccaattttaccatgctttagaaccttgggcatatatcaatggagaagcgagtcaaatacaagagctttgtgaaggatccaggaactcttggatccctcgaattaagtgaagtgatgctgctctttgtcccaaatgatcctaaatcagatttgaagcttaaagttcagactcacaacatcaaaagtcagaaatataccaaagaaggatcaaataaaccttcttggctcaatctgaccagcaagcagggaaggagtcatatctttgagttttgaaaataatcctgacatgcatgcttgtcgtgatttcatcac

SEQ ID NO: 106869 - DNA, 410 bp, Arabidopsis thaliana columbia
  unsure (1)..(410): unsure at all n locations
cgattccattagcgttttctctccattaccgctgctttttatctccgatcttggagttatcagtagtacacacactatcctcgccgttgattactactcctcagctgcttccgccgtctctgccatctctcgtgccatcttggacaatgtctctgtcgcggtggttggtaaaggatgtgatcaagaagatccatgtatggttntgataggcgagatttcaccgatgacactcgcttgctgcgatgaaactgccgtagcagcggttgctacactctctgccggagatttaatgtcctatatcgacggtagtggtccgccggagagtctagttggagtagttaggaatcgnttggaagataaagggatggttggattaatctcactcattgattctttgtcgtgtcggcggg

SEQ ID NO: 106870 - DNA, 376 bp, Arabidopsis thaliana columbia
  unsure (1)..(376): unsure at all n locations
atttaaagcccattcgatatcctatttcacngtancatcaaaaaacacctcaaagaattattcattcaggcatcttctcaaatttttgtttgtgaaaaaaacccacatcaaaagatctctcatttattcgtttcgtttctgctgttttgagtgtcgggttcgttttagctgtaatctttttttccggcgttcgatttgaaaaaatccggggaacaggtgatcggaatcacggctatacacgggatatcacggggtgttagctcacatgtccatattgtccgacagaagggttgtttaatcgaaactaatcctttgccgcacggaggacgtggagctctgccgtctgaaggcggcagcccttccgatctcctctttc

SEQ ID NO: 106871 - DNA, 167 bp, Arabidopsis thaliana columbia
  unsure (1)..(167): unsure at all n locations
gcgcaggctgtgagcagcaggcttcgtttgcagaagccaacgncccaaggcacgaccgtgtgtaaaagaaactcgagacgagaccacaaaaactcggcctgttcgacaagaggctcctaggaagttgcggagagctcaggcgaggaatgaagggatccgatcaagac

SEQ ID NO: 106872 - DNA, 469 bp, Arabidopsis thaliana columbia
  unsure (1)..(469): unsure at all n locations
aaagaataccctcactttgatggccaacattagtagtctcgcttctattcaaagatctcgtttgcaaacccgatggaaccctctctttcaatacganngagaaggtttatcannnataatcatttggcttcgtgcccccatccanccaataattcaatcttggattgggccagatcccaagatnnttgctcggtggaagggttaatcnnttgatgttccaatcccatagaaggtgcatatgcccatatacttaccctcatatanttcccggttataatgggttntcttcatgacnggtcgaatattggnnngacgggttagtggtttatggcctaccgagaaccgggatttgggatatgcatacccattgttggagacagattaagatggatcaaatccaaagtgaattatcgttacaatggggtgggatacgacaattctagacccggaaatcattacaagatctttg

SEQ ID NO: 106873 - DNA, 439 bp, Arabidopsis thaliana columbia
aatccatgctggagttttgctgcgttacattctcttttttgccaagcgtttgaccgggatcgtttcgcgtggaggatccattcatgctaaatggtgcttagcttaccacaaggagaactttgcttacgagcactgggatgacattctagacatctgtaaccagtatgatgtggctctttccattggagatggtctgagacctggctccatttatgatgctaacgacactgctcagtttgcagagctccttactcaaggtgaactaactcgccgagcgtgggaaaaagatgtgcaggtgatgaatgaagggccagggcatgtcccaatgcacaagattccagagaatatgcagaagcagttggagtggtgtaacgaggcaccattctacacccttggtcctttgactactgatattgcccctggatatgatcacattacc

SEQ ID NO: 106874 - DNA, 389 bp, Arabidopsis thaliana columbia
atttaaagcccattcgatatcctaaaacactctgtctgtaatttatcaccgcaaagaacattcattcaggcatcgttctaaaatccttgtgcgcgcaaaaaacccacatcaaaagatctctcatttattcgtctcgtttctgctggtctgagtgtcgggttccgtttagctgtaatctctttttccggcgttcgatttgaaaaaatccggggaacaggcgatcggaatcacggctatacacgggatatcacggggtgttagctcacatgtccatattgtccgacagaaggagtgttcaatcgaaactaatactttgccgcacggaggacgtggagctctgccctctgaaagcggcagcccttacgatctcctctttctcgccggcggcg

SEQ ID NO: 106875 - DNA, 419 bp, Arabidopsis thaliana columbia
  unsure (1)..(419): unsure at all n locations
ctcagatattataaggcacaaaaattttttcctctttataaacagacgcgaaaacngaactcggtgaaatgttacaatagctcatcagttctctcaacgatatactacccattcttgtacaaacaacaaccaatctccgctcttcaaccaacctcaatcccaacaactatgtcttacccaacccgatacgcgttctcctgcacccgcatccaatgttgaataacccactactatgcagtgaaacaatcggacgactcatccttctacgatctactgggcgacaccgaatgagtcacactcccagaaatcaaacaagcttatggacaactagctcgaaaatatcaccccagtgtgtgtcccccggatcgtggcgatgtatacacagaccggatgattcgggttcaagaagcttacgaaac

SEQ ID NO: 106876 - DNA, 397 bp, Arabidopsis thaliana columbia
atttgtctctctactttcataacactttttcctacggaatggcatagccactgctaacgtttgtgacatctgacgacatgcttaacggtctctggatgaggtctacctctctgtcattcatgaagaggagctgaaagaagcaatggcgtccatttcttggcgcaagagaagggcatcaatgaacatgtgcagattctgtccctgcatcatatcctgaatggcatggtgagtgattcccacactgtgatccgatactcgcccttagggaaaattgtatgtacggattcgtgcagaacggtctccgatgacaatctgttcatgggatttagacattgataatgcacgattgactgaaacatgagaaaaagatctgttgacacgttcaatatgcttcggg

SEQ ID NO: 106877 - DNA, 328 bp, Arabidopsis thaliana columbia
  unsure (1)..(328): unsure at all n locations
agaaactattcataaatgctngncttattntttgtgcatgattcaattcttaatttatgtttacacaccataaattgtttttttttctaaataagtttttgtctatccatagttgctaacgtggttttgcatttttataaatagctaataattccattttctattatcttatccgtcaccccttctctctatataaaaccattttcactttcctataaacgtacgtgataacccctatatatatctcaatggccggttcggttatggttccgtccgtttcaatcggtttagccttatctgtcttaatcttcttcgctcttccctcaag

SEQ ID NO: 106878 - DNA, 404 bp, Arabidopsis thaliana columbia
  unsure (1)..(404): unsure at all n locations
gagaaaccagcatagttgtaatcttgaggatttgctatctttctgaaggatattnggcctaatttcgaaactcaaggtacttaggaaacgctgtagaagatggctattgtgtcgttgcgcgatgtggccatggtgatggtgacagtgcaggtgtttgcacgagggtatccggaaacagatttggttgtgaggcttcctggtcaaccaaaggttgtattcagacagtacgcagggtatgttgatctcgacttgaatgctggccgtagccttttctactacttcgtggaagctgaaaaacaccctgacacaaaaccgttaaccttgtggctcaatggaggtccaggttgttcttctgttggtggaggagctttcactgagctaggtccattttaccccacaagata

SEQ ID NO: 106879 - DNA, 347 bp, Arabidopsis thaliana columbia
  unsure (1)..(347): unsure at all n locations
gttgtnncgaagtaaggcataaacaactnttggaatcgagggctgcaagggacccaacgattattganntgaaatagggacagggttatggnngaaaccatggtatggagtatttagacatccgtcacaatggatgcttttggctggatgtcanntgacttacaggggggaagggttctcggaatacaaaagaaccgggattcaagaagatggatataaagtgnttctgattngcaggcatcttttggagagggactggaaganntcatttatttaagtgcaagcaagcttaggcggaaaaagttggataaacataaggagggaggttacaagaaatgtgttgatta

SEQ ID NO: 106880 - DNA, 400 bp, Arabidopsis thaliana columbia
  unsure (1)..(400): unsure at all n locations
aaaaaaaaaaaacttccattgaactatngaattgagttagcttggcttctctgncttctaagctcaaatcctccttttctctctctctctatagagtttgagtatttattagaatgtaataatgagagagtctatacagatactgttcttatctactacatgagtttcattgccctgttcaactccttttgtcagagaagaacaaaaacaataatatgattatgcagaaattgctataagaagaaacctaaactctctcccatttattaaaagagagacgtttgtattggtagatctattcttatttttccttttgggatttttttatttggttcgtaattgtgagattgaaagagagatgaacaatctgagttatcttgaaccagattactctgagttt

SEQ ID NO: 106881 - DNA, 382 bp, Arabidopsis thaliana columbia
  unsure (1)..(382): unsure at all n locations
gatcaaaagagttggagagatgngttttgcctactcaggagtttaggatgaacagaggaaagattgattgggccatggcaggaatcatggtcggtgtattctccaaaaccagtaggattgatgagctaatgaggctgttgcaggacatgaaagttgaaggaaccaggcttgatgctaggctttattcctcagctttgaatgctctgcgtgatgctggtctcaattcccagatcagatggctacaggaaagctttgacgctgcacaaactagtacttcaaaatattcgaatacaaagaacacaggaactttaagttgaaagggaaaactgtacaagccaagattatttttcttgtaattaaatgtactatattgccaatngna

SEQ ID NO: 106882 - DNA, 422 bp, Arabidopsis thaliana columbia
actttatttccttgatgcttcagaagcaagtttcactttttcagaaaccgggtcagataagagtaatattcatgttaagtcctgctgcagaagaatggtacatctgaagttacattgaataaggcagaagctaagagtgggaatatgacggtaaaaacccttatggaagtctatgaaggctgcatcactcatttacgaaagtcccaaggaaccagacgggtcaactctctgaagagaataactccagcaaattttacaagagggacgcgtacaagagttcctaaagaggtcattcagcagatcaaatcgcttaacaacctcgatgtggagctctacaaatatgcaaaagtaatctttgccaaagaacatgaattagtgtcgaataagttgatctcaagttctaagagaagcaatggtgatct

SEQ ID NO: 106883 - DNA, 369 bp, Arabidopsis thaliana columbia
  unsure (1)..(369): unsure at all n locations
tttcttggaatagattatngacatggtaattgtatgtaccacaataaatacatctatataatatttcgaaatgtcttggaaatcgtcaactttatagtgggcattttgcgagaggtaaaatcaaccagtgttaatcttacatagacatatgtgtactctaattatagcttggcctggaccacaaatacacatcttttccatgctactccccatctccatctccatctccactattagttgtgaagaacggagtcagaaagtttttgtccaacgcggtgaatgatgtagtggttttgtgaaactccttcagcttcatcttgaacccgcttcctgatgatgatgtatcctcgtcagatgaagctccaatgc

SEQ ID NO: 106884 - DNA, 386 bp, Arabidopsis thaliana columbia
  unsure (1)..(386): unsure at all n locations
aaaagagagaagctttgagaaagaaagaaagatttgacttagtgtgtatcaanctctgtactttcacaagcttccaagctctcttatcattcactgatttttggttctcgagaaaaaagtgaagatttttgagattctctttcgatggattacgaacgaatcggaaagacccaggttactagtagcggcggcggattttctccggggaagttaaggagtatgcttcttctaggtgttgatagaaagaagaatgaagaagaagaatcaactcctacaatgagatctgggtctaatcaaattgatgaccctagggtttatgttgctagtggattagatgattgcaaagatgttgatgttgtgagtgagattactgattgttctacttc

SEQ ID NO: 106885 - DNA, 413 bp, Arabidopsis thaliana columbia
  unsure (1)..(413): unsure at all n locations
gagatcatcgtcgtcgncgaacagattctctttatttggctggaaaactcatgcacgctctgcagtacttctcttacggtggtggcgccgccggattagaggttttcatctctcttttctatatattcctctaaactactgtgttattgcgatttgattctctgtatttatcgataccgtctcgattttatttgtattcttctctctgccgatgcgttgattttttgataaacttagaagattttgttgcctcagatgttgaaaaatccaatgttttcatcaatttgatttggattgtaaaggctactagattacatgataaaacacaatcatgattgtaaatgattttcttcatttctgatgcttacgtagtcactagcggnttctatatggatcctcgtgctctgggaatc

SEQ ID NO: 106886 - DNA, 364 bp, Arabidopsis thaliana columbia
  unsure (1)..(364): unsure at all n locations
acgccacgcgtcacggtttgatcggntcttccttattcncagcnaacttatgaagtttcttcaangagccnnaagcaaccagaggcgagagtagaactttaccagaatgcgcgggacaacaccccncncataccaaagaactcaagaagaagnctcaagncttatggagccacgatagcgtcgagaaatcgtccaaataaaccgttcgagatccgattccaattctgtcgacacagatccaacggttggtatgaccaaggaagagcttgatttcattagtcttcttgaagatgagcttgagaaattcaattccttcttcgttgagcaagaggaagagtatatcattagattgaaggaattgaag

SEQ ID NO: 106887 - DNA, 241 bp, Arabidopsis thaliana columbia
  unsure (1)..(241): unsure at all n locations
aatttgntcaagcgttgagtatagtttatattttagattacaacgaacacacaaagtatgggttaccctggaattccannaggttgttccaaaattcatagaagttatttcgagannaaaatagtgcttaagaagggctgcttgctgctgatagctttaccaagacctnnttgatgaatctaagggaaaccaatcannacaaggaaattgagggagaataaagaccagaactttccaacca

SEQ ID NO: 106888 - DNA, 429 bp, Arabidopsis thaliana columbia
cggacgcgtggggtttgttttctctagtagtggctctattcgcaatcatacgaacacgaaacattttgcaggaggaaggccagaaacagtacatgaacactatgttccctctttacagtttgttcgggttcgtcgttctgcacatacttatgtatgctggtaacatatactactggaggcggtatcgagtgaattactctttcatatttgggttcaagcacggtactgaacttggttatagacaagttctatttgtgggattaagcattggagtctttgcacttctttgtattcttgccaatcttgacatggaggttgaccccgaaactaaagattatcaagcattaaccgaacttcttcctcttttcctgctcactggtatgtttgtagttctagtcttaccattcaacatcttctaccggtcgagtc

SEQ ID NO: 106889 - DNA, 288 bp, Arabidopsis thaliana columbia
gtaaattctgagaagaaactggtgtagcatctgtaacagtcattgatcgccctgactctaacacccggaacgatgggctacaggtcctccaagatttcttgtgcgagaggattcccttagacgacgatgcgcattgttctaagactgtctcatgacaacggacaactgacaaaatagcagcgctccgttgagtcttagaaactaaatggagaggccatgagattgcccagtacagagacgcccatgtgcctgtgctgaattttggacctaactgtgtaacgctcacag

SEQ ID NO: 106890 - DNA, 223 bp, Arabidopsis thaliana columbia
ccaaaggaaaatttatttttgttggatcatgaccaatgatgaaccaattccacatcgtatttttaagaaagaaaattggtgggaaaggtaacacacaaaaaaaaagggtgggtaatggaagaatgaaatgacaggccaaagatttcttcttttagaaaagcaaattcttacacccaaagaacaaacccttacccaaaattatactaaaattcttcacttttat

SEQ ID NO: 106891 - DNA, 405 bp, Arabidopsis thaliana columbia
tagagtttttaggttcttccaagaaattgaatttggaaggaggctttgatgggtttgaattttccatgatcgtcccttgtttacggtatttttctcaaggaatccctgaaaaactatttcttggtctttgtgtaattgtctggtgcaaatcaagttattgtttttatcttgtgttgttgattcagactcttgttgtttgaaaatgctatggctcgtgaggggatgttgttttgattttgggaaagtcttgattgaatggtcacggcttttctgaacattcgcgtgttctttcttgtctcggctctgcttcgaaatgtctctcggccaaaaaaatgttgatcctgttgaaggttcaaggtcgcatgcttgcttatatgaacttttatgttctgagacacccaaatg

SEQ ID NO: 106892 - DNA, 429 bp, Arabidopsis thaliana columbia
aaattcttcatcgtctcttttcttatcatgtctctcttctcatacgatccacaagattcgtgatcgaagaggtgtcagaaaatccaccggaagagctactcttaccggctttgctgaggtcaacgatgtggcgctgtttttcggtggattggttagaatgttgatgctcataggatcctgcttgtgggttcgtctgctggttgaatttgatggcaagttaaagtctggtgcttttgatctgacttaaataatgcttccaccttctctaaatcactccagtgccgacattacttgtataaaagagaccacatgttttaagtcaccacaagtttgtactttggtttgaatgcttgtacaccacaaaataatattccgaaaacactagttcttattgtgtattctatgacatcacttgtatgctaaacaata

SEQ ID NO: 106893 - DNA, 156 bp, Arabidopsis thaliana columbia
tccgtcaggatttcgttgaaccggcgtttttgagtttcatggaagctaacgcgaaaaaatcgtatgcccgcacgtttactgtagacgcgtggaatccttctggatctaacagctttgtgaggtttgaatggtccgatgggaaacacgtggtgggaa

SEQ ID NO: 106894 - DNA, 359 bp, Arabidopsis thaliana columbia
aaacgctcttcttcttcgatctcttttttttttttttttattacttctctgaagccataagaggggaagaattcaaaggagggatctgactataaacagaaacttccagagcttggtgaaggagcagccaccctaacttttcaatccctaaaggagcaaaaactctgattttggagcatcggtagggttggtctcttcccatattgttaaaacgacttcgtttggttgaagaaaaagcttcctggggttgaaggctctttgctcaacctaagagatgaaaatagtcaaggcaaatgcaggagcactgacccatttcgaagggcttgactttcttaacttgagaggggcattaaaagata

SEQ ID NO: 106895 - DNA, 375 bp, Arabidopsis thaliana columbia
gtttcattcacaggttacttacttttctcatctgatgcgacaaagggacattaaatgtgcaactatagtggtggacgccaatggcaccgtcaaacttgcagattttggattggcaaaggtgtcaaagttaaacgacattaagtcccgcaaggaaactctattttggatggctccagaggttattaaccggaaggataatgatggttacagaagtccagctgatatatggagcctcgggtgcactgtgctggaaatgtgtactggtcagatcccatactctgatctagaacctcgtgaagccctgtttaggatcagaaagggtacgctttcggaagtacctgatactttatcactagacgctcggcatttcatact

SEQ ID NO: 106896 - DNA, 146 bp, Arabidopsis thaliana columbia
gaagagcacaacaggagctgcgctctataaacttagttacatagggagataagggagctgtcacagtgaatttctggttaccctatgttttgtcatccacgttttgttcagatgcagaagcattttaataactggtggaccttata

SEQ ID NO: 106897 - DNA, 433 bp, Arabidopsis thaliana columbia
gaagaagaagaagagtcagtgagctgcaatggctgattctcactcagtcaacaatcagctctcgggacacacttccattttgggtttacgtttatgggttgttctcggcgtttgcgttggagccgcgatcgttcttttactcgttctcatctctctctggttcatttaccgacgaagcaacaagaacaaatctcttgagtcttcttctaaatctaaccatacgattgttcccgttgtttccaaggagattcaagagattcgacctccaattcaacccgacccaacaccggagccacaccaaaaccaacaaagagaagacgattacaaaattcacatcgaaattggtaaagatcatcggattgcgtacccggaacgaggaggttggactggtttccggtctgggttcgggtcgggtgatcagggtttacttatg

SEQ ID NO: 106898 - DNA, 316 bp, Arabidopsis thaliana columbia
  unsure (1)..(316): unsure at all n locations
tcatttcctnatcgacattttttgtattgtggacgttgttcattgcacacattgggctatgtcacccttgttctagagattgtcgcgagcgtcgtttgagtcatcgtcttcacctctagaattgatcttttcgtcgagtatcaacctccaaatgttgcaggccttgcttattttcctaaactcggcaatggttttggtcttattattggtatgatctccagcgtaatggtaccggctgatgttatcaatctgcatgcttgacaacaagctatctacaatggtgcttgcagttttactttgcccattaacgatcttt

SEQ ID NO: 106899 - DNA, 445 bp, Arabidopsis thaliana columbia
cgactacatcaacatcctctgctttcgattggaaaacccaacagactctgttccgagtagccacagaaatatcttcaattctcttacaacgtcgtaactggatcactcatctccaatatgttaaatccaagctcccaaggtcaacacttacttcacctgtattcctccagatcctccgtgaaactcgaaaatgccctaaaaccactcttgatttcttcgattttgccaaaacccatcttcggttcgagccggatcttaagtctcattgtcgagtaattgaagttgctgctgaatcaggtctcttggaacgagcagaaatgctcttgcgtcctctggttgaaaccaattctgtgtctttagttgttggagaaatgcatcggtggtttgaaggtgaagtttcactgtctgtctcgcttagcttagtgcttgagtattatgcccttaa

SEQ ID NO: 106900 - DNA, 419 bp, Arabidopsis thaliana columbia
gcaaagcttgatgattagaggctctctctctactagggtttgctgatttgagttttctatgccgactatacgagttcttcgattctactgggatttttttttgaaaaagggaatagaagaagaagttgctgaattctacgatatggaatccataatggagcgaagctgatcgttacattgaggatgtattagtggcatgagcggtgagcgattgcaagacagaagatacttcagcggaagggaaaagcttcggaattggcagaagaagctgacaaggaaaagctcgctgacgctacacctagtttacttgttcaagcaactcagctcaagcgagatgtacccccaagctagtgctactgagcaaacttatttacaagaaaaagagaatgtggagcatttatctcgatagaggacgctta

SEQ ID NO: 106901 - DNA, 170 bp, Arabidopsis thaliana columbia
atatagtaagaagaatagaagatcgtatgattgttatgtcttgagcatgtcagtcgtttgtgcgtgattcccatatccttagcatgacacgagctttattggtgtaaggtgtgtttttttagtgaaagacatccgcacatgattatacaacaacaatgcacaagtgtgca

SEQ ID NO: 106902 - DNA, 139 bp, Arabidopsis thaliana columbia
gagaaacaacaagaagtagttatggcttactgttttctttactaccccgatggggatacatcggggggttaggataccatggttggttcattcaacgggttttaaacattcgctgaattcccgatcacctgcaagacca

SEQ ID NO: 106903 - DNA, 420 bp, Arabidopsis thaliana columbia
atggcaatgagtttgattctacagagattctccttcgagctttctccttcctatgttcacgcgccttacacaatcatcaccctttacccacagttcggagctcatcttatgctgcacaagctctaatcacataaccccttgttttgttatcaaataaactcattatctttttatgtatccaagtcagaactcgtgtcatagtttaataaaacccttcaagatgtgtcaaaaaaaaaaaaaaaaaaattaaaaacataaaataaaaaaaaaaaaaaaaaaaaaaaaatataaaaaatattaaatttaataaattattttgctcctttcatttaaactttttcaaattttctatccctttaactcaacctatcttctttttttttttcttatcctaaaattaaattatttttaaaaaggggg

SEQ ID NO: 106904 - DNA, 262 bp, Arabidopsis thaliana columbia
gaagaatgtagagagaccagcaagggatcggaagagatggctagtaccgactatacgcaacggggcagccgacttaactagacccgatcgtactatgcgcgcatgtccatacatcagaagccaagcaaggctcatgttgcaactggtggctaaacacacacactataagttaaggtcctgaacatcggcaaggatgagaccgatatcaccacgggcgttattactggttaaatagagagttcggagatagctcaagctaatg

SEQ ID NO: 106905 - DNA, 385 bp, Arabidopsis thaliana columbia
gagagtttctcaagtctatcaaacgatactacagcaatacctacactgatggcgaaaagcaagacgccataaacttattcttgggctactttcaacctcaggaagggaaacctgcgctctgggagctggattctgattactatctccatgtttcagggattggagatgatattttcccagatatcggggtccagtccattgctaaacctatgagtggtattggagtcaatcttgcaccagtgccagctttcagagacgacttctcgcggaagaagctgacatcgtttgacaaactgatagagcagacatgcagttcaataaagaacgtgaggctttgtagtgagacagaccaaaggccaggtggcaacactggaagcactggtgt

SEQ ID NO: 106906 - DNA, 370 bp, Arabidopsis thaliana columbia
gtttcttcattatattttgttaagtccactcttctttctcatatcttctaaccaaaacagagtcacaaggggctcttaagcccttccaactaaattcttttcttttgttctcttgaaactgaatccaccagacaaaaaaatgggggttgatggtgaactgaaaaagaagaaatgcatcattgctggggttatcacagccttgctcgttctcatggttgtcgctgttggcatcacaacatcaagaaacaccagtcattcagaaaaaatcgtccctgtgcagattaaaacagccaccacggcaagtgtagcagtttgtgcacctactgatttcaaagagacttgtgtcaatagtctcatgaaagctttttct

SEQ ID NO: 106907 - DNA, 281 bp, Arabidopsis thaliana columbia
agaggttctctcaatctctagccctttctgccatatttgctttggtactttcctttgtcaatgcttatgaggcaagtccactacaagacttttgtgttgccatcgatgtcctaaaaagcgcatatgtgaatggtaggttctagcaagacccgaagcgagtcgatacaatagactgtttcttatcaagtcgcattatgcgcgaggacagcaataatcaagtcggctgtaatgtgaccactgttaatgtggatcagatgccatggcttaacaccatgggaata

SEQ ID NO: 106908 - DNA, 481 bp, Arabidopsis thaliana columbia
  unsure (1)..(481): unsure at all n locations
tttttgtgtgtgagcagctggaacagatatctcataccaagcaagnnncttttcattggcatggggagatagattttacatacaaccattgtcaccaacagaagctgcagctagagccaaagattctgctaaagagatcatcaacgttaagtcatttatcgacaaaaaagcttggccctatgttcagaacgatctccgtttaagagcatcgtacctccgttacgatctcaacaccgttatctccgctaagcctaaggaagagaagcaaagccttaaagatctcaccgcaaagcttttccaaaccattgacaacgtaagttttttctttctttagggttttgttttctaagcggttcttggtaaagaagttagagtgtgcatagattttttttatgcacaagattcttcctaagtttgggttaatctgaaaatgttgttttgtagattttcttatggtgaagttggactatgccgcgagatc

SEQ ID NO: 106909 - DNA, 491 bp, Arabidopsis thaliana columbia
  unsure (1)..(491): unsure at all n locations
agaaactggaagctatcagcttaggaagacgaactcgagcaagcctcaaggttttgtcgatgtgtcgatgcgtatatctgcagagcgagaggattttgggggttttactggagattttggaggagtcatgctctcgaacaactcagattacaacacttcaggacaggattacatggctggttcatcgcagtatccatttgctccaatggaccagtcaaacccattctcagttcccccatcatataaccaccactcatcaatgcctaaccctccaatgaccaacaccaacccacaaatgcaacaaccttactatcctncaccgatgcagccaccaccaccacctatgaactcagggtacatgcctacatacatncccaaatctgtgaatgactcatcaatgcctaaccctccaatgaacaacaccaacccacatatgcaacaaccttactatcctcaccaatgcagccagcaccaccacctatgaactcagg

SEQ ID NO: 106910 - DNA, 464 bp, Arabidopsis thaliana columbia
agctccacatacagaagatcacatgctctatctctttttctatcttttgaattaaagaagaaaagttagtgaaatatttcaaaaatagcaaaaaacaagataaagagaattctctcttctctctctctctctctctctcacgctatatctctgccttgtcgctgttaataaatcgtaatagtgtttcagacagtagtagaagaagaagaaagcttcttcctttttgcttgtttaatcgctgatttttttttgtttccattggggcattttgggatctcaaagttcttcatacagtccccaaccaaaagatcctgagactgttatgtgctgattgtgatcttggaaactataaatggagaaaaggaagagagaatcatctgagagaagctttggtgaatcaaagtctgtgtcttcactatctgagaaggattctgaatatcaacctgagagtacaatggagtctc

SEQ ID NO: 106911 - DNA, 405 bp, Arabidopsis thaliana columbia
acccatcgcgttccagctcgattatcttagggagcagtttatgtaatagagtaatagcagtgtctaggttatatagttagatagagagatatattaacgcgagagacgcgacgatatattcatagatcccgttaggataggaaaaatagttttggatcatagttcatagggaacattagagtttaaaagatgtagacttttatgctattccttcacgagcctgatgttatagatcttcaggaactttaatattttcttcccttctgggaaaactgtggcggttagtggtgggagtggctctggaaagagtactgttgtttccctcattgagagattctatgttccaaacagtgggcaaattctgttggatggtgttgagataaaagacgcttcagttgaagtttt

SEQ ID NO: 106912 - DNA, 427 bp, Arabidopsis thaliana columbia
attaattcattaaatttttcctttctctaagtagagagactctagagtggtgctaggtttcgagctccttttgactcttcttggattccttcttccttgtgtgtttttcttctttctcgtacttttgtttgctgaatttctgctccttttactttcttctccttcttcttccgtcaatttcatttcttcactctcttgcctaaagctctaaactttttttttgctttctctcaaagtttccatttttgagctctctcttctttgatctgcttcaagttcttgcctagttcgttacttctagggttttataatgagcttaaaaacaaacccttttcgccgaatctcctaaatctttagcttattttgaaatgcatttctctctgtggaaacaaattcatcactgcgcttctctgatcttagacatgag

SEQ ID NO: 106913 - DNA, 192 bp, Arabidopsis thaliana columbia
  unsure (1)..(192): unsure at all n locations
ttttggtagacgcacgcgtccgcttttggaactcttcgtttgccttgatcagatcttcatatgtaaacctcanaagctgnttctaggtcatgatcatttgatggaagttgtacagnnaggaaccaggaggaagagaaagaaaaagttgagaaatccttaaacagtgaactgtgttaagatgtaaaccacata

SEQ ID NO: 106914 - DNA, 250 bp, Arabidopsis thaliana columbia
gacccacgcgtccctctttctgcaaaaaataataacacatcaaatactttgagtattctctaaagagacttatccgagcgaatttgttcacgctgagaaggctaattcaaatccaacatcaaagagatgggcttctcgaattccaaagatgttccaaaattcaagaagatattctagaaactctgagctaagaaggctgctgctgctgtagctaccatttcctttgatgcatttaatgacacaatcaaca

SEQ ID NO: 106915 - DNA, 198 bp, Arabidopsis thaliana columbia
agacgcatccactccagcgcttcacgttactaagagcaccaactacctgacctttcatgtctattgcaccactcaccatatgcgcaatgagatctactcaataaggggactagaaaaccacatctcatcaagaaagtaccatccactatctatacaccttacaggtaacaatcgcacatgagcactcctcgtaatatg

SEQ ID NO: 106916 - DNA, 250 bp, Arabidopsis thaliana columbia
  unsure (1)..(250): unsure at all n locations
tcgtccacacacccactcaactcanctcgaatatattattatttacactccactcattttggagtagatcttccgccaaagtagtcaaccgataccccaagctttcttttccttcacccactcttcacacctatccatatagtctcctccttcgtcactaatttccattatgctaccttttcacctgcatgctctactacgccatcctctgttactgcttaaagtatatgttaaaataacctattattac

SEQ ID NO: 106917 - DNA, 424 bp, Arabidopsis thaliana columbia
ccacccgtccgcttttttaaaaagagatcaccacggttacactcctgtgaaggcgtccacgtgctaacgcgcctatctaactaacatctccgcctaattctctaatccggcgcacttttttttccgccatggccacaaccgcctccttttcctggctcctcccttccatatctctcaccaatctctcctcctctaaaaaggcctccttgggctccgccgccaagaatctaacccgatctaggatttctatgagcgtctctgctggatctcagagtactactgttcacgattctctgttcgctgattacaaacacacctctgcttttcttctttcccggtcaggggagctcaagcagtaggaatgggaaaagagtctcagagtgttggagcagctggagagttgtataagaaagctaatgatatc

SEQ ID NO: 106918 - DNA, 142 bp, Arabidopsis thaliana columbia
ctgaatccacccatccacccaaacaaacacagattaagcccttttccccatcacattttcacctttcttaacacaacctccttataccatagagccttcactatcacctgatacgaaactcaatataactccacaaatccta

SEQ ID NO: 106919 - DNA, 308 bp, Arabidopsis thaliana columbia
  unsure (1)..(308): unsure at all n locations
catgggttttaccagccgccgnttacgacttcgttttctcattctctacctcttcatctggggggggtctgcttttcgctatttcctattctctccaaattcaccatttccttccaccactcatagatctgcccttcttattagctatgtctttttctaacacgccattttttagcgccgtctctgtcggatcgatagattctcccgccgtccggtttaattcctagtgacccaattattcgtaatttactcaacatgagctctttgcttgctaaccaattcttactcctggttgcgttattcaacgt

SEQ ID NO: 106920 - DNA, 303 bp, Arabidopsis thaliana columbia
ttcttctgcagcagcaggcaagtctctaactctcttctgaccaccactctatataggctacttttaccaaatccctaaaacctacatttccgattcaaaactcgtctccggcagagtctcgaagccgctttctgtctctctctagctagcgactctaccgattctatcattctaaggagagaaggacggtgagacgtatctagacctcaaagcggcgccagaagatactcggcttgccgatgtgtaccgagccatcgtgacggacctgaataacatgctgcgaggtactgattccacactgac

SEQ ID NO: 106921 - DNA, 349 bp, Arabidopsis thaliana columbia
acgagctttcgtagttgaaagtagctgagcctgtgtattctgtgtccttctccttgaacgggtcgggcagcccctgcaggtgccatcatattacaattcagattactaaacttctaaataccacactcgaatcaccaaaccacaatgtaacaagaactgttgcggtctcagatgcaatcactagtgaggccaaactcattgctgttctgactcctaaacctcaccacatttgacaaaactaacaaacttagttcgatattcgggctgaaggacaagtttgagtttaactctccccagggttaatgacttaatttctataactaataagatttcaatctcatttgaccta

SEQ ID NO: 106922 - DNA, 331 bp, Arabidopsis thaliana columbia
gcgattatcatttgagttcgaggagttgccacgatcgcagctctagcatcagttggagaacaagaatggtacttctttagtccacgagatcggaagtatccaaacggagcaagaccaaacagagcggcgacttcaggttattgtaaagcgaccggtacagataaaccggtacttgctttcgacggtaaccaaaaagtgggcgtgaagaaagcactagtcttctacagtggtgaaccaccaaaaggcgttaaaagtgattggatcatgcatgagtatcgtctcatcgaaaacaaaccaaacaatcgacctcctggctgtgaattcggcaacc

SEQ ID NO: 106923 - DNA, 171 bp, Arabidopsis thaliana columbia
atatgtaccataaggacataaaccaggacaacatggttctaggtaagattcgaacggaaccagagaggggggacatatgctctacatggacaggtccaagatcgtgttgagattgagtcactctttgatggtggtgatttttctgagccactaaccaaaactcgattcaag

SEQ ID NO: 106924 - DNA, 302 bp, Arabidopsis thaliana columbia
  unsure (1)..(302): unsure at all n locations
tattacaaatatctatcctctcctctcgtttttttccattaaaaaaagctcatcnaccaacgaacggtggcatatagaggcgggggcggtggctgttatccgcctatggatctgatgctttcatagacgattcaatttgttcagttatattgttcccatgtaatctgttcattttaccgtcttttaccttgtagatcttggccttgttcaatttaaagactttaattcagttaaaagcctattttaatctacttactcagctcagtttaaaagatgtcgataaattgcactttaaatacttt

SEQ ID NO: 106925 - DNA, 447 bp, Arabidopsis thaliana columbia
taccgatcctggattcccgccacgcgccccgcgttacgggcccgtgtccggtatagggacacctgatatatcgtttttcctctacgccagctgtatgcagtggggcggctatcttcttcttcgtgaagtgaaaaatggccgctggagaggacattcacccactcgtctgagacaatggaactggaatggtgcaggctggatttgctggcgatgatgccccgagagcagtgttcccaagcattgttggtcgtcctaggcacactggtgtcatgtgtggtatgggtcagaaagaagcttacgttggtgatgacgctcaatccaagagacgtatcctcactctgaagtatccaatcgaacatggcattgtaagtaactgcgctgacatggaaaagatatgcgatcacactctctacaactagctttgtgttgcccctgaggagcccccag

SEQ ID NO: 106926 - DNA, 173 bp, Arabidopsis thaliana columbia
ctctcatttactccctctaaagtttcacggcgacatagttcaccggaaatcgtagaataaatgagattctttctttttagtatgtatcaaagggtttgatctcaagaacaattgacatgagcggggcttgtgtgagtataccactctgaagttgggtaaaaccctggttagaa

SEQ ID NO: 106927 - DNA, 455 bp, Arabidopsis thaliana columbia
  unsure (1)..(455): unsure at all n locations
tccactcttttcatcttcttctctgccgtcgtcgctcggagctcgcgaagctctctcatcagaaatcaaaaaccctaaaaaaagtcctttctgattcatctatacagacacatactgtattctcaaaacaatggagattccttctctgaataagcagcaagagttcactctcgcctccgtcactgatctcacttctccttcctcatctctttcgtcctctcctgttgtagctacgttttcatgcgttaatgaagtcaaggaactccgatttcaggaatcgaaatcgtctgatggtttcagttttgatcttagttcgactcagttgttcaagttggggccacttcagttcacttgtgtatctgatggttcgatntcttctgcaaagggagaaatcgtcatttttctcgaggaagtgtaataaaaatttagagatgagaaggatagcaaggagtttt

SEQ ID NO: 106928 - DNA, 457 bp, Arabidopsis thaliana columbia
gatgtatccgagaaacataggcttccaatgtggatgccaagtatgacaatgaaggaacgtgagcgtatgaagcaaaagaggtctatcccatctaacaaaggcattgctgttacaagagcaggtcaagttttggttgtctttacgtacgatttaggtacctctgaaagtcacaggatgttccatctgtacaagagggatcctaaagatcttgacccgaaaaccctcgacacccggcttcttgaggtacattctctaggtgatgaggccctcttctatgatttgggtattaccgtgcctgctgaccatacccttggaattgagcctaactccatttatttcactcgtgatgatcgtatctgtcacaataaattgtcatgcctcgacatcggtgtcttcaatcttgcaacaaagaccgtcaaacgctttcacggtctctccaacttcaacttcaacgatg

SEQ ID NO: 106929 - DNA, 271 bp, Arabidopsis thaliana columbia
ctttgtgattggattctccactcactgctccagatttgaattaacacaacctaaacaaatcgagagagtcagatatggcggcaacgaagtggcgtgacatcgatgatcttcccaagattccggccaactacacggcgttgactccgctttggttccttgatagggctgccggggttcatccgaccagaaaatctgtgattcacggatcgcgagaggacaacgggcggcagacttatgaccggtgtcggcgactcggcttcggttttggcga

SEQ ID NO: 106930 - DNA, 437 bp, Arabidopsis thaliana columbia
gaaaaatgctctacattgttacacacacatcacactatttcttataatgatcaaaatcaactgtgctgaaaaacatagaggtgggatgtaccattgcgcagagctgattagacaaacttacttcatttgtttactcattctgatacacatcctatggaactgattgatcttagattggctaattttatggaacttatgcgcatatactcatataccggatacgggcaaattgccggtgtgcaaatgtgatcgtcttgtgctcactggatcaggcttctgatgatgctttcgacgccgacctttttctcgaatccaattcaattgctgattacatgctgttcaaacgccgtcccgaccccggaaatggtaccagcgagttgcagacttgcatcgtgagttacaagaaacgttttccttggattcttctaacccttttc

SEQ ID NO: 106931 - DNA, 256 bp, Arabidopsis thaliana columbia
cacagttcctgaatcgaccactcgtccgacccattcggtataattcaaaccggagattttgtttttcgatttttaccggacaacttttttccgcggggagcaaataatttgaaaggttttttttgccatttaaggtagaataaacagaaatggaatccttgaggaggttaaggggaaccctcaaggaagaagaagaaggaaggggatgaatgttggaaccgatttttgatttcaataaacgttcaacgaagatggg

SEQ ID NO: 106932 - DNA, 351 bp, Arabidopsis thaliana columbia
  unsure (1)..(351): unsure at all n locations
ttnttnnnaaaccacagggtggaaacttggcaattgggggattttaattttttgacacttcttcaaacattacaaactaaacaataaaccattccataaaaaacatgaaaatccctttaactttactttttttgcttttggccgctacggttttggcattcgttccagggcttattgaacttttgttttgaaaaccattttttggaaccttacccaacttttaaagaaagaaaaaatttttataaacttccccaactttaaaagcttgccccttggttttgagacctttaaacatattaacttttacaacgggccctcaaattgtaaaaactttttttaaaactttttttt

SEQ ID NO: 106933 - DNA, 241 bp, Arabidopsis thaliana columbia
ctcaacttctaattcttcctactcttgactgtgtttatagatttctcttactaatcaaacagcgccgagtgttaattcatggaagggtgagaactaaccagtttcaaccataggcttccagatactcttccttacaactggggaacacacaattcaagtgttaacgagccaggacctcaaaaagttctatcgaatgatctggcctgctttatttcgaaatctaattccagaaactttcttt

SEQ ID NO: 106934 - DNA, 440 bp, Arabidopsis thaliana columbia
gaagataacaagattattatagcatcaggatcgagattgttcgtcgtccattgaagcagcattgtccttgttcaaagatcgcttttggttcttctcgctgttttcgttttctaatcgcttgcaacaatttcaacgtttcacatattaaggagaaatggatcctcggagaaacttccaaccaggtggctatgactctcggaataccttcacttcaggatcttttgggcctccagattttggtgaaagtgatgaagcagagttggtttctgtttcttggaatcaggattacagttgttttgctgctggcactagccatggttttcggatatataactgtgaaccgttcaaggaaacttttaggcgagagctgaaggatggagggtttaaatattgtgagatgcttttcccggagttatttcttgtcgtctgttggtggtggt

SEQ ID NO: 106935 - DNA, 194 bp, Arabidopsis thaliana columbia
  unsure (1)..(194): unsure at all n locations
tacactcgatgttaagttccggggcctgtgttttttacttaattngaaggaattctttagtttgtgttcactttttaccgcggcttggccttcataaagaaatctttgtcacaaacattgtctctagtcacatttcgtcatcgcatttgttgccttgttctcattgttgaatgattttcttttttgaaatcttt

SEQ ID NO: 106936 - DNA, 202 bp, Arabidopsis thaliana columbia
atctaattaactttaagacccaaaatggggggcttccacctttgaagttttcaaaccggaccgttggaaggacaacttggatatggggaccccaaccataaaaagcctggactttttagggcaaggggaaccattttggccccattcccacctgaccatggtccaagatgggaacccttccataaaaacccgggttcccggg

SEQ ID NO: 106937 - DNA, 367 bp, Arabidopsis thaliana columbia
ccacacatgcgagatcatcatcaattactagtggctcaaacactggtgagaatcagacaaatatagtccacctgccagctttgaccaggaatatacaccaatatgcttgggatgcttctttcagttctagagccagtaatccttcgggtattgggatgcctgcagagcgattaggaccacagtgggaaacaccgagaagcaaccaagagcagcccttgtttgcacctgcaactgacatgagacagccggtgcatgatctttggaatttcgcacgtggaagccctggttcatctgtagattctctctttgttcctcgagcagggccgagttcagctattcatacgccacagcctaatcccacatggat

SEQ ID NO: 106938 - DNA, 317 bp, Arabidopsis thaliana columbia
agagaaactagagagtcaacggctatagttttgtctaaatctatcactctcaccaggcggaatgggtccaactagctgttggctgcaccacaaatcttatccgctaacagtactaaccaatctaattcctgcccaacactcaactgaaggctgaagaatctaaactcctagctatccaccataatatagatttgaactaactgaagcatttcttctcaataaaccaaacactccacgtgatctaatccaaatacctacctatcaaaccaatcggcctacgcactgaccgcttttcctgttcttcggtcaataaatag

SEQ ID NO: 106939 - DNA, 337 bp, Arabidopsis thaliana columbia
  unsure (1)..(337): unsure at all n locations
gggcgacgatatggattccctgttcgaatggatggattctttttacaccgtcntctcagggctccggttacagcagggtggagctcaccacctcaatctgaagaaaccaaggctgcggaggcgacactgatcacggctccttctcaaccagatgtgacggaggcgacactgatcacggctacttctcagccagatattacggaggctttggacgagaatctgttttcagacttaacgattgtgactccggttcaacaccaacctgagccgatggaggcagttatcactactcatcaatctccggcgaagaattatggacgtcaggtgtcactgaaga

SEQ ID NO: 106940 - DNA, 335 bp, Arabidopsis thaliana columbia
  unsure (1)..(335): unsure at all n locations
caaaaccacatcncataactttttacttaacaaaacaccttcttatcatttaaaacatgaacatttacatcacccctaagaactatttctacatactcattaccaacaaagacaataaagcactatattttatctgaaaccattaccttattacattactacaatctaagactaactcacaaaaactcactcagtatcgactcactttttaatccaccaaatatccttaccactattcgacacgacaatctttagacttatcggcattcaaaatgctacaaacccattttattacattcaattccattaaaacattaaactgcacttttttgttt

SEQ ID NO: 106941 - DNA, 374 bp, Arabidopsis thaliana columbia
ctttgctttttttggagaaagatggcccaggggtcattatcttaaagattgttatggtcgacgggagtaagtattattgcgagtacagttgccgctagcttgtaatcagccaagatgagagattatgctttaaggagtcacggttgagctcgacccctttagaaagttcgttacatataacaatctgtcttaatatgaacagacaacgaagacttcaaatatcggctcctaagatagagtttaacaaacattgaacaaaaccgcggtcggaactacaaggaagaaaagctttcccatgttaagcgtaacggcataatcgatatgaaacgaggagactcatggactgaacaagaacacaagctggacatgctagg

SEQ ID NO: 106942 - DNA, 308 bp, Arabidopsis thaliana columbia
cggtcgacgccacgcgtccgtaaaaatgtcgacggcaaagaggactcccagggttaaccgtaaccctgacctaatcacggcagttgtactagattttaggtgtcagctgcaccacacgataggatcgtggcctatcaagggcaaatactgtggcgatttacctcttgactatgctcaatcaaaggtcgactctgctgttgcgaagcctgtcaagatttatccggcggaagacactaagaaatcgattgttaacagacgcatgcctaagcctaccaagctaaaagccagcattactccatgaactgtga

SEQ ID NO: 106943 - DNA, 399 bp, Arabidopsis thaliana columbia
agcattttggccattctgggcgtataggatgtttgtatctcatattatcttgctcaaagagcagtcgatctgtggaagcaaatagttggggttccaaacatggaggcttttgtgaataaaccagatattctatccttttccattgcgagtaaaattcccgtgtctgagtcaattagacaagagctcttggagctggatggagtctcctatagattgcagcgagaaattgaattgcttgaaagttttgatcgtgttcgatgtatacactgtcagactgtcatagcaagaagaaaagacatgttggttatgtctaatgaaggtcctcttggtgcctacgtaaacccacatggctatgtccacgagataatgaccttttacaaagcaaatgacatagcgctt

SEQ ID NO: 106944 - DNA, 432 bp, Arabidopsis thaliana columbia
cgtgtagctaatgttcctgaggatggaaaggaaggtcctcctgatgtttgtgtcatcgaattaggcggggcgtataggtgatgttgaatctatgccctttattgaggccctaggtcaattctcgtataaagttcgacctggtaattactgcttggttcatgtgagccttgtgcctgttctcagtgatgttagggaacagaagactacatcaacccagcatatcgtgcgaggcctcaagagccttcgtttgacaccaaatatcctatcatgtcgaaggacgaacgcacttgacgaaaatggcaagacaaaactatctaagatctgccatgtgcccaaagtgaatatagtaacgctctatgatagttcaaatatatggcacgtttctctgcttttaaggcagcaaaaagctcatgaagcgatgctaagagagtt

SEQ ID NO: 106945 - DNA, 427 bp, Arabidopsis thaliana columbia
ctcgcatcttctcgtctttagtgaagatcttttcttcatatatcttttgccacccattatattgaatgcagggtttcaagtgaaaaagaagcagtttttccgcaatttcgtgactattatgctttttggtgctgttgggactattatttcttgcacaatcatatctctaggtgtaacacagttctttaagaagttggacattggaacctttgacttgggtgattatcttgctattggtgccatatttgctgcaacagattcagtatgtacactgcaggttctgaatcaagacgagacacctttgctttacagtcttgtattcggagagggtgttgtgaatgatgcaacgtcagttgtggtcttcaacgcgattcagagctgtgatctcactcacctaaaccacgaagctgctattcatcttcttgga

SEQ ID NO: 106946 - DNA, 405 bp, Arabidopsis thaliana columbia
  unsure (1)..(405): unsure at all n locations
attcaacgtcttcttctctcaatctcttccgttgtcaacaatcgaaaccgcgaaccctttgattggaccagatgagatcaaagatcgaggcaggtgttgctactatggcttgagggttttcgagaagcttgttctcttcaccgtgttgtcattctctgtctcaggtcgagaaagcttctcttaagaactgggcagtgttttcttttgaatggtttgattttcttaggaagtttaggtgtgtttaagtggtttatagatccatcccttcagtggatattacctgatcagtgctctcccctcacttctcaagaattttgttcgtatggtggattntacgcctttctacgtggtggacttttgcagctcttttacgttttttggttctatcctctgtacatgctcagc

SEQ ID NO: 106947 - DNA, 414 bp, Arabidopsis thaliana columbia
  unsure (1)..(414): unsure at all n locations
aattactantttctcaaacactttttataatcatacaaatatattccacctgccatttttgaccagtgggtgtacaccaatattctttctatncttctttcatttctatagccactaatcctttttttatttgtattcctgcatagccatttttaccacatttttaaacatccttaatcaaccaaaatcattcctttttttcacctacaattgacattttacaacctttcataatcttttcaatttctcacatttttaaccctttttcattctttaattctctttttattcttcttcaaagtccatttcatctttttatactccacacactaattccacattgattcctctctaaaatttcccactcacatattcatctaaaacacatataactttcttcctttactttatttc

SEQ ID NO: 106948 - DNA, 301 bp, Arabidopsis thaliana columbia
gtttcaagggttttcgtttttatcttttcctccgcagaagaagataagaggttcaagaggaaggggatgccaggtccaggtgttgaggaaacaactgacgaggctcttatggatgccattcaagagcagatgaagctacagaaggagaacgatgttgctgctgaggatgtgaaagatggcaacgaagacgatgataatggtgatgacgacaacgaatagattagctgatgcagtctgatggaatgaggcttgcactgaacagttaagcgagctgaaaaggcctaaggtgatgcttaaactc

SEQ ID NO: 106949 - DNA, 183 bp, Arabidopsis thaliana columbia
acatcacaaaaccacaagcacgagttatttacagatttttactttgaagaatgcctttcccctaggcgcctgtttaaaaagcggttgcggcaccacaacaacaatctctcactttctcatcactacactcatgtttcataacctatcaacatctatattatatccaattctctttatatattt

SEQ ID NO: 106950 - DNA, 313 bp, Arabidopsis thaliana columbia
tctaaaccttcacacttacttaacccataacccatcaatttttaacacaccattacaatgccttctcgttcctcttataagcacgggtctcaccctacaacatctccctcttaaaactacccctatctcccattctccactcccaccaaccaccaaaagacccttacctctctatctcttctcatgctaaataaccaatccctataactcatatactcaaacactttacctaacaaaaaccctactaatattctctctcctcaccacaccccccatccttcaccttcattaaacatcctttatcttctaaaat

SEQ ID NO: 106951 - DNA, 207 bp, Arabidopsis thaliana columbia
tcaaactatatttctatgtgacacaaacttccttactcttaactataaaaaactcaatggcacgagtcattacagaagcggtggtaatcgtcacaatctactggttactatctgatatcggaaccccagaccttacaggcaaacgatccagcaatctatttagactcgtaatatccgcccacaaagtgcaatacaactacaaacaga

SEQ ID NO: 106952 - DNA, 302 bp, Arabidopsis thaliana columbia
atttgtaagaaaatggcttccaagactttgcttcttttgggtctctttgcatttcttgtcatggtctcagaaatggctgccgcgggcacggtgaagtcagagagtgaggaaactgtgaaacctgaacaacatggtggtggattcggtgacaatggaggaggaagataccaaggaggaggcggccatggtggccacggagggggaggataccaaggaggaggaggacgataccaaggtggcggtgggcgacaaggaggaaggggaagtttctgtcgccactgatgtttgttcaaaggttacca

SEQ ID NO: 106953 - DNA, 420 bp, Arabidopsis thaliana columbia
ctgcttcatagttcatacgattcttcgattcgtcttcttcaatcagtgaagaagaacggaaaagatggctaaagagagagaccaaaacactaaagacaaaaacctcctcatctgtttcttatggaacttctccgccgagcttaagctagctctaatggcgttactcgttctctgcactttagctactctcctcccttttctaccttcttctttctccatctccgcttccgaactccgtttctgcatctcacgcatcgccgtaaactccacctccgtcaacttcaccaccgtcgtcgaaaagccagtcttagataacgctgtcaagttaactgagaagccggtgttggataacggcgttacgaaacaagccgtaactgaagagaaggtgttaaataacggcgttattaaacggacgtttac

SEQ ID NO: 106954 - DNA, 192 bp, Arabidopsis thaliana columbia
cgttcgcccgttaaaattctcgttcatctgcccgtaaatttatttatgatcatattcatttatatcgtgtcgtgaaagaagctaatgtggagcttccatgtctaatcttgtttaagcttttcttctacttctctctcctgagactcgatcactagttttttttcggggtaaagagatcgaatgtgtcttatg

SEQ ID NO: 106955 - DNA, 377 bp, Arabidopsis thaliana columbia
  unsure (1)..(377): unsure at all n locations
cccacgcgtccgcagagacacagaccctatatcagagagttaattggtgaagtggattggatcacataagccatggagtctgcgagaaaccatggaggctctgaagaggaggaatacagcagttgtgagtcagggtggactatgtacatagaagacgccttccatggaaatgaccaatcatctgttgttgtcgatgatgatgatgatgatacacaggttaaagaggctgatgatggttatgagaacgatgatggcgatactagtgatgatggtggtgatgaagagagtgatgattncatggcttctgatgcattcttggggcctagcaatcagctttcaaagcacatcaacaaacatgcaggctggaagaatggttc

SEQ ID NO: 106956 - DNA, 315 bp, Arabidopsis thaliana columbia
tttagggttcctcttctctgatccttttgttaattttcaccgtttttttgacagttccaaagtttcttcaaattctaggggagtgcattttcaaattctggtgaaacattatttgtgtttcaatggtgaagcttagatcttgcgctaacagttaagaaaatctcatctttttcctgtgaaagttttggcctttttagattttaccctttctatattcattaaaccgttcattgatttcttctgagtcattagaggttgatttattgcacgccacttctctttcaattgtacattggctgctacatatcttctcca

SEQ ID NO: 106957 - DNA, 461 bp, Arabidopsis thaliana columbia
cacccatgcgcactttagccactccctctcccccatgtttatcctgcgccatctccctgttacacgccatctccgtttatcccgaaataaccgcgtcgcttccgttgtatccgccgccgccgttcgccaggacgcttccctctggactccagctcctctctctctaatcgaatcagctgcagaatcgcttttccacatctcaatcgacatttcaaacgctccggatctcgtagcttcgtacacgagacccggtcagtatctccagatccgtgttcctgatgttgagaagccttcttttatggcaatcgcttctcctccttccttggcgtcttctcgtggtgctttcgaattcttggtcaagagcatcgctggttctaccgcggagattctctgcgggttgaagaaaggagagaccgttgagcttagctctgtgatgggtaatggtttcaatatcgatctga

SEQ ID NO: 106958 - DNA, 388 bp, Arabidopsis thaliana columbia
  unsure (1)..(388): unsure at all n locations
gcgtcgtcaaaacaatcgtcgaatgggtttctggagagagcgagaatataagctgacatgacagctgggatccagtggaattcggttggagctttactgctcgaacatggatcagcggacgatgatgcggtgatactacagtgggtgacacgagcgtaatacttttttagcggactgtgctggagcatgtcctagggctgcttgtgtctcgagcctaccgttcgacgaagtcgactggactaccgtaactttncatcgagcagtattttgggaagagagctgtaacaacttcgtagagcattacactgtggaggaatgggattagtttgccggtgggaactgcgcactgactgctacagggtttgtgtcatgtgtgtgtgactggttg

SEQ ID NO: 106959 - DNA, 470 bp, Arabidopsis thaliana columbia
agaataattacgaagaaatggagaattttggtgaagggagaagaagtggaggcggaatgttgcgcgggctggctctaagcgccggggcggagtactatagactaccgtggaaaccaccggtgacggcgagtctcctggccgcgaacactctcgtttatctcaggccggcgtttatcgatcccgttattcctcacatcagtgaggtctggttcaatcctcacctcatcttcaagcataaggacttgaagcgtttatttctatcagcgttctaccatgttaacgagcctcacttagtctataacatgatgtcacttctctggaaaggtatcaagcttgagacatcaatgggaagcagtgagtttgcttcaatggtctttactcttattggtatgtctcaaggagtcacattgttgttagacaaatcgcttcttctcttgttgactatgacagaagctactacaacgagtatg

SEQ ID NO: 106960 - DNA, 411 bp, Arabidopsis thaliana columbia
cgaaaatttcaatccgatttgaataatttctgttttcttatcggaacaaaaaaatctgcggggtctggaatctccggtgagtttgtcaatttcgaagaaatttgattgaaatggaggcgagaatcggccgatccatggaacacccatctacacctgcgattaatgctccggcgccggttcctcctccttctacgaggcggccgagagtaagagaagtgagctcgagattcatgtctcccatttcttcttcgtcatcgtcgtcttcctcttcttccgccggagatctccatcaattgacttcaaattctcctagacatcatcaccaacatcagaatcagagatcgacttcggctcagaggatgagacggcaattgaaaatgcaagagggagacgagaatcgtccttccgaga

SEQ ID NO: 106961 - DNA, 454 bp, Arabidopsis thaliana columbia
aaacaacaaatcatatacaagcaattatggtcacaaaaacaaaaacaatgtctctatcattgggactggtcctcttcatccttgggtctaccgtctccgtgacctcaacactagaaaacctttcaccggcagctgaaaacaaaggatattggtgtgtagcgaataaaaaagcaacagatgagcagctacaagcgaatatagattggtgttgcagctacgaaggaggattccgtgattgtacacagatcaatcccggtggagtttgctatgaaccaaatactctacgagaccacgcgtcgtacgtaatgaacttatattaccagaaccttggtagaaccaaagaccaatgcactttcaacggttctggctctgaagttactaaagacccaagccatgacgcgtgtattttcatatcttatgattaatgtatgtgtgggagatttttagccgaatc

SEQ ID NO: 106962 - DNA, 554 bp, Arabidopsis thaliana columbia
  unsure (1)..(554): unsure at all n locations
gccgcataaggccttgggggaaacctcttggtaggagcatatctccggtcaggtctctttgagtttcaatctgcagggaaaggaacaacctttgattgcgccgtgtgtgtgtnntgggctaccnnncaagcaataccgattgggggctggttcatatagacnngttcaatcatnnncttcaagatcttgattccananntggagaaagaaatcttgaaagggttattgcaaggtgcaaggcncttctatcgacaagttgtacccatatgtgaccgaaggaaagaaccaaagtctgtggcttcgattaccacatacnnagatcctcttgatcancttgacttgaagcttccaagaataaagggttcttctcaagacccatttgcacgcgctggaagattngccattgaagaatactctttatggaactggcacaaggacattgaagggttngtgatcaagagacgggaaagctctatgtncgtccaagacacccgaccacatagtgtgatccaaattcttctgaccactttcttaattgtgtaccgttacgtttt

SEQ ID NO: 106963 - DNA, 221 bp, Arabidopsis thaliana columbia
tcggtgccacgcgtcgccacctcggcaagtacagctaaagtgttttctcgactaaatgcgagtgttctgctggtgagcgtgaagacaagctttggcacgataggggtgactgtaaaagttacctggatcacagagtgttcgatttgcaaaagaactttttgcaaacctaacaggccatctttaagcgtcaaacaaattgggagctataccagggggtttgt

SEQ ID NO: 106964 - DNA, 437 bp, Arabidopsis thaliana columbia
  unsure (1)..(437): unsure at all n locations
cgttcgagccatacctatacagagtcttccatctttttgcatttcccgaaaattccctgccgggggagcagattctaattgcgagtcaagtttgtagaaattcgtaatggaagaaaactttttctttattaatgactattaactattataagatcttcagacataaagaatgatctatctaacaaggggattatgatacatctagttgtaggtgatcttgcaagaagcataagtccatttatttagtttcgctttttttgtacctattattttattctatttctatctctattcggntctattctatatattgctactaaggtcggatattaatattagatatatatttacttaaagatacttagtataattatataatagatataatagaaataataaaaatacangatattctaagatatctttagaattcagaa

SEQ ID NO: 106965 - DNA, 472 bp, Arabidopsis thaliana columbia
aacgtgatcaatatggaagctctaatgcttatcttcacgttctgtttcatagttctgtgtctgatattcctcatcggaagaatcaagcgaaagctcaaccttcctccgagtcctgcatgggcgttaccagtgatcggtcacctccgtcttctcaagccaccactccaccgtgttttcctctccgtctctcaatctttaggcgacgctccgatcatctccctccgtctcggcaaccgactcctattcgttgtctcttcacactcaatcgccgaggaatgcttcacgaagaacgacgtcatactcgcgaaccgacaaaccaccatttctacaaaacacatctcatacggcaactccaccgtggtctctgcttcgtacagcgaacactggagaaatctccgccgcatcggcgccttagagattttctcggctcatagactcaatagcttttcctctattcgccgcgatgagatca

SEQ ID NO: 106966 - DNA, 196 bp, Arabidopsis thaliana columbia
tgatgaattgtgtaaaacatggcgattcatgaagaaaccgagatgtcaacaacacaaggagcctccttgcacttttaatgatgcctcgccgcctcaagatcatcggttcgagaagcttcgtggggtccgatggggaatcaacctcggaatattaccgcgtttttctttctccaccattgatgagctttgcagagta

SEQ ID NO: 106967 - DNA, 233 bp, Arabidopsis thaliana columbia
caggcgcacacgacagacaatcaatcatgaacggttatcctcaaccatggctatgctctgcggtgagagttccagaccggctgcgaccactcacatatcatatgtgccaaggagcggacagatgaccatgacgaatactgtggacctgtcaaacggatcatcatgcagtccatggtacggatctgacctagtgaagtacttgggttcattctccacaaagcgctcgagctacc

SEQ ID NO: 106968 - DNA, 472 bp, Arabidopsis thaliana columbia
  unsure (1)..(472): unsure at all n locations
acgacccacgcgggcggaacnggagacggagaaggccacggtcgatgtttccttatttttataaggcgncaaggcnnancnccggggccttattggtggcagggtggtatgttcaaccgacccagnngcagggancgnagncttccgagttccaagaagagagcttagagagagggtcgtcgagtccggccttgaaaacgatgagacccaaaacgtcgtcgttgaatgtcggatctgccctcgctgaaacgacggcaaggaagaggaagagtagtgaaacggcgccgatgaacatttcctctcgcttttaaagatattaaggaggtaaaaagcgaagaaagaaggctagtcggccatggccatggatgatgatgcagagctcaagtaagggtttgatgcttgaggataactaaactgaccaaaaagcttttctttttaccggaaaagagctgcaaggttaacatgagcacaa

SEQ ID NO: 106969 - DNA, 317 bp, Arabidopsis thaliana columbia
  unsure (1)..(317): unsure at all n locations
cccacgcgccgaaaaaaaaaaaaagacattcccccnttaatanactttaccccccnngggncccggcagccgttttttgtgatcattttttttttctccannnaccaanctgaaatctactcagattctttgtgattttctccttaaaatctcgatctgtatcgtacagtgacttgtgaaattaggatcgttgtgtctgtgttttctggttacagtttgtaaaatttgaatatttgtgtgtgaagtcagattcagtttcgtgagctgttcggatttggtttgggggtatatatatagcgttgtgtgatctatttggg

SEQ ID NO: 106970 - DNA, 440 bp, Arabidopsis thaliana columbia
  unsure (1)..(440): unsure at all n locations
gctcaaaagagagagaccacggaagcatgaatttagaaacnngaagaagaaccgagacgacgttttttatagagatggcactctactctgnanccccagaacatgggagctcatcacacaagttgcataaacctgcaagaaatctttctagactctatgcacttgctagaaaaaatcagagtgaaaacaagataatctcagtaaccaaaaacattgtgtctggtctgtccttgttgctgaaatcctgtggaagtgatgtatcgaggttaacttactggttgtccaacactgtcatgttgcgagagatcatttcactggattttggtagctcaaagctaaatggattaaattctcttaaagaagattggggtgatgtgagaacccttgaagcggcattaaaaagagttgaatcatgttttttcacccaagcagttgaatct

SEQ ID NO: 106971 - DNA, 434 bp, Arabidopsis thaliana columbia
  unsure (1)..(434): unsure at all n locations
aataacaactgcaacgccaccgaaagacggatagnntttgttgccgggaactaaatcggagagttcaaaaccaccgcacatagtggtgtttccattcccagcacaaggccacttacttcctctacttgacttaactcaccaactctgcctccgtggattcaacgtctccgtcatcgttactcccggtaaccttacttacctctctcctcttctctccgctcatccctcctccgtcacctccgtcgttttccctttccctcctcatccttcactctctcccggcgtcgaaaacgttaaagacgtcggaaattcaggaaatctcccgatcatggcttctcttcgtcagctacgagaaccaatcatcaactggttccaatctcatccgaatccgcctatcgctctcatctccgatttcttcctcggatggactcacg

SEQ ID NO: 106972 - DNA, 210 bp, Arabidopsis thaliana columbia
gttctagcttaatctcccaacccaacgcgactagacaagaactccgacaagcgcaccgcgcgggatcgcaccgaccaccgggcgacagacaacatgcgactcgggggaccgacacactgcggaggttctaacgccgaaggaggcgaatgcagcgggaagtggcgagcaaggagtggggggattaatgcacggtcggggggagaagacacg

SEQ ID NO: 106973 - DNA, 444 bp, Arabidopsis thaliana columbia
gaaaaagaaaactacaaaatcaatcaaagagaagtaagataaatggcaggttctaactgtggatgtggctcctcctgcaaatgtggtgattcgtgcaggtaaaccctagattctctcttcattaacttatcatgcatatatatctaatatacatgtggttacatattccttaagataaatttttgaaatcttatacttctgttgtttttttggtatgacaaagttgcgagaagaactacaacaaggagtgtgataactgtagctgtggatcaaactgcagctgcgggtcaagctgtaactgttgaagaaattatcagcatggtctcaaaccaaggaaaatgggaaaaaaatgtgttttatgctaagagatctttgtgtatgttggaataaagacttggcattgtgttgcgtaatgagtaagagtaactattaagcttgcttgac

SEQ ID NO: 106974 - DNA, 450 bp, Arabidopsis thaliana columbia
  unsure (1)..(450): unsure at all n locations
gcggttaagcgtctagtacaatcacatcaagttgnttctcagaaggagattttgaatgtgatggcctcatacaaacattcaaatattgtccgctggtacggggttgaccaggacgaacattttatctatatttcattggaactgtgtgcttgtagcttaaacgatctcatctatgcatcatctgcactacttgagagtccaatggcttcaagtagtatacattcgattcagataaacccaatctttgagaatggcaagggagttgagctatggaaggaaaacggacatccttctcctgttttgttgaagttaatgagggatatagttgctggtctagttcatttgcatgatattggaatcgtacatcgagatctaaagcctcaaaatgtgttgattgttaagaactcatctctatgtgcaaagctatcagatatgggtattagcaagcgc

SEQ ID NO: 106975 - DNA, 326 bp, Arabidopsis thaliana columbia
  unsure (1)..(326): unsure at all n locations
aaaataaatttctannnnanaaaacttttgagggggttttttatgagaggttttaccgccccccaaaagcgggaccttaaaaaaactagaaaaaaaaaaaaggctgaaaaaggggccacaaaacagaacccaaaaatggggtcaaaaagggcgtcccaatgctggggggccaacaaaaacccccccagaaccaaactaaagagaaagaaatttctaaattttggggcagaaaaacaaaaaccgggtttaacaggaaaaaaaaaaagccaaaccccctttgagaccaaactataactacggaaaacacccctttcaaaaaaacaaga

SEQ ID NO: 106976 - DNA, 454 bp, Arabidopsis thaliana columbia
  unsure (1)..(454): unsure at all n locations
gctgagagtgtggactcatatagncataaatcngncactgttttgctgaattctgtggaaatgctggttgacctaatgcgatttcctggtcagcttattcctctatcaaccaaagcaatttttatgagtcatatctcagcggcaggggaaagtgattctgcagagaatgactcttgtgattcacctttggagccaaacagtcccatgtttggttatccagagaaatttgaccatgaaaatgcagaaaaagatgaaaacctttcgttgcacaggaaactggatgggtctccaaatacgtctggtccaccatcaaggaatatgctgttacgatctgcctctgcgctagagaggaaattaagtttctcacagagcgagtcaaacatggctaacgagttttggcggcagagccggaggaaggtcattgctgatcagcggactgctagttccagtcccg

SEQ ID NO: 106977 - DNA, 443 bp, Arabidopsis thaliana columbia
  unsure (1)..(443): unsure at all n locations
gtttcttctgtgtgaagatcataatctgattaatacntttgtgtggcgaatnggtttggtaatgagcaggatgacatattaatccggcggtgacttttggtttgttcttggcgaggaagctatctttaaccagagctctgttctacatagtaatgcagtgccttggagctatatgtggtgctggtgtggttaaagggtttcaaccagggctgtaccagacgaatggcggtggagctaatgtggtggctcatggttacacaaagggttcaggtcttggtgcagagattgttggaacttttgttctggtttacactgttttctcagctactgatgctaagagaagtgccagagactctcatgtccctatcttggctccgcttccaattgggtttgctgtcttcttggtgcacttggctaccatcccaattactggaactggcatt

SEQ ID NO: 106978 - DNA, 465 bp, Arabidopsis thaliana columbia
  unsure (1)..(465): unsure at all n locations
gaccacgcgtcgggacgcgtgggcggacgcggggncnncnactaaaccaagctngggnnctttggatggggggggctgctcacattcacggacaaccttgtggctggaaaatctggcaaagtgaagctcaatctttactacgaatcactttgtcccggttgtcaggaattcatcgtcgatgacctaggtaaaatctttgactacgatctctacacaatcactgatctcaagctgtttccatttggtaatgccgaactctccgataatctgactgtcacttgccagcatggtgaagaggaatgcaaactaaacgcccttgaagcttgcgcattaagaacttggcccgatcagaaatcacaatactcgttcatacggtgcgtcgaaagcgatacgaaaggctgggaatcatgtgttaaaaactctggacgtgagaaagcaatcaatgattgttacaatggtgatctt

SEQ ID NO: 106979 - DNA, 323 bp, Arabidopsis thaliana columbia
  unsure (1)..(323): unsure at all n locations
actaaacaaacacactctctctnacaacttattctttctctctcncncgannnncncccaggggagttcgcaattagctgccactctctgatcgatcttcttctcacatcacatcctttataatcttcagttctactgctcggaggtgtttgcttgcgttctctcttgtcggtcacatccctaataaccatcactgcccctgaataaagttttactctatcttctttgttgaagccaaatctgagctcaaatcagcttcaattatcaaatctccacgaatgattccaatggataatcactgcttgccaagtactagcaccacc

SEQ ID NO: 106980 - DNA, 353 bp, Arabidopsis thaliana columbia
  unsure (1)..(353): unsure at all n locations
ctccatcaaccaaaaaaaaaaacatttnnggtagnttgtttgcattgaagcttataggcttcgttagtgaaaatggagatcgaatccgtgagatgtgagtgttgtgggttaatggaagattgcacacaagactacattagtgaggtcaaatctaacttcgacaacaagtggctctgtggtctctgctccgaagccgtgagggacgaagtgagtcgccggaagatgaccacagttgatgaagccgtcaaggcccacgtgtcgttttgtggcaagtttaaaaaagataatccggcggttcatgtcgctgatggtatgaggcagatgctacggaggaggtccggtgagttgacgaa

SEQ ID NO: 106981 - DNA, 413 bp, Arabidopsis thaliana columbia
  unsure (1)..(413): unsure at all n locations
ccgccttcggagacttgagtcgccactggatagntcttcttcgatacattccgccgttcgttgcctcttacttggcgtcttgggtgcagtgagaatggggagcaatgatttgaacacctgggtttcggacaagttgatggttctgctaggcttttcacaaactgctgtcgtgcagtatctaattgcaatggctaaacaatcaaaatcaccaggtgaactcgtccgtgaattggtggaatgcgggttttctttgtccggtgatacccgcgcgttcgcagaagaaatttatgctagagctccccggaaaacccctggagtgaatctctaccagcaacaagaagcagaggcagcgatgctgttgaagaagcaaaaaactttttcccttttagaggctgatcatgatgaaaatgaaa

SEQ ID NO: 106982 - DNA, 434 bp, Arabidopsis thaliana columbia
  unsure (1)..(434): unsure at all n locations
ggctcttttgcatgttctgtcataaatttgnctanttcattcatcctcttcttcttcttctggttctatcctctgttttttgccctctctctttgtttagtggctgtggtcgtttgtatttggtgaaacataatttaaaaacaagtgcggctatctttaactctggccgacacatcggcggattcgactgtggtcggatcaagaagtgcttcctttttttccggcgtcgtttcttcttttatattcatcgatttggtgctctcgcaacttccaatagattacggctaatttctaaaatgaagatattaccatgctttggatttatccgtagaaagaaaaataaggggaattcaaaacctcagaaaacgcagagaatacttcagatcagacttgaagagccagtgaagccttttgagaatgatgagccctacaac

SEQ ID NO: 106983 - DNA, 419 bp, Arabidopsis thaliana columbia
  unsure (1)..(419): unsure at all n locations
ctcgttgggttccctggccgtccttncactggctacctttgtgaatccaaaccactccctccggggcctccttcatctctctgctcctccgccaccaccggctcctgctcctccccttcttgctccgccgctcactcttcccttccctcctccgacctctgcgctatctccaactgtcctcttgatttcatcgaaaccggagattgcaacacttcttcttacccttgtcctcctttctactacgcttacggtgacggctctctcgtcgcaaaactctactccgactcactctctctcccttccgtctccgtctctaacttcaccttcggctgcgctcacaccactctcgctgaacctatcggcgtcgctggattcggcccgggacgtctctttcttcccgctcagctcgcttgtcactc

SEQ ID NO: 106984 - DNA, 425 bp, Arabidopsis thaliana columbia
acggggtgcctatatgaacggccgagcaatggagttgattatgcattcttgggcctttcttcgatattagtgcgctgccagataatacactattcaagagtcaacctgatgttgggcagcagtgtttctctgaagcatcggaacgtcgtcccgcagatttattatcatccttctccacgattaaaaatttcatgaacattttgtacagcgggctgcatgatgtattgatgattttacttaaaagtactgatacccgtgagcgtgttctacagtttcttgcagaggtgatcaatgcaaatgcgtctagagcccatatacaggttgatccagtctcttgtgctagctcaggcatgtttgttaaccttagtgcagtaatgctccggctctgtgaaccatttttagacccacatttaacgaaaagggat

SEQ ID NO: 106985 - DNA, 181 bp, Arabidopsis thaliana columbia
  unsure (1)..(181): unsure at all n locations
gcaacggagctacaagaacnccccgactactaagatcaccccggnccgcaacaacaagggagggctagtatgaggcgaacggaaaccccaaagagaagggcacaaagngaacacgaagacgcggcagcgaangagnccaaaganaccanngcaaagcanccnacacacancaaagccgaga

SEQ ID NO: 106986 - DNA, 240 bp, Arabidopsis thaliana columbia
atttctcgtgagcactaacttctcactcctctcttcttcttcttcatcaggctacggtgacacaatcttttacccacctatttaaaggtcttttctgaaggtttcaggggttggttgttgggttttcccatgacttttggtgggggttccttgacattaacaaatttagatttgggggggggagcaaaggggaagagggaacccccctggagagaaaaggggaattatctggggggagaa

SEQ ID NO: 106987 - DNA, 247 bp, Arabidopsis thaliana columbia
gggggggataacatatttgtgggaaacaaaaacctgaagaatgtctttcaccattttcaaaacattctttgttacaaatttcgggggcttatgttctgtaaagttttttatcacatttactttttttcaacaagctttttgggttgttcgattttggggatgagcctaagatgcataagggttttttggttttttaaataaactcccttttttggtgaaatgataccttttcaacacctgttttatt

SEQ ID NO: 106988 - DNA, 315 bp, Arabidopsis thaliana columbia
acttgctccttctggtactagttctggttttaatgatcgtggaggtggtggatatagccgaggtggaggtgacagtgatcgtgggggtggtcgtggtggtagaaacgattgtggtaggagctatgagagttgttgatatgatggtggaagtttgtgtgtttattattttttgttgtattattaatatattgttttatgtctttattttgtttttatcttttttatatttttattttttatatatatataattttttttatattatatttatataattttatattttatatactttttatttttattatttatata

SEQ ID NO: 106989 - DNA, 100 bp, Arabidopsis thaliana columbia
accaatcttacatacccttgcggtgggtctttataacatcttctataatcctctctctaatcttcaatctcacttcaccatctattttacaatcttctat

SEQ ID NO: 106990 - DNA, 271 bp, Arabidopsis thaliana columbia
gtgaagatatctgatttcgggttagcgaaacggaggagtggtgaggtttgtgggtggagtagaggaacaccgtggtatatggcaccggagtctgtgaatcacggcgagtttgaatctccggcggatatttgggctttgggatgctctgttgttgagatgtctagcggttaaacggtatggtgtttggaggatggggctctgaactatttaatgacttttttgttttctattgatgtttgttattttattttttctgtttcttatttttatt

SEQ ID NO: 106991 - DNA, 278 bp, Arabidopsis thaliana columbia
gatgcaactgctgctcctagtcaccaccataacctaagaatctccagatcacgggggcggtttttacatccatagcaaaccccccctgacttaaagaacaataagttatgactcacaaaccaaaccctttaccaaactccaaaacaccatataaaacactgattcttgttacaacattcatgccatcagtgtttgttgcaaaacctatgtattcttctcccatataccattagtttgcaacaataattctgacaaacacatcctgttagaaaatacat

SEQ ID NO: 106992 - DNA, 338 bp, Arabidopsis thaliana columbia
tttttttttttttggggggttggggactttaagatgaaacattcattcatgatttgttttagatcccgacaaagaagaagggggccaacgaattattatacaacatttctttttaaaggggggaaaaacaaaaaggttaaagaatgttccggaagaaaattggtttggtatggaaaggccaaaatctggactgggttgctggttccaattttaaccaccgctttttaaaattcaatccccgtgaagtagaaaaccctacttggatgctaaccgtttttcattgttttgggcagtacttttgccttcattttgaagcgttccaatttgggatgggttca

SEQ ID NO: 106993 - DNA, 361 bp, Arabidopsis thaliana columbia
ttagggttactctttttttcgcttccttttgttcttggttcttaccgagttccacgagcattagcttcagagaccttgaattgaatgccgttggatcaaaaacaagtgggcgaaaaataggattatgattaaaggaggtgtttgggagaacaaccgaaatgagattctaaaaccgccgtgatgaagttggtaagaaccaatgggctcggatctcgtctcttttggtcgaagtctgctaacagtgtaagctcgctgtacagtggtcgatcattataaaaaactgatggacaagagagatagagcttacattgtaacttgctatatgaacatgtcatgggtgccattatgtagagtaagtctg

SEQ ID NO: 106994 - DNA, 414 bp, Arabidopsis thaliana columbia
ctcctctctcaaagtttttatttttaagtgatttagggttttttggtgccctggaggaagaagtttgagtctttgtatctactttgatcaaattgttggtcgcgactggtgcttgaagatatagctttggttctttatgcaaggtttactctcttagaagaatgagagcagataatgatcacgcgcttggtaactcgatagagatttgtaaagatgaatctaagccgcatcaatgtcttgatgagaattgggaagatgcagagctaaaggtcccggaaaatgggaagaacatcaacaatgtgtgtgagttgttctatgatacaagaagtggtgaagaatgggagaatgaggcctgaaagaaagttcgagattctagtcatgattgtgaagcttatgtggattcttctgagaaaa

SEQ ID NO: 106995 - DNA, 255 bp, Arabidopsis thaliana columbia
gtccgggaaaggaccaggggtaatgtgttccgtccacccaatcaatgggaaggccacatggggtggttgaaatctcttaaaggacactattcctgggcaatggggtcttaaaggggaccttggcttaaaatggggcctttgtggtggtttctttaacccacaacatttcccttggccttccggaggaggccgccgccggacccattaaagccggttgggccttggcctgcggcccgtttttggcgattttaccgg

SEQ ID NO: 106996 - DNA, 236 bp, Arabidopsis thaliana columbia
agaatctgaccacctctcaggatcatcagtttcttgcactttctcgttctctggacgcggaatgtgatacatatatagaataataaagctataatagattgatcgactgatgctaatcgtcttgcatccaaaagaagtcatatacttgatctattgatggtaaggatttctaccagccactatgtcagtcatatgtgtgtctttaacgacaccaaaccatacagacatgttaatgt

SEQ ID NO: 106997 - DNA, 221 bp, Arabidopsis thaliana columbia
tggtggtttcctctcttcatctttgcattcggtatctttctcccggggttaaggcccattgaagctggcacgtgtcattctgatgaccaggggggtcttttagcttttaaaacgggtattaatcaagaacctaccgggattttcaggttttgggagaaagggacctgcctgtgtttaatggaagggggccggtgggttaaccaaccggttaaccggcttaa

SEQ ID NO: 106998 - DNA, 453 bp, Arabidopsis thaliana columbia
ttcttgatcattttctcttttgagtttttgagtttaaggacttaaaagagaaaacgctatggtcaagttcacaaagcaattcgaggggcagcttgtgcccgaatggaaagacgccttcgttgattactctcagctcaagaaagacctcaagaaaatccatttgttcaccaatggagttgagaagaagcacacagaaacttctctcatcaaaaccgttaagtcctctttaggaaggctttccattttcggtaataaggggcgggaacaatctcgtgtcatccaagttcataagaagcttgcttcttctggaagtaacaatgacgtgtatgaaacggaacttctggagaagattgctgatgacactgatgctgcgaaagagttcttcgcatgtcttgacatgcagcttaacaaagttgatcagttctacaagacaaaggagaaagagttcttggg

SEQ ID NO: 106999 - DNA, 413 bp, Arabidopsis thaliana columbia
aaagagtgtgcaagcaaaataagagaactctaatttatatttgaaacaatgacgatgatgagtgatctttcgcaggatttgttagaggagatattgtctagggttccgagaacttctctaggagcagtacgatccacttgcaaacggtggaacactttattcaaagatcgaattctatgtaaagcagaagaaacaagggatcagtttcggttcataatgaagaagtataagctttgttcaatgaggtttgatctcaacggaaccttaaacgaagatggaggtaccgaattcgtggatccatctataaaggagttaggtcatttttttaatcaagtcaagatatctaaaagttttcaatgcgacgggttattgttgtgcgtgaccaaagaggacaacattaggctcggggtatg

SEQ ID NO: 107000 - DNA, 345 bp, Arabidopsis thaliana columbia
ccaaaaccctaaatatacaaagctttttcgaagttgatcatcaatggcgtcaattgggcttctactcacacaaatccttcaccctacaatctctgaattcccttcttcttcctccataattcttacaccatcttcttcttctccatctttccattacacgcatcaacagaaatctccaagacccgacagtttcaagatctcacctcttcacgaagatccgcaagattcaagagttatgatcgatttgttctagacttaaactatctttctcccgctttgtgtaatttttgctcttttggccacaagttgtaaaatcacttatgaggatattaatgggaaccttca

SEQ ID NO: 107001 - DNA, 404 bp, Arabidopsis thaliana columbia
gttttagaagaaaaaaaagagagaaaaaaacttgtgaaaaaagtccaaacagggctgggttctccgactcattctctctctctttgccacaacaggcgatggcgatggagatcgattttctccgacgacgattgaggttgagatcagataatttaattggaagattttaagttatggataacagaggtcagaaacgatggaggttgtggaagagttacatgatgataagagagcttgtaactctcaggatttcaggctaaagacttttgattattgagtacttggacgtttgctgagcagtgtttgcaaacacttgagaaaatatcctgacatgagccggtagcctgcttgaatgctggagcaattattgcagggctttcggttattgatttcttctcaacaag

SEQ ID NO: 107002 - DNA, 275 bp, Arabidopsis thaliana columbia
ccggggcgacccacgcattcatttttttctataaaatcaaatttttactttctagtatgagtaacctatatcttcttggttgttaaataatgtctctctcatattataacttaaccacaatcttttttcctgaaggtctttcttaccacttaatgtatgctaatgtagatcattttcatacgcctattttcccatatggaattttttcctatcactttgtattttcttaccgttgttaaaaaatttaccttaaaatttttttaatcctcattctt

SEQ ID NO: 107003 - DNA, 404 bp, Arabidopsis thaliana columbia
atgattatctagccaagcttgagatctttgattgagtgcaactgctaacattcacggtcggggttgacgctgggaaggcgggcacagtgagcctcaatctttactacgaatcactacgcaccggtggtcaggaattcatcggcgatgacctaggtaaaatctttgactacgacccgctacacaaacactgagctcaagctgaatccataaggtaatgccggactgtgcgataatatgactgtcacttgccagtatggggaacaggcatgcacacgaaacgcccttgaagcttgcgcattaagaactgggcccgatcagaaatcacaccactagttcataccgtgcgctcgaagcgaaacgaaaggctgggaatcatgtggttaaaactctggacgtgagaaagc

SEQ ID NO: 107004 - DNA, 420 bp, Arabidopsis thaliana columbia
atctttttgggcgggaggtaactgaagcagcgaatgaacctttttcttccagtacatatcctcaggatggtcttgattatgctggaactagttcaatcagtaaaagtaaggcattggctttgcttgaaattcttcagtttagatctcctgatgcttcgatgcagcttcctcaaattgtgtcaagcctaaagtatgactcattggtggaggacatacttgggaaccgtgatacctctgttagcggcagtatttactattattctgagcgtggtgatcggctaattgatctatcttccttcagcaacaaactctggcagaaactacattctggatttcccctagtagatagttttccaaatgttgctgagctgagtgaagttagagagacaattcaacagctgttgaaatggggcttgaagt

SEQ ID NO: 107005 - DNA, 179 bp, Arabidopsis thaliana columbia
atcgtctcttctctgctctgctttgctctagatcacaaattaaaagactttattagtcttcctgtcttcaccattaccttctttctttttaacctaacccccaccaggcaaccattggtccggtttccctggattaaaaaggcctccattatttttaccgattggttcttcacacacga

SEQ ID NO: 107006 - DNA, 426 bp, Arabidopsis thaliana columbia
ccgatcccgggtcgccacgcgtcgcgactaaaagaaattatttttatgggcaggccctccttggtgaggcggtaaaaaatggggttggtggtggtggaggccttccttcctaccaaaaaacctgagaaggtccacaccggagaaggtttttgtgggcggccggaaagggagaggccacctctctagaaatatggtcctggagggggaaggaaggggatgatccaggaatatggaatgtgtgtgccacataaaaaaaaaaccccttttaatttaatcctaaatttaatttttcctaatccccgggttgggaatataaaatttttttttcaagggggccaataaaaaagcccgcgatttcaaacctaattggaaaggtttccgaattaaaataacccttcataaatctttgaaaagcaatttatattc

SEQ ID NO: 107007 - DNA, 348 bp, Arabidopsis thaliana columbia
agaaaaatgtcaaacatttccccaatcttctccatctccaactctcaacatttgagggactatggcttcgatccccaactccactactttcaggttatggaagaagcgaggaagcataagagagaaacgtcatcaaaatcatacacgaacggtcttcaattcaagatccagaaacccatttcaaaagacaacccgacccggtccacaatgcacaacgacaagaagaagaaacggtgttggtggaagaaagctctcccttttttcaaatggcggaaatggccaatctccaccgtcggcgtgaacgaagatcgtagggtcaggaactttcgcttcctaacccggttcatg

SEQ ID NO: 107008 - DNA, 444 bp, Arabidopsis thaliana columbia
tgaaaagaaggtaagtttgtctgaagagaagggggcacacaagtaagtgctttgtcagatttcgcgtgcattcatcaaaacaaaaacaaaaaagctcttctttcttcttcttctctctttctttcattcattcagttttcttggctccttcctctcctttcttttctttaattttctcaattttcaaagaagaaaagttgtaccgatttttattaaacgaaaggtcactgtttgattgtgtttaagagaaagaaaaaaaagtagaagaatcttttatcatcaacctgatctggtttgtgcttaactcgaagagaggaaaagacttctgttttgtttttcttggtttgtagcgcattttgcgttcttgaggtttaaagtcgaagaacaacaacagctcatacctttttatattttctggtttctgtggggcttatagagagagag

SEQ ID NO: 107009 - DNA, 416 bp, Arabidopsis thaliana columbia
caaaatcatcaaagagggataataatcatgaaattgctagaaaaaatgacatatgtagaatgttttatgataataatggcgacatggttcatgttcataagttacagtcatggagccaatgtagctgcagcacctggaaccaacggacttgatactgcttggtatgatgcgcgagccgcatattatggtgatatccatggtggaggcactgaactagaaggagcttgtggatacggtgatctaaacaaacatggatatggtctagccacagcagcattgagcacggcgctcttcaacagcggggcctcatgtggggcttgttacgagatcatgtgctctcctaatccacaaggatgtttgtccggatctatcaagatcacagcaacagatttatgtccaccaagatccgcttggtg

SEQ ID NO: 107010 - DNA, 421 bp, Arabidopsis thaliana columbia
ggaggaggatcagccaccccgagaagcttctgagcgcggagccttcgatgagtctaagctggttgacgtcaacattgccttgagctgggaagcctttgaggtgaagcaaggaacagagacagtgcgtgagtattataacgagttccttaagaaggtcaagaacctcggaagagagttggaggaagagcagctggcgtgtctgttccaggaagggctacgcgaggagttgcaggaaggggtatgtgcagcgaactgcggatggatccttaattatgtgtcagatgtagttgatgaagctgagaaggtagaggccaaacttagaagcatcaaggaaaaggtgccgctcgtgtctgaggagtttgcagatgttgactgcggacaaagcaatttgggccgacccgcatccgaagatgaggtggtg

SEQ ID NO: 107011 - DNA, 370 bp, Arabidopsis thaliana columbia
tgtcctcacaacttcagtttaggagttcagcttaagatcttcaagcagagcttaccagaatctatgtggcttaccatcagattgtagagatatgattggaaatgctttgattctcatgggagagattggagctaatgattacaatttcccattcttccaactcagaccattggacgaggtcaaagagcttgttccgttggtgattagtactatttcttctgcgattacggagttgattggtatgggaggaagaacatttctggtgcccggagggttccctctcggatgctcagttgcatttttgacattacaccaaacatcaaacatggaagaatatgatcctttaacaggatgtttgaaatggcttgac

SEQ ID NO: 107012 - DNA, 357 bp, Arabidopsis thaliana columbia
gaagaaagttgggttgaccggattcaggtgccgttgcggtgagcttttctgttcagagcacggttcctccatcgcgatggttgtggcttccacttccaaaccgcttgtcgtgaggcgatcgcttgagaaaatccgggggtcaaggctgcgaaaatggtcaaagtttaaaaaattaaaaattcgatctcaaccgctgaaaaacttgtggggggtcaaaagctcccatcggcagagagattggtcggagagacacggatttgatttggtgatgtgttgtaaaaaaagatcagcgagatgattcctcttctcataaaataaaatgctgcaccatatttttttttcgacgttttttcatca

SEQ ID NO: 107013 - DNA, 413 bp, Arabidopsis thaliana columbia
aaaaacaaatttttattttatcttccatttttttttttccccgaaattctcgacggggttttccggcgattcattttcgatgcctgaatcgccgattacctgaattcactgaaaccctaaaaccctaaagttactgtagttattaaagctgtgttcttgattccaaatctttgcctaaagattcgtgctttttgtttacttccgatttgatctactcaatctctggaggaagaagaagtttcagagatctatttttgaagctgtgtttgtaattttccccaatttatcaataatgatgatcttttggtgcttgaatatggaatgcttgcgggaacggtgttagtttccttttgtagagctgtcatatattgtgttggtttctttctacatggaagcttacagagaggaagctc

SEQ ID NO: 107014 - DNA, 409 bp, Arabidopsis thaliana columbia
tttctccatcaccggcgtttggtcagacatcatcaaatccaacaaaccctttttcgagctcagacatctaccaacccttttgcccctcaaaccccaacaattgctagttcgagttttggaacggctacctcaaattttggttcctcgccctttggtgtaacatcttcttccaatctttttggttcaggttcatcaactaccacatccgtttttggatcatcctccgcttttggaacaacgacaccatcaccgttatttggttcatcaagcactcctggatttggctcttcttcatcaatctttggttcagctcctggtcagggggcaactccagcatttggcaacagtcagccatctactctgttcaattcaaccccttcgaccgggcagactggttcttctttggaca

SEQ ID NO: 107015 - DNA, 147 bp, Arabidopsis thaliana columbia
tccgggttggccccacccttccggtctcgttccaaaatttaatcttttaccaaaacttttccaatttccctaactctactgggaaagcttcaatctttttaacttttcaacaaacagataaacaaaaagcttcaatctttgatactt

SEQ ID NO: 107016 - DNA, 419 bp, Arabidopsis thaliana columbia
cgaaaaatgaggatgtttggcttgaagcttgtaggttagctaatccagaagatgccaagggggttattgcgaagggagttaagctgatacccaattcagtgaagctatggttggaggctgcaaagctggagcatgatgtggagaacaagagtagggtgttgagaaacggactggaacatattccagactctgtaagactatggaaggctgttgttgagttggctaatgaggaggatgcaaggattttgcttcacagggctgtggagtgctgccctttgcatctggagctatgggtggcacttgcgaggctcgaaacatatgctgaatcaaagaaggtgttgaacaaagcgagagagaagctcccaaaggagcctgcaatttggatcaccgctgctaagttagaagaagctaatgggaag

SEQ ID NO: 107017 - DNA, 279 bp, Arabidopsis thaliana columbia
ctttcgcttactctctccccattctctttcttttatagcctcaccttatattttttggcttgtggtttctcggacaaatccgcctttttataaagctaccttagtattttccttcttttaccatctgttttagttttctcctttactctttagatggcagactttcagaatggtaatgcctttgcccctcctagtgtagtgccttcaaatgctatgaatacttattcctttaatgttaaaaactttatctcacgttcaagagcactttattaactcttt

SEQ ID NO: 107018 - DNA, 422 bp, Arabidopsis thaliana columbia
tttcgttcttgtaaacctatcaggtcggtttgatgcttagaggaatgggcttcaacaaaagtacatatatattccttgccgctggcccgatatatagcgcaaatagaactatggccccactactcgagatgttccctaatctacagacaaaggagatgcttgcttctgaggaagacctggctccttttaagggttctacgattttccactgtttgttcatccaggatgagtcctttctgacttgtaaacttatgtgtctgtgtttagaacttctcctcgagaatggctgcaatagattacacggtgtgtctccacagtgaggtatttgtgacaacacaaggtggaaacttccctcatttcctcatggggcatcggaggtatttgtttggagggacattcaaagaccattcagccagacaagg

SEQ ID NO: 107019 - DNA, 418 bp, Arabidopsis thaliana columbia
atcctgtcaaacctgcttcaaaatattctgaagccgagttaaaagcttcctctaaacgaggtgcgtcagtgaacaaatctgcaaagcaagattttggaaaagatgatggaaagtccggtaaagctattggaagaacatccacagctgacaaagatcttaattatctggagagcaggcaatcaggtttgaccaaagctctttccagcacagcagccaatggtagcatagctactgggtcgtccaaagtaaaagatgatggcgctgaagctttggatgcacaaaagcaatcttctcggactgttcattcccctaggcatgaaattgtcacttctgtgagatccagtgataggttacaaaaacgagctaatgctgttgaagatagtgaaaggataagtaaacgtcgtaaaggagatgctga

SEQ ID NO: 107020 - DNA, 407 bp, Arabidopsis thaliana columbia
attttaaagattaaggaagcagtgtgtataattttttctttgtaatgacaaactctgctatgggaaggaaatatgtggttttgggtttagcagtgtgtctctttctctcaagcttcaatgaggtttcttgtcaggccgagggaggcatagagtcgagtaatagtgaatttcaaggtagcttcctagaagaaggagaagtagaagttacaaagattgagagtgaaagccagagcagcagctcggagcagaacactaaattgtctatgtcggaggaaaaccaagaagattcttttgatgttgataagtttatcgagtctgaagctgttagtagtcgtgaagaattaggtcaaagttcgagtattgacgaaagtaaccgtgaccctgaagccattctcgatagtctaaat

SEQ ID NO: 107021 - DNA, 420 bp, Arabidopsis thaliana columbia
gaagaagtgctgttgatatggacgctgttacttgtatagacatgtcttcgttttaccagatgctgatgcactgtcttccttccacaggcgagtcccaaaaagagcaacttgcgctgccgtttcgagctcttccttgggatactgctgaggttcatcttgccttgtttgttcacagagtttcgggtttgcctaagggactgtatctcctagtcagaaacgaggatcatctcagtgatctcaagacagctacgaggcctgaatttgagtggactaaaccagatggatgtccggacaatcttcctctgtacaagctcgccgagggtgattgccagaggctggcaaaagggctatcatgtcatcaggacattgcaggggatggatgcttcagcttaggcatgatagctcggtttgaaccagcac

SEQ ID NO: 107022 - DNA, 288 bp, Arabidopsis thaliana columbia
  unsure (1)..(288): unsure at all n locations
gggacccacgcgtccggctnttcttaacattctctctttctttttattctcaaccaaccactaactggaacggttcttttccttcaccacctttttaacattacactcctacctattaacacttctcttctccacctttttaccacttcccaccaccacctaataagcactaccaatacaaatcttcacctccacctattaatcactactcaccttcttctattaccattccccaccctcaccaatttaacacttcttttacaaactttctttcttcttcataccact

SEQ ID NO: 107023 - DNA, 420 bp, Arabidopsis thaliana columbia
cgcgaaattagttttcaccggcgagattttttatcctctctacgagataacacttagaagaagaggcagttaaaacagagagacgacgtcgtgttatttttccaaattccggtgatctgagaatgacgtcggggactagaacgccgacttggaaagagagagagaacaacaaacggcgagagcggcgaagacgagcgattgcggctaagatcttcgcaggactaaggattcatggaaacttcaagctccctaaacactgcgacaacaatgaagtcctcaaagctttatgcaatgaagctggttggactgtagaagacgacggaactacttaccgcatgggatgcaaaccaatggatcgaatggacctcatgaatggttctacttcagctagtccatgctcatcgtatcaacatagccctc

SEQ ID NO: 107024 - DNA, 372 bp, Arabidopsis thaliana columbia
cgagtggaacgagtactgcggatatcaaaactttgaggtgacttcctttttgaaacaagtgttgtgatcctcttcctcaggtgatgacccagcaatcaatctatatgcatgcaccatcttcttttgtccgggtcgaaacgctcgcccaatagcttggcgggtcacagaagggtttaggggaacatcgagtgctctcatgcatgatgctggaccatgcgagataccttctccacatgctctgatcgatccaaagaatgttacggcgtatggcgaactggcaaacgactacatgcgaccactcacgcaggtccgtactggtattgaccgagagaacaaaagcttgtctgcattgtttacataccttagcttaag

SEQ ID NO: 107025 - DNA, 418 bp, Arabidopsis thaliana columbia
gtcgaagaggcttgatgctagcgactcatgccatgatgggttttggtaaagatcctgactcccaatgaacaaatcagcattttattcactccctaaggtgtttggtgagtcgaaaatagttgaatatcatattcaagaaagtgaaacctcgccggggaagaaagagatactaattgacaacaaacaacactacaagatcatgggaaggaacatagatatgatctctctcattaagctctatgtcgaggacgggaagatcgttcgacatgaagactggtgggacaagaaacctctgaggaacagagacacggttagctttccattagtcggacgggtaatggagatgggtcgaagaggcttgatgctagcgactcatgccatgatgggttttggtaaagatcctgactcccaatgaaca

SEQ ID NO: 107026 - DNA, 345 bp, Arabidopsis thaliana columbia
gggctggctctcctgagagagactctatacttctcctagtgtttgagctccttttgactcttcttggattccttcttccttgtgtgtttttcttctttctcgaacttttgtttgttgaatttctgctccttttactttcttctccttcttcttccgtcaatttcgtttcttcactctcttgcctaaagctctaaactttttttttgttttctctcaaagtttccatttttgagctctttcttctttgatctgcttcaagttctttcctatttcgttacttctatgggtttttaatgagcttaaaaacaaacctttttcgtctaatttcctataatctactttttt

SEQ ID NO: 107027 - DNA, 416 bp, Arabidopsis thaliana columbia
  unsure (1)..(416): unsure at all n locations
caaaccttcttcttctttcttcttcttttacaaaatttcacaaaaccagagggaggggagattcaaacaaacgaatcaacatgtgtgaaattctaaatatatgccagcccaactcgcccagaatctcgatttctccacctttcctcttctattcatcttccaaatcccttaaaaaaagactcaaactttttaattttggtccaaaaaagactcaaactatcttcatcaatggcggagtaaactcacgagagagacgtttttacctaaagctagatgcatcccacaagctctaatcctgggacgatacgaaaagggtaagcttgtcggtcatggtaccttcatttaagtttaccttgcacataacgtttattctttcgtttgcgtancaatcaaagtaatccacatggagaaagttc

SEQ ID NO: 107028 - DNA, 339 bp, Arabidopsis thaliana columbia
caatcacctacttacaaaaaacgtccacttctttttacacagcgtattaaatgaacgagggagggtaccattactgcatttgtagagaatacacaattccaacgcctacccatcaaacctgaactaaataactagcactgaaaaccgtctgtacattgacataatgtacatgttttgatcatccctaccgcattgaccgcaactcatgcactgataatcccattaattgctaacaattcagccgatactgttcttatcaagcaacctgattttgaacctcatttttacaaaaacaatagtatgttccactaccaaaattctactcacgcacacacttga

SEQ ID NO: 107029 - DNA, 420 bp, Arabidopsis thaliana columbia
cggacgcgtgggttcggttgttcacgaattgtttctgagtttgcccaaacacaaacgaattgaggaaaactgaaagatggcttcttgttcttcttcttctattagtctcctccaacctcttcatagtctctcttcttccactcttttcttttctcagccaagttttcatttttcgtcctctcttaaacctaataagtgcaaaaggcacaatctttcgaaatccttgactctccgatttgctcttaccgaatcagattctacttaacctcttgaaatagaagaaccaagttccaaatcccttcttctacaactctctaagtgttttgatcttccatcagattacttccagcagctaccaaatgatcttcgtctcgatttgaatgatgcggcttttgatctctccaatggacctgtcatcga

SEQ ID NO: 107030 - DNA, 377 bp, Arabidopsis thaliana columbia
gaaagaagagcttctagaccttatcatcgacgccatcaagatcggatatcggcatctggactgcgctgctaattataagaacgaagctgaagtcggtgaggctcttacagaagcattcacgacaggccttgtcaagagggaggatctcttcattacgactaagctatggagtgcagaccatggccatgttattgaggcatgcatagacagtctcaagaaactataacttgattacctcgaccttctcctcgttcatatacccatagctacaaaacacaccggaataggaacaaccgactgtgctggtgggatgatgggggattggacatagatacaacactctatgtggcaactacatggtacgacatgtgaaagca

SEQ ID NO: 107031 - DNA, 340 bp, Arabidopsis thaliana columbia
cattgatccaacatggttcggtttctggtacctctgcggttcgattgagcttctcatgctctgtatcaccaccgtcgtcttctcctccactgtcaagggtttctctcaattttcagtcggagaagaagagttgttaccggagaatgatatgcagagctatggttcaagactcggttcaagggattccttcagtttacgccagagaaatggagcgtctctctgctaaggaatcgcttattctcgccttcaatgatgctggaggatttgaggctctagttacagggaagatcactgatatgcaaaagattgatgtcaatgaaaggataacgaatcttgagcg

SEQ ID NO: 107032 - DNA, 453 bp, Arabidopsis thaliana columbia
ttccggttcggaagggccgacccagagcgctacccgttcgatcaggggtttaggtctttccattactttttaatgttttttctgttactgggtccgcgatctgattttacgacaatagagtttcgggttttgtcccattccagtttgaaaataaagatggctcgtaccaagcaaaccgctcgtaagtccaccggaggtaaagctccaaggaagcaacttgctactaaggctgctcgtaaatctgcaccaactactggtggagtcaagaaaccacatcgttaccgtcctggaactgttgctctccgtgaaatccgtaagtaccagaagagtactgagttgcttatcaggaaactgccatttcagaggctagtccgtgagattgctcaagatttcaagactgatttgcgtttccagagccatgctgtcttagctctccaggaagctgcagaagca

SEQ ID NO: 107033 - DNA, 200 bp, Arabidopsis thaliana columbia
atatttacgatccacgatctctcttggtggttctggcttcatcgagacgaaaaagggtgctcggatcgggatcttctccggcttcggagccggattgggatctatttctgcaatttcctcaactcaagatctccagatcggtaatgcccagcgaaggattgattttagcgcacatatcgcgaagggcctcttgaccctca

SEQ ID NO: 107034 - DNA, 481 bp, Arabidopsis thaliana columbia
  unsure (1)..(481): unsure at all n locations
cttcttcaacctaatagcctctgtctcatccaatcaccgtcctcgtctaccctctccgaaaccgcgcgactttcatcctatcctcgcgtcagccatatcttccgtttgtccatgccgccagattttctccactttcagcttctttggccagattcttcgtcccccgcgagctaagagagtagtacccagtttccaggtagggtattttccagatcaataggcgtccggcgattgcataggaaccctagcaatagtcttatgtgagcttcaatattccatcggaatatggaagattcggaaagtcatgggatatcgtggaaagaanntccgagcttgatctagtgcctccagtagatgggcggattcaataagacaaagatgggtgattggaaacgagttatagcccatgtaattgggtgcaggacttggttgaaattcgattagattggcttaaggacttcaatcctcttgaggatctaaa

SEQ ID NO: 107035 - DNA, 318 bp, Arabidopsis thaliana columbia
  unsure (1)..(318): unsure at all n locations
gtgagagcaacggtgtcgcgttttccgatcgattcagacgctcaagaggcgtgaggacttccttggggactgacagtaacaccattcgcggccaaagacgagaacggaatcggaccagcgtgcggatctaacggtcatcttcttcctcgttgcgaaaactgctacgcttacttcaatacctattgtgagcttgatcaatgggcttggaattgctcgctttgtggaactctcaatggacttccttctgatgctattgctcgttactctaatcctcactctatacctgaaatgacttcctncttcattgatcttgagatg

SEQ ID NO: 107036 - DNA, 291 bp, Arabidopsis thaliana columbia
ctgtcacataaatggctcagtactatcaccaagcgaatccatggccctcaaggagcgggggcagaatgaggcacggcgccaactctatggtacaaaggctcgacacatgtactcaatacacaaagactatacagggagctgactctatccgtaatgaccggttcacgcgaagcttgcgctgaactgtcatcccttacaatccgctgtcttagatacctaatgaaaacttttcccacctgatccgattgagattaaacaatccgactatcatctaatacccataccatgttc

SEQ ID NO: 107037 - DNA, 313 bp, Arabidopsis thaliana columbia
catgagtcaaatcttggaattgttcgctctgcataaacactatctctcctacggtggatacctttacatatcgaccaacattctaatccacataatcttgatcgggccaagctgcttctaagtattactcatccttcactcgccgaccccaatgctcgacccctctcaattaaggttttctcaatcgaagaccctcgacagcgttaagcgatttaaccactgatttatattccactggatgtatgctctgttctatatcgaattggatctgaaatctggattagtagctgctcttatgtgtttctcttgctga

SEQ ID NO: 107038 - DNA, 303 bp, Arabidopsis thaliana columbia
cacaaagcaaaaaaaaaactagtcttcttctatatcaatcagagccatctgagagcgaaaatcactttcttacgacaaatctaataaacccttttattcttcttcttcatctccatgttccttcacagccatcttcttcttcttgatcttcaactcatatctcttatactcattcagtttcatctcttttctaaacccatatccaccttctaaatcccccaattctcttctcttacccaatattctttttacttcatgtcaaacacccgaggtacaaaccattctcattcacatattcttctg

SEQ ID NO: 107039 - DNA, 271 bp, Arabidopsis thaliana columbia
ctaagtgagacagaactctctcttttgtcccgaaagttttaaacggttgtggtggtggaatcccatgagactgatggaccctttttatgcaactccatatcctgtggccatagacatcccgaactgagctctctacgtctaaacgtttatactattttcttccggtttttatcgattcaaatttttagacactaaatcttaatcgataatttttcaactccatcagatcctgggattcacctaatcttacttcgagatcgactctactatc

SEQ ID NO: 107040 - DNA, 401 bp, Arabidopsis thaliana columbia
gttatcaatattcatatctttgttaagtctctcaccggaaagacaatcaccctagaaagttttatctacgacaccatccacatctttaaggcctagatccagtataaggatggcattccttcttatcatcataggcttattttcgccgtcaagcatctagaggatagtcctacgttggctgattacaatatccataatgaatccacccttcacttaatcctcatgctccgtggtgatatactgatttttattaaaaccctaactaataagacgatttcttttgtagtggagagttgatactccatctttcttttcctatgccatatattctttttaaattatattattttttccatactttatacttaatatcttaatatttaaagtctttatttcatttt

SEQ ID NO: 107041 - DNA, 248 bp, Arabidopsis thaliana columbia
  unsure (1)..(248): unsure at all n locations
gttaagctataagagagtttaatgttgtatttaattaaagttncggttcggatagaaattgtttttgtcaaaatgactcatttttacttgatgattgtgatgttgatgggtttggggtttagtatagagttttcataattggctcttgatctatgtttgtgttagagattaattatttaatctattatttttcattttttatttagtttttttttttttttctatttcttaatatatttaatcttttt

SEQ ID NO: 107042 - DNA, 413 bp, Arabidopsis thaliana columbia
aacactctggtgaggagcggtggcccgtgcctgttatcgccgtcaatggcagtggcggctctgaagaggatgagagtgtctggtttagccacgtcatcatcatcttctgttcctaattggaaaggtggagtttccatggtccaaggagcttccagaggcattggtctcgaatttgtacgacagttgctggagaacaataagaacgggtatgttgttgctacttgccgaaatccaaaagaagcaacaagtctctctgatttgaagaaccgtttctctgaaagacttttcatccaaaagcttgatgttacagatgaaactaccattgaggaatcagcggaatctgtgagagaaaaatatggttctctcaatctacttataaatgcagctggtatactttcaattcctggcgtatt

SEQ ID NO: 107043 - DNA, 430 bp, Arabidopsis thaliana columbia
cctaatttttcttcttcccttctattctattagaatctctccacttcttagccctcatagatggtctcctataaccatgaagcagccatatttttctcaacctttttacccatatgaacaattagaaaatcccaaccttgttgctctctagaggttttctttattcccttctcatctttgagattttcttagggtcatcatttttggaagcttacccaccagcgaaaaaattataacttccatcgattcctggcttctctctctcgctctctctgcatgtgctaaatcgccggactgatcctcactgtcacctctgttcccggcttattcgccggtgaaatctatggttggtgctcagatttatttccaattgtttgtgcatctggtggaggataaatgctccttgttttggatctagggatttctagtc

SEQ ID NO: 107044 - DNA, 205 bp, Arabidopsis thaliana columbia
acgagatgatcatcaaaacgatcggaggaatttctcagactgcaaaagaatggcgaggaggcagtgatcctccaccgtgacggcgaagcatctttcgaccttattctaatggataaggaaatgcctgagagggatggagtttcgacaactaagaagctaagagaaatggaaggtgacggtcaatggatcgttgggggtaaacgtc

SEQ ID NO: 107045 - DNA, 278 bp, Arabidopsis thaliana columbia
atctcatcatccatcacattaaaaatagaatcttacctaacctagcaacctcacatcacaacttttctaaattcaaacaaataaaccataaattcatctcttcaaactataaccattaacttatatcctttattattataactatttttatcctaacctacctttacacataataatttacaactttcaaattctatttctctcacttttttaatccctctcctatacattctaatacctattattattatttcatcaacaacttttattctcttttt

SEQ ID NO: 107046 - DNA, 418 bp, Arabidopsis thaliana columbia
atccaatcacaacctcatcatatatctcccgctaatctttttttctttgatcttttttgtttttgcttattatgttgttgactttgatctcccatcatttcatcttcttcttcttcttctgatcaaccattgctgctgctataagtgctgctttctctttaccttcctccaagtcattctctctcctcacctaattctcctctttatcccctcaaatgattcttcttcaattgtgcacaatgtgtttcataagatttgtttcattgttttcttatctttctactttttcttccgtggtaccaccacttatttttcttctcttaatttttgatatctctttttttcttttcttttttttcttttttttcttttctttcatttctttatattagttttctttctttttaacttttttatt

SEQ ID NO: 107047 - DNA, 411 bp, Arabidopsis thaliana columbia
aaaaaaagaaaacacaaaaccaaagtttttattggcttcctcaaccatggctttggggtgcggtgccttcgccggaaaggctgtgaagcctgccgcatcagatgtcctcggaagcggccgtgtgaccatgaggaagactgtcgccaagccaaagggtccatcaggcagcccatggtacggatctgaccgagtcaagtacttgggtccattctccggcgagcccccgagctaccttaccggtgagttccccggtgactacggatgggacaccgctggtctatccgccgacccagagaccttcgccaggaaccgtgagctagaagttatccacagcagatgggccatgctcggagccctaggctgcgttttccctgagctattggctaggaacggagtgaagttcggagaagc

SEQ ID NO: 107048 - DNA, 387 bp, Arabidopsis thaliana columbia
ctacctactaatttcttcatccttctatttaaaaacctctccactcttgccctgagggatatccctataccaatagcaccaaatttttcctactttttcccaaataacaattgataacccaactcgcactctctaagatcccctttattcactataatctttggattttcttagatcatcattttggaagcttacccaccagagaaaaaattataacttacattgaatcctgacttctctctcttgttctctctccatatactcaatttccgaactgatccttactaccacctgtgttccactgtttattccactgcgaaatctatacttggtgctcagatttatttccaattgtttgagcatctagttgaagataaatgctccttg

SEQ ID NO: 107049 - DNA, 410 bp, Arabidopsis thaliana columbia
ttctgccggtgttgacttcaaactctttttgtttagatcggcgccaacttctaaaggcaggtgggaatcacgagaaacttgatcctgggtttggcttgtttagcctttgtctccattgctaaagctctgcctcatgaaccagaacttggctcggctcgtgtcgtcttccagactagttatggagatatcgaatttgggttctatcccactgtggcacccaagacagtggatcacatcttcaagcttgttcgtttaggaagatacaacactaatcatttcttcagggttgataaaggttttgttgctcaagttgcggatgtggcgagtggacgatcagctccaatgaatgaggagcaaaggaaagaagctgagaagaaaattgtgggagagttcagtgatgttaagcatgt

SEQ ID NO: 107050 - DNA, 360 bp, Arabidopsis thaliana columbia
gatacatcaatctctaatatacccaagttgttttatactataatggccatagctagagcagattctttgaacaagatcacacacactcatatacctaccattacctaaagccatttttgccatctgcacttctaaccctctaaaccatcttctatacccccatttttcagactactacacacataaaaccaacttttaacacatagtcctacctcaaatctaattacatgctcatactctacaagtcgactatttaatctatccacattcataattcctacataattctctcaatgtatacccacacatatgtgctctcatgccttcccttatggacaccattccttacatcttgcatga

SEQ ID NO: 107051 - DNA, 244 bp, Arabidopsis thaliana columbia
gaagcatagacacctcttgatcaatcttcctttattaaagaactatactcctgcagaaagttatttttcctggaatactaaagccccaactttttacggacatcccttaaattgcctcaagctaaacagagccggcctctattataggagatacataaaggtcaccacatgtactctatgacaagcagttgaaaaatatcatccttctacataaacatacactaccatcccctcaacaacccat

SEQ ID NO: 107052 - DNA, 325 bp, Arabidopsis thaliana columbia
tccggtaaacaatttcacattctgagacttattgtatatatggcgaccacaacatcagaaggatctcatacataatcaaccaatgcatatcttcactatcattctcagaatcttcgtcatcaagtaattggtcacatgattctcttacatagcgataatccataccattttatactaaaaacatgcatgtatactatagtaccaaaatcaatgaatgaactcaataaagtagacagcaaaccatccatggtacataatgaccacatcaactgacaaaggacagttcttaaacatgcttatcaagctcgttaactccaaaaacaca

SEQ ID NO: 107053 - DNA, 405 bp, Arabidopsis thaliana columbia
tctctaaatattttgtaggttattattataaagtttgacaaaatgtttaagaaagcaattttttagcttcgaaggattatcttctacaaacacaacatccgtaatatgtctgttattgctcatgtcgaccacgggaaatccactcttactgattctttagttactgctgctggtatcattgcccaagaggttgctggtgatgttcgtataactgataccaatactgatgaagctgaacgtggtatcactatcaagtccactgttatttctctctactacgagatgactgatgaatccttgaagagcttcactggagccatagactgaaactagtacctcatcaatcttattgattcacctgggcacgttgacttttcttctgagatactgcttctttccatatta

SEQ ID NO: 107054 - DNA, 456 bp, Arabidopsis thaliana columbia
cattgattccgtacagtatcgaacaatcataacgctcaacttcacgacggagctcagcgtacgcgaaggttacgtagctgttcaagccacgggatattattaccaactctctcttcttcttcttcttcttcttccaccgtcgccgtcacatctgttttttcttgttcgtgaaatcgacgcttgagatctcgatacttgtgcctacaatcattagcggaagcgaggaggtgagagagagagctccgggatcgaacctccgtagcgacggaatcccaatcaccaaatccgtgtcgtttaacggcgcatgctaataacagctcttcccacgtgccccatgcttgtgtttggctcttcttagtgttgctattatcttcatcttcttcgatgtaatcattatcagtgcagatatagttgttgttgttgttagtattgtcgaccttaatgttataagatcct

SEQ ID NO: 107055 - DNA, 335 bp, Arabidopsis thaliana columbia
  unsure (1)..(335): unsure at all n locations
agtctaagctatatccgctccgccgcagagagagatatagatatttctataaatatgtttttgtatatatacacagagagttttgattaaggaagaaaaatccttagatcattttttttttgttatctttgtttcgnttttctggtagaagagagaagaaggagagacgaattggcagctaagcgattctctctctttctctctttctcttctcgggtaatcttttggtgttcttgaaaccacttttttttttgttaattcctctgtttccttggaattgttttctgcttttttaagaagaaaaaaacgatgaatgtggtgcggagattaacgag

SEQ ID NO: 107056 - DNA, 343 bp, Arabidopsis thaliana columbia
cccacgcgtccgaaagaatcgtacttcttctctcaggttgatttctctgtccttcttattgagatctccgtcttgttttttccatgatcgtaattctgaaagttaaaaaaaatgagacgaaagatttttctacgatccgtttgatttttttccttctctttgctctcgattcatgcttctaattattgttcgatttctcttctttatttttttttggatgatgagattcgatctctgtgatgaaaccgaggctgtgaattttatttttttgacgaatttctctgtggtgccatttaggttaagtattggcgtgttgttgctgttcctctttgactatgagact

SEQ ID NO: 107057 - DNA, 343 bp, Arabidopsis thaliana columbia
  unsure (1)..(343): unsure at all n locations
tcgtgttcccataggattatantctggagatgactgtcatatgttgataactctaaatttgctgtgatcctgtggagacaataactagctgttaaagggggaaggtggaaggtntgtggataggtggtcctatatgatcatattcttcatatttctacagttgaccccatggttggtcctggatgttcttagggatgccatacttgctccttatccatatatgcatatatgatctcaactgatgatctgtgaagaatgaaacaatgctttatggaacactataataagctctggtggttttattctttcgaagctttgcgatattctggaaagtatttctttg

SEQ ID NO: 107058 - DNA, 304 bp, Arabidopsis thaliana columbia
gaaatatgatcagaagtaagcttgtgggttatgattttattactttgtgggtattgatttgggcgagcgtattcagagtttttctcttttcgatcgttttacttatccagtacaccaagggtgttgacggtgtagagcttcacgaaacataaactttcatttcttctagcttcttgatttgctcttaaaggtgcatgttgaagtgattgaaagcgatttacatgtgacttgcagttcggtcagacattttacattacactcaacacgatattggaaaggatgccttggaattcaaagtttgatt

SEQ ID NO: 107059 - DNA, 193 bp, Arabidopsis thaliana columbia
gtaaaaaatggctgaagaacctactactaccactcttgtttcaccgggaaagattccttctccgaggctcacgccttttgaagaatctgaatctactcaagatgcccttcccacagagacagaaactcttgggaaagggactgtgacttattcaccggtaactgtggattccaccacccagcccgaagaagaa

SEQ ID NO: 107060 - DNA, 334 bp, Arabidopsis thaliana columbia
gggaactcttgttcaccgttgtctcgcaagacgagaaatacaaagctaaggtatgcatagatgtaattgttcaacggcttggagatgctgcagcggcgggactatttgaagtccttaccattgctcttggcggtcaaacgtcaactgcttcactctatgccctgccagtgtgtttaatatggatagtcacagcgttcttcttgggccggcgacaagaacaattggcgaaactccaggtgggttcatcttcataggaacaaaatcttaactttgatacagaagatgagaggcttcaacgtcatatgttggagttatgggaaaacaacttaaaccc

SEQ ID NO: 107061 - DNA, 482 bp, Arabidopsis thaliana columbia
  unsure (1)..(482): unsure at all n locations
tcgccgtccgcaccttatctcttcctctcttctcaagacgagtattnntcctcttcaaatctcaagagaatatggctgaatgccaaggtatgtggttccaganngtctgtgctaaagatagatcaagnaggcaagatggaatgggcatttggccaagttaagatgatagctgtagnctgctaagaaaaagagntgttgaaggcccgcaagtcttatcttcaagagagnctgagcnagtattgccaaagaataccgctgagaaaggataaccgagttgatcccgattgaaagcgggaggcttaagttgaaaaggagtttctaccgttgtaccctgaggctatagttgctctttatcaattcgtatccgtggtatcaaatgccattgacccataaaaccaagaaagattcttgcagctccttgcgtttgagacagatcttcaatgggtgtgttcttaaggtgaacaaagcaacagtaaacatgc

SEQ ID NO: 107062 - DNA, 341 bp, Arabidopsis thaliana columbia
ttgaaatttactatgaacccgacaaagcgccatgtcggtcactatcccggcgaatatcgagctcaacccgtgatctagcaaatctctgactcaatccgtacctaaattctccgcaagatgagtctgatccaatgacaaatactccttactcacacctaaatccatgaaagcgttatacgtcgacggcgccctatcttgcatactcctctgtgctcctatgccagccgtcgatgatatctcaggtttgactacttgcatggactcaaaacagctcgcttaaagagagaagctgccgatcaagaagctaggatcttctattaagctctacgctactgaatctg

SEQ ID NO: 107063 - DNA, 352 bp, Arabidopsis thaliana columbia
  unsure (1)..(352): unsure at all n locations
aatggatccaggaggatacgtgaaggttaaatgcatcccttgtggacgtcgcagtgagagtatggtcgtgaaaggagttgtttgtaagaaaaatgtggctcatcggcgaatgacttcaaagatcgagaagccgcgtctgctaatccttggaggagctctggagtatcagcgcatctctaaccagctgtctagttttgacactttgttgcaacaggaaatggaccatttgaagatggctgttgccaaaattgattctcacaatcctgacattctcttggtggagaaatctgtctcgcggtttgcgcaggaatatcttctcgcgaaggacatatctctcgngttaatattaaaa

SEQ ID NO: 107064 - DNA, 336 bp, Arabidopsis thaliana columbia
gcgagagcttgcataagaagcttcaagcacaagcttctcaccactgaagaaaacgaagctgaatgattcttctgattcatcaccggactctcatgacgtcatcgtcttcgcggtttcatcttcttccgttgcttcgtcggcggctttagcgtctgatgaatgttccgttaccatcggtggagaagaaagtgatcagtcctcgagtatcagctccggttgtttcaccagcgtatcgaaagaaatcgcgaagaacagttcgtcgtttggtgtagatctggaggatcatcaaatcgaaaccgcatccgaaacctcaacattcatcaccagcattttcac

SEQ ID NO: 107065 - DNA, 255 bp, Arabidopsis thaliana columbia
atttgctctgcaatggcgactaccatgaatgctgctgtttctctcacatattcaaactcttctttggtttccgcttcaaagtgtgccatttctccctaaaaggtcaaggtttcttaagggggttttttcttccaaaaccacaattttgtggccggggaaaaaatgtttttcctttaaacgccaatttccaccggaacacgttccccttctcccgcgaaaaaaggggagaaagggtgtaaaaaaaacacgggaagg

SEQ ID NO: 107066 - DNA, 223 bp, Arabidopsis thaliana columbia
ctcttgtggttacaattttcacttctaatcccataattctccttctttgtcctcttctttctccctaaaatcctaaatccctctttggattacccttctttttcaattcttcccaccagggttggccctcttctctttccaatcttgggtccttaactgttcaatttttccaattcccaatttttccttgtggggctttgccttaaaaatcaatcctttgggt

SEQ ID NO: 107067 - DNA, 373 bp, Arabidopsis thaliana columbia
cgtaaaccctaaatcactaatcatcgattcttctccgttggatcaaagacaataaaacatgggaaggtattgtatccgaagaaactcccatggatgcttctcaggagcaacaacatgaaacagttgaggagatgcttgctcgccacaggcaagagattaaacaacttcaaaacaaagagacagagatgaagaaggcagctgccaaaggtagcaaagctgaacaaaaagctaagaagaagcaagtcgaagatgacatttccaaactctccactaagctcaaggacaaacagttgaaagaactcgcctctcaaggttcagcagcagcaacagcaacaacatttgccatgacgaaacgactgaaaaaaaagagaca

SEQ ID NO: 107068 - DNA, 334 bp, Arabidopsis thaliana columbia
cctcaacttcttcttcttctcctctcaagaaacaataactagcaatggcggttaagagatcttcaggggctaacacaaaccggaatggttgaaccaattcctaagagatgcttgagcttggcccagaatcaatgctttgatgaggatggtctgcctgtagacgtaccaaagggtcatttcccggtctatgtaggcgaaaagaggagccggtacatcgtacccatatccttcttgactcatcctaagttcaagagcttgcttcaacaggcagaagaagagttcgggttcaatcatgacatgggactcactattccttgtgaagaagttgttttcc

SEQ ID NO: 107069 - DNA, 390 bp, Arabidopsis thaliana columbia
aaacccttttagaagactaccgcatctttacttcaaccatatgacgcaacaatataaaggggcaggctttggagaattgagcccccatccgtttgcatttgcagatgcagcttacagacaaatgaaaaatcagggcattagtcaatcaattctggttagtggtgaatgtggagcagggaaaactgagactactaaattgctcatgcaatatctggcagacatgggaggtcgagctgtttctgtaggaaggacagtcgaaaagaaagtcttggagtccaaccctgttctagaagcatttggaaatgctaagactcgacggaacaacaactcaagtcgatttgggaaattcgcggagattcacttcgatcaaagaggtaggattttatgcgc

SEQ ID NO: 107070 - DNA, 336 bp, Arabidopsis thaliana columbia
  unsure (1)..(336): unsure at all n locations
acaaaacccgaaactgaaacagagaatccaaaaaaaatgccacaactcgagaacaacgagcgacttctaatcaacgaggaagaagaagaagaaacagcgtacgatgaaacagagaaggtacatatcgtaagaaacgaagaggaggacgatctagaacacggcgtcggatgcggcggcgcaccaccgttctcatggaagaagctatggttattcaccggacctgggtttttaatgagcattgcgtttttagatccagggaatctcgaaggagatcttcaagccggtgcggttgctgggtactctntgttatggcttctcatgtgggcaacagcaatg

SEQ ID NO: 107071 - DNA, 314 bp, Arabidopsis thaliana columbia
accgttaaacactctaagcgctcttcttcatcttcttatacacttctcttccaacaagagagggtaccaagtaaacttgttcacttttacaaagtcaaaaccatatggcgaacatgaacgctctttaacaaatgatcttcccagacgagaacgctccaattcatcgcaataagtctgtcactgatgcttctgtgaaatccaaagggactgttcttggtcagaagaaacctggaggagcatcgaaggctctgaatgatattacaaacaaggctgggattcatgcgaaagctgctgcttcttcaaagaacaagcaa

SEQ ID NO: 107072 - DNA, 357 bp, Arabidopsis thaliana columbia
ctcctcttcctccacgtccactagaactcgccatgggaaatattggaggagaagcttatggaaacggtccaaacgatctccttaagtccatcactgcaccaacagaatctgacaaacctgtcatcatcgacttatccgtggctgcaatggaagagctcatgaggatggttcaagtagacgagcctctgtggaagagtttggttttagacgaagaagaatatgcaaggacctttcctagagggatcggacctagaccggctggatatagatcagaagcttcgcgagaaagcgcggttgtgatcatgaatcatgttaacatcggtgagattctcatggatgtgaatcaatggtcgacga

SEQ ID NO: 107073 - DNA, 347 bp, Arabidopsis thaliana columbia
atctgatctatctctctcttccagctgtttcatgatcgatttactcttaacttacagctgagtacagttcactgtaatctctcaagaaccctagattcttttttttccttttcaattgtgatccgtcagcagcaatgcttgatctttaaatttactgatatctgaagatcgaattagggttctgatctacttgatatttatttgtttgggctcttattcagcagctcgatcttgggctgaagctatggctcagagtaattgggaagctgacaagatgcttgatgtttacatatatgattattcggtgaagaagaaacttcatcatactgctaggtcgtttttgactg

SEQ ID NO: 107074 - DNA, 366 bp, Arabidopsis thaliana columbia
agtgattaccgaggggttcctcttcacatggttaaagagctttgttttcatattttggtggggttggattatcttcatcgtgagctttctattattcatactgatttaaagccgggaaatgttctgcttttgtctacgattgatccgtcgagagatgtgaggagatcaggtgttccacttgttctgcctataaccaaggacaagattgtttctgagtctgctgttaaacctgaaactaaaagttatacgtacaatggtgatttgacaaagaatcagaagaagaagattcgtaagaaagcgaagaaggtggtggctcaagattttggtggagaggaagctttggaagaaagtgagagagattctaac

SEQ ID NO: 107075 - DNA, 199 bp, Arabidopsis thaliana columbia
  unsure (1)..(199): unsure at all n locations
tcgatcccgatcgcgtccgcaatatgttatgcattttctgtattcattagatgccttctatttgataacccaggtctctcnnnttggttattgtggagagagcacatagatctatgcttanntggtctgatactcttgaacacccagtacatgttattcttcactttaggagagcgattctttnncttctttctaggtt

SEQ ID NO: 107076 - DNA, 518 bp, Arabidopsis thaliana columbia
agacaatttaattccaaaagataaaaacaatcaatttattaatgccacaaagttttttgtgctgcgtcgttatttacatttggtgtgccattttcacctcaagtcatttttaataattttccatattgtcttaattatttctctcacatctaaattgtactaactatttttttttatttttactttttatattttttttttacttttcttttttttcttatacttttattttatttttttttccttaaaactatttcttttttatctatcaatttaatttctatttaatattttaatttactcttttttttatattttttatatatttcaatatctctattatatatcttacattatttttttctatattattttatatattttttttatttttttcttttatattttttatattttattttattttattattaatttatttttattatttttctttttcttatttatataattatcttatttatttatatattttatatttatctatttatcatttt

SEQ ID NO: 107077 - DNA, 284 bp, Arabidopsis thaliana columbia
  unsure (1)..(284): unsure at all n locations
gtggggatagttctctctctattcatttacctttgagatggtaggggattcttgaactcatgattacgtagcttcgctgccgtgaggagagtctaccattntttcaaagactagctattttgaaataaccaattcttcatcaaagctaaaggtggtgggtgatggccttattttttttagtttttgcaccaaagaagagcataaacatctttgcatgactcattacaatatgctctagatgatggattgatatgaatatgcgagaaattaaatcagtatttaac

SEQ ID NO: 107078 - DNA, 471 bp, Arabidopsis thaliana columbia
cggaaccgccgggccggcccaggcctacgcgtgcggataagggctccctctatccatgaacctggaagttgtatgttcttgttttattatctcgatcatcattcttcatcgctcacaaaatgggctgatgaagagaggtatcaaacatctatgtttcaatggcttcacgggctactcatcacttcatcatcattatcatggatcaagctcaaagaacggcgtaaaaccggagtcaaacatctttgcatgactcattacaatatgctctagatgatggattgatatgaatatgcgagaaataaaatcagtatgaaactaactataaatagtattacatttagagattcaagtatgatatataaaatatgagtcgtcgtgttcatggcttgcagcatgaaaaaaggaagagttcccctttcaaaaacttcaatttcttttgtaaagagaaaaaaaacaaaatttatatgtaat

SEQ ID NO: 107079 - DNA, 384 bp, Arabidopsis thaliana columbia
tccttttgcattgtgtgaaaccttcgagttttctcttcatcttctcaaagtaacaaacgttctgcaaacatattattattggaagcgatctcatcaagaactacgatgaaattcccggctgtaaaagttcttattatctctcttctcatcacatcttctttgttcatactctcaaccgcggattcgtcaccatgcggaggaaaatgcaacgtgagatgttcaaaggcaggaagacaagataggtgtctcaagtattgtaatatatgttgcgagaagtgtaactattgtgttccttcaggcacttatggaaacaaagatgaatgcccttgttaccgcgatatgaagaactccaaaggcacgttcaaatgtccttgatcatgttct

SEQ ID NO: 107080 - DNA, 450 bp, Arabidopsis thaliana columbia
cttctactctctgaaacaacttctcaccttctttgctcagattcaaagactccagtcaacaacggcgagacactccagttgtgcgattcctacaaagaaagatcttgctgcaattctaaagatgatcttcaattacagaatcgcttcaactccatgaacatctctgactctaattgttcttctcttctcaaatccattctctgttctaaatgtgatgaattctcaggacaattgtttggtgatgatgatagttctctagttccaattctctgcaactcaacatcacaagacttatgttcaaaactttgggattcatgtcagaacatttccattgtttcttctccttttagtcccactctacttggtggtgctacttcgccttcaacttcatcaaattcatcgacattaaccgatctttggaaatcccaaaccgaattctgtacagccttt

SEQ ID NO: 107081 - DNA, 464 bp, Arabidopsis thaliana columbia
  unsure (1)..(464): unsure at all n locations
caaatatatattttaaaaaaaaaaaaactgaaacaaaagaagagtcatcagattttgaagacatgaaggtcatgacactaatgggggtcacatttgtgattatcgtcctgtcatctcctattttgatgaaagcagaagagacacagtcatgtgttccgatggagctcatgccatgcttacctgcaatgaccaaaagagaacaaccgactaaagattgttgcgaaaatctgattaagcaaaagacatgtttatgtgattacattaaaaacccattatatagtatgtttactatctctctagtcgctcgcaaagttttagagacttgtaatgttccttatactaagtggtaaagctcaatatattttttaaaataaattttttttttttggtaataatattaataatatttttttttatatatatattggttnttttatttttttatattattttatatatttttt

SEQ ID NO: 107082 - DNA, 289 bp, Arabidopsis thaliana columbia
cataaatctcaaaatccatagagctaaactctactatttttttatctctcataactacccttcctatgccataattaataacctagtgaggattatctcactacaatttttcttcaaaccccaacattaactataccttctatactcatttcatacattacaacttcataaactttattatttttatttctataaacaccaactacttcattattgatataaacaattctttttcttaatatattttctcctaaccttcattacttaataatacactttcatcttctta

SEQ ID NO: 107083 - DNA, 457 bp, Arabidopsis thaliana columbia
  unsure (1)..(457): unsure at all n locations
attctttgaaatttgcccagaatcgatgaaacaatcatattcactcgaaatatcgtctctaaaggttggttagtttcctccaggcgttgataggtgatcagagatatgaagaaatcgccgttgccggtgcagaatgtgcagagctccgataagaacgttgccggaaaagaagcattggtgaagcttttgagatggcatttcggtcatgcagatttcagagggaagcaattggaggctattcaagctgttgtatctggaagggattgcttttgcttgatgccaacgggaggaggaaaatcgatttgttatcagatacctgcattagctaaacctggaatcgnccttgttgtgtctcctttgattgctttgatggaaaatcaagtaatggcgctgaaggagaaaggtattgctgctgagtatctctcatctacccaagctacacatgttaagaacaaga

SEQ ID NO: 107084 - DNA, 356 bp, Arabidopsis thaliana columbia
cggacgcgtgggccgacattaaccaatggattactctattcccttaaagaaaaaaacgcgaatggtctattctccactacagatgggcctacatatatatacacacacttgtgcattttcattgatcaactatatccctcttaagatacctagaaagaggagtggatttatctaaagatgcctgattggggacccgtttttgtcgcggtgaccctttttttgttgctgactcccggactgcttattcaagttcctgggagaggtccagtggttgagtttggaacgtttcatacaaagtggctctcggttatttggcatactcttatttactctactcttggttggattctcttgct

SEQ ID NO: 107085 - DNA, 342 bp, Arabidopsis thaliana columbia
gagcaatctatatagattacaatccatactgcttgaagagacggattcacgggtcggatcttgtaagggtagctaggaataaaggctactgtcactactcatgcctcgagcttgatattatgaccttgcacttcaaagccaagaatcctcaccggttcttccagaaggctgaaccgcgactagtagcatacattgatcgggtgatcgggcaagacgtcttcgctcaaggttgaagctaaaaaaggagaatggtcgcccggtttggcagtacctgattatctcaccggcagttttgccagtgacaatgggtttgaccccgtgagcctagcacaggatacaaag

SEQ ID NO: 107086 - DNA, 313 bp, Arabidopsis thaliana columbia
gcgacgccggaacccggggacccacgcgtcgcgtgtcgaaccattattagagagaaaaaatactaaaaaagagagggctgatacgaagctggagtgaaagcacgatctgagccggtagccggttgactcggtgtgcaacaaagtaagacatgggttatagagtctgtctgtttgaatcggagatcttcagactgccttatatcccacctgctaagccctacctggctgatgttgggaccagatcgcgtaaggcgcttgatgagtggaccaggggcttttttgagagtatcaagaagttgtctgtggcaaattt

SEQ ID NO: 107087 - DNA, 388 bp, Arabidopsis thaliana columbia
cggacgcgtgggcagtgattcttaaggaggtaattgtgaaattcccggaggctagaattgggggaggtaaatctaatgttcagagccgtccaaggaagggaagcataactcatgaaaagtttgctataaccctgtctctgcttactatactatggaccctgaaagctttatagatgctgacatgactaattctgctgctgcagataatagtattagcaatggaacaaatatgtgttaacgaaaatgaatctgttcctatcaaaacctccttcactacttcacaaagacacattgcgaattcagaatacagttctcactctcaatacaattgaacacgtcaaggatgcacatttatgccacactagtacgtacatatatcatcatctca

SEQ ID NO: 107088 - DNA, 453 bp, Arabidopsis thaliana columbia
  unsure (1)..(453): unsure at all n locations
ggataacgcggcaaatgccacggcagcaacaatcgtgaaacctttgggactaggggatcatagttttggggagttaatcataattaacaaccctgtgacactggaccagaactatctctcgaaaccagtggctcgtgcccaaggcttctacttttacaacatgaagacaaattacaacgcttgggtcgcttggacattggtattcaattcgacaaagcacaaagggacatttaccataatggatgcaaatccttttggtttgcagccggccagagatctatcgatcgttggtgggactggtgacttcctcatgactcgtgggatcgctacattcaagaccaaactcactcaaggcagtaagtatttttgtgtggaaatgaatattaaactttatgaatgttactaatatgtgtcttgggattgatcttcgngtgttggcagtttatttgcttt

SEQ ID NO: 107089 - DNA, 446 bp, Arabidopsis thaliana columbia
gtgagatggtaaaaaaaagtcatttaacgtaaaaatgttggccttatatttcattctactcgtctgcgtgcccttaggtgtcatcatgaccgtgacgagtcctcgactagccatcactgtggccgtcactcagccggcggtcttaataatacaaaatcccaataataacctcacatctcctcaagtaattacatctcagccactggatcacgatgagttactccttcgtcaagcttctaaagccaacccaaacccttcacctaaatttcccaaaaaactagctttcatgttcttaacaacgaactctcttccacttgcaccactttgggagctttttttcaaccaaagctctcatcacaagtctctttacaatgtctacgtccatgtagacccgactcaaaaacacaaaccgggttctcacggcacatttcaaaaaccgatcatac

SEQ ID NO: 107090 - DNA, 452 bp, Arabidopsis thaliana columbia
tgatcgttggtggtttagcgaacatctcgaacacttagactagcataaggacatggttcaattgccacgatgagttcttctttctgtttctgctgcctcccatcatattccagtcaggcttcagtttacaacctaaacctttcttctcaaactttggagccattgtcactttttcagtgcttggaacttttgtagcttccatggttactggattgcttgtgtaccttggcggtgtgatgtttctcatgtacagacttccattcgtcgagtgtctcatgtttggctctcttatctcagccactgatcctgtcactgtattgtcgatatttcaagaacttggttcagatgtaaatttgtatgccctggtgtttggagaatcagttttaaatgatgctatggcgatatctctgtacaggacaatgtccctggtgagaagtcattcctctggacag

SEQ ID NO: 107091 - DNA, 454 bp, Arabidopsis thaliana columbia
tcttactatactatggtgcaggttgtggactttggtgaggtgtgggcctgttcgatgttcacgcgggaggggttacataaatccggtcatgaagttcattgaccaaggaaggaagttcatctgtaatttctgtggtaaatgttactgttttcagttatgcaagctacaaaatctgaagttatagctatgtaactgcaatagtatgtatcaagttatgaaataattgaatattccaagctagaagcgtacactaacatttttgtgcttaaccttcccgtatttaaagatttcttctgtcaatctggatttcacctaattgtggaaggtggtgatatgattttgtttaagagagatgcttatatattgttattgttgtattctcttgggagttcgttgatgtgggaagctttgtgatccatttccttatcaactttcttttgcacaggattcactg

SEQ ID NO: 107092 - DNA, 386 bp, Arabidopsis thaliana columbia
ggaatgtactatgagttcacaacacacaactgggcagttggaaattttggtaacctgcaaacggtgctaccttgcaagagcacgtgcacaaatcaatatcaatcacagacaaccaacaacacccagtgtcctgatcaacggtcaacttcaaaatgcagccacttcaaacacgaagacacagattaagcgtcttaatcaacagttaccatcttccaaaacaggcgacaatgcttcaggagttaaacaaatcactccggatttcaatttggcaccgaaaagtaaacacaagacattgtcttggggagtcatatggaggaaaaagaacttggcagacacaggtgttagtttcagacatgaaaatggtatgttggcttgacgatctgatc

SEQ ID NO: 107093 - DNA, 427 bp, Arabidopsis thaliana columbia
ggtatgataaaatctaccgtaaattggcatctcagggtaatgtttcttcaggattggattctgtaaaggatgaaccagagaaactcagggaggaacaaatggagggggatggttttaaggagaagttatcagactctgtgttgatagatgagaagcttgaagagtacagtgattgtgatcgaacagcaaccacttcccgttctcacacagatccagtatcttctcaatctactcaccagaccccggaaagctttaggactccaataacatgtgatgatgatacttttgtatctgtctctgggatttctagggatgtttcaaatctaatcccattcgcgacagagactccagcttcacctgttcaagaaaaaatggcaaacactagatcctttagcaacaactctgtgaaaggtaatcaagatgagtt

SEQ ID NO: 107094 - DNA, 458 bp, Arabidopsis thaliana columbia
tgaatttacaaaatacgagagagaccttcttgctaatgctaacaactaaattaccaaccccacttcacgcgcctctagcaacctcagaagctccaatcaccgtcttatcctcttgattctccgccggcaaaccaaaattggtcggcgcgtgaggtccaatcagcttaattgaagcgttatcataagctagagcagcttcctcagcagtgttaaaagtacccagccagagacgatcacgtcgtcctttacaagctcctcttccacatctgatctccgccacccacttcccccacggcctctgcctcactccacgatatttcttctccgttttcgccgtcttgagaaattccgccgggatcctgattttgaaccgtgttttgcagacatcgagtttatcggcggaatcggaaggatcgattacgatctctttaacgaggcgtttcccacggcgccgagtc

SEQ ID NO: 107095 - DNA, 438 bp, Arabidopsis thaliana columbia
acgctctcgacataacagcaccagtacactttccaactctttttgtgaaaaaaaaaaggagacatcggggactggtagcttttgatgaagggtgagaaatcatacccctaaatctttaattatccaaggattcagattcaatcgatcaaagcttctcaaattttggcggctgcattttctatttttgcaccggcgttaaacaagcaagtattaaccttaactgacgaagcttcttttacgattcatcatctcttgcaacaacttcaaaaaccctttcttctattaggcgttaaagctcgtgactgcaacaacttgtcgtacactttcaattactcctattagaaacgtaaatttgacgattttctagaaaataaaggtattaggattcttagtgaaccaaaatccttaatgcatgtaattgtaacaaatctttatttt

SEQ ID NO: 107096 - DNA, 457 bp, Arabidopsis thaliana columbia
gtaatttaatctatccttgtaaaattcgagcaatggcgtgatcgatttttctcgtttatggtgtgtgggccagttttttgaatatgacggtatatacttttctgattaacttttatggtagacgaaattcgaaacgggataagcttggagaaatagaagaggaagacaaaaaaaataagaaatggattaagaatgttggggataaaagaagaaggagaagaagtgatagtgatgatgataagattcgattttaatttaaaacgggtcccgaaatacagctggtgtggagaagtacaaataataatacaagtttttaagactatcggaaatgaatttatagagagtttgggtgggggaggagaagacaccaagtacaagtttatatccaataacaaaattgaggtcttggactgtggaaaatggaaactttaatgaccttaaaaagcgacgtgagttc

SEQ ID NO: 107097 - DNA, 453 bp, Arabidopsis thaliana columbia
atatttttaaaaattactactaatgtctaaccaccagttttttttcttctaatatgcatgaaggtgtgtgtatatactgtgtatgagtatatgtatatgtgcgttgagtataaatacgaagtctcatcttctaagtccaacaccaaaattatttttctctcttttaactacaagtctactacaacttccaataagagagaagagacagagcattaatggagtcaccaagccttccgatgacggccaaagactggaccaccaccagtctccaccgtgtcttcgccatgcaaggcggcgaagatgacctcagctacgtcaacaattccgatagccaagctttggctataaccttaagcaaaccaatccttatctcatctctccaatccatcaaactcttcttcgaccaaactcccatcaaaatcaccgatctcggctgcgccaccggcttcaaca

SEQ ID NO: 107098 - DNA, 434 bp, Arabidopsis thaliana columbia
cgcgagcggccgcccacgcgtccggtggctagttacatgctcttacatttaagtgtctttcctgctcagtatatttaatgaacgcgaaatatgtgatcgctcatagaatggttttgaattttgtgctgattcagtaatatgttaccatttctgcctatcttctatttctcaatgttttttttgtggctgtgttaatagggcaagataggagcactcagagagatcaggtgcatctgccttctcattcaggacaagtactttctaacaatgcatttcaacctcagagctatcctacaactgatcacagcaaggtcaaattttccggggaaagagcacatcgtgagctagaaattcgctcaaagactcctcaagtttcttatgatagctacgttgaatcaagtgtggcatctactgctccaagatcagtcaatgac

SEQ ID NO: 107099 - DNA, 447 bp, Arabidopsis thaliana columbia
ggagcagaaggcaaaggccgaatctcagaaacatgttgcagaggagctgaaaagtctgagaacattatagggttgaacttgagaggttacgccttctgtgcgagcggatagtcaagagggagaaattaaagcgagagttggctatttcctcacatgaaatacttgctgccaaaagggatcatgctgcacggccattacatgtccgtaatccattttctcctccagaagtttcgtcggactcagctacaacatcaataaaaggccatcctgatagtaataatatctggcagtgaagcaatacagaggtcagatgatatcactattgacagcacagtcactgataagcgcagaggcaaaggtcccttattaatggacacggatcagaaaactgatgacagtgctacttccaagagtcggttttcccgtaaactaacagaaagacagatc

SEQ ID NO: 107100 - DNA, 468 bp, Arabidopsis thaliana columbia
caggattcaaagaagctgagcatgaaagcattgttggcagatataaaagagattactgaaaagaagcgagaggatgattcacttcttgcatttgcagccggaaatagactatccatttccccagatttggagtttgattatccggatcatgaccttcatgaagatctttaccagctgatcaaatattcgtgtgcagaaatgtgctctaccgaacagttagataaggtaatgaagatttggacaactttcgtggaacaaatatttggtgttccttctcgccctcaaggtgctgaagaccaagaagacgttgtcaagtccatgaaccagaatgtaaagagcggtagttcaagtgctggcgagagtgaaggaagtcctcacaattacgctagtgttgccgactctagacgctcaaagtcatctcgaaaagctaatgaacatagtcagttggggcaaactagtaattcggag

SEQ ID NO: 107101 - DNA, 370 bp, Arabidopsis thaliana columbia
  unsure (1)..(370): unsure at all n locations
cggaannncccgggncggacccacgccgtccggaagacgaaacacnaaaagatgcnagatcttcgtgaaaactcttgtaccggcaaggactncatcactctcgaggtggcgagagcnnagcgacaccanntcgacaatgtcaagggcctaagatcctacagacaaagaagggaatctcctctcggatccagcagagattgggatctttcgccggaaagggcagctctgaagatggcccgtaccttttggctgactaccaacatctcagaaaggaatctacancttcatcnttgtngttgaggcttagaggagggtattattggagccttcctttgatgatgncttgctcgtaaagtaccacatcaggata

SEQ ID NO: 107102 - DNA, 318 bp, Arabidopsis thaliana columbia
gtagctacttgttacactatcgcgatttctctgtttctccacacacatctcccgtcggcgtagcttatcatcgcggctgggggctcgatcgaggagatctacttataaagcctgcttgctcgggagccgaaacccgaggctgcaatcctccggtcccgggcatggagccgctccatgcggagctctccttggacgggtcccgagtattcgagctgttctcgagctgatttggctagaccatcttgtgcacctgcttaagatgacgtatagacagaccgtatattacggtggcaaaggcgccatccgtcgtgtgcgtca

SEQ ID NO: 107103 - DNA, 239 bp, Arabidopsis thaliana columbia
attatcactagtttaaaagaagctactttattgtctctgaaaccaaagctgccatcgggatgctttcggttaccgagcagaagtccgaaccatgaaatctatatatcacgcgagcatacatacggtcgctgtggaattaccgcaactacagtgtacaagcttgtatataacttcgctcgagcctcacgagctaagggatttgtaatcggttggggcgggagctccacggtattaaacca

SEQ ID NO: 107104 - DNA, 280 bp, Arabidopsis thaliana columbia
agaaaaactaagcagcatttatagacgacgttgcatctaattacccaatgtaacatgagtgtaggggggcggttacatttagtgcgggggggaagctttatacagacgaggcgatcatggcttcggctggtaatgtttaccacatgatcgttgtgtatccactccatgtttccatagcatgtccagtcaccatctagcgatgtgatctacacgaacgctgctagcacacacttatttatatcattttctgtactaacgtacatgatgcggaggcaaatgt

SEQ ID NO: 107105 - DNA, 272 bp, Arabidopsis thaliana columbia
ccataatatgagagaaataagcatacgatattcaatcaaaggctaacaaggctcatggggctgacgggtctctctggatgagatctcgacatctgagaagtaacctcttaatcttgctcaccagtgaatgcacagagtatgggaaaactgaaacctgatcaactgggatacggttacgatggaagcaactacaataacggatgtaggtaccagggaggagggtgatcatacccattaagccgaggtaggtgccaagcacgacaatatattta

SEQ ID NO: 107106 - DNA, 273 bp, Arabidopsis thaliana columbia
attatcacttgttaaaattatgatactttattctatctgaaaccaaagctgccatcgtgctcgttttgatacatgatgagatcggcgactttgggaatctatatattatgcgagcttacatttggtcgctctgataatatggcaatgatcattctacaagcttgtatctaacttcgctcgatcctcacgatctaagggatttgtcatcggtcggggtgggagatccgccgcattaaaccaacggaggtgacgagcgcctgataatatctaggc

SEQ ID NO: 107107 - DNA, 422 bp, Arabidopsis thaliana columbia
  unsure (1)..(422): unsure at all n locations
ccgggnccgacgccacgcgtcccgagctatgaatatttcaatgaaaacattactcntttttttttcagaagaatgtctatataggggccaggctaaatcccaacgcgagggagttgagcttcaaacagatggacgagagaaggtattatgaccgtgtccagagcatacgaatcatacccgtcattaatcgcccacttagaatgggatccggaaaccaaaatgagggactcgcttgaagaaaccttatccttccagcacaggtcatacccctgagctctttaggatgcaacatgccaaccagtgcctgccttaactctacaacacccccactaaactcttttaacacgcgtcattttcgcactatactctaatcggttgtatttatatcattccagagaaaacattttttctttttttttttt

SEQ ID NO: 107108 - DNA, 411 bp, Arabidopsis thaliana columbia
  unsure (1)..(411): unsure at all n locations
cagtaagacagctcgctgaaatgatgaccgaggtttacgcaaaagtgagtggagaaggagccattgagagcccaacggttgatgttagctccaaagagttttacggggaaggttatgatgacagtgacaagagaatcccagacatgaccatcattaaccgccaactcggatggaacccgaaaacatcgctatgggacttgctcgagtcgaccttaacctaccagcacaggacatacgctgaagctgtgaagaaggcaacatccaaaccagtggcttcctaaactctccaagaccccaacgaaactcgttaaacacgcgtcattttggcattttactctattcgattctatttttttcatcccagagaaaactatntttcttttttctttttaagaaaacgatataatcacg

SEQ ID NO: 107109 - DNA, 178 bp, Arabidopsis thaliana columbia
  unsure (1)..(178): unsure at all n locations
gccaaacgcgtctcggaaactacannaaaatggcgaaactcggaaggaagtatcatgtcctcgtatcttcacaatctcttngagacctggtctagcggnncgaaggatactcttgctcgcaaggagagctatctacacacgattctgattgttttgaaagggcctacatattcaacga

SEQ ID NO: 107110 - DNA, 261 bp, Arabidopsis thaliana columbia
cttaacaatacatttagaacctctctagaatggcctgagcgactttaggaagcgtaacattgagatctggtaccgggcaccaagtgtgagccatcaaatcatcaagccaccgccagaatcgatactgatgctgtagcatcaccgctgcttacagaaaactcatctctgatgaacttagctgtacgagacgaagcgattgcacgtcgaattgctttgcccggaaacgccatgacaatatatgcacattcgggcggagcggat

SEQ ID NO: 107111 - DNA, 205 bp, Arabidopsis thaliana columbia
attttcacttgttaaaattaaggtactccgctgtatctgaaaccaaagctgccatctttctccgtgtgggttctgattagatctgcgattcatcgattctatctattatgcgagctcacatatggtcgctctgattatatgacaatgatattctacaagcttgcttcttacctcgctcgaacctccacttctaacggatttgtgt

SEQ ID NO: 107112 - DNA, 478 bp, Arabidopsis thaliana columbia
ctgaaaaaaacaatggcgatgatgcttctgcaaatttctccttcgacttccttgttgagacaccagaaaccttcaaatccggttcttccactcttcagtttcagcttcctcgaagaaattcagatgcagagccgtccgtgagaaggcggaggacattgataagaacatttcgccgccgtcttcttctactcctcctacttccgccgaagaagttaccaagaaatatggccttgaagttggtctatggaagatattaagctctaaggatgatgaaggaagcgatggagacaataagaagaagaaatcaaaaacagatgaggctaaagagttacttgcaaagtatggtggtgcttatctcgctacatctattactctttctctcatttccttctcactctgctatgtccttgtgacttccggtgttgatgttcaagctcttcttctaaaggttgggatttcgacgaatgagacaggagag

SEQ ID NO: 107113 - DNA, 263 bp, Arabidopsis thaliana columbia
ctcttcctttctgcaatctgccgcatctatatctatctctctgcctaacgccactctggacgggtcttccaacggacttgaggcgggcgttggcgtttcagcctcttccacggctgacaacgccataactaccgaaacaagcacctgggcaagagacaagtgcgtgcacttgatcgcttcatccggaaagaaatagttagcgactgtctggttaccgtcctgacctcactgacttcgaatcgactgacgatgctggctacttt

SEQ ID NO: 107114 - DNA, 367 bp, Arabidopsis thaliana columbia
aaaaagagtcatttccttgacacgatgaaatcatgatactctctgttcatcaaccactgctctgcttcttcttaaccagcggactccagattaatcctgaccagccattctcaatgataccactcacaattacatccgtactagctgcaacaccacgatgataccctgtcctattgttctcttctctcagctagatctgtagctctgctcacaacgatccagcccacttggctagagccgacatgaccgtcactgttaccaagactctggacttagcgctgatacccttgcaatgtcaccactctgcagccagagagcatcgaaaatggggctcaccacccaaccggaggctatgtttgtcacgact

SEQ ID NO: 107115 - DNA, 391 bp, Arabidopsis thaliana columbia
gaaaaattagctgcttttgaatcaaaaagttttgtgctttattgattcaatcatggttgaggatcgtgcggcaccttatactgcctagcaaccttaatctaacatcaaacaactacctacttatgaacagatccgacgacgatttactgaatgcaaaaacttggatttctagagttggttctattagaatttctctagagttgctgacacctatctcggaatactcaccatagccgctgtctacttggtgtacaacaccaccgacactgatagtgtcctttgtttccagcctcagacaactcaatgtcttaaatctttatctcgccctaaaatcaaatggaattcgattcaagcctatcctgatataacgtcaccgtacgctaatttgcag

SEQ ID NO: 107116 - DNA, 299 bp, Arabidopsis thaliana columbia
atatttgttaaatcgaatccttgaagacaaaaacacatgagagagtacgagagatgacagcctgcgctatctacaaatgcagcgtagacatcagttcccaattgagaagatcagacgcactcttagaaactgcgacatcaatgaagttggtcacaagagtatcatacagagcgatgatctgtaccatcttatactggagacaagcgtgtatgctcgagaaccagaattaaggacagaactcatggaagtgacagcctaacattcatgagacataatgaccacattagcttatgaaagac

SEQ ID NO: 107117 - DNA, 256 bp, Arabidopsis thaliana columbia
attatcacttgttaaaattgtgttacttagttctatctgaaaccaaagctgacatctgtctgcgtttgggttaagatgagagctgagattctgagattctatatattatgccagctcactttggttcgtgctgatgataggacaatgatattatacaagcttgtgtctttcctcgctcgatcctcacgttctaagggatttgtgtacggcagaggtgagagatcggtcacttttaaccgagcgaggttactagcgc

SEQ ID NO: 107118 - DNA, 345 bp, Arabidopsis thaliana columbia
tgaatcattagttaccacggaatcagcactaacaaccgcggcgtcagctattgcatagagaagtgattcatctatgatgggaggttagcttttatgtttcaggctcttgaattggctcttaagattttgaacgatggcttatcagcggattatataccagatccttctggatatgcgattatacatgatgacaatgatcgtcaatgcaccgacgcatcctgagactactcaataggaagagtaaacagtagctatctaaaatcttcacaccaatatcagagcatgtacacaacgttactctgagaactaggagaggcttcaactagagacatcctgattgcataa

SEQ ID NO: 107119 - DNA, 362 bp, Arabidopsis thaliana columbia
ctaatcctgccgttacttcatcgcatcagtaacaatcaccctgtcttcctcaaccaaggaaggtgtgttgtccaccagcggacggcgagcgtcccagctttagccgcatcaacctgcgacgtcggcagacaaacccaacctgtgctcaggactcaagacgagaccctcctcttgatccaataatacaaagagaactggtccgcaatcgtacgttggcctctaaaatcaactcactgtgaagagatcgccgatgctgtctcatctcggtccggcggtggacggacatgtacacagcgtaagcataagatcgagaagacgcgtaaaagattccgatcctagagacagagcttgggtcctatctc

SEQ ID NO: 107120 - DNA, 321 bp, Arabidopsis thaliana columbia
gcgtcaaccgtcgcactccttcatagcgtctattgtaactctgatgtctcaaacgaaaacgcctgcgttttctataagaaatggcgtgagattgaccgtcctcgccgcagacaggggcagcagcagaacaacaaagcatcctaggcccatgtagatacattagacgtttctgctgtttccgaatccaaagagagtacagatccttagccacaggttatgcagcagactgggatagagtctgcttcagagcaagtttaatctgaagtttgttctaacggtgagtcttaggcaatcttaccgatgttcagcctgagagaacct

SEQ ID NO: 107121 - DNA, 146 bp, Arabidopsis thaliana columbia
  unsure (1)..(146): unsure at all n locations
cattatcacttttgcgcttgcgatttactaacacgtatctttttttggggttgattccactgggcagggttatatgaaacctttgagggaggttaancttttaagccccttccaggcttgattggaacggtttccattgggttttc

SEQ ID NO: 107122 - DNA, 310 bp, Arabidopsis thaliana columbia
cttgaacacttgtggacttgttctatacaataaccttgaggctctagctatagtttccgcttgagctgtttataatggcagcgttgacgaagataaaccatgaaatcactgacaagactgtttggaactcggtgctagtgaagttacccgccggtgtatcgagcctgtgcggctcggctctctcttttaccggattctaatgtggttggtccatttctgcaacgaggatcaccgcttctggaattgcgaacaagctgttgtcagaagtgatcaactccttagtgtgggataaacatttaatgttcgttgg

SEQ ID NO: 107123 - DNA, 255 bp, Arabidopsis thaliana columbia
ataaaagcttgtgaaaacacagatacttggttcattttaaaaccaaagctgacatctcgggtgggtatgttatacgatgagggaggcgctttttggactaaatctattatgccagcacacttttgacaattactgattatactaacactgattaaatacaagatcttttcttgattcgatcaatccaaaacgactaagggacatgtgttctgtagaatttctagtacctagagtgttaaacgagaaaggttacta

SEQ ID NO: 107124 - DNA, 476 bp, Arabidopsis thaliana columbia
attcattaatatatttattttgagattttggttgattttttgatatataaatattggacttgccattttctattacaaccatcaaatctcaataaagcaaaacgaacaagaaaatggcgagcacggaagctctcttacccgtcacgtccctacaagatccattatctgagtcaagatccgaccagatcccggagacccgtcggagacgacccatcaaagttcatcttgcagtctattccggtttgctcttgatcgctttgtacgtcactctcatcgtcacacacgacggctccaaggctgaaatagcgacggagtcacgtcctcgtatggccggcgtgtcggagaagagcaacgacggtgtttggatatcatccgatgatgggaaagttgaagcgttcccgtggaacaatactattttgtcggggcaacgcacggcgtttcatttccagcctgagaaaaattggatgaacgatcct

SEQ ID NO: 107125 - DNA, 369 bp, Arabidopsis thaliana columbia
cttgaacacttgttgacttgttctctacaataacttttattttctgctattgttaccccttgggctgggtataatggtagaggtggagaagataaatcatgaaatcacttaccagactgattgcttctcgttgcaagtggtattacccgtggttttatcttctacttttttcttggttatctctttaatcgtgttctcatgttcttgagccatttcatgcaactggtgtcatcctttcttggaattgttaacaagcttgttactagtattgatcattttcttgttttgtgataaacatacaatctttgttggaaccttgtcatcttttgttttgtttttttgttggagttcatgtatatatacatcttc

SEQ ID NO: 107126 - DNA, 284 bp, Arabidopsis thaliana columbia
ccgttaattagggttttcttctctatctcgatttcaataccattgatgatcccctgagctagggttgttcgatcccgatggttgtgtcgcttagctctgatctctgttcatcgaatttggttaatttgttttgattggttaagatacattgcaaagcgatgccaccgaatgttgtgaagaggggaggcgccacgagaagaggtgccaggcttacgagatcggcgctcaaggcgcacaattcttacgcggaatctttccatgacgaatctgtaatatcattgagc

SEQ ID NO: 107127 - DNA, 278 bp, Arabidopsis thaliana columbia
ctcgcatggcctaacttttaacgaactttttgtttttatcttataactgaaagagacggagagcttctattgtctgtagtgcctagggcaaacgtggtggtttacaaatcatgaccgatcaattattcgatccagatgcctgcatgagttaattgaatcgcatcggaatgtgctatcgtcgccttcatcagtatgcatcatctttggttacgatactggtgttttgagtggagctgattgttttatagaagaagatgcgtagtcaaattatgatcata

SEQ ID NO: 107128 - DNA, 324 bp, Arabidopsis thaliana columbia
gtccgggattccggcgcccgctgacgcgtgatacaaccgtcgcactcgtactacagagtgttttctaacggtgatgtctccaacggaaacacctgcgctttctataagaaatatcgtgagattgaccgtccccgccgcagacagaagcagaagaagaacaacaaagcatcctaagccgatgtagatgcatcacacgtttctgctgcttctgaatccaaagagaatacagatccccagccacaggttagcgagcagattgtgatagagcctgttccagagcaagcttaatcagaagatggctctaacgatgagtttaaggaaatg

SEQ ID NO: 107129 - DNA, 204 bp, Arabidopsis thaliana columbia
cggacgcgtgggaaaaaaaaaaataaaaaaaaaattttttattaaaaaaaaaaaaaaaaaaaagggtaaatatgtatgggcggtctgtatgtagcgatccaatcttacgtacgcttgcatgcaaatgtcattgcttttatatagcgcaaactaaatttaattgactggccgtttataaacaacatcttgattgagaaaaccctg

SEQ ID NO: 107130 - DNA, 418 bp, Arabidopsis thaliana columbia
  unsure (1)..(418): unsure at all n locations
cagagattgtaaagatggtacttcatgggggagctcaccgtgcgaagcaggtggtgaaagttctgaacagcgacgggaaagtcattgcttatgctaagccgtcttatccatggataaaaggaagtgacacatcaactgcagaatcaggttctgaagctgaagatattgttgtgtctccaaaagcagtaaagagttattcccatctccgcttgacccctgttcgtgaagaggcaaaggttggttctggtgaaacgagttttgccggtagttttgcaggttatgatgagtatgttccaatggttgacaaagctgttgacgccacctggaagttaaacccaccgncatcaaccgggctcctttaaaggagctatatgcctcaatgtccaaggacatgaagctcagtctcggtctagaactt

SEQ ID NO: 107131 - DNA, 377 bp, Arabidopsis thaliana columbia
gcaaattacacggcatcaaagcattggtttttctgttcatatactatttcataggttgcaccgttccattggctttcggggtatgggatctgcggcagttaccccttcaaaacattgtgggtaggcaagaagccaccagagggtttccttttgtaaccattgaaactgtttcagggcagccttaaggttctgaacaggaattgggcttcggccacagtgtcgaaaaatcatgtgtttaaagcaggtcctatttgaaccaaccattcataataatcattgacctgaagcaaacatccgccaatcttctatggaagttaccgggaaaaagctttatggtattgcagaatggttcttagtcccaatgtgttgtgttgtgt

SEQ ID NO: 107132 - DNA, 280 bp, Arabidopsis thaliana columbia
cccggcgacaagggcagagggccgttaaccatggagtcttggaacgcaagctgcgccccaagccttctggccgagggcacgtttgcctgagtgtcatcatcagtgccgttctcactagcagagctatcttccagagaatgaagaactacaccatttattgcagtctcaatcacaatccagattggggttggtttcatgcttattggctttgatatgggaatttgacttctcagcgctcatggttctgaataatgccatccttaatgatgggactatcatg

SEQ ID NO: 107133 - DNA, 263 bp, Arabidopsis thaliana columbia
gagatgagggagactattagagagacgagaaggagctgaatcttacctttactgaagacgtcaccaaatacaagagcgccgctgtgatcgtaaacaaggcggtacaagttgctatagatgaatgcaaagccaaagctaaaaaaaggggataactgggagaaaagagactgtcttattaaagagcaaacagcgagcatgaacaagaagtctaagaagaacattgagagaggtggtgccgttcctacatgcatttctgggaacaa

SEQ ID NO: 107134 - DNA, 215 bp, Arabidopsis thaliana columbia
caaagatggcaaaactactcagcaccactttctaatttttgtctatcagacaaaatcgacagagcgggctttactgtgcggacatgagatcatcaatgacctaaaaacataaacacagtttgacacgggggcatagggctctgcgacaacaacgacaacgactgcactggtagcaatagatgaagttgaaaaaagcacaatactatttgaccagg

SEQ ID NO: 107135 - DNA, 407 bp, Arabidopsis thaliana columbia
caaaaaagacagtggtaccagctccactcttcaatttctctggatcaaacaaaattggaggagccagcgtcactgtttgaacattttatcatcgtggggcttcatccggaaacgaatttgaggccagtggaagaggctttccgtagaagaaagaaatgggagatggagatgtcaaggtatgaagtggcagattacagaatactccgtcaccgtgggcctcaatttcctatattggagccacagattctttttaaataccctcccggaaagaaggtagcaatgcgtccaaaggatctagcaactttctgctttcctggtggtgtcaaggcacgacttttggagaggaccccatctctcagtgatctaaatgagcttgtgtatggacaggaacatttaggcactgatga

SEQ ID NO: 107136 - DNA, 203 bp, Arabidopsis thaliana columbia
aacagatctataatctcttgcaaacatttttttttttttctaaagcgaaactctgcgagaagggcaaaattccgtggaccatggggacttttaacaaatgatacacctcatgacttctaaacaaggggacacttacctgagagtcatcagcattgccgctatcactagcatagctagattccagagtatcaataactacacaa

SEQ ID NO: 107137 - DNA, 212 bp, Arabidopsis thaliana columbia
  unsure (1)..(212): unsure at all n locations
cacagataacaaaactctcagcagcacttattatttttcgttaagcgaacaccacgggaagagggcggtttactgtggacacatgggaacatcaacnacttaaacagatgaacacagcttaacacggggacttagggctaagcttcaacaaaaacaacgatgtcactagtagcactagattatagtgaaaaaaaaactatacatatttttca

SEQ ID NO: 107138 - DNA, 453 bp, Arabidopsis thaliana columbia
  unsure (1)..(453): unsure at all n locations
gcgccgaagccagaacaatacaagnncagnnctggttttattttttcagacatcttctcagggctgggagacacttcattaggtgtgtgggaaagctagagtatcaaacttcagattcaggagactacatttttccagtacgaggctccgagagaattgattgttactctgttagatgttaatggaaaccaaatattacagaaaggtgtgttctttttacaactctagagatcaaattagtggttttattagattttctgaatttgagggtttttggaggtagagatagagacaagaatgataatagagagtggtttcttggaagagaaactttcattcaatggctatggaaatgttcaattgaaaatgcagtttgttctcagggaggaagaacgaaatcgcatacgtttcttgagacaatctgcattgcgaaagaagcatgaggagcttgtc

SEQ ID NO: 107139 - DNA, 457 bp, Arabidopsis thaliana columbia
  unsure (1)..(457): unsure at all n locations
ctcactttcacagantgnggcagngcgattatggttatggcagagctctcaaccccgggaacggcgtcatcttttgtcgagtgggggtctcgaattcctctctcttcaaaattgcacctttcaaaccactttcgccatcttcttcttccacctctccacacaacaactcccaactacaaaatctcttgctccgtttctcaaaatagccaagctcctgatgctgcgcaagaaaatggattggtgaagacgaataaagagtgttatggagtgttctgcctcacctatgatcttaaagctgaagaagagacaagatcatggaagaagttaattaatattgcaatttcaagtgctgcaagaatgatttctaaccatcttctcttcagacttgctataggggaagtatttggtccagatcaacccattgcattgaaactgctaggtacagagagatcaattc

SEQ ID NO: 107140 - DNA, 465 bp, Arabidopsis thaliana columbia
  unsure (1)..(465): unsure at all n locations
gtgagtctcttctctctctcaaatccactccgtattaagttcataatctatcatccaccatggagaaaacatcaatgttctccattcacgaaggaaagccgattcgatgcaaagcagcagtatctagaaaaccaggagaagcattggtgatagaagagatccatgtggatccacctcaagcttatgaagttaggataaagatcatatgtacatctttatgtcataccgatgtttctttctcgaaaatagacagtggaccgcttgcaaggtttcctaggattctaggacacgaagcagtcggtgtgatcgagagcattggtgaacatgtgaatggatttcaacaaggtgacgtcngtttgccagtgtttcaccctcactgtgaagaatgtagagattgcaaatcctcaaagagcaactggtgcgcaagatttgccgacgatttcctatcaaacacgagacgatatg

SEQ ID NO: 107141 - DNA, 298 bp, Arabidopsis thaliana columbia
acccaccggccgaaacacacatcatacctatatttggcactaataaacatattttatggatatgagaatcaactggaacgggggtagggttctacggaaagggtgcaaccaaaaatgcaccattcgaccattccttcaatggaacaaatacgcagactcttaaaccaatgctacactcttccttgctaagatctaccgtcgagcccgtcttcttaacctcatctaatacggtcctgatcacactttgtccgcaatatttaagtgacatttgtacaaggcttttggtctcatcgtgaac

SEQ ID NO: 107142 - DNA, 217 bp, Arabidopsis thaliana columbia
gcgcccacgcgtcgttctcgaccggggcctctctttaatcctacccctctacgatactgtctggtgttttttttttttgcccttccttttcttcgttctaaccactgttccttaccgttgcgctcctagaggcactttggctcaacgctagaaatcgcctgagggcccgttcgcttgcgcgcggggcgatcgctgcttctagcaggccatgcgcgtt

SEQ ID NO: 107143 - DNA, 327 bp, Arabidopsis thaliana columbia
gtttttcttcagctgtggatttcttcaattaggtgtatctgttatttggtacacttaccgagggttgcaccccggagaagtggggtacaatgactgctggtcccaagtacagatttctcttcttcattatataagtaattttggtgctcatgattgatatagtaatttgatcactgttttctcttaagatcttgaatacaaaaaactttgaaactgctggagcaatatgggcatttgtaaagtggaaaagagtctttgtttttgagtgacaattatctcgatgatcaactactgactcatatgtaactattccattggtgaaatgcg

SEQ ID NO: 107144 - DNA, 468 bp, Arabidopsis thaliana columbia
  unsure (1)..(468): unsure at all n locations
ccacgcgnccggggaaaatcccgtcaggtctcttcaatgccatgtttttattttcgagctgnnggcagaaagacgcaggcgtacaccaaaaaccttgcttttgatggggttttcatctcattatactcggtggctttggacaaatctcaagtgttactccgtgagcatgttaagcaggctgttccatcaacatgggaccctgctgcattggcaaggtttatagatatttatgggacgcatataattgttagtgttaagatgggaggaaaagatgtgatttatgcaaaacaacaacactcctcaaaacttcagcctgaggatctgcagaaaaggttaaaagaggtggcagataagaggttcgtggaagctagcgtagtgcataatacgggttcagaaagagtacaagcaagtagtaaggtggaaacaaaggagcaacgcctgagatttgcagataccagttctttgggc

SEQ ID NO: 107145 - DNA, 447 bp, Arabidopsis thaliana columbia
cgctcttctaattttgccctcaaaacccttcaattattacgaaaacgccactgctctgtcggcgggactccggtgaggccgtttgggccggaatctgacaagggatatggatgtaggagttactacggcgaagtctatacttgagaagcctctgaagcttctcactgaagaagacatttctcagcttactcgcgaagattgccgcaaattcctcaaagagaaaggaatgcgcaggccttcgtggaataaatctcaggcgatccagcaagttttatctcttaaagctctctatgaacctggagatgattccggcgccggaatcctccgcaagatccttgtttctcagccgccaaatccgcctcgcgttacaacaacgttgattgagccaaggaacgagctcgaagcttgtggaggattcctttacaggaagatgatggtgcgtgccat

SEQ ID NO: 107146 - DNA, 415 bp, Arabidopsis thaliana columbia
aaacgaaacaaaacttttgctgcggcgattatcgttaattcgaaatggacgacggagaaggcatggaaactgcagcggcggagcttgagagactccaaattgaaatcctccacaaaatctccattcttgagagctcttttctcccacagaattcctctgctgctccgtcgccttctctaccggttgatgaaaacgaaactgtgactcgcctctccaccattctccagtccggcggcgttaacgacttctgcttcaagagagttgctaccgattactatgactggcctctcgaatctcgtcgcgacgttctcggcgctttctcagtcgaccatctctgcaagagtattgttctggttaatactcaagctgcatcaaatattttggattgcagtgatccaaacaactcaaaatacta

SEQ ID NO: 107147 - DNA, 611 bp, Arabidopsis thaliana columbia
  unsure (1)..(611): unsure at all n locations
ccggnnnccggaanncccgggtccgaccccacgccgtcncnnggaattccaaacaaagtttnngttgtgcttttctcgtgtattgttcattnnnttgtgnnngccattgnntcaccgcgaggggcgaggtcttgaagaaaagtgtccaagaggagacccanatattaggcaccnnntctcttnnncaaaatctactttaacannaaggcatnntggagcttcnnngctttctgcttgcnntggtcttaccttaccagcggcnnagcagtgtcttctaggcttctgcnttagtgcttttaaccaatccnncaaaggtccaggggccatgtgcattccgaaaggtggctacacaaagtaccaatcgggaccatagtcattgccaagtggtctgcaaggcaaaggagtttcttctgcaagttgccttctgccgctacaaggtgagtgctgcaagctgcaagtgacctcgcaaaagctgcttgcttgcacgtgctaaagggtaagtgtaagcttccgcatcaagtggtgaagtggttccctctgagaaagaagaagaaaggaccacaaaaggaaaaaaggattgagcgtgaggtcatttcatattcttatgcatt

SEQ ID NO: 107148 - DNA, 192 bp, Arabidopsis thaliana columbia
  unsure (1)..(192): unsure at all n locations
cacgcgnacgatggggattgctgatggccantatttctgtttacttttgngaagaaactcccttgcaggtncgcttaaattttaaagctgcttggattgattcaattggcttatcggtggctgctgctgtgctagtgattcttctgactcgatattttactggtcacactaaagacaataatggaggtcctt

SEQ ID NO: 107149 - DNA, 407 bp, Arabidopsis thaliana columbia
tgacaagtacagaggactatacacaaattctatcctaaatgcaaaagctttctacatgtcatctggttactcggatgagcttctttgggctgcagcttggctacaccgcgccaccggggatcagtattacttgaagtatgctatggacaattccggttacatgggaggaactggctggggggtgaaagagttctcttgggataacaaatacgccggtgttcaaatccttctctccaagatcttgttagaagggaaaggcggtatatatacttcgacattgaagcaatatcaaaccaaagctgactacttcgcttgtgcttgcctcaagaagaatggtggctacaacattcaaacaactcctggtgggttaatgtattggtagagagtggaacaatctgcaatatgca

SEQ ID NO: 107150 - DNA, 286 bp, Arabidopsis thaliana columbia
atttattttagttttttcgtccaacgtaaacgtatctactctttcgcttcttctttcttctgatcatcctcccgtagctgattcatggagtcaatccactgcaatagtttactaaaccctaatttctccttaaaccagcgtcgtcggaggattaatcacgctgttcttaatcggagagatgctcttttgcgatccctcaacgccgtggagttgcggcggagcacgacgttctcggctgtacggacttctaatttctcagatactgcggcggcgacagatgttggtg

SEQ ID NO: 107151 - DNA, 169 bp, Arabidopsis thaliana columbia
atcctatcacaaaaaaaaattccaaactactatcattaaccagattacaacccaaatggggtcggctcatttagttaaaggggcggctctatctaactatctttcttcacatcacttcattgaccaatattcattttttattatcaatacacccaattcaatatacaca

SEQ ID NO: 107152 - DNA, 120 bp, Arabidopsis thaliana columbia
gaattacttaggtcatagctctgtcgaaatcggtgttgctcttgctgtcattgatccttgtgggcatcgaagaaatgcatctagatgtagtccatacactgtgacaggcaaccaaacact

SEQ ID NO: 107153 - DNA, 387 bp, Arabidopsis thaliana columbia
  unsure (1)..(387): unsure at all n locations
gcaagccaaagaacctagactaaaatcaatagacacaagataggaaaatgaagaagcaaaagatgacagcctttgttaaagaactcaacttacggatgaattcgaagaaagaaccgataagtctccgatacattcacatccttggcaccgntgtcttcttctcctctgtctcctctctcgtcatcctccttgctttttaccttaaccaacgcctncaaacatcactcttcctcgtcgaagattatcacactctctcctcaaatcctctcacttctccttccctctctcctnctncttctccttctcctcgcagctctggtagtaatattgcagacgaagagctgatgtggcgagcagcgatggccccacgcagccccatgaagaatg

SEQ ID NO: 107154 - DNA, 471 bp, Arabidopsis thaliana columbia
agagatagagagagaagagaaagatagagagggagatggggtctcatatggtttggttgctatggcttgtatccttcttgtgtgtgttcccagctccatctgagagcatggttcgccactacaagtttaacgttgtaatgaagaacgtgactagattatgctcaagcaagccaaccgtgaccgtcaacggtagatatccaggtcccacaatctacgcacgagaagatgacacgttgctcatcaaagtcgttaatcacgtcaagtacaacgtctccatccactggcacggtgtgagacaagtgagaacgggatgggctgatgggcctgcttacataactcaatgcccgatccagcctggtcaagtctacacatacaactacactttgaccggccaacgcggaacgctctggtggcacgctcatatcctctggctccgagccactgtttacggtgcattggtcatcctttcca

SEQ ID NO: 107155 - DNA, 432 bp, Arabidopsis thaliana columbia
ctaaagtccacagtccagttaacaccaaagaacattaggagaaattggatttggggcattctcgcaaggagaatctttctaaaagtagttccaagagacctgcaagacatgaaactagaggaatcaatgagaaggaaaaagttagaaacggaaacaaatctagtttgttgaaacagagtctgaagcaagtgaggtctgaaagtacagatgcagaaataacagggaagagaggacggaaacccaattctttaatgaatcctgaggattatgacatttcttggctttcaggaaaaagagatcctttaaagacgtcttcaaacaaaaagatccagaaaaaaggatctgggggagtatcatcactaggaaaggtgcctgccaagaaaacacctttacctaaagaaaattccccagccacgagtagtaggtctctga

SEQ ID NO: 107156 - DNA, 483 bp, Arabidopsis thaliana columbia
gaattgtgtaaaaccactccaatggcgattctggacaaattgtttcgagcatctcgagcatggcgcggatcactctctcattctaaatccatggttccttcgcaatcaccacgggcacgagagcttcgtcgctgtttccaccacggaaactttgagcagagtaattcaaaagtaaatcaagtcttgagatcttgcagcaccctaaacgattctccatacttttccatggcacctgcagttttgggtgctctctttagcgttggagtaattggagtagcttatgctgaatctgatgaggctaataatgacaagtcttctgccccaatagatcctaatgacgaaacgtcatctgccccaatagatcctccaccaaactatgtaaacctttgccaagaaagaacgagctcgagttgaagaacttatacaaagtaaaggaactcaatatggttcttacccacggttcaatgttgctgtaagaggtca

SEQ ID NO: 107157 - DNA, 284 bp, Arabidopsis thaliana columbia
  unsure (1)..(284): unsure at all n locations
catttctctctgatcactcgatctctccaaccatctatatttcccancacaagcaaattcggcgtttgattcattttcaacacagactgcacccccacaccttctaatagccattttacccataagtttttcaactccattatttttcacacccttaatttcaagaccattattttcttattacatttttctctactactttttatcttacaaatacttttcaaagtactttcctttataaaccaccacctttcttaatcccttactttttgtctccaaaattt

SEQ ID NO: 107158 - DNA, 398 bp, Arabidopsis thaliana columbia
tggtaatggagattgtcgctctaagtcactgtggttttttcttcgctatttagaaacgagtgggtcaactgcttcgttatttctaaatctatttgccactacctcttgttgctgcaattgaattggctcaaatcttcttcacttggtcgacagtaaagacgactttgacttggtttttaacttcacttctccgtcgaaaactatcccttctcttccgatcgaatcaatcggctctatctccacacagaccaagccaaatatcttctcctgatactggagacaaacctgcatacatttctgtgatttatgctaagtggcacaagtatttaagaggctccatcttcactgcaccactgagaagtttcgagtggacatgtctaagcttagaattggtttgg

SEQ ID NO: 107159 - DNA, 437 bp, Arabidopsis thaliana columbia
gtaatcaatgagtgtttctcaaaagaaagtgtgaagcagatcatacaagcatttgaagctgaagcaagcaaagacgggaatgaatggataactccagtcatcaaaggtctaaagcgatcgtcacccacagggttgaagatagtactacaatcgatccgtgaaggtagaaaacaaacgctgagtgattgcctgaagaaagagtttcggctcaccttgaatatcttgaggaaaaccatatcccctgatatgtatgagggtataagggctctgaccatagacaaagacaatttttccaaagtggaatccagcgacattagatgaggtggatgatgagaaaaatcaactcggtgtttaagctctttgaggatgatgatattgaactacaaatccctgaaacagaagaaaacaggtggtgaggcaaatacgagacttcaggc

SEQ ID NO: 107160 - DNA, 454 bp, Arabidopsis thaliana columbia
gttcttcatgaaagcctgagacagaacctttagaagccttctctttgaggtactgtactggcggcgatgcatggattgcagcaccgtacggaagcacatcctcgttgattctatagagtggtgaatgagacgatgcatacccgttggtctcatcttgcattcccagtagagagaaatggcccgggattgtttctgcaaagtatgagaagtcttcggatcccattacaggtgctgcttccacaaaagcttcttgacccaacaaatctctaaccaccttcttgaattgcttgtacaagtccttgttgttcactgttggtggcattggttctctaccgtttggtgttagattaacggacgcattgcatcggtgaacggctgcttgcttggtaatcacctagaatcaaaagttgaaaccggagattggttctatgggtaaagcaacaataccgggaaa

SEQ ID NO: 107161 - DNA, 393 bp, Arabidopsis thaliana columbia
tgatgcctgagtctgctcttacagcacctaatgtgttgaagcttacaggaagacagcggctggaaagttgtagaggtagaggaacgacagtcattacttatgaggaagatgaggatgaagattagttagacattccttgtaccaacgaatacgatggatatcacaaaaaagatatgctgatgctgaagcctgcaaagggtacaactacacttgcttttatatataaagaaggagttatggtagatgttgattctcgagctagcatgggaggatatatcttgtagtaatttgtgaataatatttttgaagttaatagttatatgctaggtacattgtttggtggtgctgattattgtcaattttttcacataaattttggtattaaattccctt

SEQ ID NO: 107162 - DNA, 450 bp, Arabidopsis thaliana columbia
gtcccattcttttaggttttttgaagatgcaaagatggctagttctgtctcagtgtatgctgaaagatatctttgatctgtcgtggttcctgttacctttctggcggtgtcttatctccctttgttttctttttaaggtttttaatttccctattacctgatgtttttgtcgttttaaatcgtagaggtcaaggcattgttggagggaaggatggtatgagtttaattttgtgtttctggttacttctcatctacacacttttttccccctaattgttttatctaatattggctattatttgtcagtgaggtatgatttgtcctctgtgtcttatgtttcccagaattttcttcaccaatcacttcactacgtttctctgctgtgtacacacttgaaagatgatcatatattccttccaaacgaagtttgtcttataccttgtcctttta

SEQ ID NO: 107163 - DNA, 390 bp, Arabidopsis thaliana columbia
ggcccacgcgcccgtaatctctaactctaagcttgagtaatgaatttacatttcttcggaaacctttgatcaagcatggttctctctcttaaaacttcgaaacaattcctgatttacagactatggaaatggaatcattcatcgacgaccttttgaacttctctgtaccggaagaggaagaagacgacgacgaacatacgcaaccaccgaggaatattactcgccggaaaactggattacggccaacagactccttcggtctctttaataccgacgaccttggagtggttgaagaagaggatttggaatggatttcaaacaaaaatgcttttccggtgattgaaacattcgtcggtgtattaccgtcggagcattttcctaatacgtctc

SEQ ID NO: 107164 - DNA, 473 bp, Arabidopsis thaliana columbia
caatctctaactctaagcttggtaataaattcacatatgtctgaaaatttttgtatggacatgaccaaaagaacgtgtaaaattggacagtgcctccatttctgaggtatgggaagtactgtggactactttacagtggatgtcctggtgagagaccttgtgatggtcttgattcttgttgcatgaaacatgatgcttgtgtccaatccaagaatagtaattattcacatacactctatatctagtcccacttttaccttatatttcatataaaagtgttacaattttgattaatttttgtttttatgcgtagatgattatctaagccaagagtgtagtcagaagttcattaactgcatgaacaatttcagccagaagaagcaaccgacgttcaaaggtaacaaatgcgacgctgatgaagtgattgatgtcatctccattgtcatggaagctgctcttatcgccggcaaagt

SEQ ID NO: 107165 - DNA, 468 bp, Arabidopsis thaliana columbia
ctcgatttcgctcttcagaaatttgacaatgaagcttgacactagtggattggagacaactatgcctgtgattggctttggatcaaacagtgagatgcttgatgggttttcgtctgcaccttcgtttgatcttcctcgtaccactgattttgatgggtttcagaaaaaagctgtggagatggtgaagcctgcaaagggtacaactacacttgcgtttatctttaaggaaggtgttatggtagctgctgattctcgagctagcatgggaggatatatctcgtcgcaatctgtgaagaagattattgaaattaatccttatatgcttggtacaatggctggtggtgctgctgattgtcaattctggcacagaaatctgggaattaagtgccgtctacatgagctggcaaacaaaaggagaatctcttgttcaggagcttcaaagcttcttgctaacatgctctattcata

SEQ ID NO: 107166 - DNA, 481 bp, Arabidopsis thaliana columbia
  unsure (1)..(481): unsure at all n locations
caaatcttaaacgttttactttgtgctgcattacttaacctcaatggccgcctcaacggtntgtctctcctcccctgccttcgcgggtaaggccaccaagctttcccccgcggcatctgaagtccttggaagcggccgtgtgacaatgagtaagactgttgccaagccaaaaggcccatcatgcagcccatggtaccgatctgaccgtgtcaagtacttgggtccattctctggcgaaccaccgagctaccttaccggagagcttcccggagactacttatgggacaccttcgttactttatctgaccgctagtcattcccaaggtacctataactataatttattcacatcaatttgggccaagcttggtaacacttgttttgatctttttcttaacttattgtttttaatccgttttcttttcctttatagacttttttatctttttatttttttatactattattcttttattttttt

SEQ ID NO: 107167 - DNA, 292 bp, Arabidopsis thaliana columbia
gagaaagctacttgagagagagagatagagataagtgcttgagaaaatcgcaatggcttaagctgagtgataattggtttatcctcatctatgcgtgggttagccattgcgcggcagagaagaaggtgcaggtgaaacagacgaacagcattgttactgggttggtctgcattgctcagtatggagctggtgcttgtctttttgtagccagtctattatggctgctagtcgtgtttgtgggaagctttacctggcgtcagactggccattatccttctattgctgggtttct

SEQ ID NO: 107168 - DNA, 411 bp, Arabidopsis thaliana columbia
cgcgaccggccaattcccgtccccacctcggaccgtgggcaaaagaggcgctgggatcagagggtcttcactgagttttctttttcattctttcttctcttcagattccttgctttcttcaagattctccttcttccatgtgcgtctggctttgagacacatgatgatgagatgcttatattgaaccaaatcgctccacatgttcttctgagttgatttttagactcgcttcttttccgattgtcaatcataggctacctgtgtgtattggatcaaattcatcacaagctcgagtttattataggctctgtatctggatgaaaagctggtggggtctctacgttcatgacggttagattgttatcgctcggtgttcagatagcactgtctagagcttctcggtctgttttt

SEQ ID NO: 107169 - DNA, 436 bp, Arabidopsis thaliana columbia
aaagacttctgttttgtttttcttggtttgtagcttattttgcgttcttgaggtttaaagtcgaagagagcaacaacagctcatacttttttatattttctggtttctgtggggctcatagagagagagaaagaagagagattttatacgattatatagctattagatttttgtggtagtggtgttgtctcatgattaagagaagctttaaagaaaactcaagtttgcttctgaggaagacaattaagaaaaaggtttactattaaacgacaacgctgttgcaatcgccaccacaaaaagattcaagctatggattcgtcttacttgtggacgacttaacaaattacagatttaaaaaaaaaaggtttcacatggttctgtctttgaaaatgtgcttagcacttagatacaaagtaaaaaaaatttgttattttaa

SEQ ID NO: 107170 - DNA, 322 bp, Arabidopsis thaliana columbia
gacccttcaaaacacacacacgtcgcccacacagactgctctttaatgtgtcttcacgacttttcgggcggcttcaggtcgtgtgttaacactgctacgtactgggaaggcgggagactcacacgcgttttactcttctagacaaatcttggtcggttaatcaacagagtttgttggagatgttgcaatagctgtctgtacttgagaacagccacttttcctaatcgagaccatggatggatgattggtctggtatatgggggtctatcttacacctagttcacaagtaggtgcagacacattcatttgtcgccaccgcatt

SEQ ID NO: 107171 - DNA, 336 bp, Arabidopsis thaliana columbia
accggccggaatcccgtcgacccacctcgtcttgattctgcaaagctgaaccttcttttaggaaattttaattaattgtgctgttttcaatgaaaaagttataccaccattgcaaagcccatgcttaaatttggtgcttatatctttttatcttcgcatctatccaggcgttcaatgagctgctcggcgagccacacttcgcgaccaatcattatctatggattagccactcggctgctagggacttgaggcttcgcatggagatgattcaaggtcacggaagtcgcccacgagtcttggaaaaacgttcttgggaagaatacagggttgtgatta

SEQ ID NO: 107172 - DNA, 433 bp, Arabidopsis thaliana columbia
  unsure (1)..(433): unsure at all n locations
ctttttcaaacgaagaagaagaagacgaaacgctaccatcatctacacacacacacccaactacttttgtccatcgccggcctgtacaaatgtcgactacccgtaggatccgcggcgagaatcggttttataacccacctccgatgagaaaacttcaacaagagcgtgagaagaagagacttgaagcggaggagatagagaaagagaagaagaaggcaaaggagattctcgatcgaaagattaaagtcgaggagaaggagattaagcaacctgaggagtgctcgacctccgattgctctgtgccgagtcgggtcttctncaccaccaccaccaccggaactacttcttccaatttgggccggtttctggattgcaccactccaattgtttctacgcagcacttgcctttgacaagtagtaaggggtggagaac

SEQ ID NO: 107173 - DNA, 252 bp, Arabidopsis thaliana columbia
cccaaattcaccggcaatgttgtaaaaatccctaatccaaatctatacccaggattttagggagaaaggagaattcgaacacggtgcggcggcccactccgatttagtgaatcatcatggagatctctttgatcgcacatccactcacagattgcacggctaagcaaggtatcagagtcggctaaaatcgttctcaaaggagggagccgaccaatctcattcgttacccatcatccgatgcttatcatcaat

SEQ ID NO: 107174 - DNA, 428 bp, Arabidopsis thaliana columbia
acaaatcttaaacgttttactttgtgctgcactactcaacctcaatggccgcctcaacaatggctctctcctcccctgccttcgccggtaaggccgtcaagctttcccccgcggcatctgaagtccttggaagcggccgtgtgacaatgaggaagactgttgccaagccaaagggcccatcaggcagcccatggtacggatctgaccgtgtcaagtacttgggtccattctctggcgaatcaccgagctaccttaccggagagttccccggagactacggatgggacaccgccggactttcagctgaccccgagacattcgcaaggaaccgggaactagaagttatccacagcaggtgggccatgctcggagccctaggctgcgtcttccctgagcttttggctagaaacggagtcaagttcggagag

SEQ ID NO: 107175 - DNA, 423 bp, Arabidopsis thaliana columbia
cagaaacaaaccaatattcaggtgaattactggatcttgcagatgcatacaatatcgttgtaggaaacgaaggtcactatgatagtaatggaagacaacaaatagagaattggatgaagaaagatacgtctagagttagcgaagaccttaaagcacttcttactcaaatatcagcttctcgtgggatagagtttttgtcacctagagatgtaagccccaagatttctgttaacagtagcgatcaagagacaaagaacctagatcatgatatgcagctgctacttcaaaagagaatgcttgaaaggaacgagagtaacttatcgttggaaggagtttctgtgactgaaatcgagggtgaaagtgagggtgatcggttgaaaagacaggttgattatgataggaaactgctgactggtttatata

SEQ ID NO: 107176 - DNA, 419 bp, Arabidopsis thaliana columbia
  unsure (1)..(419): unsure at all n locations
caacaacaaatcttaaacgttttactttgtgctgcactactcaacctcaatggccgcctcaacaatggctctctcctcccctgccttcgccggtaaggccgtcaagctttcccccgcggcatctgaagtccttggaagcggccgtgtgacaatgaggaagactgttgccaagccaaagggcccatcaggcagcccatggtacggatctgaccgtgtcaagtacttgggtccattctctggcgaatcaccgagctaccttaccggagagttccccggagactacggatgggacaccgtcggactttcagctgaccccgagacattcgcanggaaccgtgaactagaagttatccacagcaggtgggccatgctcggagccctaggctgcgtctttcctgagcttttggctagaaacggag

SEQ ID NO: 107177 - DNA, 347 bp, Arabidopsis thaliana columbia
  unsure (1)..(347): unsure at all n locations
caacaacaaatcttaaacgttttactttgtgctgctttacnggnncngnnngngncgggcatggcgggtcttcagagatccaccatctctttccgacgacagggctcttcgggtatagtctgggacgatcgtctcatcgccgagctaagccaacaagcggccaacgaccggaaaggcgagactctacaacaggacgaacaggccaagctgattacgtcggaagtacaggatcagacaaccaaacctatcgccggagaaggactcaaacctatcagaactgacggaggtatggagaggagtcgatccaacggaggaggagccatccgccaccatccaaacacaaggag

SEQ ID NO: 107178 - DNA, 279 bp, Arabidopsis thaliana columbia
gaaggacagagatggttactggaagtggcttgttgttaacttgcgatctggaggagcagctggggcactcttcccttctgtgcgcgaacacactagactatgcccgtacccgtgatagctaatgatgccaaggctgcaaagaaaggaagtggcggaagacagtctgatggtcttgttgatgtttacagagagacacttaagactaatggtattgctgatctggtccgtgaattcaacatctaaggtgttgatataaatgactaccgtggtatgaacttt

SEQ ID NO: 107179 - DNA, 225 bp, Arabidopsis thaliana columbia
ctctttttaacctctgaagcaaaaaccaccacatcggagatttctaatccaacgaaaacgctgcaattttcttgcgatttctcttcctctgcgaaaaacccttttggattcagactttcctcggtttaccagttggactcagatagaagcttatatctgtacctgataatttgcagcaaatatggatgactgggaggacgagaaaattgcaccactttcagcaaa

SEQ ID NO: 107180 - DNA, 365 bp, Arabidopsis thaliana columbia
aagaaattatactattcacactacggaactactatctaaactattgacataggactaacgaggtgggctaatcatcgcactcacagttggcactgataaactaactgaacgaggtttctaatgaatactgctactgatataatattatagatacaggacaccttcatgtgaactaacatgcctaaacatctaagaaatcgactccctccggctgtacataccataacctaacaagccctgctagtccacaccacatatgtatgtacaacactgtcacttgccataggtcacctgcattattatacccttactgtagatacacagactcttggccatctggtgcgaacacgccaggcaaaccaatt

SEQ ID NO: 107181 - DNA, 416 bp, Arabidopsis thaliana columbia
  unsure (1)..(416): unsure at all n locations
acggagattgtttggtatcctgacgcanataagatggtcaggaatgaatacaatcccctcacaggtgacgcatttgataaagtttttggaccacagtcaacaactccagaagtatatgacgtagctgctaaacctgtagtcaaggctgctatggaaggtgttaacggaaccgtttttgcttatggtgttacaagcagtggaaagacacatacaatgcatggtgatcaagattttcctggaatcataccattagcaataaaagacgtgttcagtatcattcaggaaaccaccggaagagagtttctgctccgtgtttcatatcttgaaatatacaatgaggtgataaatgacttactggatccaacagggcaaaanttacgtattagagaggattcccagggcacttacgttgaggg

SEQ ID NO: 107182 - DNA, 392 bp, Arabidopsis thaliana columbia
gtttcttagggtttttgatctctgcaatggcgaatctaattcctagattcctcaggaacaaggcttgcttcaattcaatccaaaggcttactactactccttctctcttcacttaccagaagccctacttcaacaacaacaacaacatcgactctgttattgagaaacccgatccagtttcttttactaatcctttgattacactctccgggaatgaatccaatcaacctatgcgggtttaccctagtttctccatggggttatgcttgaatcccaaaatgattcaaggtctggatctagctgaaacaccgtcgttggaggaggagggagaggatactcaggagattgtgatttacgctgatagtgtgaagaagaagagggagaagaagatg

SEQ ID NO: 107183 - DNA, 156 bp, Arabidopsis thaliana columbia
ctcgctgctcgagttatattcgagaggtttccttcaacattggcgaatttatcaagaatggggatactgatcaaggatgctaacgcaaaggcgactgcaaatatcaaacttttgaactcgatagaaagcaaaatcattctgtcatcaaaattgact

SEQ ID NO: 107184 - DNA, 198 bp, Arabidopsis thaliana columbia
cttccttcttttctttaacccgcccgccgcggttttttgcaccattttccgccaatttttcggctggttctaaagtaagtctccttcaactttcctcttcttttctatacccttccgtctctctattaccttttttccgccacaaacggcttctgcgttccctgtttccgccgtccttacctttttccaatcaaattg

SEQ ID NO: 107185 - DNA, 399 bp, Arabidopsis thaliana columbia
  unsure (1)..(399): unsure at all n locations
ctgaaaatggaagcggagtgttatcagatggcggcgggggagtgcagcaaaagacggtgggtcctgtatggaactcaaataaagattttcaagcctaaaagctttgatcatcgctatttttttatataatatcaaactctctttgtattgtccccaaaaaaacacaaactttttaatttctctttttttttttttttgttccctttttaaatatgcatagcagagaagtaggggagactgaaaaatcaacaaaccttccacaccatatggaaaaaaagaagaaagtagagagtgaggggaagaaaagggaacagctttgatgatccattttattatacacagcagctctctnttnangtttgtttttttgttggatttagtattacaactctgtattca

SEQ ID NO: 107186 - DNA, 445 bp, Arabidopsis thaliana columbia
ggcttaacgaaatcaaattcgcaagtggtgtcctggacgagcttctttatctgggtgtaccgtctgaacgcagatatggatctggaattatggtgttagagtatggaaaagcagttcaggagagtgtgtacgaacatatccgtgttgttcgcgaaggccatcttcggattatattctcccaagagctgaagattctctcatgggagttctgtactcgtcgacatgaagaactacttcctcgtcgcctagtagctccacaggtgaaccaattgcttcaggttgcagagaaatgtcagagcacaattgatcaaagtggatcagatgggattcatcaacaagatttgcaagctaatagcaacatggtcatggctgctggacgtcaactagcaaaaagcttggagtcacattcactcaatgactgaagcttctcaaaacgatatgttcg

SEQ ID NO: 107187 - DNA, 421 bp, Arabidopsis thaliana columbia
gttcgtatcagactgtggaactgattgagaccttcatgaattaccaggagaatatcaagaggtgtgtgtgcatcatatatgatccctctaaagctgatctaggcgtcttagctttgaaggctttgaagctttcagattcctttatggagttgtaccgaggtggaaactttactggcgagaagttgagagagaaaaatttctcctggatggatatttttgaggaaatacctatcaaggtttcaaattctgcccttgtcagtgcctttatgaccgaactggagactgatacacctgtctcacagggcgattatgatcgtctacactcatcaaccactcctttgcttgagaacaatatggagtttttgattaaatgcatggatgatttatctatggaacagcaaaagttccagtattactaccg

SEQ ID NO: 107188 - DNA, 149 bp, Arabidopsis thaliana columbia
cttaactaggaaaggaaacagtgccaagcttacttggaagtgagtgttctctgaggtggttatatattgactcattgacaagagagagatgtttcagaaagagactgaccaatcgattgagctctttcgaaatttaagaatgtttaaac

SEQ ID NO: 107189 - DNA, 240 bp, Arabidopsis thaliana columbia
  unsure (1)..(240): unsure at all n locations
cacgccgtccccgcttacttctcannaagtgaaaacaannnaaaatgaatgttcttggtgtttcaattgggttatacttactcttcttgtgcttgagaacggtatnntcgcaacccccgctcaaacctnnctcattcaagnnnattcttggcaagaaatgctnntttgcnngaaagaacgccgcaattggtcaataccgattggntcttgcgtcaatgtctcgttaccacannagatcca

SEQ ID NO: 107190 - DNA, 353 bp, Arabidopsis thaliana columbia
atcaagaaagaacacttttgtgaacttcttcttccccacatctcctaaaagcttcacgacacggcaaaccaagcgtttcttttcttatctactcgattatcaacacatcttttcctgaaactccttccacatctttgtctgatcatggtgaaggaaacagtgtattatgatgttcttggtgtcactccctctgcttctgaggaagagattcgcaaggcttattacatcaaggcaagacaagttcatgctgacaagaatcaaggtgatcctctagctgctgaaaagtttcaggttcttggtgaagcttaccaggttctaagtgatcctgttcatcgtgaagcgtatgatcggac

SEQ ID NO: 107191 - DNA, 279 bp, Arabidopsis thaliana columbia
  unsure (1)..(279): unsure at all n locations
cccgtccgatttcgtttagactcannaccttcattactannatctctcttttaagcggtttnnctttcgtgggaatcaaagatcgggcaaaggaatgcgaatnncttttttcgtntcacaatctcgnnaatccgtcgaaccgagggnatcatcccgacaaggcnntttgtgatcagaatctccgacgctttatcctcgatgccttggccttgaacccaagaccctgaagaggcaaagttggcttgtggagaacttgtaccaaagacataacatggtcat

SEQ ID NO: 107192 - DNA, 412 bp, Arabidopsis thaliana columbia
cctccctctacatgatggatacattctcttgtaattcttatgaacaaaaccacccccatgatgatgatattgatattgatgctcatgatcatgattctcatggtggtgatcatcaagaggagagtggatggacaacttatcttgatgatttctcaaatcaatatagaactactcatcatgaagaaaatgatcatcaagacaagagttcttattcacttcttgccacctctacttctctggtctctgacgccgccacccatgccttttccggcaagagttttcccgttaattttccggcgaaactgaagtttgggaggggaagaaccaaaaagatttgtgaggatgattctttggaggacacggctagctctccggtcaacagccctaaagtcagtcactttgaacatattca

SEQ ID NO: 107193 - DNA, 169 bp, Arabidopsis thaliana columbia
ctcttttacagcttttcacaaacaaatcccaaatctgattctttcagctaaaattcttccatgggtcgatcgaattgtcaaaaaaaagatatcacaacccttcgtgtgttctcatttcttaatcttatacacttgaaatctccaaaaaggggaaaaagaaaatgagttg

SEQ ID NO: 107194 - DNA, 424 bp, Arabidopsis thaliana columbia
aattcccccaaatttctctctatcacccttctcttagtcaatagagattcttcttcggcttggacgataagacagagaagatctccggtggaagaaacaagccggagttctcattttcagcttctgttttctgaaatttctccgatttggatctgtctccaactggcaagggtgacaatggctagctgcaagggatcacagaagtgttagaaacttgatgtacccggggaagcatgctttgctcccaccaaaaataccggttcctagtgtatcagcatcgtattccgagtatattcctactggtttgattggttcaagacatggtcagaagcttagtaatgagaaaacacatcaccagcgaactttcttcgagagccatttggtagaagagcttcccttttggcttgatgatcttctcaatgag

SEQ ID NO: 107195 - DNA, 341 bp, Arabidopsis thaliana columbia
  unsure (1)..(341): unsure at all n locations
agaacagaggagctctgtcttgtttcctcttatttacgtactaccaatcctcatacacacacgtgtgtctttggtttcatctccgaaaagtgataatctngtttttttgatttgacttttgagagaacagagcatatataaagaaacagagcagctctgttttttttttttgtgttgcagtttgtagaatcatggagaggtacgaaatagtgaaggatattgggtctggtaacttcggagtagcaaagcttgttcgtgacaaattttccaaaaagcttttcgctgttaagttcatcgagcgaggccaaaagattgatgaacatgtacaaagagaaatcatg

SEQ ID NO: 107196 - DNA, 331 bp, Arabidopsis thaliana columbia
cgcggatgcggaagatggcggagaagacgaagaagctgagaggaggattcatcgtcagcgcgaacgtggtggagaatcgcctcgggaacggagaagacgttctccgagtagagagagggatgattcgaagagtaatcgatcgggaagtagagagagaggaagtaggggtaacggtggtggaagtcgacgagtgagtagatctccgggaagaagatcggaggataaccctaattccagtggcaattctgtgaattcgagtaacaacaatagaccgtggaaatttgtatctgttcctgcaacaagataagctttaagcaacaacaatggagat

SEQ ID NO: 107197 - DNA, 323 bp, Arabidopsis thaliana columbia
gcgtccgaacaaatctgatcttggtggatggacacggattgttgtggagaagccatttggcagggaccgtgaatctgcagagcaactgagttctcagattggagagttatttgatgaatcacagatctatcgtatagaccattatcttgggaaggaattagttcaaaacatgttggtcctccggtttgcaaatcgctttttcttgccactttggaaccgtgacaatatcgagaacgtgcagattgttttcagggaagattttggaactgaagggcgtggcggatattttgacgaatatggaataatgcgtgatattattcaaa

SEQ ID NO: 107198 - DNA, 251 bp, Arabidopsis thaliana columbia
gtggggtcctgattgcaccgcaaagtttctacaagacaataatttaaagtggatcatcagagggaagggagcccctgacgaaagggcaaaacgagatgaccttgcaccaatgaatggaggatatgcagaagaccatgaaaggcttataactttgttcagtgctcctgatcattctcagtttcaggatacacgggagagacacaacaacaaagcagcctacataatattacaaatccctgaatgtgaggagc

SEQ ID NO: 107199 - DNA, 446 bp, Arabidopsis thaliana columbia
gatctccccctcctcctcctgctaagaaaaacgcttctaaaaattcaacttctgcacgtggggcacctgcgaaaaaaaaagaggatcatgagaaaacaatcatcattgctgttgttgtgactgcagtttctacgtttttgttggctgcattattcttcttatgctgctccagggtttgtggaaatggttcaggaggcaggaaaaacgatgaaaggcctcttctcagtttaagcagtagtgattactctgttggttcctccatcaactatggtggttcggtcaaaggagataagcagggtcatcaatcttttaatatttactcaaaccaaggaaaaatgtcatctttcgatggaagtaactctgacacttcagattcgttagaagaacggctatcacacgaaggcctgagaaataatagtattaccaatcacgggcttgcacctttg

SEQ ID NO: 107200 - DNA, 143 bp, Arabidopsis thaliana columbia
aagaaacacactcatgtccacatttttttttaacacctttaaattacaaagcgagaggggttatttctacataacatccacatttatcatgtagcttaattgatagtgaaatattagatttaaagatcctaatggattatctt

SEQ ID NO: 107201 - DNA, 426 bp, Arabidopsis thaliana columbia
tattttcaaagctcttaacccaaaaaccctaagtcttttttttcttcaaattattgggtatattaatgttttaagctatgatggatatgactcctacaataacaacaacaacaacaccaactcctaaatcacccgaacccgaatccgaaactccgacccggatccaaccggcgaaacccatttcctttagcaacggcatcatcaaacgccaccaccaccaccaccatcctctcctctttacttacaaagaatgtctcaaaaaccacgcggcggctttaggtggtcacgctctcgacggttgcggcgaattcatgccgtcttcgtcgtcaatctcctccgatccaacttctctcaaatgtgctgcttgtggctgccaccgtaatttccaccgccgtgatccagataacaacaacgactcttcccaaa

SEQ ID NO: 107202 - DNA, 144 bp, Arabidopsis thaliana columbia
ccgaattttttgcttaaaagctttccaatagggtccatggtttttggcagccatggttattgaccggtttcgttccaggaggggtttaaaccccttggattccaccaaataaaatccttgggggggggttggcatattcggctt

SEQ ID NO: 107203 - DNA, 439 bp, Arabidopsis thaliana columbia
  unsure (1)..(439): unsure at all n locations
gaaaacacagtataaacgaattagtttaccattacagtaatcctgaagattagcaactgcaacttccagtcctcggccaggggtagcatttcctgcagctgcactcgcaccttgccttccaatgtcttcctcagcaaaggatcctgatatcgacaaggagagcatggaaatcaattgcagcctaatttaactgtaaattttcattgtttctttttggttttagtaaagtttcgttgttggagagttaaattcttagttgttaacaaatgatagataaaaagttgttctaacactccagacnaaatttaaagtaacataaagctatcacatcatacggtaatttctgagcgatagaagcagcctcagctacgcggctatcatcagaaaacaaagcggaaagctccataagaacccctgggctgccggtgaactccattag

SEQ ID NO: 107204 - DNA, 430 bp, Arabidopsis thaliana columbia
tcattttctatcaacaaaaaaaaagacatcttcttcttcttctttttttctaccaatgtcaattttcacatccccatttcctagtcctaaaaaaaacctcgaataatgttgatgcctcccaccatgtcttgtttgattcccaaaatagttttcatatcccttatcacttgttttgtgtgtcgtggaccttatgcccatgcaagaagtttgaatccaccagtcatgggagaaactaacccgctcataaaaacgatgaaggttcctgtgaatataatctacggaagttataaaagtggacctgatgattcaggtaaaggtcacgatgcacctttaccaccaaagataccgatgaatataaattacggaggttataaaagtggacctgatgattcaggtaaaggtcacgatacacctttaccaccaaagatac

SEQ ID NO: 107205 - DNA, 199 bp, Arabidopsis thaliana columbia
tccggggggccttggatatcctcggacctgcaccctttctggtcgtttttggcccccgattggggggctggcccaaccggatcttaacccccacctgccaggttgaaattctcttgggaaacaagcccggtttggttgtttttcgggggccgggaatcgggaaaattttggttggaagccctttccgggaggaccaacc

SEQ ID NO: 107206 - DNA, 113 bp, Arabidopsis thaliana columbia
gccaagccttccgttgttttggcaggagggtttcctttaagtttatgggaaggggtccaaaccgccatatttaagggcctttggctcaacatccctgcctttgatgccccaac

SEQ ID NO: 107207 - DNA, 431 bp, Arabidopsis thaliana columbia
acttttgaaggtctgtctgttttcctgatctgaggtccttctagggatttttttttatggcggtgaagcagcagaagctttagctagacttgtcggaagattgtgacacttattgaatctcagattagggtctacttatattaccattgagtggaatatttgaaagactgttcttccgaaggtgaaattcatggctgataagtacatcgtcgaggaagcagaggctttggccaagagagctttgcattcaccaattgcacaggcgacgccgatctacgagcagcttttgtcactttatcccacttctgcgagattttggaagcaatatgtggaggcacagatggctgtaaacaatgatgatgcttccaaacagatatttagtcgttgtttgttgacctgccttcaagttcctctttggcaatgttacattc

SEQ ID NO: 107208 - DNA, 176 bp, Arabidopsis thaliana columbia
ggggggttcttaaacttttggtccttttggccataatggtttgggtcctttgtttggcaaaggttattattccaggtcacttccaggcttttgtggtggccttggtggccctaaaaggggttttggggattggagggtttggaaaagccccgagcggggtggttccaaagaatttt

SEQ ID NO: 107209 - DNA, 199 bp, Arabidopsis thaliana columbia
ccacccttccgttgttttacactgggttaaggacctttgctttaacggccaacctatttaaacctttggccgccgcccctaataggaattaactgtcctcgccaatggcggaggtgggggggattgcccccggggggcgaattttcgggagaggggggaggaggaagggtaacccccggaggccgaacccttgggttgt

SEQ ID NO: 107210 - DNA, 353 bp, Arabidopsis thaliana columbia
ctcaagttaaaacagaaaaaatgtcaactttagaaaacactccgtttaatggcgttgcctcatccaccattgttcgagctaccattgtccaagcctccaccgtctacaacgatactcccgccactctagaaaaggcgaacaagtttattgtggaggctgcaagcaagggatcggagctggttgtgttcccggaggcgtttatcggtggttatcctcgaggttttaggtttggtttaggggtgggagtttatatcttataatgtctgtatgatttttcttatgttccattgctttcttatattatatgtttctgtttccttgtatttgtatatttttttttgttaattcttttt

SEQ ID NO: 107211 - DNA, 418 bp, Arabidopsis thaliana columbia
ctcactgtaatcccttagatcttcttttcaaatttcaatggcgtccggtgatgttgagtatcggtgcttcgttggaggtctagcatgggccactgatgacagagctcttgagactgccttcgctcaatacggcgacgttattgattccaagatcattaacgatcgtgagactggaagatcaaggggattcggattcgtcaccttcaaggatgagaaagccatgaaggatgctattgagggaatgaacggacaagatctcgatggccgtatcatcactgttaacgtggctcattcacgaggtagctgtttcttgtttgagccattcgttttgtttattattattttttttctctttatttttttctatatatcttttcttcttttttttttattagttacttttaattttaaactcata

SEQ ID NO: 107212 - DNA, 184 bp, Arabidopsis thaliana columbia
gaaactctccttaagaattaagaaagagtccattttcgtaaacctcatcaatcaaagctcaaaatcgccttcaatggatgctaagaacggacaattctttgacttccgtcggtactttcttcagcggcagcgataagaacccatggtgcgactgagatgtcattgcttgttgtgaaagagaggt

SEQ ID NO: 107213 - DNA, 339 bp, Arabidopsis thaliana columbia
ggaagcacatgctcgcatagaagatctctagagcgagaagcgatctcataaaaagaagctcgagcagttcttgaggaaagttagcgaggagagggctgcttggcggagcagggagcatgagaaggtccgagcaattattgacgatatgaaaactgatatgaacagggagaagaaaacccgtcagagattagaaatcgtaaatcataaactagtcaacgagcttgcagattcaaagttagccgtgaagcgttacatgcaggactacgaaaaggaaaggaaagcaagagaattgattgaggaagtttgcgacgaactttgcaaaggaaataggagaagtta

SEQ ID NO: 107214 - DNA, 297 bp, Arabidopsis thaliana columbia
cccaagccttccgttttttttttgaaccttaaattttgttaaacacctaacaggatagataaaccatctggtcttatttttcttgttattacttgagtttatcaagtattattactgagtttctgaaaaatcggtgaaacaacagaggaagcaatatggcacttacttggactcataaagacaggggagaaattagggttcatgagaatttggaggaactaagcatagacttggttgattatatagctgagatatcagaagcattaattaaagaacatggtgctttctgcattgtgt

SEQ ID NO: 107215 - DNA, 427 bp, Arabidopsis thaliana columbia
gactattatctcgtgaaacaaagatcacttcgggattcaaacctgctccggcgagcgtgccactttgttcggggtagacatcgattccaaccctcagcaccgcgctctcttgagctcggcatgaacaagacggagcttgcctcatgatgactaaatcaaactcagattccgactacttggatggctactatcgtcgcaagcaacctcagacctccaccatctcttggttgctacccgttctggggaaacaagagactactcttcgtattgatccatgctgaatgaccgtgacacatcacatcatgacagacatgtataccatcgattgactccggctgcgtttaactccgccgaatcggaccaccaccatcaccgcttaactcatgtctacattggtgagcttcaccctgtcttcgatgaggctgtt

SEQ ID NO: 107216 - DNA, 139 bp, Arabidopsis thaliana columbia
cggccggaaccccgggcgacccaccgtcaaataaacatctatacctccttccttcttgctgatccttcacccagggtgggtttgtttcatcaatccatttctttgattcagaggttctggatatttggatgtgtgatta

SEQ ID NO: 107217 - DNA, 398 bp, Arabidopsis thaliana columbia
  unsure (1)..(398): unsure at all n locations
tttctagtggaagtgtcatggagttcagcaaatttggtagcgatttgggtataaactggtaaaagttgcttctctcgggttttaatctgtttctggagaagctcgatgtttgcatatgccttgtttcgcttggcatcttggatatttgctttcagattgattagcgtctggtccaaccttcccatgcactctaacagctctttccttctaaattttatctctatcatcccttcaggctcaagcacattttcacgagcggtttcatcagcgtacatttcaatataatccgaatttatctggctatcaacaaccacccatgcttcacctngcagttctcccatcattgggatgtacacaaacactggctgccgatatgttctcagattttctactatagc

SEQ ID NO: 107218 - DNA, 432 bp, Arabidopsis thaliana columbia
ctagctttaagaggagagttctttgttaaatccaacagaggaaaattgcattccacgagactgtatattcctgtaccatcaaaagatgaaacaggatcagagaaatttgcttttggagtaactgatcgcattgtggactgcaattcgtcttcaaaagtggctttgccgaaaggtcacaataaaatccttgctattagggtcctcaggtggtcgttcaatgatgtgattcatgcatgtggacaatctaaaaactctgagctagcggagcagctaatgcttcagatgcaaaatcttgggttgctaccatcaagtcacacatatgatggtttcattagagctgttgcatttccagaaggatatgaatatggcatgacactgttgaaagtaatgcagcagcagaatctgaaaccatatgattcaactctagctacg

SEQ ID NO: 107219 - DNA, 436 bp, Arabidopsis thaliana columbia
gcagagaccaaagaagagacaactaccttcaccttagatgatgaagaagctgggttggaaggcgaaaaggaagcggaaaagatgattgtagaagcatactctgctctactactcgcctttctttcaactgaaagtagaagtatacgcaactccatcaaggactatctcccgaaacgcaatctggcaattcttgtaccggttttggaaagatttgtggcatttcacatgactctgaacatgatccctccggagacacataaagcagtgatgggagtgattgaatcctgcaaatcaccgtagaaagggatcaaaaagggcaattaattcttcattctccaatttctctgtacagcttctgcaatagaaaagaaaaaagaacttggaatgctttggggtgatcactaactctggtgatcgcattgatgtatgatataag

SEQ ID NO: 107220 - DNA, 409 bp, Arabidopsis thaliana columbia
aagaaagagaaaaaaagctttcgtagtgtctattgaaaccagagaaaagccaaaggggatgcaaccaacatccgtcggtagtagcggcggtggtgacgacagaggaggcagaggaggaggaggagggctaagtagaagtggactatctcggatccgttcagctccagcgacttggcttgaagctttacttgaggaagatgaagaagagtctttgaaacctaatcttggtctcaccgatttgcttaccggcagctaacaccgatatctatgtggagatcgatagattacccaaggaaggggaaacgatttaggccaagacagggcaaacgctcgtcggaggaaaaggcgcgaatcatgcggtgtgtgtagcgaatctaatttatccgacttacttcgttggtcgtttggg

SEQ ID NO: 107221 - DNA, 304 bp, Arabidopsis thaliana columbia
cgatgagagcttaagctctgccgcgttttcgttctccgatctttttccatttggggggtttcttctcttccaaattagcgttttttcttttcagtctttgggaatgattttgatgcggtgaaaaagtcttttttttttgagggggaaggatttctgcgttcgctcttacggttttgacttttcaatccccagaccctgaaataatccgccctatatgtcatttgaatcgccgatgagccctgacttggagcagatttacagagaaatccatcaccacttccccgccctggctattggctatcaa

SEQ ID NO: 107222 - DNA, 337 bp, Arabidopsis thaliana columbia
  unsure (1)..(337): unsure at all n locations
gcgtccgactctcactctcagtctcactcacatttttaccattctccttctcgttttcatctgcntttttcaaatcacgcgcctctcctccacgtagcaccgtctcgttgagttcttccaggagacgacaagatcgccggcgatcaattgaggctatgtctcatgtgatggaattggaagatgaattctatttctagaagcttctctcatcggataatctgatctcgttcactggattcggttcttttctttccgagtgaagcgcgaggagtacattcctagatttggagaatttgagaatggtgatattgcaaggatttatattagttttgcttat

SEQ ID NO: 107223 - DNA, 354 bp, Arabidopsis thaliana columbia
gtgagtttagaccgtccaaaattgttttttattggaatccataggatttcaacgtagactggcttccattgacaatgaggtttttcagattcgccggtccattcgagacgctatatttgtgcagttagagaagcgaaacccacttaccgatgatgatgcattaaaagcgaagcctttagaagctgctaaacgcttctagggaggactttttaaaatggctatgacaaaggaggaatacttgcacccgtcaactcttgaatctcgcttgacaagcttaataaaaggcttgcaattgcataaggtccaagcccaacatgctgaatgttctacgcttggaacaaccataacacctac

SEQ ID NO: 107224 - DNA, 286 bp, Arabidopsis thaliana columbia
  unsure (1)..(286): unsure at all n locations
ggcggcgacccacacaancnaatgactcgaaaatataatatactttttttcacctcaacacttttaatccttggccgtttttatctcaatttaacattaccaacatcatcatcatatctccatactattatccaactttaccaataatttatctctccatcctacacacatactataatatctactctatttactattaataaattaaccactactctctttaccatatcttataattttatatacttaacactatatcattatttatctataaaataatatttta

SEQ ID NO: 107225 - DNA, 344 bp, Arabidopsis thaliana columbia
ggggggccacgcgtccggacttgtctctgctttgattgaatattacgcttgatcgaaaattcccttagattgcttgaatatggttttacagaaggtcagattacacagagatcggatttgcgaaaaaaaaaaatgggaagtccaaagaagaacgagaacaaaggcttcttcgccgccatgacttctggcttctccatgttcggtaccgtcgtgtcgagatccgttaacggcgtgcaaggtaatgaaggagttgaggtcataaattcagaatgtggcaagtaagattctgaagaggaagctcagaaaggaaggtggaaggactaggaacgagattagttacttga

SEQ ID NO: 107226 - DNA, 391 bp, Arabidopsis thaliana columbia
caaaaacaaagattataatggcttccttaaccatggctttgtcctcccctgggttcgccggaatggctgtgaagcctgcctcatcagatgtcctcggaagcggccgtgtgaccatgaggaagactgtcgccaagccaaagggtccatcatgcagcccatggtacggatctgaccgagtcaagtacttgggtccattcttcggctagcccccgagctaccttaccggtgagttccccggtgactacggatggtacaccgctggtctatccgccgacccatataccttttccaggaaccgtgagctataagttatccacagcatatgggccatgctcggagccctaggctgcgtttttcctgagttattggctatgaacggagtgaagttctt

SEQ ID NO: 107227 - DNA, 420 bp, Arabidopsis thaliana columbia
tcttcttgctccttaccaaagaggatttatagattggtctctttggcggtgcgtgtgtgggtataactgtgcttattatccaccttatcaacaatgttgccaaagctcatggtggtttctctgtgtttgctggtgtggtagaacgaacccgttaaggcaatgacttgtacatataaatgattgagagtgttgtcatcaatctatgctaatagcattctgagagcaagtgtgctctagttttcggtcaaatttatgagccccctgttgcccgtgcccttttatgactgactggtttgacttttacccaatatttccttgttgctgtaggccaattactttttctttttattgactaccattattcattttacttatgtcctactttatatgtctgcttttctccttttttttaccttcttt

SEQ ID NO: 107228 - DNA, 440 bp, Arabidopsis thaliana columbia
ctcttccaagcttagagactcttagagcgagaaaatgatggcttctcttaaagctgaggaaacgagccagatgcagctcgttgagcgtgaagaaaatgatgaagacgaagatctatttgagatgattgacaaattgatcgcacaaggtataaacgcaggagatgtgaaaaagctacaagaagctgggatccatacctgcaatggtctcatgatgcataccaagaagaaccttactggaatcaaaggtttatctgaggccaaagttgacaaaatctgtgaagctgctgagaaaattgtgaactttggatatatgactggaagtgatgctcttataaagaggaaatcagttgtaaaaatcactacagggtgtcaagctctcgatgatctcttaggaggtggaattgaaacctcagccatcacagaggcttttggggaattta

SEQ ID NO: 107229 - DNA, 222 bp, Arabidopsis thaliana columbia
acccacgcgtccgactcataaaaaaactcattcatctttattctctcacttaaattcaaactccgggtgtacttttttatgattaggaaaccaacctcaacacaaaacatcaataactaccaccaacaaccaagccctcattttattccaattagaaaccatcaaaaccacatcatacaccataaaaaccacactttttttcttaaaatctcctccaattac

SEQ ID NO: 107230 - DNA, 298 bp, Arabidopsis thaliana columbia
ggggggagccacgcgtccgaaaaacccttcactactctttattatgtgtctcaagcatcattttcccgagagagctgtgaatttaaacatggtcccaccatcaaaacaacaaaacgagcttaataatatacaacacatccttctcaaatgtccaatcataatgctccaatttactcctcaacgtttgacaaacccttaatgcctctcttcagcgccaacacgaacaacaccaaacctaatatattctctgctatcaatccgtatcgtgatcaagcaaagcaagctttagattttaaaa

SEQ ID NO: 107231 - DNA, 297 bp, Arabidopsis thaliana columbia
  unsure (1)..(297): unsure at all n locations
gaagggccgacccaccccacccgtctttatctcattaccaaacttcttctatatttaacattaaatcaccaanatactatgcgtgcgatactctcaacactatataaaatctgactgttctaactaccaacatacaaaaatcaaaacttcacgccaagtaattatatccatatccaccaaaactatccccatcaaaaatttcttcacataatctaaaccgtatcctgccattacacttttaaacacattcaatcactattccatataacaacaacattatacaatcaaaatttcaat

SEQ ID NO: 107232 - DNA, 432 bp, Arabidopsis thaliana columbia
tccaattttaactgaatttgagataattttggtttagtgatggcgattaggttgaatcatagtgtaattccagtgagcgtgaagcttggagctccgacgagagtatcggctcggagctcgttaccgttcagcgttggagattggcgtggtgtttctacattttccggtgctaggcctttggttctcgcgaaggtgaaactgagagcagagagtactgaggaagatcgagttccaattgatgacgacgacgattctactgatcagctcgttgatgaagaaattgtgcatttcgaagagcgtgattttgctggcacagcgtgtgttcctgtatatgttatgctaccactgggagtgattgatatgaactcggaagtggtggaaccggaggagcttttggatcagttaagaactttaaagtcggttaatgttgat

SEQ ID NO: 107233 - DNA, 359 bp, Arabidopsis thaliana columbia
caaacacataaccaataactcaccatctttatataactaattctcaatatatcccgctgtttttttaatttgacgatttcatacacctcctaactactataataccaatctttttacctctcaactctctacaacagaaaccaaaacgaaactatctacctttgccacccaaaataaaacacacccttcctatttctgccaccacaccaattatcctaacctcgatgcttgcttaaaacaatatccacaaaccaactcttcaatccaaacattcaccaaaaccaacaatcccattgtttcttgacatataactacctcttcctaaagttactattaaatagatcttactatccaattta

SEQ ID NO: 107234 - DNA, 326 bp, Arabidopsis thaliana columbia
ttaaaaaacactaatcgctcgatattcttcaactctcttatcgaaaccaaagggctggattatcctccgagatctacacgacaatcactgaaacttaagcctaccaagtaaacagagatatcgcaccttttgaatatcatatccttgctaaaatgtactagttatctgacaatcaatccatatacgactagatctacggtcattctagaaaggaagcagaaaactaacttatccacatgactgaatcacagacccttaaacataattcaatggatattttttctaacatgcagaggattcacagatatacccatataatgcttaaa

SEQ ID NO: 107235 - DNA, 431 bp, Arabidopsis thaliana columbia
aaaaaaaatgcagaggaaaatgaaagggaaaaagaaaaacattggttcgattttcgaggagtgcaatgtatctgcgtctcaggagatttatctacagcgatgcggttttgccgtaccaggtcaaccacctccagattccgatccctccgtcggagtctcaccgccaccgttaaacgacggaattccatatcagcgttcatccggtgattcggatacggataaggatagtgtaatcggctcgggtaacgatgcggtggagagtcaggcgattcgatgcgtcactccggaggaaagcgtggacaccgttgatttagaggaagatgttgcagatccgacggttgaggtttcggcggagaagcagagtgatgttcctctggaatctgcagcgaagaaggaaggtggaggaaagaaacttaagattcctttaaggg

SEQ ID NO: 107236 - DNA, 435 bp, Arabidopsis thaliana columbia
catgaatcagattcaagatagaagtctttcaaacaatgtctagctctcttggccagggcagattcttggttttgttcatgcttcccttatattctcaactgactaccgcacaacccaatatgctgaacgataatgatgatgaatgtagcgacacgagtgcaaacggcacacgatgggctgttttagtatgctgcttcaaatgaatactataactacaggcataaggctgccatatgccacgcgtatcagatacttcaaaaaggcggtttcaaagatgaaaacatcatcgtgtttatgtctgatgatatcgcgtttttctaggagaatccaaggcctggagttatcattaattaaccggatggacgagatgtatataaaggagttcctaaggactacacttaagaagactttcatggtcaaaactactacaatgtg

SEQ ID NO: 107237 - DNA, 354 bp, Arabidopsis thaliana columbia
  unsure (1)..(354): unsure at all n locations
gcgtgcggggccacactctctaatttaaaaaagagagagagagagagagacacacagagagagagaggggtttctgagaacctttttttttcacgggggttacatcgtattaaacgtaatggcccctcacgaagttccatttcaaaaaaaatggttccagggggaaaaaagccggttcctactttttccaagaaatcggaaaccgccaccccaaagcgggtgccgggcgagaaaccccctttttcggggggggatctgaaaaaagcaatcccgccgaattgtttaaaacgctcaatccctcgttttttttcctaccttatcagngacatcattatagcctcatgcttctactac

SEQ ID NO: 107238 - DNA, 332 bp, Arabidopsis thaliana columbia
  unsure (1)..(332): unsure at all n locations
agggncgacgccacgcgtccgaacattctttttacaagaatcagattcaatatttaaatctttcaaacaatctctattgctcgtggtcactttcagattcttgcttcacttcatgctttgcttatcttatcagctgaatcccgcaaaacccaattgcttcacgataatgattttgaatctagctacaagtactcaaaaggcacacaatggactgttttagttgctgcatcaaatgaatattataactacatgcatcatgctgacatattccactcgtattcaaatactccgacaaggctgtttaaaccaataaaccatcattgactttatat

SEQ ID NO: 107239 - DNA, 338 bp, Arabidopsis thaliana columbia
gagccatttataaacaacactcgagaaaacgcttgagaagacgtattcaacgttggggggggtccatggatcctcccacccaaagccataactcggtccgtactgttccaggctcgaatcatagccacaccgatttgattatctcatcgttcctttcgtttccagattcctctccgatctccattagcaattccttcgatcgagtccttgatagagctctcgcctccgcttccgctgatgaatccgttcaggatcgtctcgtcgatcgtactctcgaactcgcgtcgcttcttctcgattccactaggcgttgcttccgtaagcgagcttctgttcac

SEQ ID NO: 107240 - DNA, 489 bp, Arabidopsis thaliana columbia
  unsure (1)..(489): unsure at all n locations
cggaagnnccggaatgaccgacgcgtccgactcgtccggaaaacttatcattagattcaattgcgtacatgatagaaccatgtcctggctaaacagaggagcgcgtgaaggtcaaacagaaacccctgatctgatcaggggntgttggtanaatacctcnngagatcccanngatgtaccatannagagaggtttggtgggcttatcannaggccaaaaatggagnngcgttttcccaacgtnncacgacgctttaaatctaaggtnntgatgcttctcggtggnnagaagccnnaccgaagttcttattctcagctgaagaatgtnntaagaaacctcttccccaaccaggcgcnnacggcaaaacnncaaccaagcttcagagctaggcattactttccaggtacccagtgttgattattccttnggctggtaggttcaaagggaaaagaaggagttgtcttccttaaagcagcttgccttctggtt

SEQ ID NO: 107241 - DNA, 192 bp, Arabidopsis thaliana columbia
atgaatgtcttgtcaacaattggaccgttggccttggtagagcccggcttgagggttccaaacaggattgcattgtgcttcccctggccaatattggtcaaggattggaagacctggttgaatcttgaggtgggtgggaccttacttttccaggcgggggtggaaccttccaaagcttccaactggattttg

SEQ ID NO: 107242 - DNA, 429 bp, Arabidopsis thaliana columbia
  unsure (1)..(429): unsure at all n locations
ccacgcgtnccgaccgattttgcagcatgtcagtcttcaacgatatcgctcgccggcttaaaagatataaacacgcgggcgcctggtgaaaatccatcatnctggtaaacaaacccattgaggtactgtaacctccacgttccgatctcaagcanaaaattcaaatncccgctcttcagaaatcattatccagcaaagagaatccgaatccgaagcttagtcaccgctcatttggatcgactcagaagccagtgctccggcctgtaccgcgcattgataagtccgccgtgagtggcgagggtcgggttacgcgatccacgtcatctggtttgcgaggtaggagttctagtccatctgatttgattagggttttctcggatttgagaaagagaaatgaatctagggttattggggaaaagggtgaatcgg

SEQ ID NO: 107243 - DNA, 305 bp, Arabidopsis thaliana columbia
ctgactcttactttaagtacatataacttcacgaatggatgattcttatggaccgggggaccatgtctcttattcttgctttggtcaccgcagatttttacacaaactcgtgacaggagaagccgccacaggttatgaaattcttcactgcaattcagttggaaggggacgtcacagtcacattgccatggaactagaaaatgacactgactcaacggtccatacaatcaccgatgatacgctcgctacactccagtgccgtaaaatcttcagtcgcatgtccttcatttgctacgatgtggaag

SEQ ID NO: 107244 - DNA, 336 bp, Arabidopsis thaliana columbia
ctgagactgactgagaaagcacctaactgcgagacctgagaaaatttaaggtggctcggaacattgcgatgatggattgctcatatcctgtcacagagatcacaaatactggctagaattgactcctccatacaactgaatatttttaactacgaataggcttgtacaggcgctcataattgcaagctgatggaactagtgaatgcttgtactgttccgatgcacacaggttaactttgatgcgcatgggtgaatatgagacgattcagaactataaggtacttcacgaagtggctaatatactcaagatcactgaccacatcacagtgtgcaaac

SEQ ID NO: 107245 - DNA, 403 bp, Arabidopsis thaliana columbia
caaggttggaagctgaagcaggataagaatatgatacatatgactggtaaataccatgaaggaaagggaggagaatttgaagggacagggtcaaatggtgacgaactccaaatggttgatgatgctcggcttcctatgagccgtgtggtacatttcccatccgctcgcatgacaccttatcgtatagtgatagttctccggctcatcattttgggagtcttcttgcattatcgtacaactcatcccgtgaaagatgcatatgccctgtggttgacctcagttatttgtgagatctggtttgccttttcttggcttcttgatcagttcccaaaatggtatcccattaacagggagacttttcttgacaggcttgctttaagatacgatcgagatggtgaaccat

SEQ ID NO: 107246 - DNA, 190 bp, Arabidopsis thaliana columbia
cttactcttacttttaaaccatgaagcttctggggttggccttagatattttataaggtggggcgacttgcatgcttgaagaagagattacttgcgaagagaacgtgtcgtgaacatggaaccaaacagagcgtttcaacaaactagatttcgaatgcgtctgcatcggtcgtgatagatcatctgctta

SEQ ID NO: 107247 - DNA, 349 bp, Arabidopsis thaliana columbia
ctaactcttactctaagtacatatatcttcaagaatggatgctacctcttttccaagcgagcgggtcttctatgcttgctttgatctccccacatattcacacaaactcgtgacaggagaatccaacagagcttgtcttaatctttactacaaatcactttgaacgggacgtcagagtttcatcgttgttgaactatgaatagactttgactccgagctccatacaatcaccgattacaagctcgctacattctcggtacgccaaaatctacaatcgtatcaccgtcattagccagtatggtgaagaagaatgcgaacttaacgctctcgaagcttgcataattaacac

SEQ ID NO: 107248 - DNA, 365 bp, Arabidopsis thaliana columbia
ctaactcctgctacgagtccatataactaccagaatgtatgttctttctggcacagggaacagagtcttctatgctagcttttaaccgtaacaatcactaaaaaaccacagccaacggagaatccgacattgcatgtgcaacacttgactgattgtatgactgatccggagatgagactgtcagtaatatggaactagtaaacctctgcgagtccaatatctatacaatgagcgttcgtacactcgatacattcaggaacggtaaatgtctccagaagatctcccacattaggttgagtgttgcagaagaatgataacttaacacactggatactggactaagtaacacacagtctaagctgaaa

SEQ ID NO: 107249 - DNA, 367 bp, Arabidopsis thaliana columbia
ctaactccaactctaaatacatatatttttaagaatcactgccaaacgcggggcaggggagcctgatcacaatgcttgctcactgcatgccagattagccaccaaccgcttaacttgacaatcctgcacatggtgacttaatgtttaatccaattgaacttggacaagttttaacaaacctatcgagattcaactagtcatagcttatgcattccagatcgattctgctacctgttcctagcattttgcatccagaagcattaagatatgcaaacttatttccggcatatgaatggatggtgctaacaaatgcacactccactcacttgagaaacgcataactgacacgtactctgaccacaaattt

SEQ ID NO: 107250 - DNA, 351 bp, Arabidopsis thaliana columbia
ctaactctaactctaagaacatataacttcaagaatcgatgatatttctgggtcaggcgaccttgtctattatgcttgctttaccctccacagattctcacacaaactcgtgacagaagaatcctacaaaggcggtcttaatctttactacaaatgactttgaacgtggatgtcatagtttcatcgtctatgaactagacaaatgactttgactccaagctccatacaatgaccgatgataagctcgctacattcgggtacgccaaagtcttcaataatacttccggcatttgccagtatgttcaagacgaatgcaaactctacgctctggaagctagcagtagtaacact

SEQ ID NO: 107251 - DNA, 401 bp, Arabidopsis thaliana columbia
caaaaatggtggtgaaaaactcgatcaaattcaactctcagagtgagcgcgggtctggggaagagaccaaggttcctcctatctttggccttcctccagatgccttagacgacaagaaacctacctcggattttgcagtacctatcatcgactttgcaggcgtccacaagtcgcgtgaagccgttgtggagaagatcaaagccgctgcagagaattggggaattttccaggtgatcaaccatggtgttcctttaagtgttcttgaagagattcaaaatggagttgttaggtttcatgaggaagatccggaggttaagaaatcttacttctcgcttgacctcaccaaaacatttatctaccacaataatttcgaactttacagttcgtctgctggtaactgg

SEQ ID NO: 107252 - DNA, 382 bp, Arabidopsis thaliana columbia
ctaactcttactctaagtacatatatctttaagaattaatgatatatctttttcagcgcagctttttttctatgcttgctctacactctccacatactcacacaaactcgtgacaggagaatccaacagagcttatctcaatctttactacaaatcactttgaaccggatgtcacagtttcatcatcgatgaactagtcaaagactttgactccgacctcaatacaatcaccgattctaagctcgttacattctgttacgccaaagtctccaataatatcaccatcattagccagcatgttcaagaggaatacaaactcaacgctcttgaagcttgcgtcattcacactctgtctaacccgaaattgcagcacaagttcata

SEQ ID NO: 107253 - DNA, 392 bp, Arabidopsis thaliana columbia
gcgagcaataccgagggtttttcaatctctaatccctaaggccataattgctttgggactgtactttgtcaatgctaatgaaccaagtacactccaagacttctgtgtagccattgatgacctaaaaggcggacttgcaaaaggtacgttactgtaagaccacaaggcgagttccaagcaaaagattatttcttctcaggtctcaatgtgcctaggaacaccaattactacagtggctcataaggagaccacctgttatgtcgatcagattcctgctgtcaacaccaataaaatatacttggttccgatagactacgcacggtacggacaaaatgcatctaagactcaccctcatggctcacacatccttgagcttgtctaaggaacattat

SEQ ID NO: 107254 - DNA, 384 bp, Arabidopsis thaliana columbia
cacactcaaaacataagatacactgatttagacagtttatgcttcagattgcccggggaagacaaatccgtatgacttgcattcttcaaatttgaagagaatggtatatgtcaagagaagggcaaatcagttggttgcagattcagaaattcatgatggctggcagagccagattccttcctctgatgggtgctctaagcaaagtcaaaatcacctagttaggtattcagagagccgatgcaatcagtcaatttccttgcctgaagatgcattagatacacgatcagctgcaaacatgggttcggaaagaccatctagctcagcattttctgactctgctgtgatgcgaccatttaagcaatcaaaggtttctctggttcggac

SEQ ID NO: 107255 - DNA, 230 bp, Arabidopsis thaliana columbia
cgatccgtgccacctccgcaccaaagagaggaagttcgaccatggggttacctgaactatgggttaaccgagctgtaggatggtctctgggtgagtcggtactcatgctctggactatagaccatgtctaaaactctcgggaaggagggataggatgcattttgacaaaaagataaattctagacaggtggcttatctaaagtgtacagagtttggctatgtagctggtt

SEQ ID NO: 107256 - DNA, 357 bp, Arabidopsis thaliana columbia
ctcactcttactaaaaaaactcgtaacttcgagaaataaggaaagacaccgaacagcgcacaaccattccttttgattgacctcttccttctatatctgtaacataccaatcgacgaaagaaggatcccgatcgtgatctatagtttgctgcatatgagctggaatcggagcttaaaggatcgtttttttgaccgatctaattgttttgaggatcggtcttttataaagacgctgtctttgctgctttcatgactggacaggacaaaatacaagtgattttccgaattaggccagcatgggaagaggaatgccaactctacgctctggaaagttgcgtaattaacacttaggctaac

SEQ ID NO: 107257 - DNA, 292 bp, Arabidopsis thaliana columbia
ccctattcctttgatctacttaatagccctgagactctctttctgtactctaatcatttatcgagctctctcattctcttattctggatcagccaagtttctccatttctcaatcaagaaaatcttgaaatactcaaatcttttcaagattcactttcaaagatatcttgataatagcctcaaactctggtttcaaagatgggaaacgacgagaccgtacgattcttgattcactttttcaaatggagaaggttcatggtgttttgcttcgtttctcatcatggctttgcgc

SEQ ID NO: 107258 - DNA, 289 bp, Arabidopsis thaliana columbia
gacaaattctgattgcgtttgatagcattagattctgatcgaatttgcaagacctgggagactggggattctttatgctcggttattttaattccataggagcgctccggatcaattgaaactacctcggttaaagcagtcacttaactttggatcgatgagggttttctcattggagtttgaacgcattagttctctagcttgcacatacttaatcttcatgtcttatgagacaagtcttactgctgttatcatgccattctagaacgtctctatggcattaccaggc

SEQ ID NO: 107259 - DNA, 401 bp, Arabidopsis thaliana columbia
ctcacacttacggtaaaaacacggaattttacgagctaaagaacgactcgggctagcgacacaaccatttctctctattgactccattccttctttatatgtaaactacgaatcggtgatatacggatcccaaacgtgatctttagtttggtgaatttgacgctggaatcggagctaagaggatctggtgactgactgagctaatagctttgaggatcatccttttataaagtcgatgttttcggtgcttagattactggcggggacgaaactatggtgattccgcgaataagcgaagttcagacaaacaaccgcctactgtacgggcatgatagttgcgcaataacctcgtaggctatccgggaatgacagctcgtacctttagctacggactagatact

SEQ ID NO: 107260 - DNA, 396 bp, Arabidopsis thaliana columbia
ctcactcttactataaaaactcatatcttcgagaattgaggatagacacggtataacgcacactcgttcctcttgattgaccggttccttctatatctgtaacatacctatcgacaagagaaggatccagagcgtgacctatagtttgctgcatatgagttggaattggatgttaaaggatcatttttttgactgatctaattgttttgaggatcgatctttaacaatgacggaggctaagctggtttcatgactgtacaggacagaatacaatagattgaccgacatttggcagatgtggaagaggaatgcaaactcaacgctcttgaaagttgcgtcattaacactgtggctaacccggaatcgcagcacatgctcatactatgcgctgaaaac

SEQ ID NO: 107261 - DNA, 420 bp, Arabidopsis thaliana columbia
  unsure (1)..(420): unsure at all n locations
cggaantccggggggggcccaggcgtccgttttcctttgnttttttaacccacttttttaccaccaccaatcataattcatcttggtcttctgaagggttcctaactttttccgcaatctttctttttatcaccgacgagaaaacaaatagtaatccttttgaagtttttcattttcctgggaaattgcccaattaatgagtttctatatttatattaaaagttgaaaatttaaggccttgtctctctttcgtcggttaatttgtttcatctgatcgaaagggaatcagtttagggtctttgcctncttcttttcggccagctcaattctcgatcaaaggtgacgtggatatatgaagcagatgttttggggaccagagttctgtaaatagaaacctacacgcgacgttgaaaggttttt

SEQ ID NO: 107262 - DNA, 313 bp, Arabidopsis thaliana columbia
aaaaaaaaaaaaaaaaaataaaaaaaaaaataacacaaacagtatcaaacacaaaatcaggggaagaattttctcaggcgttcgttctagcaaatacagaattgcttacgctttactgcctccgcttccaccgtctacgccgttcctccaactctccttatgaagcctaccttaaccatctctgatcctgtactacctttgcctccaatgactaagaagaatggaggagcaagatgttcaatgcagacaaagtaaggacacttatgacccattgggtctggattttcagctgcagcatcagctgatttgacag

SEQ ID NO: 107263 - DNA, 263 bp, Arabidopsis thaliana columbia
ctcactcttactaaaaaaactcctaacttcgggaattaaggaaagtcacgggcgaacacacaaccattcctttttattgacctcttccttctttctttgtaacataccaatcgacaaaatttggatcccgatcgtgatctttagtttgctacatatgacctggtatcggatctcataggatcatttttttgactgatctaattgttttgaggatcgagcttttataaacacggagtctaagaagctttcatgactgttcacta

SEQ ID NO: 107264 - DNA, 195 bp, Arabidopsis thaliana columbia
atgaggtttaaacggactatacattcgggagggccctgcttacctgaggctgaaccctcaggggcaaacctagctaaactgattatgttctttgcttttactaacattacagccatataatcttgtctttttgatatgaatgagtttggtgttacactcataaccatttctttacttaatgagagtgaattggtc

SEQ ID NO: 107265 - DNA, 407 bp, Arabidopsis thaliana columbia
cggacgcgtgggcagggtatacgttttcagttgctgcatgcgccaccctttgtcatgaattatgctggtgacttaaaatacgtggtaaacaagttccatgtatctagtggaacatctgaaagtataagagatctaaaagtagaactcgcagaaatgaaagtctggattgcatcttcattacatagaggcgaagaagaagtcattttaggagttcacaacatgcttctcgaatcacatccggactctgttgtcataattgtgcctcgacatccacatcatggccaacagattgctcatctttttttgtagaaactgcggaaagatggccaaagtgttgctctaaggtctcaaaacgaaaagcttacaccaaggaagacgaatatatatgtggtggatacactaggtga

SEQ ID NO: 107266 - DNA, 410 bp, Arabidopsis thaliana columbia
aatttactaaaactcttccaaaatgtcacattccttcttcaatttattcctaatctgtcttttgctctacaacaattgcattgcgcatcactatacattcacggttagggaagttccatatacgaaactgtgtagcacgaaggcgattttaaccgttaatagtcagtttcctggaccgattataaaggttcacaaaggagacactatttatgttaacgttcaaaaccgagctagtgaaaacatcacaatgcattggtagtctaaagaccatttgtattataccacttacaagcatataataaattaagacgatgatgattgaataagtgtatatgtatatttaaacacacaggcatggtgtagagcagccgagaaatccgtggtcagatggtcctgaatacatcacacaa

SEQ ID NO: 107267 - DNA, 398 bp, Arabidopsis thaliana columbia
cttggttatggtggggattgggcagttcggattgatgtaaaaaataaaggggtgagggatgatgtgaagagaagtgcacatctcttcttttatttagctgatgaaggtggcaatgttttaaatttaggccaagatggtttagatttccaagggagctctctcctggtttcggggtcacgtgaagatgtaggagactggcagatacacttaaaatcacagaatcagctcgagacacattattccggtttcaagacgcctcacatatataatttgtctgatctagttcagcaaaatcttgctctgcaggcaaggaagtttggacgacttcagctctctgacacatcagaggattcttctaacatttacatctttcagatttctgggaggctaccatttac

SEQ ID NO: 107268 - DNA, 367 bp, Arabidopsis thaliana columbia
aaaaaaaagaaaacgccgaaccatagattttaatggtcttcctcaaccatggctttgagctcccgtgccttaaccggaaaggctgtgaaccctgccgcatcagatgtccttgaaagccgtcgtgtgaccatcacgaagactgtcgccaagccaaaggttccatcaggcagtccatgtgacggatctgaccgagtcatgtacttgggtccattctccggcgagccctcgagctaccttaccgatgagttcccaggttactactgatgggacaccgttggtatatcctgcgacccagagacctatcgcaggaaccgcgagctagaagttatccacagcagatgcgccatgctcggagccctaagctgcg

SEQ ID NO: 107269 - DNA, 240 bp, Arabidopsis thaliana columbia
  unsure (1)..(240): unsure at all n locations
nnngnnncnnnnnnggnnnttttgtcccatcagccttttgtggtattcttggttttcgaccatctcaggggactgtttcttcagttggagttttgcccaattctcagagcctagagactgttggatggtttgcctctgatccatccgttttgtgtcaagttggacatgccttactaaatctgagtgcagtaacacatagaaggcaaagatctttaatctttgctgatgatttattcgagc

SEQ ID NO: 107270 - DNA, 265 bp, Arabidopsis thaliana columbia
gtccggaatggccggagcgacccacgaatctgcggacacttgaaagtacccttttcacactctttctttcgattttttagggtaatcgtgagtagcgttaacaatggctggtaaaggagaaggtccagcgattggtatcgatctcggtaccacttactcttgcgttggagtttggcaacacgaccgtgttgagatcattgctaatgatcaaggtaacagaaccacaccgtcttacgtcgccttcactgatagcgaacggttgatt

SEQ ID NO: 107271 - DNA, 396 bp, Arabidopsis thaliana columbia
aaaaaagatattctttatcccaatttccctaaatcataaagaaacttacgggtcggggtgaacgccatctggagtctactaaatcataagcgatgatatcttcgattgagaatgagagatccgaaattccttcccctgagaagctgaagttagtggaggagccatccgacgatgaatctaagttctataattatgattcggactattgggaaactttggcagatgatcttctactgttatatgaagagtggggcaagagcgggggtattgatgtggacttctcgaaagtgcgtaacagatttggtcacggagctgttcatctcgacgactacaatatggatagcgagcctcatgagaccaacagagatctgctcaacatgatgtccaacatggcta

SEQ ID NO: 107272 - DNA, 398 bp, Arabidopsis thaliana columbia
acgagcttctcgcatgaagcaatgcttgaagggatagtgccagtgagagtgtttgatgagagatcgagattagagagtgaaggacaatcctggaattggtctggaacttcgccggagataaagttatcggcgactaaaaacgcctgtaggttgtgaattgagaggattgtggaagggagagatgatcggatctggtttcttgagaaatcaatgaaagaaagtgaaactgaatcggagatgtctccagggatccctccgctgagacgatttccggctagttcgagtctctgtagcttctcaagcttgccaaagccgataggaattgatccgtttagtagattgttctgcattctaacacgaactagtgattggcaagtggaaagagtcgctggaatctg

SEQ ID NO: 107273 - DNA, 216 bp, Arabidopsis thaliana columbia
  unsure (1)..(216): unsure at all n locations
attatggggtttttttttttatatttttgtctctcaatctaaagagcaaacacagttaaaatatcttaaantgcttttggccaaaannnnanacaaaaacacaattctctggataaagtttttacaagccaaaaataatttttgttcaattttattaaagccagnnnaacacttattaactttttccccaatagggccatttttttgcacgttttt

SEQ ID NO: 107274 - DNA, 386 bp, Arabidopsis thaliana columbia
  unsure (1)..(386): unsure at all n locations
ccgaanggaaggcccgacccgcgcgatccgtccggactccgaacatgagccccgctcaggcgctgtttcctcctgtctctctatcatcatcatcatgactttctctatctatctctcttcttaaagcggccattggtgctctccaagctccatctcaagcttttcttcttgttttgttggtctcttaattgaaaaacaagatcttgaactaaaaaatggaaactgaagacgatttgtgcaacaccaattggggaagctcttctttgaaatcgcgagagccgggttcatcagactgtgggaattcgacattcgcaggttttacgtcccactagaagtgggaagatgcttcaatcttggattatgagatgggtgtggagcctggattg

SEQ ID NO: 107275 - DNA, 438 bp, Arabidopsis thaliana columbia
gtttgcttctagggtctttcttttctttgtttgtatatgtgacctgtttgaatcttaatttggctgttaaaagggttattgagatgcagcaaaagttgtagactgagatggacaaattatctgagacctggaattaaacgtggaaactttactcctcatgaagaaggaatgatcattcacttgcaagccttattgggtaacaagtaatctcagacaaaaggatctacatgtgtatatacttgaatgttttgtgtatatattttgatgatgtgaaccctaaactggcttatttgtttacatatggatgtggtaagatgggcgtccatagctttatacccaccacaaagaacggacactgatatcaagaactactggaacacacatttagagaagaagctcacaagtctgacagtgatgagaggagcagatcagagaaca

SEQ ID NO: 107276 - DNA, 315 bp, Arabidopsis thaliana columbia
gatccggcgccacgctccgcattgtcttgattatgtccgctgattattgatctttttgcgagctgtttttgataactagagatttgtgcctaagtgaaaatcatgttataattgatttgatgtaaggtctgatcatgataacacatatatgaatgattttattttgtcttacgagtactacgtttattggtctcgtgttgggattataaaattggtcaggacccctttagctgtatggatggattttcaaatgggatgaaaagagcatggggggagtgctacaagagatataggatgtttaatatttttgtttgc

SEQ ID NO: 107277 - DNA, 351 bp, Arabidopsis thaliana columbia
cactctttggtgtctcaataacactaagaaagtaagtaaatgaaaaccagagatggcgaggacggacagcatgtacggtatttgttttaccggccaaagtcacctcgggtgccggcgcttggttgatcagtagctccgagtattaattgccgatgagaaacgccggttctaggctcgtagggagggcagacaaagatccttgtgctgtttgctcttcttgaaaagattctccggcagctgccgttgctccggatggagctactgtcatcaaacccaagccaccactgattgggcctaagagagggtctaaggacaagattctaaggcgagaattctattggttcaagaacg

SEQ ID NO: 107278 - DNA, 251 bp, Arabidopsis thaliana columbia
  unsure (1)..(251): unsure at all n locations
gagagttaagctataagagagtagaaagttggtgttaattaaagttttggttcggatattgatggtttttgtcaaaatgactgatgtttacttgatgattgtgatgttgatgggtttggggtttagtatagagttatcaaangggcacaagttctatgttggagggagagatgtgtgggtccttatctttattgaggtttttttttattttncacaccnatatcttttttaatgtatcgacacttatatat

SEQ ID NO: 107279 - DNA, 141 bp, Arabidopsis thaliana columbia
  unsure (1)..(141): unsure at all n locations
cgtacaagcaagaagagagagcgaaaatggagctctgtgttatcagcacgactacgactgttggggggagtaatccgtttcttccgtcaattacacgccgtgttagnnnccgattttttcaattcagacactgtgctacag

SEQ ID NO: 107280 - DNA, 427 bp, Arabidopsis thaliana columbia
  unsure (1)..(427): unsure at all n locations
gaccaattggtcattgaagaaggctaaagtcttcactcactatggcttcatccctctggtcatgttcgtcggcatgaactccgatcccaaacctcatctcttccagctccttagccctgtctgatccatccaattttatcatcaacctaaatcaatcgaatcggtcttcctctggttcggcttcttcatatctttacgcgtgttcttagattcgccgaatcntcttgtatgctttttcattagctagtctttgaatactttctctatggtactgtattgtataactttagcttatgatttaatgtgaaatcgaattttatngtttgttantnntttattttaacaaatttttttacttttgttattaaagttttttattctactctatcaaatttttttttttatgtataatgggctgttctttttt

SEQ ID NO: 107281 - DNA, 486 bp, Arabidopsis thaliana columbia
  unsure (1)..(486): unsure at all n locations
gttgaagtgtaatcagccccagagaatttcaagttgcttgcgaaatgcagaagtgaagtgtgtaaggagcttggaataccggaggagcaatgtgagctatctatggggatgtctggtgactttgaactagcaattgaactgggaagcacaaatgtgagaataggatctactattttcggggcgagagagtatcctaagaagtaatgatgtaaactactgagtgatgagattgattctaagtttgaacatcaaaaccagtttcagggaagaataagagcttaggttttaatgttgaaatcatgtagatcttctctcttcttttggtttgcattgcatttggtgatgttgcttgtaagttgtaaccaaggtacattatnactatttttctaatttcatggatataaacacatgaaagatgtattttttcactattatattattcttttatttaaacacaaatctatatttttttttactaattttatt

SEQ ID NO: 107282 - DNA, 414 bp, Arabidopsis thaliana columbia
  unsure (1)..(414): unsure at all n locations
gttcggcgtttgtatcaccagagacgcgacgcgataatgcttcggaagtcggttctcgagctgtcttctcgtttgtcaataaagagattcccgaggaatttgggagctcagaggtttcatttgagctcttcgagaaatgcatctacatctggtaaaaatggtctccctggagctaaacccgttgggaaaccagatgcctcaaaagttgatcctncaaaagtgactccttctcctcctactaaaggaaattcttcaaaagtggttataggaggtgttgcaatcgctggggcttttctggaagcgtttcagactggctatttggatcatatatttgtgaaagaacattagtaattaagtgagcgaattctttctgaatctcttactttaaagctggaggaggcttttcattttgaa

SEQ ID NO: 107283 - DNA, 436 bp, Arabidopsis thaliana columbia
  unsure (1)..(436): unsure at all n locations
atctataagtttttgaaagaaattaatattcaaaacatggcttctagtagtggaattgcatgtggaaacactcaaatagtttaccctacaggaattcacaaggccactatagtctggcttcatgacatagggcagaaaggcatcgagtaacaccatcacattgctttattttgtaaattttgcatgattcattttttgcaggtaaaatggatttgtccggtcgcaccaacacgtcccgttacttnctggggtggaattgcaaccacctgcttggtgcgatgtcacaggaatttctgagaacatggaaagatgatttggtttccataaactcaataactgcatttgtatttagccttttgcttgacgaaccacaaaatgtcatgatagggataggaggtatcggcttgggtgcagcagtagctctctactgtgcgac

SEQ ID NO: 107284 - DNA, 497 bp, Arabidopsis thaliana columbia
agcttatgcaggaatcggctgttttgtcagatttttttacccaggttttatccaaaccagagtataaaactgtgagagctcaactcgaaagtaaaagaaactttaaaaatgtaaacttgaatactaagaccgatactagacccgacccggaaacccaaacccgatgcaattctgtcaatctctcttcttactaccgactcttctccgtacgatctccgccatcagatcctctaatttccgacgccggctcaatcctaacacaccaccgttccaaattccgttggttcactctacgatcacttcagcctgtaggcttcacaccttctcaatgctccgaaatcactctctgcctccgcaacaatcctcacctctctctccgtttcttcctcttcactcgccgttactctctctgctctcacgacacacactcctgctcaactctcatccacatcctttctcgatctcgtctcaaaagccacgctagtgaaatcatacgt

SEQ ID NO: 107285 - DNA, 309 bp, Arabidopsis thaliana columbia
  unsure (1)..(309): unsure at all n locations
gggcgaccacgcgtcgagaaatggaggtgatcggatttacgcgcgaattttaggggaaatcgaagaaaaagggaagccggggacgatcaagagtttcgtagtctccacgaccttttaccagtcgtacgtactcgtgaccaccgtgctgaattagatgctnnaaagcaatcaacgtcacattcagctgtggatcgagaggttagtgaatggtcacatgcaccgactgtttctgancctaaagacttgctatatctgtagactgaccaagacaaatttttgtgaaaatctgaaagcggctgttgagaagaa

SEQ ID NO: 107286 - DNA, 384 bp, Arabidopsis thaliana columbia
  unsure (1)..(384): unsure at all n locations
gaacaaacaaaaaatgaagagaagtgactttgagactcaatgggaagcaaatagtgaaatggctagctttactgtctacgcttgcaccgaaatccgacgttcgtccggttctaattctcaagcctaccgatccacatctatgatccagctataggaatgccttcaatgggtaagaagaacggaggagtgagatgatcactggagacatatcgaggaaacgaatcatccatgggggctggagatcagctacagcaacagctgcttcgacatgggactggagcgaatccctgatggctatgatagatgagaggatgcgaacagtatgttcnggaacaccctttggtctaagcaacaaccatctagggttggattctgtaaggagtc

SEQ ID NO: 107287 - DNA, 340 bp, Arabidopsis thaliana columbia
gtagactttgtaacaatggaaagttcagaccctgatccatccactggcagcagaatcgtttcgagacatcgttctcctgttataccagagtattttcggtgtccgatatcacttgaactgatgaaggatcctgttatcgtctccactggacagacatatgaaagatcatcaattcagaagtggcttgatgctggtcataaaacatgtccgaaatctcaggagacacttttacatgctggattaacccctaattatgtgttaaagagtctcattgctttgtggtgtgaaagcaacggcattgagctaccgcaaaatcaagggagctgtagaaccacaaaaa

SEQ ID NO: 107288 - DNA, 441 bp, Arabidopsis thaliana columbia
gaataatccactcgaatcttaaaacgacgtcggtttaaccaaatgcgagtcaacggatgctgctgcaatgcgtcgtgttgtgttcgtcactcgccgtcgtcgtcatctccgtcgcttcgacctctcccctcgttggtgttcaccctttagatgaaaagtatttcgactcagatgttatcaaatgcaaagatggctccaaatctttcacatgagatcgtctcaacgacaacttctgcgattgtctcgacggcaccgatgagcctggaacttcggcatgtccaaatggcaaattttactgtaggaacattggaagttctccaaagttcgtttactcttctcgtgtgaatgatcgaatctgtgattgctgcgatggaagcgactagtacgaaagtagcattcattgttccaacacttgtataatgggtggtaacgttaactaca

SEQ ID NO: 107289 - DNA, 106 bp, Arabidopsis thaliana columbia
  unsure (1)..(106): unsure at all n locations
gttttgatggataaggaaaggacaaaggcttttactgatgctccgaggactactcctgaagggatctccaatgatacttgtcctttcgtgttgattgttanaggat

SEQ ID NO: 107290 - DNA, 455 bp, Arabidopsis thaliana columbia
  unsure (1)..(455): unsure at all n locations
gaatatacttcctgacctcattcgtcattgttcttatcaaaaagcatcggtccgagatggataccttacgcttttcaagttcttgccaagatccttgggtgctcagttccagaagtacttgcagcttgttttaccggccattctggatggtcttgccgatgagaatgaatctgttcgtgatgcagccctgggggctggccatgtactggtggagcaccatgcaacaacgtctctgcctcttcttcttccagctgtggaggatggtattttcaatgataattggcgtatccgtcaaagttctgttgaactgcttggggatctattgntcaagggtgctggtacatcgggcaaagctctactggagggtggaagtgatgatgaaggtgcaagtactgaagcgctaggtctggccattattgattttttaggaatggacaagtgcaattgaatttttg

SEQ ID NO: 107291 - DNA, 283 bp, Arabidopsis thaliana columbia
  unsure (1)..(283): unsure at all n locations
ctttatcttccaaaacacaaaacaaaatattttttcttccactgctctctcaagcgccatcggcggaacttcattcatccgtcgttccccagctccaattattntncgttctcttccattagccaacacacatttcctcttnggnntnaaattaggcaccgctcttngttttcgttttacagccatgctttcattcaaggtctaattttatctctccagaaggngagcttccggctgagtgtgactactacgtttacgtttttgttgctgctgaggaagctgt

SEQ ID NO: 107292 - DNA, 393 bp, Arabidopsis thaliana columbia
ggcgaccacgcgtccgcttgaagattcgaatcgagaagtccgtggaagaggaagaagaagaagatgtctgtgcaagaggatttagacaagcatatgctttctcggaaaatcgaagacgccgtttatgccgccgtaagggctaaaacctcagatcccgtgctcttcatcggtaatcatctgaagaaagctgtatcatttgttataacgaaggtttaagctcgtcatatctttgacagcagaggcatttcaacagttgaagttgatctgctctcttacaaaggccgttttcgtgcttaagatttagtggtttttctttcggaacattttattccatcatattacttttttgtttcataattatttttttttgatactttttatatttttttcttt

SEQ ID NO: 107293 - DNA, 385 bp, Arabidopsis thaliana columbia
ggttattggtccaaaaaggtaaaccgattggggaccaatggtggaggtcaaatccaccgtttaaaccgcctgaaacgccattagattctatggagtttttgtcacgtacttggagggcttccgctactgaagtttcaagagctgtcgtcgcgtttccaccgacttttcaaccgccgcaaatgcgtttttcggagatccaaaacgggtcttctgacgtcactttggtgccggaagatgaagaaaacgcattcgtcttggaaatcttttcttttgcttttagaaactcttaatggcatggacgatatggtcatcaccgggattatcgccgacatcagggacttctatgctatcacgcagcctcgatcttctcgcatcgcacttagca

SEQ ID NO: 107294 - DNA, 118 bp, Arabidopsis thaliana columbia
  unsure (1)..(118): unsure at all n locations
cgaaaaggcccttaattcnngaaaattcccaatttcttcataggtnnttttaaaanngagtattgnncaaagatgtgcgttctngnnattcgtcncnncgggaaggaggnnnatgtgt

SEQ ID NO: 107295 - DNA, 332 bp, Arabidopsis thaliana columbia
  unsure (1)..(332): unsure at all n locations
tctttctctatcactcgctctgtttctctgctttacggataattcctttttggctatttatttatgcatgagaagttccatcgagggagttctgaggatgcagctgaagctctcaagaagcttgaaacatccataaatggtgcgaggataagcttcgacacgacatggacacgagaatttaggagcttatttataggtcccttattcaagtgtttggnggctttatgtttgataatctccctcttagttttcatagagggtatatacatgaaccttggagtactctacgtcaaggtgtttgagccgaaaccccgaaaagtttatagattgga

SEQ ID NO: 107296 - DNA, 490 bp, Arabidopsis thaliana columbia
  unsure (1)..(490): unsure at all n locations
ctcttctttctatatatttatataaaaagtcaaaatatcaagaagaggaagaagaagaagaaactcattttctccgcagagaaaatacaatccatggcttctacttttaggctctctattagcttcctcactctcatcctcttctctctggtatgtttatctctccccatatatattgttaacaattttacacttatatgtatatgattctttatgcatatgttcctctatatgtgtgaggctcaaattgaaagccttattctttaaacatatgtacctctatatatgtatgtatacatatgtatatgattaaaagtatttaatataagacataagagtcctggaaattaatcacatatgtaattgtggcacacaaatttacataagtttatgcatcataatgttttaagaaccttcttttctctcttcaatcggataaaaaaagaaactagtactngtataagaatctacagcatatattcatggaaat

SEQ ID NO: 107297 - DNA, 443 bp, Arabidopsis thaliana columbia
aatcccaggccttgatattgttgttgacccgtgtgctgctgtgctagtgttcattgtaacaggactttgttgccttggagtaaaggagagcacatttgctcagggaattgtaacaacagcaaatgtctttgtcatgatatttgtcatagtagctggaagctatttgtgtttcaagacaggttgggttggttatgaacttccaacggggtattttccttacggggttgatggaatgcttactggatctgctactgtcttctttgcctacatcgggtttgatacagttgcaagtatggcagaggaggtgaaaaatccccggcgggatttaccgctcggtattgggatttcgctcctgctttgttgtttgctgtacatgatggcgtctgttgttattgttggttcagagccgtattttgctttggaccctgacactccaatatcat

SEQ ID NO: 107298 - DNA, 380 bp, Arabidopsis thaliana columbia
tgtttggtttaatccacagtttatttacattatgtattaattaagggttttcaaaatttgaaatattgaaattcaggtacggaattgaacaagagtataccttgttgcaaaaggatattaagtggccggtaggttggccggtcggcggtttcccaggtcctcagggaccgtactactgtggagttggagcagacaaagcctttggaagagacatcgttgattctcattacaaagcttgtctttacgccggaatcaatgtcagtgggactaacggcgaagttatgcctggccagtgtgagttccaagtcggtcccaccgttggaatcgctgccgtctatcaggtttggattgctcgtttcattcttgagaggatcacaaaa

SEQ ID NO: 107299 - DNA, 426 bp, Arabidopsis thaliana columbia
cccttcttgcaaaggctgttgctggggaagctgaagtccccttcataagttgctctgcaagtgagtttgtagagctgtatgtcggtatgggtgcctcacgtgtaagggatctttttgcacgggccaagaaggaagctccatcgattatatttattgatgagatagatgctgtggcaaaaagccgtgatggtaaattccgaatggggagcaacgatgaaagggagcaaactttaaatcagttgctcactgagatggatggttttgacagcaattctgcggttatcgttcttggagctacaaatcgtgccgatgtcttagatccggccctgcgtcgtcctgggagaatttgatcgtgttgttacggtggaaacgccagacaaaattgaagaagaaccattttgagagtacatgtgtaaaaaaagagct

SEQ ID NO: 107300 - DNA, 411 bp, Arabidopsis thaliana columbia
ccggagaaacttccgaccaacgtgtcggagctgattagaaatagtgtcatgtcacacatgcagggaatcttctcgatcgaagggccttcactggttcctctgcaactatcatctcgtatgtaagtcgctccactgttatcacatgttgcagagttgcggaaatgaattgtgttgttatccatttcatgtagggagactcatctattgtatgttgttccagatgaagtgataagtatatctcttttaaaacactactctcaaattctgtcaccatctgagaatgataaagttctttagattctagacatacattgtggtcggatcctagtaccttgatcattaagatgaacatgtttgggtagcctgaggtatgattgtctcgatatctattatcttcgattgcctcacctt

SEQ ID NO: 107301 - DNA, 130 bp, Arabidopsis thaliana columbia
aaggaaaacatgattgggagggatcgtacgatggtgggcgtcgatttatacgagtgtcgcacctgttggttctctgaagggaacacagacgatcgtcgaataatgcaccgataaaaattatcaagctccg

SEQ ID NO: 107302 - DNA, 305 bp, Arabidopsis thaliana columbia
gtctcctccatgtttaccacttacaccagacgcataaccttcctttattcgcgcggatggggggcaacaaatgttcagaagcggcaacgtcaccgttcgggtcttcgaacgttaaattcggactccttctcccggcgcatgcgacaggagctaaaattctttctctgtctcaatctatcagtcgcaatgtgtgtgtagcttatctctttaccggcaatgataggtcaatcgcgctagacactggtactaaaacctagtcccaagcctcacactctacgatgtccgatctaccgatcactgttatc

SEQ ID NO: 107303 - DNA, 213 bp, Arabidopsis thaliana columbia
aattattctcagatggagaaacccatctccatcacgacggggaagtttcggaccaacaacagcaacaatcataacaatgtctggttcgttgttccactcttctttatcctctgtttcgttctcctctgttttgactactctggtttcttaccgacccaaaccaaaccgtttctaattccgacgttcccaaaataacatcttggattacaaaga

SEQ ID NO: 107304 - DNA, 208 bp, Arabidopsis thaliana columbia
tttttccgtaattttccggggatctgccgcaatttatcaaccgaaaccccgggtttccttttctttaacccggccgtaacgccgttcaatgtagttacctcctcggccgcttcgccgagtttgcaaccttttaaccggcaagttttgttgggccatcctttgttcctgctaaggttgaggggaaaaagacctttgtttccggtggcaa

SEQ ID NO: 107305 - DNA, 431 bp, Arabidopsis thaliana columbia
caaaggcgtctgcttttacgttttctacttcacagcatatggcggattgggctccagttgtgcggggagttgtattaggcggtatcctttctccgggacttcttttctcgttgcccggacatcaccatactctccaattcggcggcatgaaaaccaacggcaaagccatcgccgttcacacactcatcttcttcgctgcttacaccatcttgatcctcgctgtcaatctccacatcactaccggctaatttatgggccgaaataaaggtaacccttttgctgtatctgagctctctccctctcaggaatcttctgagatctggaactctgtttttagggatttgtatactatactctgttctctagtttgtgttgtgcattgagctaatactgtaaaatgttataatcattttagcttgttttgatgtcat

SEQ ID NO: 107306 - DNA, 497 bp, Arabidopsis thaliana columbia
gaaaactcattaattcattcgtcggattcgaagaagaaatcacttcccagaaactggcttcgtatcgaagtattgcttgtgttcttcggagaaacgagatcgggatccgaatacgagtacaatggaggtttcgcaagatggatcggaaagagataaaactcctcctccttcctcttcttcttcttcttcctctcccattcctgtcgtcaccaatttctggaaagaatttgatttggagaaggagaaaagcctgcttgacgagcaagggcttagaatagctgaaaatcaagaaaacagccaaaagaatcgccgaaagcttgcagagagcacacgagacttcaagaaagcttcgcctgagaacaaacttagtatgtttaattccctcctcaagggatatcaagaagaagtagataatattaccaagagggccaagtttggggagaatgctttcctaaatatctatcagaaactctatgaagcacctgatcccgtttcct

SEQ ID NO: 107307 - DNA, 368 bp, Arabidopsis thaliana columbia
aacgtgaaagcatccacagagcagaagcaaggaacgcccccttctgtagcccatggtcttggaacttaccggtggcttagtgaagacgtaatgatgaatacattagggatatttcgtagcccttacagtggatttgttgaaggatttattgctgatgctagtagaaatctaaaggatgttaagataaacaacgatgttattgttagaaccagtaaaggaattcctgttcggaggtatgaactgagggtggatgtagatggtttctctcatttcataagagtccatgacgttggggagaatgcagaaggaagtgtagctttgtttcttcatgggatttttggaactggtgaaaaatggatccccattat

SEQ ID NO: 107308 - DNA, 504 bp, Arabidopsis thaliana columbia
gttttagtattatccatcttgccgaggacggtctagccagagagaacttatagcttgaagacggtggaagtactccgcaacggctagaagacaccgtgcttcttgacgggtcgtcaacaattggttcagcctatggatcgtttggtgcctcaaattatccgcctgtaagtttctaatgtattagctagttcaaaactaaataagagttatagggaaaatggagaaatagtaaaagcaaaacaaaagatggacaaagtagtgcacatgttattgactaagaccaattaaggacaaataatcgaattggaccatcattaatctcataaatataagtattaaagactaactagagaggaaaaaaacagataaaggactaattaagcattataatgattgtgcatgacccgaaattatgtggttgattgacgactaatgccgattattcaacattgtgatcgatcaaaaaatcaaagcttgtagtaattcactaaatagaacacgaca

SEQ ID NO: 107309 - DNA, 390 bp, Arabidopsis thaliana columbia
acattgcacatttttccctttacttttctttagctcatttcaagaagatggttttatctaagacagcttccaaatccgatgattcaatccattcaacttttgcttcccgttatgtccgcaactctatctcacgattcgaaatacctaagaactcgatccctaaggaagcagcataccaaatcatcaacgacgagctcaagtttgacggtaacccgaggctaaacctggcctcctttgtgaccacttggatggagccagaatgtgacaagctcatgatggaatccatcaacaagaacaacgttgagatggaccaataccctgttaccaccgaccttcagaatcgatgcgttaacatgattgcgcgtctcttcaacgcgcctttaggtgacg

SEQ ID NO: 107310 - DNA, 235 bp, Arabidopsis thaliana columbia
tttggtcttcttgggctctattttaataaaggaggttggtccacatcaaaaaaaaaaacgacattgcaagggacaacgcggtaaacacttatcaaagatcaccattcaccaaaggcatggagaggccctatatgggaaatttaaaagatagaattggttacctatttaatggcttggatcaaaggttaaggggctcatcattaggtgggttaagggccaacattggcttccattt

SEQ ID NO: 107311 - DNA, 369 bp, Arabidopsis thaliana columbia
gaacaataagggcagggaaaaggtcaacccttttctttctttctttctcccggctgtttgcatttaaaaggaggtcggaaaatttggttggtggttaatcctcttctataaaaaccaacccggggggtttgtttcattttctggcctggcgtttccattaaaactttaactttccaattaaatccatcccatttccactcttcaaccattatattaatcttttttttggagaggacagttacttttctcctctctctctctctctcttcttttctctgctcttggctttctcctctgtctatggagctcacccagtcgctcatttgcaaatggttcgggtagatacagaggtgcaataactcatgtgac

SEQ ID NO: 107312 - DNA, 479 bp, Arabidopsis thaliana columbia
acgcgtgggcaacaatggctacttcaagaacattcattggctgtaatctctctatcgtacgtgctcgatatagccactacttatggtcaggctccagcttcaggcccttcaggcacaacgaacatatccgcattcctagacaaggctggacaggccacattgtgcataagacttcttaaaagcgctcaagcctgagaccaaatcaacactcagctcaattctttctggagtaatggcttaaccgtgttcgtccctactgatctcgcccacaacagcctcaaatccgggaccctaaactcatgggctgaccaacaataaggtgagctaggtcaggttcatgtcttacctacactcatgaccatgcctgagctgcaaacctgcagtaacgcctgacgcacgcatgctggagatggccacaacggtagatgccctgttaacatcactagctccggtaaccaagttaacatcagcactggagt

SEQ ID NO: 107313 - DNA, 123 bp, Arabidopsis thaliana columbia
caatctattctccgctgcatcttttctcgattcactcaaaccaggggggggacaaccatgtgctgcgtccgaacctaccttcccaagatttggtgagtttccagagatctaaacttcgtcttt

SEQ ID NO: 107314 - DNA, 454 bp, Arabidopsis thaliana columbia
ctgaaattgagaagaaaagtatcaaagacaaacttccacagcttgagcaagaggagcggaatagcattgaagaaattgatcgcataaaacctgaactctctaaggcaagaactgaggtcgataagagaaagacagaaatgaataagttggagaaaagaatgaatgagatcgtggaccgtatctataaggattttagccagtctgttggggttccaaacatacgtgtatatgaagaaactcagctcaagactgctgaaaaggaggctgaagaaaggctggaactgagtaaccagcttgctaagttaaaataccagctggaatatgagcaaaaccgtgatgtggggtcacggattcgaaagatagagtcttctatcagttctctggaaactgatttggaaggtatacagaaagacaatgtctgaacgttaggagacagcggttaaaataactaatg

SEQ ID NO: 107315 - DNA, 424 bp, Arabidopsis thaliana columbia
caacgatctttatctacaaacattcataaactcttactctctccaaaaatgaagctctgtctgcgttttctctcagtccttctcctgatcgctttcatggttcttgctaccactgcagaggtgagtccgttggataataaaatatgcaagacaaggagtgatcgtttctcaggagtgtgcataagcacaaacaattgtgccatcatctgccaacaattcgagcactttgatggcggtcactgcgaattcgatggagccttccgtcgttgtatgtgcaccaaacaatgttgattcaatactctctatttgatcattggttctatataataataagggacacactttgttaatttgtgtcctctctccatatatactatatactatctcattatttaagaaatttaatggatttttaataataatt

SEQ ID NO: 107316 - DNA, 344 bp, Arabidopsis thaliana columbia
atgaatcttaaaacaaaaaatggatttcttaaagctatatacaatgatccgtttgctcgcaatgaacgatgctgcatatgacatggacatgtcaatcatatcctacaacgaaaacaaccacatcactaccaggacctgtcgtgactacttggatgttgagagattctacgaagcgtgtatggaggaacacatgcagaagtagatgaatcaacacagtcttggtgcacagaaagatcaaagagttgcgagctttaacgataatgttggatctatcgatgaacataacaccaaagaccgtgcttatgaactagctttaaccgggttggctgaattaaccaatgagg

SEQ ID NO: 107317 - DNA, 381 bp, Arabidopsis thaliana columbia
aatggggggaccgtgacatggttagaatttttctcgtaagtatctgtgcttgatggggtgggcatgagtgaacccaaagagattgtaagagaagaaagggaatctgataggtgtgaacggtagaggatggagcacaaagatcgcgaaagaaatttagagaaagttaaagatcatatcaaaagagtgccatgtactggtgctgagaaagatgattttcaaaacgagaaatagcttggtgaagcatctgccaatctctttatagcagtaatttttgttatcattatctatatgaagcagtacgtaccttttatttttttaaattattaaagatatacttaatgaaattaattgttagagtgtgatggtttatttatttttttt

SEQ ID NO: 107318 - DNA, 318 bp, Arabidopsis thaliana columbia
atacatgttgatacaaaaaatggtttttttaaagccatatacaatgatcctcatggtagcaatgatcggcgacacatatgccatggacaggtcaattatactgtacgtcaaacgccagcacgttaacaccgagaccaggcgtcgcgactcagaggctgcgagaatgtaggaagcgtggatggtggaacacgggaggaagaagatgaatgaaaacgtgcttggcgcatggaaagatcaaggattcatgctgttctatgatcatgttgaggatatcgaggaacataacagcaataacctcatgttaaacttggttaaccc

SEQ ID NO: 107319 - DNA, 463 bp, Arabidopsis thaliana columbia
ccgggcaggaattggccggagcgacacgcgtccgtttttttttaaaacaaaaaaggggttttttaaagtaatctccaatgatccttctcctggcaatgatcggggtttcatatgccatggacatgtcaatcatctcctacgacgaaaaccagcacattaccaccgagaccagccgtagcgactcggaggttgagagaatctacgaagcgtggatggtggaacacggggaggaagaagatgaatcaaaaccggtcttggtgcagagaaagatcaaagattcgagatctttaaagataatcttcgtttcatcgatgaacataacaccaaaaacctcagttataaacttggtttaacccggtttgctgatttaaccaatgaggagtaccgatctatgtaccttggtgctaaaccgaccaagagggttttgaaaaccagtgatcggtatcaggcgcgtgttggtgac

SEQ ID NO: 107320 - DNA, 239 bp, Arabidopsis thaliana columbia
tttattgttaaaagagacagtggatgtattagataaagtatacttagacttttttactagcaatgatcaatggtgaatgttctatagacggtgacaacagggatgcctgcgacagctgagtgatcaagatcattaatggacatgaaatctaagaaggtgcatggatacatcgatcgtaagatcggagacacgtcacgtaaaggatgcgtcaatacagtctgggggcccagagagagcta

SEQ ID NO: 107321 - DNA, 230 bp, Arabidopsis thaliana columbia
ctccgtcactatcttcgactcgggtctttttcctggtggacgcatgtctcaaagaagggagattggagaagatgggaaggagttgatgttctaccatggagcttcatttttctgcgtgagcaactcttatgccatggctcttgttcatgagtgggaatccagaggttttgtttctgaatggaaacacgtttttgggagttttgattgctcctccaacatgtttcttggca

SEQ ID NO: 107322 - DNA, 421 bp, Arabidopsis thaliana columbia
  unsure (1)..(421): unsure at all n locations
tggatgttgtaaagcttgtaaagttatgtgtagtggcaacgatggaccttgcttgtgcgattcatgggtgttttgtgggaacaaagaggattgtggctcgaagtttggagagtgttggttgaagaagcaaaaagatgtcttggtgcctgatcgacaaggaggtggcgagaaagtaatgtggacatctggacttatcttcggacaaggccagggcattgttggttttgagacggaacacggcgtaattcatgtcaaacttcaacctggatgcgctcctcactcagtatactacattctgagtttgttaactctacgccattgtgcaggctgccagtttcatcgagcagagaaccggtgatcatattgngactcagaaggcaatcatgtaaagaatgctccctttggtccaccatacgctatg

SEQ ID NO: 107323 - DNA, 391 bp, Arabidopsis thaliana columbia
attgtggttaaaacaaaaaggggggaaattaccgttatgtataatgactcttttggtgggaaagagcggaactcaatatgcacatggacatgtgaatgatattctactacgaaaaccaccacatgactaccgcgaccagacgtagcgactcggaagttgagagaatctactcatgttggatgagggaacacgctaagaagaagatgaatgaaaacggtcttggtgcagagaaagatcaaagattcgtgatctttaaagataatctttgtttcatcgttgaacataacaccaaaaacctcaggtataaacttgaattaacccgatttgctgctttaaccaatgaggaggaccggtctatggaccttggtgctaaaccgatcaaagggttttg

SEQ ID NO: 107324 - DNA, 327 bp, Arabidopsis thaliana columbia
cccccacatttctatatctctctctcgcgctgcttcgagaatcttgtgtaacatcctctttttttacaagagaaaaatggcctgtggagaggatatacacacacttgtgtgacacaatggcactggaatggaaaacgctggtttctctggagaatacgccccgagcgcagtgttcccaaatagtggtgggcgctctacgcacactggtgacatgggtggtatggcacaaagagactcacacggtggatatgaatctcaccacaagagaggtattctctctgtaaagtatacaatcgcacatcgtattgagagacactggtatcacat

SEQ ID NO: 107325 - DNA, 183 bp, Arabidopsis thaliana columbia
  unsure (1)..(183): unsure at all n locations
cgggaagnaacgggggggcccacgccgtccgaaaaacataagctaagaaaacgaaactcatctaattttgttatcacccaaaaagaaggggaaacacaatggctttcgctttgagggtcttcacatgccttggtttaacggggtgcataggtgcatcaagcgatgctggaattttatgtggga

SEQ ID NO: 107326 - DNA, 273 bp, Arabidopsis thaliana columbia
actgacacaaatggaaaagctcttgattcggctattcatattaatctcaaactatgtaggactacactacatgttactttacgcgatgtgtaatacattcaatgattgctatcgttgtcaaaaccaaagctgtaaagctgttgtcgatacaggcgccagtaccaactttgtatacaatgatgaaaagatcaccaactgctgtacgagcgactacgggaagatcttgcgacacactcgtcaatagactggcaccatgtgtctcgacggtcgact

SEQ ID NO: 107327 - DNA, 278 bp, Arabidopsis thaliana columbia
  unsure (1)..(278): unsure at all n locations
cacngtcgtccgctttcctcttacttcttactttcccttaattctatcttccattaccgcnnttcttgggttccagacgacggaaccaatgaaaaatgacctcgaatctgttcaaaccttcnnccggtgaaccccaaaccgnnatgtctnnccttctctttcacttttctcttggttacaatgtaccnngtcaacgatggtcagcaggggaagagcacctnnattctactggcttcnnacttgagtcaccacnncgagtgggaaaacccttgagtcta

SEQ ID NO: 107328 - DNA, 409 bp, Arabidopsis thaliana columbia
aaaaaaggaaaccccaaaaccaaggtttttattggcttcctaaaccatggctttgtcctcccctgccttcgccggaaaggctgtgaagcctgccgcatcagatgtcctcggaagcggccgtgtgaccatgaggaagactgtcgccaagccaaagggtccatcaggcagcccatggtacggatctgaccgagtcaagtacttgggtccattctccggcgagcccccgagctaccttaccggtgagtttccccggtgactacggatgggacaccgctggtctatccgccgacccagagaccttcgccaggaaccgtgagctagaagttatccacagcagatgggccatgctcggagccctaggctgcgttttccctgagctattggctaggaacggagtgaaagtcggaga

SEQ ID NO: 107329 - DNA, 415 bp, Arabidopsis thaliana columbia
ctcattatcgatacagacccaggaattgatgatagcatggcgatattgatggcgtttgaaacaccggagctggagatattaggattaactactgtgtttggtaatgtttctacacaagatgctactcgcaacgctttactcttgtgtgagattgctggctccctgatgttcccgttgcagaaggaagttccgaacctttaaagggtggaattccgcgtgttgctgattttgtgcatggtaaaaacggactaggagatgtctttttttctcctccgagtagaaagaaatctgagaaaagtgcagctgagtttctagatgagaaggtcgaagaatatccgggtgaagtcaccattctcgccctcggacctctaaccaacctggcattagccatcaaacgcgatagttcatttgcgag

SEQ ID NO: 107330 - DNA, 370 bp, Arabidopsis thaliana columbia
  unsure (1)..(370): unsure at all n locations
gaagaagaggaagaagaagatagatgcttttgacaacatgaagaagatttaacagtttcatctcggctggattgattatatgctactgagaatctttaatttctgcaacttttgtatctcttgctgatcaccaaataagaaaactctcgtggatctattgaattgggtttccactatctttattggagagatggagtcttcaagtccccaccattagtcacattgttgaggataatgttggaaaatatgatgaagagagaataattgtggcgatgtaagtctgtggagaagcaccatgtgggttttcagattctaaagatgcttccggngatgctcacgaacgctctgcttctatgcggaagctttgtat

SEQ ID NO: 107331 - DNA, 418 bp, Arabidopsis thaliana columbia
gccggcttcagggtatggtgatagcttttgcattcgtgaagccaaaacagaaccttttgctgtcaaagatcatagaggagaactatacaagaaacattatccaccggctgtacacgatgaagtctggagactggatcgaatagcgaaagacggagtgctacacaagaagctattgaaagctaatattgtgacagtcgaagacttccttcgactccttgttaaggatccacagaagctgagaaatttgcttgggagtggaatgtcgaatagaatgtgggagaacacggtggagcacgcaaagacgtgcgtgttgggtgggaagctttatgtgttttacacagaccaaactcacgctacaggcgttgtgttgaatgatatatatgaattgcgaggcctaattacaaacggacagttccta

SEQ ID NO: 107332 - DNA, 423 bp, Arabidopsis thaliana columbia
atcatattcccaaatcacaatccgcttttgtgtctttccacttgcataagtgaaagagccaagacaaagaaaggagcttcttctgtttttgtccatacttttgagaagatgcaggacatgagagatcaaaatcctccacaaggatatccagctgcagaacaagtatctgaacagcctggacaagacaagaagaagaagaaaccacggtttttcgagacaaagcagaaaggagacagaggcttcattgaaggatgtctctttgcactatgctgctgctggatttgtgaaatgtgtttctaaggaaacgaagggacacgtgacgcttctttcttctgtatctaagaatggctttccttatctatagttttacctgagagagattgaagtttcaggttgctcagtttcaatctccctaatctattt

SEQ ID NO: 107333 - DNA, 352 bp, Arabidopsis thaliana columbia
  unsure (1)..(352): unsure at all n locations
gaaaaaaggcggggacgccacgcgnccgctcaaaaccaaaatcactaaagattagttgattgctaaagcttgataaaacaggccgttggtaatggctgataggatcaaaggcccatggagtcctgaagaagacgagcagcttcgtaggcttgtggctaaatacggtccaagaaactggacagtgattagcaaatctattcccggtagatcggggaaatcgtgtcgtttacggtggtgcaacctgctttctccgcatgctgagcatttaccagtttcatcttgtgaacacttgactattatatattcctcacgctctggttgggtgggtggtgattattcttgtttttttttt

SEQ ID NO: 107334 - DNA, 388 bp, Arabidopsis thaliana columbia
cccacgcgtccgcccacgcgtccgatcatatgtcaaatggacagcaaaattggctggggagcttgacacaggagtgccatgggttatgtgcaagcaagatgatgcccctgatcctttggttaatgcttgcaatgggaggcaatgtggagaaacattcaaaggacccaattcacccaacaaacctgcaatatggactgagaactggacgagtttttatcaaacatatggtgaggaaccattgataaggtcagctgaggatatagcgtttcatgttgctcttttcatcgctaagaatggaagctttgtaaactactacatgtatcatggaggaaccaacttcgtgagaaatgcttcacagttcgtattcactagttattatgatcaggct

SEQ ID NO: 107335 - DNA, 433 bp, Arabidopsis thaliana columbia
ggagttttggtaacggatccgggttagcgggtaaggcgtttgctagctataacccggttttggttaccggttcggatctgatttacgggtcgggttgtgatcgggctaaacaaggaggggatgtagggttacagaccatcttgtgtattccttcacataacggagtgttggagcttgcattcacggaggagatccgaccaaattcggatctttttaataggatcctgtttctttttggaggatccaaatatttttctggagccccgaattcgaactcggagcttttcccatttcagttagagagcagttgttcaagtactgtaaccggtaacccgaatcctagtccggtttatctacagaaccggtataaattgaacttctcgacgtcatctttcacattggcgagagctccatgcggcgatgtactgagttt

SEQ ID NO: 107336 - DNA, 538 bp, Arabidopsis thaliana columbia
  unsure (1)..(538): unsure at all n locations
cgnntccgcgannagaagaagaaatcgtnaagtagctctcgatattattgaagcttacctgattgganngacatcgacggatggacggatgatgaaatcccctaaannnactgtgaattcggggccgattgccagaccacttanctccattngatctcnncggcgacccggatctaaatccccanncggtgcncnnttcctnnccgttcaatcnntctcgcttttcaatcgntgaaagacccgatgctcnaatcacgctctnntcgccggagtgatacccgctccganntctcttgtgtttaatatccggtgacccctaatttaacttctctttctcgaggctggcnngaatcttcgaattggggaaattggagaggattctgaaactcgtagctttctctaatcggagatggtaatcagacgaggtgttcaatgatnntcgattcgggttcgcaagaggtttggatgttgtccctcgatcaaagcgaaatctgaatcctaatacccttcgtagaaagatccagaagggagatatttc

SEQ ID NO: 107337 - DNA, 400 bp, Arabidopsis thaliana columbia
gtcgttatcaaccctcatcatctttttttccaacgtaaccaccgacgccagcgtcgtcgccattaacaactggatctgtctccgtttccatcaaatctctttctctctctgcagatcaattgattttttacaacgtgattgaagcggggctagctccggtgacgatagttgattggttttgtcccttaagatgagctccttcaatggtaacgaacggcgtcggctgccgtgaatcatgagagagatggctcagtttctttttcttttctctgatcttcctctttatcatcagattctatctcagaaacttatcaatgtgcgtttgattttttttgcttgggttccctttacaataatcattagggtatagtttttgaatggaattctcttccaataaaca

SEQ ID NO: 107338 - DNA, 432 bp, Arabidopsis thaliana columbia
ggtcaaaattggctgatgtttcgataatgctcatcggttggtacgttacagtcaagcggaaagttttctcaaaagtctattgctaacaaagaggagggtatgagttcaaggagtaagtctatgtgctccacaaagaagtataaaactgagagttctgttaagcaatttgatggtgaagttcagaaattgaaggcgcaaaaggttaagttgcattgcaagatcaagctagactctatgcagttcagactattgaaagcttcactagaaaaggaagttcttcagctcaaaaaagagctaaggaaaagtgagtttgagaaacatgtcctgtcagctctgaacaatcgccagaagctgattttgcagctgaagaatacacaagctttgacagccctgaagcgtctaaaaatgctgcttcaatctaaaaagatttct

SEQ ID NO: 107339 - DNA, 163 bp, Arabidopsis thaliana columbia
  unsure (1)..(163): unsure at all n locations
atagaaaacaacattttgtatgagcctaatttatcttaagctttgtaggcttcattttttcttgcaacactattaactcgttggggttttcggtgatgatatatatgaagttgatgnaaaaaaaaatataataaaattataaaaaaaagggcgggcgttttaa

SEQ ID NO: 107340 - DNA, 428 bp, Arabidopsis thaliana columbia
ggaagaagaaactctacaagtcttcttcttctctcatcctctcttctccattttcagaactctctacagtctaatcctcatctatttccccaatgatttgcttcgaatctttctctcccctgttcttctcatctccggagctctccttctctctcttctccgtctcggatcgacccgagaacctaacacccaacccgataaaagctacgaggagtctgaagaacctaaggtttttctggttcgtgaatccgatttgatgggtggttttgtggaatggaacttgagagcaccattggaagtgattcacgaagcttacgaagatgaagaagaggaagaagaagaagaagatccgacccggtttagaaaaatggagagattcccatcgttgtcactctgttacccagaatcagattcggaatcggattctg

SEQ ID NO: 107341 - DNA, 263 bp, Arabidopsis thaliana columbia
gaaaggaagggccgacccacgcgtgcggatttttgttacgatctacttatacagcttattacctatacagaacaaagcctgaggggggcttttgcattttagagattccaagaatgatacaacacaacctattttccgtgtgtttgctgttcttagctcgcgtttcgttccacaagcttcgctactgagacaactaaacaacaatgtatgaatcgatctatgagtctagcgatggccgtaaaaacaccttgaagaatagtgat

SEQ ID NO: 107342 - DNA, 434 bp, Arabidopsis thaliana columbia
cacagcatgaaaggaaacctttaaggtctttgtctccatggatcagtgatatactacttgctgctcctcttggtataagaagtgactatttccgatggtgtagtggtgtaatgggtaaatatgctgctggagagctcaagccgccaaccattgcttctcgaggatctggtaaacatcctcaactgatgccttcaaccccaagatgggctgttgctaatggagctggtgtcatactgagtgtttgtgatgatgaagttgctcgatatgagactgctacgctgacagcggtcgctgtccctgcacttcttcttcctccgccaacgacatccttagatgagcatctagttgctggccttccagcttttgaaccatatgcacgtttgtttcatagatactatgccattgcaactccaatgctacgcagagactttttt

SEQ ID NO: 107343 - DNA, 266 bp, Arabidopsis thaliana columbia
gctttctgcaaatttctccgatcgtgttcaattccgtcgagagctcaagctctgtggctcgtagtaaaaaaatggccgcggtcgcggcaccaatggcttcgaagactggaggatataaagctgaaatggtggtctacaacaagcggtgtgaagatctacggaccgggaacataaactttgctcgagcaaaatctgtcaacgtgctgacatcaaaggggtcggatgagaggtggactcgttattgtaaacggagaggttgcttgctt

SEQ ID NO: 107344 - DNA, 428 bp, Arabidopsis thaliana columbia
  unsure (1)..(428): unsure at all n locations
gttttgctcttctctgtatcgtcttcttcacagactgggcttgattttgagttcttgtagttttcggattcttagcaatctaggtttttttttttttttacttttcgaaaagccgatccagatttttgataattttgaagaagaagatgcaacaaaatcaagtgaagaagggcacgaaagagatggagtttttcacagagtatggtgatgcaaacagatataggattctggaagttattggtaaaggaagctatggagttgtgtgtgcagctattgatacacatactggagagaaagttgctattaagaagattaatgatgtctntgaacatatttctgatgcgcttcgtattctccgggaagtgaaacttcttcggttttacggcatcctgatattgtggagatcaaaagcattatgctgccttctt

SEQ ID NO: 107345 - DNA, 222 bp, Arabidopsis thaliana columbia
ctttttccttcctcctctccgattttttctccgtcagtaaaagaaaatcaaagtcggttgacacattgttggtaaagacaagcttgtggtctcaacctcctgctctcttctccacaccgctgctgatcttatcaatgagactaagcttgatgatgaaatcaagtcatggttggcgtttgctgcccagaaggtcgatgaagcgaacgcttaggtcaaggcttt

SEQ ID NO: 107346 - DNA, 406 bp, Arabidopsis thaliana columbia
agatggtagtgtgtttattgtttgaacgcaaaatgtacatgaagaaaacgcctaagaaaagcgtttactcataagaacgcgacgttttctgcctatccaagtagaggtccacaacgggtcagtctcgaccacactgtagccggcattcgagtaaagatttctagcagctgcatcgtcttcataagctcttagagcaagaagcttgaaaccccacaagtaacacaaaacatgacatgcctttaacaatgtacttgccatcttctttctcctttgagattttgagacagctaaacccgggacgtatagatattcttcgacgcccgggaaatagcgaaagacttgaactttagtttgagctgttacatcaactaacttcgcaacacttgagctcgacaaagtttagttt

SEQ ID NO: 107347 - DNA, 175 bp, Arabidopsis thaliana columbia
ggaaggggcggcccacgccttccggttcttttcgaccaaacctttttctttggattatctaagctagggtcgggtttctggaggggctcttgtcgatttcgcgggtgaaacctggtcaaggttgggggtggtcttctcttctctggtcataccttaaaaagggaaccttattttt

SEQ ID NO: 107348 - DNA, 514 bp, Arabidopsis thaliana columbia
  unsure (1)..(514): unsure at all n locations
cggacaaatngatcagatgcanttgatgtttctcttgtgagaatcagacttatgggaccaattggccgaggacgaagtgcgctcnaacggttcttaaggaccttgtcagtttaacgaaatcgagacgatgtgtggagtggaagacgaaaccgccatgatgtctgtacccgctttaatgccatcaggcttcttcatttttcatgaccaacaatactcacgaagatgatcgtgtaaccttcagctgcgttaaaatggctttaacaatacttggatgtggaccgcggttttctgtttacacaaacgagcggacacattggcatcacttggtcttcccgatgtcgcctcggacttgcccgatcnttttgcttttcacaaccaccaacctcagttgagaagacccgcttaaacctacaattggggacccttatctccattccgtctccagcttctcaggaccgacatggaaatgcaactttgaacaaaaacaattcttcgttacctgaaaatcaaagag

SEQ ID NO: 107349 - DNA, 135 bp, Arabidopsis thaliana columbia
tttttaaactcaacaccaaataaatttgttggtttaaagattattaaatttcccggggaaatttcaaccaaagtattgggaataaccggaggtttaacgccggaccagttcgattttttcaactttcaagggatt

SEQ ID NO: 107350 - DNA, 437 bp, Arabidopsis thaliana columbia
  unsure (1)..(437): unsure at all n locations
cttggtatccacctcttgaaaagactctctcttgtctatctaaattatatcgttgcttggagcaggccgtcttcactggattagcacaggaagctgtagaagtttgctcactgtcaattcaaaaagccagcaagcttatcattaagcgatcaactacaatggatggccagcttttccttatcaagcatctccttatcttgagagaacagattgccccttttgacatagaattttcagtaacccataaggagcttgatttctctcatttactggaacacttgaggaggatacttagaggtcaagcgtcactttttgactggtctaggtcaacctctctagcaaggaccctgtcaccttgagttttggagagtcaaatagatgccaaaaaggaactggaaaaatgtcttaagacaactngtgaggagttcatcatgtca

SEQ ID NO: 107351 - DNA, 427 bp, Arabidopsis thaliana columbia
cgatgatattttgcaacactctttactcttcttcttctccatcatatctctcgggggtaacttcaaaaccgtcgcgattctcaaagaatctcagacctcgagctcaattccagtccatggaagaccacgacgatcaccttcgccgaaaatttatggagttcccgtatgtgtcacccacgcggaagcagctcatggttgatctcatgtcgacggtggagaatcgccttcaatcacaactccttccctgtaacctccctccagatgtacgaaacttcaataaccctaacggttccgccgaagcatctcttcatatcagatccggcgacaaatcttctccgattgattttgttataggaagttggatacattgcaagatcccaacaggagtatctttgaatataacaagcatctctggattcttaaactc

SEQ ID NO: 107352 - DNA, 420 bp, Arabidopsis thaliana columbia
cagtctctcactttctctcttctctctctctctttcttttttgagtccgagaagtgtaagtctgaaagaatgacgaaggatgagttgacggaggaagagtcgctctccggcaaggactacttagacccaccgcctgtgaagacgttcgaggtgagagagctcaagaagtggtccttctacagagctgtcatcgctgagttcatagctactttgctctttctatacgtgactgatttgacagtcatcggctttaagagccagactgatatcaacgcctgcggcggagcttgtgccagtgtcggcctcctaggcatatattgggcctttggtggcatgatattcatcctcgactactgcactgcctgcatatatggtctttatctctctctttctctctctctctctctctctctctttcct

SEQ ID NO: 107353 - DNA, 247 bp, Arabidopsis thaliana columbia
cgaagatatttaaatataaccaaaacaatgttgctttattactttgccccttatcaacggtaggtgataaatacacaagtgtttgacagaacaacgcagtcattgaattacgtgttattaaatgccgtcgaaaacactgattctattcctatcaaacccacttacccattcccttttatatgcacaaattctcataaagagaggaagtagcaatgattttttttcggaagccatggaagctgctaat

SEQ ID NO: 107354 - DNA, 440 bp, Arabidopsis thaliana columbia
aagatatttagatttagctcatcagttggtgattcatcacttgaccctgagcagaggcggatgttggctaggcagggtgagaacgggacaagcagtcatgaaagtagggtagaaaaggcacgtagaaaagcagaggagaaaagacaagctaggctagagaaggagcattcagaggaggaagagagaaaacaaagagaggaagtagcaagattagtagaggaacggagaaagctgagagatgagatacttgaggccgagaaatgcagcaaattttcagtggctgctaaggagaaagacactaaggaggcagaaaagaaacgtcaggagagaagaaaagagagagatagggcctcaagtaagagcaattctgatggtgaagaggttgacaagagaacaagaaaggaaaccgagcagaagcgcgggcttaataagagcgatca

SEQ ID NO: 107355 - DNA, 211 bp, Arabidopsis thaliana columbia
gctttttggagaagaaaccaaagaaaactttcgaaaccctaaaatctccattgtctgttggaaaatgacaaagaagagaaacgctcaaacgacaagaatctaacgaagctgaagaaccgtcgcagaagctgtagcagactcctcaggttgttgcatcaacttttcttttattatcatcataatctaataacatctcttttatatataattc

SEQ ID NO: 107356 - DNA, 244 bp, Arabidopsis thaliana columbia
  unsure (1)..(244): unsure at all n locations
ggccgacccacgcgnccgaaaaagaaaaaacaaanaagaaccnncccgcatacattaaaaaacaaaagcaccncnacaaggccgcgggcccagagaacaaagaccctccccaccccacntnggcaaaagggttaatggacagaaacggcacattaaggcggggggaaggcgatcacagggctggagacgatatcggaacctcctcacgcactccaattagaacgaaagcaacagatggagagaa

SEQ ID NO: 107357 - DNA, 188 bp, Arabidopsis thaliana columbia
  unsure (1)..(188): unsure at all n locations
cggaaggccgnaaagcnnncccccgcggcaacggaagnccnnggaagcggccgcgngacaangaggaagacngnngccaagccaaagggcccaacaggcagaccaagagacggaacngaccgnggcaagnacnnngggccaaacncnggcgaancaccgagcnaccnaaccggagagnnccccggaga

SEQ ID NO: 107358 - DNA, 300 bp, Arabidopsis thaliana columbia
  unsure (1)..(300): unsure at all n locations
acgacccacgcgnccggcaaagagagaaanggcnagcnnnacngccatagaaataaccgtctccgccgcncgaccggggcgcgttctcaagccaaccgtcgccacctccgcccctgnnctnggtttgcctccaaaggggaagaagaagggaggagcgagatgttcaatggagacaaagcaaggaaacgtctcagtcatgggggctggagtttcagctgcagcaacagctgctttgacggcggtgatgagcaatcccgcgatggctttggttgatgagaggatgtcaacagaaggaacagg

SEQ ID NO: 107359 - DNA, 269 bp, Arabidopsis thaliana columbia
  unsure (1)..(269): unsure at all n locations
gcagcaacaagtgaattattttttagaaggnngaaacangggaaggatcagattcaaagatgaactctcccacacactagaaacgcttaataagtccagaaacaaactttgaaagagattcttctcaagaaccaatccgccatttacttacaaaactgtggtctcaatggaaacgctactgaccctgaagaagctttcaaatctatgngtcctttagtcactgatgtngaaatagagccttacatcaaaagaatgggtgatggtgacac

SEQ ID NO: 107360 - DNA, 175 bp, Arabidopsis thaliana columbia
  unsure (1)..(175): unsure at all n locations
aggnnaaaaaaagagnanancnacaggaaaagcnnggaaggggangagcgnaagggcnangagcagaagcggcnganaagagaagcccnncaagaaggaaagccgannccaacggagcnccgaaacgncgaagccaagcnncgacaagaaanngancnngaagaccaaaacacag

SEQ ID NO: 107361 - DNA, 190 bp, Arabidopsis thaliana columbia
  unsure (1)..(190): unsure at all n locations
gaagcggagnggccggccacacagcaccnaaaccgcaanncacgggggcgccgncgacggancgngngaaangggacnacagaggccaacgacagancannccnnngggacagnggcnnccgaagggagccgnngangcnnacgnggcacccaacgnngngcnggcnnggcaggncacagncngggacgg

SEQ ID NO: 107362 - DNA, 189 bp, Arabidopsis thaliana columbia
  unsure (1)..(189): unsure at all n locations
agaagagcgccaacgacgaacgacnngangacgaaancgnnnangagnnacgnngacnngaaaaaagcagcgangaaggaaanggaagcaggaccggacnnngancnggagaaggcnncnacgaaagcagacaaganggangagaancggncancnnncnaagaagaagcagagaaggggaaagcagag

SEQ ID NO: 107363 - DNA, 154 bp, Arabidopsis thaliana columbia
  unsure (1)..(154): unsure at all n locations
acacaagccacccacacaaccacggaagccannagcannagcncaacacncaagaancnccgangnanncgcgggggananccaaccagcagcgaagaacggaaaaggganaccccnagaccacgcaaccggagnngnagncggagaaacagcg

SEQ ID NO: 107364 - DNA, 184 bp, Arabidopsis thaliana columbia
  unsure (1)..(184): unsure at all n locations
gccgcccgccgggccaaaaaccaaaccnatttataacaaggcaacaaagcagcgaaggagacagnaaggggccgccgaccaccgcnacggcaacgcaaaaccccgagggaacaccggggccgggacaagccacccaccnncacgggaagngacgcnccggacnannggggggcgggggacggga

SEQ ID NO: 107365 - DNA, 331 bp, Arabidopsis thaliana columbia
  unsure (1)..(331): unsure at all n locations
ctgctgggannagcacaccaggaatgtgcgcaagtttagcgtatttcgacacttacaggcgtgcttagatacctgcgaatctggtcaggcgcagagagatctctttggagctcatacatatgagagaaccgatcgtcctggtgcataccacactgaatggactaagcttgcaaggaagagtcagtaaagcatggacacagncccttgatttgagggtattctctctctttctctctcacactctggttttgtgcttaatctgaattcaatggttccatgttgttgggagggctttattcatcatagaacacgaaaacaaattgtttcagtt

SEQ ID NO: 107366 - DNA, 242 bp, Arabidopsis thaliana columbia
  unsure (1)..(242): unsure at all n locations
gacccacgcgnncggccggagagcaggccagacaaanacgaggcttaaattgaagaagaaccagnancngaacagagcggangaacgacaacatnccacaccccaagcannatgngngacagagacaaagaacttacaacatcccacagaagctgaaaacgaagaagaagaagaagaagaaagagtaaaggaagtcagtggtgcttctcctgaaccaaaacaagaaagcaacctcacaaaaa

SEQ ID NO: 107367 - DNA, 227 bp, Arabidopsis thaliana columbia
  unsure (1)..(227): unsure at all n locations
acccagancagcaagaagaggaaggggcgagccgaaggngggccccacccccaacccaacgaggnncnaaccagagagcnngcngagganggnnacncnggngnngaggnncgcgncacnccaaagcgnacggagancancannagagccacncgnacncaaaacgnncncggngagaagggaaggaggannagggaanngacancncngggacaaaagaganncaa

SEQ ID NO: 107368 - DNA, 298 bp, Arabidopsis thaliana columbia
  unsure (1)..(298): unsure at all n locations
aaacccggcccgacccacgcgnccggangagagcaaagggcaagngnnngattaaactagaacaagngangacacnggaaggggacagangacaccagaacacgagcacgcccccancacagncggagnaangaaccaaaacnacnccaaaaacgggncnnnncgggcaaacgaagcnaaaangcagcnngaaaacncaaaaggaagagagaggggngcncaangcacaagagaancnganccaaaggacnacagagaagnaaagaagcaacnnggncaaaccaaaagngnaagaaaa

SEQ ID NO: 107369 - DNA, 238 bp, Arabidopsis thaliana columbia
  unsure (1)..(238): unsure at all n locations
aaagggaaccttgattttgtttttttggaggcancnnaacgggaaggctgcgtttcggatctttgcattccattagancagtcganagaggcagagacacgagatcgaaccgggcttctcttaccgggttatcaacaagacctagtgacccgtgtagctcaagcttctagaggtccagtcattttggtccttatgagtggtggaccaatcgatgtaaccttcgctaagaatgatcctc

SEQ ID NO: 107370 - DNA, 269 bp, Arabidopsis thaliana columbia
atgtaaaattaacttacgagattacgacatatatacaaaatatattttcaacaatgtttggtttctaaatatttttgtggatttcttttttttttattaattattagccctaagcgtttgggtattcggatcggatatttcgggttcggttttttggttttagaagtttaggacccgctgaggtaattatgattttaggtcggttacggttcgagttatttatatattgaatataaattggtggcaattataaatacttgaaattaaaa

SEQ ID NO: 107371 - DNA, 181 bp, Arabidopsis thaliana columbia
  unsure (1)..(181): unsure at all n locations
gagaaagggnancangcaacagcnanagaagcnnngaaggggcngagcnnaaggangcncaacgaagaagacaaggagaggcnncaggacaagaaanaagagcnagaggaaaannnncgcangagcgaagacccngaagcngaaacaaaganaancgaacggggcagaaaancngaggagc

SEQ ID NO: 107372 - DNA, 156 bp, Arabidopsis thaliana columbia
  unsure (1)..(156): unsure at all n locations
cgcaccccccccaccgagcggngaaccccggtcgaacctgaacggacataccttaaccattggacggaaatcaccaaccacggccaaacgcgattcaccgccacagttcgcaccgcgcaaggccaccgcgcgcgggggagagacgaagacaaacgg

SEQ ID NO: 107373 - DNA, 126 bp, Arabidopsis thaliana columbia
  unsure (1)..(126): unsure at all n locations
aaaggaancagccncaaacacnnggcaanggaacaacancncacacagcaacccgagaagagaggncgagnngcacccgaccagaaagcaaacccngcaagaggncgngggaaagacgnncaggag

SEQ ID NO: 107374 - DNA, 238 bp, Arabidopsis thaliana columbia
  unsure (1)..(238): unsure at all n locations
cggcngagcgggggagaccaaggcacccagagaataggatgggcgtagnaagcgacgaaaagcggcgggggggngaaaanaagcggacacccccacacncccganaaggnnaaccnnnngaacggcngcngaanccaagggcaggcaagagacaaccnggcgaacggaaacaacnnagnagccagaggaaaagaaagcaaaagcganncccggagnagcggcgagcgaaaggggagca

SEQ ID NO: 107375 - DNA, 306 bp, Arabidopsis thaliana columbia
  unsure (1)..(306): unsure at all n locations
ggccgacccacgcgttcgggaacaacagatgaagaaccagncagaacaaaattgccatttcgagacncgnccaaacaagcaagcggtatcttacaatggaagagagcccacgaaaggagaggatggttacaattggagaaagtacggacaaaaacaggtgaaaggaagtgagaatcctcggagttactataagtgtactttccctaattggccaacgaagaagaaagtggagagatctttggaaggtcagatcacaagagatgtgtataaaggaagccacaaccatcctaaacctcagtctactag

SEQ ID NO: 107376 - DNA, 225 bp, Arabidopsis thaliana columbia
  unsure (1)..(225): unsure at all n locations
ggctgatccgtttcctgaacanccgagaanttttaggnttttcgaaacgngnncacaaagaggggatgttgcagggnangagacnccacccccccggngaagggancnacnnngcngcnaagagnggaagaangngcgcngaagccaaaggcgaaggcncacaagaagggaagaagaaganngacgaaggggacangaggaagnacnnggagaaanggganaaga

SEQ ID NO: 107377 - DNA, 185 bp, Arabidopsis thaliana columbia
  unsure (1)..(185): unsure at all n locations
ggaaaccacaaaaccaaagannancccggattcctcaaccanggcnnngaacaggcgggggcgncgacggaaaggcggcgaccccccccgcancagangnccncggaagcggccgngngaccaagaggaagacngnncgccaagccaaagggccaacaggcagcccacnggacggancngaccga

SEQ ID NO: 107378 - DNA, 211 bp, Arabidopsis thaliana columbia
  unsure (1)..(211): unsure at all n locations
tcttaacgctccctctatanacaaacagaagcgtttgatactgtaaaaaagatttagaaatggagactctgagtcgnttattggtttcatgtctctgtttccggtttagttctgatttgtctgaaaatcttcaatcacattttgagaagtacactaactttgtgcagactattgtataagaggaattgtcgtacgtcggaaacagtcgttg

SEQ ID NO: 107379 - DNA, 268 bp, Arabidopsis thaliana columbia
  unsure (1)..(268): unsure at all n locations
gaaaaccgggccgacccacgcngtccggggcgggggttttgacccgacncagaaaaattgaagttgacccaggagagaacacgggagcncgagttgagaaganacggcagccgcaccacccgnncaggtggnggtagttatggaggttaaggaggcagcagaggccgaacaggtggaggaggagagagaaaaggaggaacaggaagaccaagcagacggaagtgagggggagcaaaacgagcaaaagggaaaagaagaggaggaccaa

SEQ ID NO: 107380 - DNA, 288 bp, Arabidopsis thaliana columbia
  unsure (1)..(288): unsure at all n locations
cgcaagggaggcagaaaaaaaaaaaaaacacaaaaataaatcaatggccgccncaacaaagacgggcggctccccagcaaacgccggaaaggcccccaaccttgcccctgcggcatcagaagtccctggaagcggccgtgtgacaatgaggaagactggtgccaagccaaaggggccatcaggcagcccatggtacggaaccgaccgaggcaaggacctggggccaatctctggcgaggcacccagccacaccaccggagaaggccccggagaccaccgaagggacac

SEQ ID NO: 107381 - DNA, 226 bp, Arabidopsis thaliana columbia
  unsure (1)..(226): unsure at all n locations
gcagagaccatttggagnggagcnnacttgncgttttggccccgaaaaaggagggggggggctgcgaagaagaagaccgcccacaaaggggcaaacccncnanncgagaggaggccnaagcaanncggnangggnggagcnnnaccnccnaagaaggancncncncgcnacancaaanggcccaaanccaaccgncnncaaaggcaaaagaggancccgaagcaga

SEQ ID NO: 107382 - DNA, 362 bp, Arabidopsis thaliana columbia
  unsure (1)..(362): unsure at all n locations
gaacggcggttganctgagncanaangcngttgatttttcangaaaancaanannnnagcggcggaataaggagannagggggactcgcttcacctggcaaccctttcttaattctattcaagagaaacataaagtcggngaccttgtatgcattagtgggaaggtaaagtcattgcgtgcagaagatcattttgaaatgagggaatacaatatagatgtactcaaagatgaagaagaatcatctcatcgagcccaggggagaccatatcctatatatccttcaaaaggagggttgaacccaaagttccttagcgatgtcatcttcagggctcttgcgggttctccccgccaatatggatcc

SEQ ID NO: 107383 - DNA, 367 bp, Arabidopsis thaliana columbia
  unsure (1)..(367): unsure at all n locations
ggcatgcaataacaanaacaanaccaaacttcncatatttatcagncacancncncaagaggagcattatctacctnatggagacccctcaacagctgccggngctctacttttcttgttacacacatttgcattcaacaatcctcataaaatgatgacccataacctttttgcgcctcttgaccttagtttctcctcctcttcatcttcctcctcctcgtcagtatcattgtccttgcaaataacaagagagccttcaacaaatatcagccatctattttttgtcattgttggtagtacaaagacttggagatataggagaggctacatagagccttggtggagaccaaacattacaaaaggatat

SEQ ID NO: 107384 - DNA, 257 bp, Arabidopsis thaliana columbia
  unsure (1)..(257): unsure at all n locations
ccgggccgacccacgcgnccggagagctctcactataaaacagagcacaagtcaatttttctaaccacnccaacagagaggcgaaagaaaaaaaaagcnanggccncccagaagaagaagnnaaccanggcaaaggangnggaagccgnncccggagaaggannncagacaagagacnancaaganccgccaccagcnccgnnnannganggagcggagcnaaagaagnggncnnncaacagagcagnnancgcaga

SEQ ID NO: 107385 - DNA, 391 bp, Arabidopsis thaliana columbia
  unsure (1)..(391): unsure at all n locations
gaaaaatngncaagggggggtttgtaaacatagnagcctatgctgaaggacatactgtgaagttagcagacaagcttttgttgaaggatgtgatttctgatcttcctgcagttgccaacagtgaaaaaagagacgagattacatatgacaaagatcccacaacgccatttcaaaagttcatcagattgagaaaggatgaagcgtcaggttcacaatcaaagtccaagtccaaaaagcatgtcttatatgatcatcaccctcttaatcttaatataaatgactatgaacgggtttgtcaggtccccaagagaaagggaggcgatttagggacttttctgtgtattgttgacctggaatgagtcaaagtgaagagggaaggaagggcaaactt

SEQ ID NO: 107386 - DNA, 175 bp, Arabidopsis thaliana columbia
  unsure (1)..(175): unsure at all n locations
aggcagcccaaggggcggggctgaccgagacaagaaccccgcccccacccaccggcgagcccccgagcaaccnaaccggngaggnccccggngaccacggangggacaccgcnggncnanccgccgacccagagaccnncgccaggaaccgngagcnagaagnnanccacagcag

SEQ ID NO: 107387 - DNA, 297 bp, Arabidopsis thaliana columbia
  unsure (1)..(297): unsure at all n locations
ggaaaaacagggccgacccacgcgnnccgnnggaagggccaaaccgggnccaagggnnanaatgaaatttccggcgangacaccgaccaacagggaannaacagaanccangacgcgccaaccaccaaggaggaggnngncncnaaagncgacgaggaagacgacganagnagcagcgacagcgananggannnacggagcgacagcgagngggcnnggganaacgngnnagcggaaaccgaaccagagngggacgncgacagcanngacggncacgagnnnaaaancaancccagg

SEQ ID NO: 107388 - DNA, 342 bp, Arabidopsis thaliana columbia
  unsure (1)..(342): unsure at all n locations
ctcaacacttcacactgnnnncaaaacagtttcatattctcagcncagccgccaccgccagcggccgtttgtgctcgctccggcgaccttctctgcggcttgtttcgcaaaaaatccgtcgcgccttttcgttttactcagcctgtctatcgtacgtcgctgtgtccaagtttcgttgctgttcgagccatggcagagtctcagactgctcagaggaatcagccgcaatcctcaggctcctctggggagaagcaagctttgatatctctatctgacaagagggacttggctttttttggcaacggtctgcaagaattgggatacactattgtttctactgga

SEQ ID NO: 107389 - DNA, 166 bp, Arabidopsis thaliana columbia
  unsure (1)..(166): unsure at all n locations
aaaaccgggccgaccacgcgtccgcgacgagtgtttaagaaagcgagacgatgntanaaatatgtncagaaaccaanacnacacaggggggactacaaggagnccaacaccccgccaaanccaaggggaanacgccanggaagcagngaagcaaggancngcagca

SEQ ID NO: 107390 - DNA, 266 bp, Arabidopsis thaliana columbia
  unsure (1)..(266): unsure at all n locations
ggaaagaaaccacngagaagacaactacaagaagaagaaagccccgccaccncaagaacccaacnncnccaagnagnancaanagngacgncacnncaacgncancaacancaacnncacccacancaacggccacgccancnccggnnncagcagagaggggangnngnacnccggagaagncacgaanaccggagangcngacgnngccaccggcaccgaagaagcaaaagggggcgcaaaacngcgcnnnaaggaggagacaa

SEQ ID NO: 107391 - DNA, 245 bp, Arabidopsis thaliana columbia
  unsure (1)..(245): unsure at all n locations
gaaaaccgggccgagccacgcgnncggcgaaggagaagcacngnggaancgaaaattaaaaaagctgcagcannnncncacaacgcngggggcgtcggcagataaccaaccagaccaaccaccnccagggaaagagaaaaagagcgagcacggaggcaaagcaagaaaaactcataccgcagcagggaagagaaacagagagaagaaagacgacgaactgctggagagtggggaaatccgcacaa

SEQ ID NO: 107392 - DNA, 242 bp, Arabidopsis thaliana columbia
  unsure (1)..(242): unsure at all n locations
gggagagagcgaaccataggatgagatgnnncnaccgncaaacgggcgggcattnagggcgaaagggaagcccaccaccgggancgncgggcnggacgnngnncccaacgcgagagcggngcngancgancncnacagcaaaacccnaaaggaganccaagcngngccggaggangaagggnaccgnaaagcnggggaancaaacacgcgccaacgncncaangngngcaaggaagaagaag

SEQ ID NO: 107393 - DNA, 247 bp, Arabidopsis thaliana columbia
  unsure (1)..(247): unsure at all n locations
acaaaggggacgnnnnngnncncgttatatttaattttccagaaaaaancncaaggcgcgaggggggaagaaacagannccgcgccccccgccccggnganacaaacccnaaccgagccggcgacggagaaagcgcaaacccnagaaccnaaccnagccncaancgaagccaccgncgaancggnggggcagggaggcaccgaancgacnnngaacaacgacgcnaanaacaacaacgccgcngaca

SEQ ID NO: 107394 - DNA, 260 bp, Arabidopsis thaliana columbia
  unsure (1)..(260): unsure at all n locations
cggacgcgngggcggacgcgnggggtaaaaataatgttnnacgngcnnnnnaagaggcngagagagccangacgacgacaccgcccaccccgnnagagannnggagaccaaaacngaagagnngcggcnaaaggaaaaagaannngnnggaaagaagaaagangangncgagaagagcangaagaggagcaangacaagcagcngaaaaaagaacnngagcncnngcaaanaggaaaagcnnggcnagaagaaaggaagg

SEQ ID NO: 107395 - DNA, 133 bp, Arabidopsis thaliana columbia
  unsure (1)..(133): unsure at all n locations
agcaaaagcaggnncncaagcccnncccngcccgcgaccgngancncngccgcnnccacgccgacgacnangncncnnnncnccgcagcannaccccngaaacccagcaagancaganncgccaacnnaagcg

SEQ ID NO: 107396 - DNA, 209 bp, Arabidopsis thaliana columbia
  unsure (1)..(209): unsure at all n locations
gcgcagacgccgngnnacncagcggcgacggcgacggnaagaaccacacagcnaacaaacncgcaacacgncacgaacgagnnnggcnangngaagnangcgaacaagcaccagcacacgncacgngcaaagcggacgccgcngcgnaaagcgncacgngcgaccgcgananccacncagcnaaaccacncncncgccgccacgagcgc

SEQ ID NO: 107397 - DNA, 152 bp, Arabidopsis thaliana columbia
  unsure (1)..(152): unsure at all n locations
aaccgcagcaaaacgagagcnaagacgngcaacaaaccccgacagaaggaagggacgcagnnangaganaaaaggncgacgcgggcccggcccgnggcncngaggaggcacgagaacacgacggancgcaaggccacggagcaggcgacgca

SEQ ID NO: 107398 - DNA, 261 bp, Arabidopsis thaliana columbia
  unsure (1)..(261): unsure at all n locations
gggcgagacgccngaaggccaccgccnccgcgnnaacaacngcggnnnnnncggaagcncagcgacaangaancaaagnncaaacngnnacggcgancncngncncaaacaacaacaacaagcnnccangaaancaaccgncgaancaacncncncnccggggaccgcaccngnncncgaaaaccacgcggcggagnnagagancccgacgacgaagaagacagaggagaaaaaaccganncaaannccgacggagcaacc

SEQ ID NO: 107399 - DNA, 214 bp, Arabidopsis thaliana columbia
  unsure (1)..(214): unsure at all n locations
gcgnncgggacgcgnggggaaaaccnnananncccggatgaggttataccacgnggaaacgcncannagaggggggggagcnnnagcnggncccgaccaacaaaccaccggnnncgcnnggngggccgggaaggcccgacnaaacaannaaacnnggaaacnnnngggagcncaagnagcccaagccggannaancgnanncngggccggagca

SEQ ID NO: 107400 - DNA, 182 bp, Arabidopsis thaliana columbia
  unsure (1)..(182): unsure at all n locations
gagaagaacaacaagaagcggnnagttctgataattggcgngccacggcacagggagggggggcaaggngaaaacgcacccgccaccccnaggncacngngngaccgcggnggaacaagcngcanccggnanaaaaangacnagannggaagaganncagacnnngaaggannaccgcaaac

SEQ ID NO: 107401 - DNA, 154 bp, Arabidopsis thaliana columbia
  unsure (1)..(154): unsure at all n locations
gaancaccaagaagaaanncngagaaaagnnngcgnnncaacggaanaanggaagggaaaggagcaacaacgacgncgnnncaaaggncaggacgacacacagcgannccncaagggccgncagnnncgcaaacccaaacnncaacnaaacgcc

SEQ ID NO: 107402 - DNA, 409 bp, Arabidopsis thaliana columbia
  unsure (1)..(409): unsure at all n locations
cgggccgacccacgcgnncgaaacggcaaagaagngcaggaaaattatttattagaaattgagaaacnnncaaagggancgggggcagatanagaagcacacctccacccccccccgaggaaggngnnnaagaagcagaagctgacaagcctgacattaaaatctcctcaggaaccggctcgggatttgagatattatgccaaggttacaactgggagtccaataaatctgggagatggtacttggaacttcaagaaaaagccgatgagttagcttcactaggattcactgntctgnggttacctccaccgacagaaactgngtcacctgaagggaacatgcctaaagacctgnataacttgaattccagaaatggaacaatngatgagctaaaagatacagngaagaa

SEQ ID NO: 107403 - DNA, 254 bp, Arabidopsis thaliana columbia
  unsure (1)..(254): unsure at all n locations
ggccgagccacgcgnncgagaggacgcaagggccggngcngaggagaaaataccaatagtgaacncaggggaccacaagcgaaaggagaaaatgnggannaaacccgcccccaccaacgctataanagnnnctaagggggataacatatttgcacatttccgtggcaacaacagctttgagctttgtgggtttacaagtctggacggagttgtctcttgaaagacttagagctgatgggataatcaccaagaac

SEQ ID NO: 107404 - DNA, 187 bp, Arabidopsis thaliana columbia
  unsure (1)..(187): unsure at all n locations
gaaaccagcnnggcccacgccccaccaagacggcggcnagaggaaaaccgncgcncacaagagcnncgcccnccnncaaaanngncgccagnggcgncaagaagancaagaccgacaagcccnncggaannaacggcagcanggaccngagggacggcgncgacgcccccggcagaaagggcaaggg

SEQ ID NO: 107405 - DNA, 306 bp, Arabidopsis thaliana columbia
  unsure (1)..(306): unsure at all n locations
gnccacgcgnannggacgaacaggaatgnaataaatttggacnagcaacagccggganaaggagggcaacaccagaccccccacaccccccgcngagcngangcaagaagcnaaccaagaagncccngagnggcncacncggnangcgncacggnccncnnnnggnggnnggaagaaccggcggncnggnggncgannnggnggccgngacnnnagaagggaagggncnnncggnagcgngagaggaggcnanggcggnggaggaggaggaganggcggcggaggaggcaanggnggnggaggagg

SEQ ID NO: 107406 - DNA, 265 bp, Arabidopsis thaliana columbia
  unsure (1)..(265): unsure at all n locations
gcgaccagcngagagancagacaccgaagccagcgaaacagacgcccaacgacacgaacgggagcacaaacgcaggagncaaagagcgncgaaacacagacaaagcccgcaccaccgacaagaacaacaacccagacggcnnaaaacagaagaagacaacnaccgacaacagcaaaaacaacaggaaccggaagagaaccgggccaaacaacgaaacggaaaaaaggaaacggaccaaggagagacaaaaaacaaaccggacaag

SEQ ID NO: 107407 - DNA, 201 bp, Arabidopsis thaliana columbia
  unsure (1)..(201): unsure at all n locations
aacaaaacaaaacnngcacaanggttaacnaatatgaggnacaaaaaccanagngggacggggggaagaaaaaggcaggccccgccccccacaccnnagagancgaaccagggacgaagaacaacnnnngggncccnaaggaaacccnaaagaagaannccggnaccggaaaaccaacgaaacccganaaaccnaaaaagc

SEQ ID NO: 107408 - DNA, 190 bp, Arabidopsis thaliana columbia
  unsure (1)..(190): unsure at all n locations
caaaaggacaancanggaccagacattttacactcactttgancgaagaaggcnanggggganggggggcacgggaaacnnagccnccccccncaacaagcannngcnncaaaggggcnacaaagnnaacacnacagnnagaganccagaaaacgagaagaaaanagcncaccnaaggaaacnncaagag

SEQ ID NO: 107409 - DNA, 393 bp, Arabidopsis thaliana columbia
  unsure (1)..(393): unsure at all n locations
aggcnnnncaagggggaccggcaaagggnccaggaggcctgcccccccncccatncnnagaagcaccaccaggatatttccaaggccaagtctccggaaacggcggaggcggacaagactcaatgccgggaaacccctacttacaacagcagcaacagcaacaacaacaacaatacttagcgngcggtatgaaccagcaacgatccatgggaaacgaacggttccagccgatgatgtacgctagaccaccgccagctgtcaactatatgccaccacaaccgcaaccgcaccaacaacattcatacccgnattcatatccgtatacaccccagtattcgactcacaaaggtgaccagtattctgattacttcaatgacgagaacacatcaagct

SEQ ID NO: 107410 - DNA, 225 bp, Arabidopsis thaliana columbia
  unsure (1)..(225): unsure at all n locations
ggccgacccacgcgnccgcagaagccgaggggccgagnaaannncaanggtattaatgtttactccncaganngaggaaggaggnaggcgagaagncaagaggcccagacacacacgcccccntcttgncctgcatctcagatatgagatggatatgttagcattttctggttgttcacatggttgcaaccccgaggaagaagaagaactaacaagaatgagata

SEQ ID NO: 107411 - DNA, 286 bp, Arabidopsis thaliana columbia
  unsure (1)..(286): unsure at all n locations
agaagggcaaagaggggggggcgaggangaagnagaacgcggcaccaccaccgcgccaaangnnacaagaaagngaagaaggggcnnngcaagggcccnncaaaaagagaccaanngnncgangaaaagnccaacanngnnancancaaggnggnnggcngnagnccngagaggancaaggacaaacncngnnccaaaggcgngcggcgcgaaaagaccaaagaganncgcgagccacccaagccnccncagccacaaccccaacaaccaccgcagaaaccgaaag

SEQ ID NO: 107412 - DNA, 201 bp, Arabidopsis thaliana columbia
  unsure (1)..(201): unsure at all n locations
aaaagaagaaaccagagaaacggcnacangcnncacnacgagngcnacaagggcanggaagagagaaaacncgacaccgagacnggggcnaagggcgnncaacgaaacaagaacnngggncnngaagagacaggnnncccnncgaccaaggcaggccgggaaggagaggaacgacggccaagaaagngnngaggagagaga

SEQ ID NO: 107413 - DNA, 161 bp, Arabidopsis thaliana columbia
  unsure (1)..(161): unsure at all n locations
ggcncaggccacnanggncgcncctataaattgacttaagnccnccgcngccaacggagccgcccgcaaggcnaacaaccacaccacccccaccacaagcaacggcggaagagnnaaccgcangcaggngnggccnccgangggaaagaagaagnnngaga

SEQ ID NO: 107414 - DNA, 165 bp, Arabidopsis thaliana columbia
  unsure (1)..(165): unsure at all n locations
ggcnaccaaaacancnncgncangctttagatagatttaancgacaannncnagccgcacggggggncaaccgccgagagacccccccacccaccnnnggnncaagacggnanganncgagcgnnncgaaccggncaaagganccgancncagancgggnncccg

SEQ ID NO: 107415 - DNA, 326 bp, Arabidopsis thaliana columbia
cgtgttatcttctgaatatatatcatggcatcctctggactgggaaaaggagtaggcacttcgagatctgccaaaggtttaaagagctcttctagttctgtcgattggttgaccagagatttggctgagacgaggataagggacaaagtagagaccgatgatgagagagatagtgaaccagatattattgatggggctggtgctgagcctggtcatgtgattagaaccacacttccgggtcgaaaaggtcaaataagacagacaagtagttacatattataacatgttgttggtactggttcctttggcatggttttccaagctaa

SEQ ID NO: 107416 - DNA, 140 bp, Arabidopsis thaliana columbia
tgtgctctgtgagaaggcttctgtcgagctatatcaatgctgggatgatcgaaagttatgtgtttggtggtgttactgctaaaaggaacgtgtgaatacgcttcatgcgtacgatgttgttgatcagaaaatgggttgag

SEQ ID NO: 107417 - DNA, 148 bp, Arabidopsis thaliana columbia
ctattgcttcgactatgttaggacttgtggaaggtttgatttatgctcataaagctggacttgatgttaagaagttcttgaagcgatttctactggtgctgctggttctaagtctatagaatttgtatgggagatattgatttctgaa

SEQ ID NO: 107418 - DNA, 229 bp, Arabidopsis thaliana columbia
tcctgagaggactgcattcatttccccaagctgctggggtaaactattctctaagttcatcgaacactgcgaatttgaaccttgtggctggttacaccaagttcctttttttatcagactcttactaaacccacgcttggagtgatttcagcaacttattcccaaagacctggacaatcagaatgtgactacttcatgaagacaggggagtgcaagtttggagagagat

SEQ ID NO: 107419 - DNA, 183 bp, Arabidopsis thaliana columbia
acgccggaaggatggccaccttggcttattgctgcttgtggcgattcgatcaaagacttaacacctcgcagagctaccacatacgaaaagctcgagaagattgggcaaggaacgtatagcaatgtgtacaaagcgaaagatttattgagtgggaagattgtagctttgaagaaagttaggttt

SEQ ID NO: 107420 - DNA, 181 bp, Arabidopsis thaliana columbia
caaatttctctcaaatgaaacaaattcacaccaaaatcatcaaacacaatctcaccaacgatcagttactagttcgtagcttataaggttttttttcttcgagaaccatacctttttgcttaacaactaattctttattacctgactatgatagacttttgtatacacctggagttctttt

SEQ ID NO: 107421 - DNA, 459 bp, Arabidopsis thaliana columbia
tagtgcaaaagcatctgaagctgtaaaaaacattcaacaagctagcatatcagatagcttggacacttcaacagatgtagatatgggaaatgctcaatcaaatggcgattctcttgatgatgttaaatggatggagacgctcttccatttcattatctcctctttcaaatctggaagagcttcgtatctgctagacgtaattgctggattcctctatccagtgatgtccttacaggaaacatcacataaagatctgtcaatattggccaaggcagcctttgagctgctgaagtggcgagttttccagagtctcatctacagaaagttattggagtcattctttcttttgctgatgactctaactggcggataagatcttaaccctgacatatctgcgaacttttatgtataggcatactttcatccttactcatgaagataaacaaaaaaatctggaaa

SEQ ID NO: 107422 - DNA, 350 bp, Arabidopsis thaliana columbia
gttgcagcgaaagagaaagtcacgaaaaagcggtaccaattcgacactttcactttttcggaagaactagagaagagatctacaaaagttgtttaggattttacttcttcgtaatgggttctgttgcgtcaagtgtaactcctgatcctctcctgtcgtcatttatcttacctacacgatcacagagttcttctgcgccacgccaaaccaaaacgtatccgagataaacagatagagcgcagagacagtgtcatttaccggctcgttaagatcggagagagaggccaatagagttgtcaagctttgcatagcatttcgtgagctatgccatcaaatggacatgagactat

SEQ ID NO: 107423 - DNA, 369 bp, Arabidopsis thaliana columbia
cttcttctaaaagtcttctacatgagaccaacatgggcagtggtgctattattggtgttattgactctggtatatggtcagaatcaggctcctttgacgatgatggatatggaccaataccaaaacattggaaaggacaatgtgtatctgcagaccagttcagtcctgcagattgcaacaaaaagcttattggagctaaatactacattgatggtcttaatgcagatctggaaacaagtattaacagtactacagaatatctatctcctagagatcatatgggcacgggactcaagtatcatccacggcagctggttccttcgtttctaacatgactttgcttggtctctcctctgggtcaatcatgag

SEQ ID NO: 107424 - DNA, 336 bp, Arabidopsis thaliana columbia
cgaaacttgcatagcttggagaattaccacatcaatctctatggagtctttccaaaacgtatggtccggtgatgcttttgaagcttggaagtgtcccaacggtcgtagtttcttcttctgagacggcaaaacaagttctgaaaatcaatgatctacattgttgtagccgtcctagcttagcaggggcataagagctctcttacaattacttggacattgctttctctccttttgatgattatgggaaagaattaaggaggatttgtgtccaagaactctttagtgcttagcgagttcactcttttcaacccatcaagggaagaagaagtgaggaaa

SEQ ID NO: 107425 - DNA, 338 bp, Arabidopsis thaliana columbia
  unsure (1)..(338): unsure at all n locations
tcgactttacggaccagtgtcagctttggcccgagaagcatcagtaaatataaagttaggtgacctagagattcccaagggcacaaccgtagtcatcccgcttttgaagatgcatagcgacaagaccctntggggatccgacgccgacaaattcaacccaatgcggtttgcaaacggcgttttccgagccgncaatacccaaacgctctcctagcaattctcgtcggaccaagagcttgcattgggcaaaactttgtcatgatcgaagccaagactgtgctcaccatgattcttaaacggtttcggttattagcctctgtgacgagtataagcacacc

SEQ ID NO: 107426 - DNA, 418 bp, Arabidopsis thaliana columbia
  unsure (1)..(418): unsure at all n locations
aagagcttctctatcttcaacgaagaagacgacttatcaacctttgcttaatctaggggtttcttcttccttttgtttcttcttctccagttttcaaggagattcttaagctccatctcttgacaggggtggatcattggtgaattcttgaggtccaggagaatctgtcattttcaacacattgtgtggaatcatctgagaggttnggtaaatagatagaacaaggatctatgaagatctgagttgaagaatgggctattgttccatgaagtcctcttggattggtgtatctttaatgtaattaaaactcaagaaattgtttaattatatcatgtgctcatatgatggattgatgagcgtggtaaggtttcaaatgttagattgaaatcagcagatagatccttgtcaagatggaaac

SEQ ID NO: 107427 - DNA, 107 bp, Arabidopsis thaliana columbia
cttcttctttatccactactaacaacgctcctcgttcatttccacacacttcttactgcccctgtctatacaccacccatcttccccgttttaatattaccactatc

SEQ ID NO: 107428 - DNA, 397 bp, Arabidopsis thaliana columbia
  unsure (1)..(397): unsure at all n locations
ttaatcnttttacttttttctncacttctttttctcaatnnccncctcaacaaagaatgttttctaaaataacttaagacaacccaaccctccttctttcccccncancatcttaattccttataaacttcccttttacaacttattaatacttctcccaatccttttttcccatcatacatcccataaaacacatcttaccttttcaaatacttcagtccatcctccagcgaatcacctaactaccttaccatatatttccccctatactacagattttacaccttcttactttcatcttacccctaaacattctcaaaaaaccgttaactataaattatccacaatatatttaccatcctctaatccctacacttcttcttcccttatctttttt

SEQ ID NO: 107429 - DNA, 291 bp, Arabidopsis thaliana columbia
  unsure (1)..(291): unsure at all n locations
ctcacactcttatacaatcacctttttatttctacttcctcnctcccactcggaagggctttcttataaagcttggaaccaccctctacttcacaactctacctctcaaaatcatactcctcgatttaacttgtaacaaacccgacttttctctaatattcactccataaacaatcatcaaaacactctaaacatttacacctcattacataatacaacctaaattttcaacacaaaatcctctaacattacgaccctttacaaaatacttacttccaatacgatctctta

SEQ ID NO: 107430 - DNA, 135 bp, Arabidopsis thaliana columbia
cacgcgtccggttttcttgttatggtcctgactttttgattaatttttgtttaaacaaaccactgttactctggtggtaactactacgtcatcacgcttttgttatatagtgcctataatgaccgcaaattaaat

SEQ ID NO: 107431 - DNA, 266 bp, Arabidopsis thaliana columbia
  unsure (1)..(266): unsure at all n locations
ttcatacatcgtaggacggtttattatctggatagagaatggccatactnaaccctttcatctatataagctcaaactcacacttccctatccacaatctcccttatgcaatcttcaaaccttaatcaaactcaaccccttatactaacttcactatccacgactaacttcttgacctcatcaacatacccgaaaccatacctttataatcctcttgatccttaacgacacaaaaccctttcttcaacctaaatcaaaccaactct

SEQ ID NO: 107432 - DNA, 292 bp, Arabidopsis thaliana columbia
aaacacactccttaacaaaattacaccttctcttatttttcttaccataaacataccttcaggaagttttccaaactcacctagagcggcttcacaacttcacctaactattccatcacccatcaaaacacaacctcaatcatcttcactcttataatcaacacctactcttttctcttcttacttactttacctacatctacctttactaataaaactcttatcatctccttattttcctcaatagacattacaaccaattctcaaaccaaatcttcaaactttgaaaatc

SEQ ID NO: 107433 - DNA, 415 bp, Arabidopsis thaliana columbia
  unsure (1)..(415): unsure at all n locations
aaaaacacanaccttaaaaaaattaaaattccctttttctttctttaagactaatactntttcagaagggtctccaaactcacctgggctgtcttcaaatcttcacttaactattccatcaccgttcaaaatcgcccctgtttcatctccgatctcatagttcatcaccttctcttttctcttcttacaagctttaccttcctctcccttagctaataaagctcttttcatctcgtgattttcctcaatggacatcacagcctattctcaaaccaactcttcaagcttttgagatcactttcagattattttttcccacttgttctgatactatacctttcatcaaccaccgtttatagaacccctagctatattttctcatcaccaatcacatccacctttttgcatccatctt

SEQ ID NO: 107434 - DNA, 292 bp, Arabidopsis thaliana columbia
aattaatattacatacatctctacaatcatttctttttttataacaccaacattctacgcaagagcctctattatttagtgaaagactcctcttttttcaataattctatctatacgaccattaccaaaacaataacacatttacacatctacatacctttcatccattcttactctgacataactaacataactctctcctcctcctctttatctaaacttccttaacattacaaatacatacatctatataatacaattaaccccttcttcccatttcatattccattat

SEQ ID NO: 107435 - DNA, 271 bp, Arabidopsis thaliana columbia
tctatcttttcttcttttaaaccatctcctttcactaaagataattttttaaataaagaaagaccctccctcactttttctcttccctccttcaaaattttctccaattacttcaacaaaatcaatacctacaaccccttcccaattttctccaccatttacttaattaacaacttcaacccctccctcataattttcaatatatacttctcttacaattacttcttcaattatacatctaacttctatttatacattcctatttacaact

SEQ ID NO: 107436 - DNA, 362 bp, Arabidopsis thaliana columbia
  unsure (1)..(362): unsure at all n locations
tatcactctcttctttctttcacctttgtttccaaacacattattnnctntagagacagagtttttttccaccaaagacaagtactccaactctattttccattcaaccatcacctatatcttcttcatacctcttttatctcttttacaaccctcacataaatcctatttttcccaatctcttcatttatactaataccacttcttttttaattcaacctacctttacttttacatactaccaactcttcttcattctctttaccatatcatccatcccataattccattcatacaaacccttttcccttacacttcattctttcttcaacatttttatttttccctctttaccccttatt

SEQ ID NO: 107437 - DNA, 437 bp, Arabidopsis thaliana columbia
ctctgcaggagatgctaacagcattagtgttggagctggtaccaatattcaggacaacgctcgggtggacgttgctaagaccaacgtaagtgggaaggtcttacctactgtcattggagacaatgtcaccattggtcatagtgctgttttacatggctgcactgtcgaggatgaggcctatattggtacaagtgcaactgtcttggatggagctcatgttgaaaaacatgccatggttgcttcaggagctcttgttaggcagaacactagaattccctctggcgaggttcttagccacgctcttatatgttgaccttctcaaacgtttgttattcgcttaagctctggtgaaattacaattctggttttccttgcaggtttggggaggcaacccagctaaatttctgaggaaggtgacagaagaagaaagagtcttc

SEQ ID NO: 107438 - DNA, 424 bp, Arabidopsis thaliana columbia
  unsure (1)..(424): unsure at all n locations
gacccaaacatacgtaagaatcgcacacctttcttatcgtcttcttcatcttttctccctgaanatttattatgctagtctttttaaattcagggggatgatttaaacattattcttctcaaattccctgaacataacatttcattacacatttctaaataccaaaaacctcctcctcttttttattacataattcatttcttaaacccacttcatctctattctcaccttgaaatctacgtaaatctctaccaatatttctcctcaaacacatatcttccttaacacatccatatacatttccctagctatcacttcactcaagcagatcaatattcttataaatcacccattatattctttaaaaattcttccttcataaatacacaacaccatcagttaatactttattactaccattttc

SEQ ID NO: 107439 - DNA, 379 bp, Arabidopsis thaliana columbia
cttctttcttctctctaacctaaaaaaatctgtctctttccttcttcctcaggaaaatttaagatagttgttgataaggatatggggaagaaccttttgaaatttttggcaaagttgaaggtgaaatagatacaaaaaaaatgggctcagaggaaaacaacagcacaagctttccaccaacagagccaaagctctgtgataacggatgtggattcttcgggtcaccatccaacatgaatctctgctcgaaatgttacagaagcttaagagccgaggaagatcaaaccgcggtagcgaaagctgcggtgaagaactctttaaagcttccatcttgcagtatcattgcacctggacaaaaacatcctctggaaattaaacc

SEQ ID NO: 107440 - DNA, 498 bp, Arabidopsis thaliana columbia
  unsure (1)..(498): unsure at all n locations
gcgccacagcgtccgcaatagtcttttttagaactagtcnntttctttaaattttttcctttatattaaannaaatatatnntaaaaactcaagtcaagaattataattattccacaaggagacacgcaatttttgttatgcttttaatatatttannatttgatctgtatttttttttaaattctaacccttttttcaagcactttttttagtcgccaaattgccagaggcctacgcctttttgaatccaatcgtagatgttatgcccgtaatacctcttttctttcttctcttagcctttgtttggcaagccgctgtaagttttcgataaaattcttaatactgtcttaaacaaattcacgattttgatttttccaacaattcaaaagatccaaaaaatcttgacgtatgaacgaactctcaattcaaacatttaatttttttggtagccatactaaatctggatcatttctatttcctaaattntatcctctttt

SEQ ID NO: 107441 - DNA, 363 bp, Arabidopsis thaliana columbia
tcctctctcccccttctcttctctatttcctattctctccaaattcaccatttccttccaccactcacaaatctccctttcttattacctatctcttcttctaacacaccatcttttatctccttctcttccttatcgatacattcttcctccctccggataaattccaatatacccaagtattccaaatttactcaacaatagccttcttctttcataccaattcttacacctctttttattatttcaacatttttaatcattactgttatcttcattccccttgacgttatttttctctttgcttcttcattattttgtttacatcctttatccctattatattgcattcatacctttatc

SEQ ID NO: 107442 - DNA, 454 bp, Arabidopsis thaliana columbia
cgtctctcttctctctctcttctctctctctctttttttttctaccgtccttctagggtttcttgagtcacattcaaatttggcgccgggtaatctcaatcctgtaagaatcagaggatatggattccaattggatcaattgtccctctgttttctcctcatcctcttcttcttccagacgctgtcaatcccgatcagacttgtatttaggaggagggtacgaggatcttgaaggagaagacgatttgaaggcagagtttatatgccctttttgcgctgaagattttgacattgttgggctttgttgtcacattgatgaagaacatcctgttgaagccaagaatggggtctgtcctgtatgcactaagaggggtgggattggatatcgttggccatattacgacgcaacatgcgaatttctttaggtacagcgaaagagaaggttgcgaagagg

SEQ ID NO: 107443 - DNA, 403 bp, Arabidopsis thaliana columbia
  unsure (1)..(403): unsure at all n locations
tctctncgatcttctctatacccaattttcctatttttccatcacnctccctgagacaaggtcttaccctaacaaggacacgcttcaccctctatttttcattcacatattataccttcttcaatttatctccaattcaattaatcatctttatccaactcccaccatcttttataaatacattaccttttttatttacaacaccatttctttttctctatctcaaacaccttcattataaactcttaaataattctttattacatcaacaaactctttaactatcccttattaacttcatatacccacaatcttgtcttaccatacataacttaacatcaatccacatatcttccaacttaaagatattttcactcatcctatttacttactcccaacaatc

SEQ ID NO: 107444 - DNA, 441 bp, Arabidopsis thaliana columbia
atagtttctttcaaatcccctaaaacctagaaaaacaccaatgtctctctctctttttgttttggtccgaaagccttttacctttgagatgtttctatataattgccagatccttcgttactactgatgctagctcctttagggctttttctcgtttactcatgtcaaattaccttcttgtcccttggtgtttaaggctctgatcctatataataatacttcataggaaggaagaagagcccttcgtcgtggtttacttggtcccgatcggagatggagagagaatgtgggtcgaaggagttgttcagcaaagaggagcttccaagaaataaagtggagtccatgtgggagacgattacgtcgaggtcatgtgtggctgcaccagccaccgttacggagacgccgttgcgaggcttaagatattttcagatggagaacttc

SEQ ID NO: 107445 - DNA, 266 bp, Arabidopsis thaliana columbia
  unsure (1)..(266): unsure at all n locations
aggttcttttgatccaaaattttctatttcatttttttttagcaaaaatggtatactcagaggcagcattttctttaagaggtgcaagtgcctccactacactcntaagcttaaacagaaaaaaaggtaattgttatatgagtgcgtttttttctgaattatgcaaccgntgattatatagccaagttaaaaaaatcctcctagcatatataattcaccaagaaaaaatcttgtacggcttcgtatatattttatcttcttacttt

SEQ ID NO: 107446 - DNA, 335 bp, Arabidopsis thaliana columbia
  unsure (1)..(335): unsure at all n locations
cgtaaatggattgatcataactcgttgtcccattgttctgtttttcttgnggacccagtcatgggcaagacgcgttttaccatctgtaacgaccacttaactcaccataacnantttatttttctaaaacatattnactcntaccataaatacaaatctattcaaataaccatttcttacaatcattttnnantcaaacttattcaaataattcccatatatctacacttntacttccattttattaacaactactacactcacttttaaatatacccaataanttttatctcaaacccnacaatcaacattcaaagaaaccgctattccttccc

SEQ ID NO: 107447 - DNA, 252 bp, Arabidopsis thaliana columbia
taaaaacatgaagacagggcttcttgaccttccaacaaagatcaataaaattctaaagaatatatctaaagtctaaaaacatgatccaaagacagtgaatctttcttttaaagtcagagctatcattaacacttgcctctttattgtatctcatatatcctctctccaaaggcattctaatcaatgctatttggtcactcttgacccattttgtcctcctacagttctataccattacaactttattcaaat

SEQ ID NO: 107448 - DNA, 444 bp, Arabidopsis thaliana columbia
gtttgaaaattatcctgacatgcatgcttgtcgtgatttcatcactaaggcccttgctaaatgtgaagaggagcctaataaactagttgtcttgacacctgctgaacaacttagtatggcagaatttgagctacgcttcaagcttcttcgagaaaatagtgagttgcagaaattgcataagcaatttgtggaaagtaaagtcctgacggaagacgaattctggtctacgaggaagaaattacttggtaaagattccattagaaagtcaaaacaacagatggggctcaaaagcatgatggtttcaggcatcaaaccgtctactgatggccggactaatagggtgacgtttaacttaacgtctgagataatttttcagatttttgctgagaagccggctgttcgccaggcattcataaattatgttccgaaaaaggtaacaaagac

SEQ ID NO: 107449 - DNA, 295 bp, Arabidopsis thaliana columbia
  unsure (1)..(295): unsure at all n locations
cgcgtacggaactgggagnagggnttncgngatagaaaattttcaaagttaatgtgcatacactagctaggggagaagaagaagactgagtgggaatggaangaacctggggttttcttttaaaacaacctataacaacaatacccttttttaccagaaaaaaagggggtttcttccacaaagagggaagaccaatcggagtgacaggtttacaggtttaaagaatcactcggtttctggaaagccgaggtttttcgatcttagcctaagagcttaaggtcccataaaagcaagc

SEQ ID NO: 107450 - DNA, 312 bp, Arabidopsis thaliana columbia
  unsure (1)..(312): unsure at all n locations
cggacgcgngggacgancncancccaaannanngannannnaaacgcaanccncncancacacggggaggnggagaaacgccggcccgaaacnancggaaaacnnncncagagnaccggcggacaacaccgcngaacacaaaaganngancgacgaccccgacgcnccgcgaccccaaccccaacaacgagancngnngccacgaaagaaaggaggangncgacgccagcaaggaagagcgcaaagaggganngcaagaggnngcagcaagacccacccgcgggaagaagcggagcgccacaggacaacaac

SEQ ID NO: 107451 - DNA, 262 bp, Arabidopsis thaliana columbia
  unsure (1)..(262): unsure at all n locations
acgcgnncgaaaacaaggaagcgcgaggcnngagaancaancaangganangcagaangaaaacgagagnagggagggncnncgaacaggcgcgcgagagnagcagaagcagcggacgncaaaaacccnnnagangccgagaannngacgagangggcaggagccccacccgaacnancacagnnncagacagagccaaagcaganganncnagaggcnannnngaagcngggagaggccnnggncancganccaaagaagc

SEQ ID NO: 107452 - DNA, 114 bp, Arabidopsis thaliana columbia
actacttattgtttacccattaaaggcacatctggtggggttacattgggttactttatttcatatatgcaatcatgacatcagtcttggtctttactcctatcaaagggggtg

SEQ ID NO: 107453 - DNA, 313 bp, Arabidopsis thaliana columbia
  unsure (1)..(313): unsure at all n locations
ctctgcnncgcccncncannnccgggggagaaaaggcggagnccgcnccagnnannnggcggagccancganncnnagaggggagaanggnngancaagnncagcaccccacnanngcgcagaaagcngccgggcagnncaagcgnncaagngnnnccaaggacgnncaagngggnnaccagaggccnncnangnancaaagacangcaaccnacggaaaccaccccaangcngcannncaannnccnccgacancccggaggggggcaacaaccgcnncncccgngnnnngccaaaccccaggagagaaggg

SEQ ID NO: 107454 - DNA, 357 bp, Arabidopsis thaliana columbia
aaagggatggtaacccatgaatacttgtactctagtaattcatcagcctatgtatcacgtgaaactttttactaccagggcgtgttcaaattaatcttgcgctctctaccatcaatccttacccatcaaacgaatcaagctctgtttacgaggagctatatcatccgacgtacaaagaaactacaaagaaacgacctcctacgtcgaagaggcacacgaagatgatgagtcatcatcatcctacggagaagttaacaagatcattgcaagcctaaccgcacaggaaggagccatggagtaccttatcgagcgaaaagacggccatactacgtcatgcactacatctagctacatcac

SEQ ID NO: 107455 - DNA, 312 bp, Arabidopsis thaliana columbia
cccggcgcccacgcgtcgttatcgcttccatgctttgtgaattcctaaacagcctttttcggttgcttcccacgtggctcactaccgaggatggtccatcaggaaacagtgcgattctactcgcgtcacacaaatggtttgttttgattctgaaaagaggatccttgtgtgggactaaaaccgaatgcaggtgtcaggacgagcgtaaggcctttgccatgtaagccgcgggaagctgcgacttgacatgacactaagggggccatgtaggatgccctaaacagttataagaaacacacgtggtctaagctg

SEQ ID NO: 107456 - DNA, 440 bp, Arabidopsis thaliana columbia
gaaaaccgggccggcccacgcgtacgcgccgaatttgcagtattgagactaaaatatggtttacttttgcgactaccgcaactatggagggacctttaaaagaccacggggtccttactaaaaagaacttcttgattctgaattgaagctggttggtgagtatggtcttcgtaacaagcgtgagctctggagagttcagtactctcttagccgtatccgtaatgctgctagagatcttttgactcttgatgagaagagtccaagaaggatctttgaaggtgaggctttgcttcgtaggatgaaccgttacgggcttcttgatgagagccagaacaagctcgattacgtcttggcttttactgttgagaacttttttgagcgtcgacttcagactattgtgttcaagttggtatggctaaaactatccattactttcgtgt

SEQ ID NO: 107457 - DNA, 172 bp, Arabidopsis thaliana columbia
  unsure (1)..(172): unsure at all n locations
cgagaccagnagncaaggcagcaanggaaggngggaacggaaccgnnnnggcgnacggngnnactagcaggggaaagacacanacaangcanggngancaagaancnccngggancaaaccgcnagcaanaaaagacgngnncagnancaaccagganaccccaggaaggga

SEQ ID NO: 107458 - DNA, 477 bp, Arabidopsis thaliana columbia
ccacgcgtccgacatatttgtagcatccatacataaatacatacatttcgagggaaagagatgaaagatcgggtggagcgattattgatattgccggtttcgttagggtgttcaacgcaatcttgcgtcgctgtggccactactcatcaacaaaagaaaccaaaccaactcatcaagagaagagaagaaagtcatgagaatggatcatttgaaaaagaatacacaaagatggacagaaacggtgctaatatgttagatggaagagtagaaagtgatgcaaagggctcatttagaaaggattacacaaagatggagaacaacaacaacggtgctaatatctcagatggtatctacagaattattcgcagcttcaagagtttctcgcactttttcatacgttacgaagaggagacgaaagagagagaagcggagatggagataggatttccaaccgacgtgaagcacttgagccacatt

SEQ ID NO: 107459 - DNA, 407 bp, Arabidopsis thaliana columbia
  unsure (1)..(407): unsure at all n locations
ttatcatctcttctccgtatatcttccgggggatcttccaacaaatgtgtgaacctaaacaacaanctggcttctacataacccacacntcactccnctccatataactacctcctctctcacatcatctaatattcaatctcttcaccntcaatctctacttctccatcctcttctccttctaataatcattcaaaaaatacctattattactctctcaaatttcctatcctacctttttttcaactcatcattcccattttctattttacattctactatcactatacatttcctcctatcatcacatctctttatattcaatatcatcccacatatctttttctttaaaatctctcatcatttttattaaaaatatcattttaaccaattctattaattttact

SEQ ID NO: 107460 - DNA, 295 bp, Arabidopsis thaliana columbia
  unsure (1)..(295): unsure at all n locations
caccgncgcnngccncccacccgccncnncnncnnccncaacnnccccccccncgncnncccgnnccgnnccaacgcnnanccgnaacgagccagnnnnngccgcnccngcgccnancanngccccnnannggagngaagagangggaaccgaagcanacgacgaggcnanngaagcncncaagaagcnncncancgagaaggaagagccaaagacggnngcagcggcaaagggggagcagancacagcggcncnncagacaggaaccccanccgacaagaaagcnnncgacccc

SEQ ID NO: 107461 - DNA, 444 bp, Arabidopsis thaliana columbia
  unsure (1)..(444): unsure at all n locations
gacccacgcgnccgcggncctagacttggcgggtttcgaaccgaggcattcagggaaactgcactcgtggcaatgtggcctactggcattgttgaaatgctcatgcaagagaatctgtggtcaacaatgtttgccggaattgttggtagagccaggactcatgaacagataatggctgatgctgctggaaacttcaatggaaatctccaaataatgagtgctgagtaccaagtgctttccccgctagtcacaacccgcgaaagctacttcgtccgctactgtaagcaacaaggagagggtttgtgggcggtggtcgatattttcatcgaccatctccttccaaacatcaaccttaaaatgtcgtcgccgaccctctggatgtctgattcaagaaatgcataggggttacttcaaggatacatgggtggaacatgtggaagtaga

SEQ ID NO: 107462 - DNA, 331 bp, Arabidopsis thaliana columbia
  unsure (1)..(331): unsure at all n locations
gagcncnncaggcgcgnngcgcaagaaccgcgcangnnagcccacgagcggcgcanncnaacaaacccgcgcnnncnncgnncncgcngaccggcgccncncgcagganacngnannnncgnngacggcagcgacgngagggacgggaccccagcccgcancaanggcggagaanannccgnnannnggnanaagaaagaaaccgaagaaagcagaagaagaagcggcggagaacgngaaagaaggcnnngagacggcggagaaaggcgnngangcggcggagaaaggaanagaagcggcggagagaggggnagagacggcagagaaggaa

SEQ ID NO: 107463 - DNA, 435 bp, Arabidopsis thaliana columbia
atctctttctcagttctttagggttttcaatacttacaccaaagggtaatgccgatcaacgaggagggtcctagtgggttaagaatactcgttgtagacgatgatacttcatgcttgttcattctcgagaaaatgcttctccgtctcatgtaccaagttacaatttgctcacaagctgatgttgcgttaaccattctaagagaaagaaaagacagttttgatttggtgctaagtgatgttcatatgcctggtatgaatggttacaatcttcttcaacaagttggtcttcttgaaatggatcttcctgtcattatgatgtctgttgatggaagaacaactacagtcatgactggaatcaaccatggagcttgtgattatttaatcaaacctattcgtcctgaagagcttaagaacatttggtcacatgttgttaga

SEQ ID NO: 107464 - DNA, 377 bp, Arabidopsis thaliana columbia
  unsure (1)..(377): unsure at all n locations
ggcaggnnctnnggatgatnggngngagaccaanngcnganacngggggaagagngaaccggggcgagccngngagcnnagaagaacnaggaaggccgaggancgangnagnngnnaacngcncaggggncnnccgngagcncccaaacaaccagaggaaccgncnngaccgagcnancaagaagggggcggagcnagaagagcccgnagagcaaaaacnngnaaggaaacacgcgnnggaacaagcagaggcgcnnggcannganannagagaggcagcgacaagagagnncgcaaacgccccagggncacacncagccaacaacagncgngcngnngaaaacncgncanggaacgangagaaacagccncaggac

SEQ ID NO: 107465 - DNA, 399 bp, Arabidopsis thaliana columbia
  unsure (1)..(399): unsure at all n locations
gagctgaatagntggcttatgaagtgtcttttctatgaacctgaggaaactccagatggaatcgttcctttttctcctgggcggattggggctccaatgattttcgtgatctgtaaccagtgggaacaagctctagatagaatatcagaaaaggaagttatcgaggctatacgccgtttcacaacgagtgtgcttcatctttgggaacaagataggttagcaacccgggagaggattatagggcatggtgatcctaggaatatggaccgagaggaacagagaatacagaaagagattcaagaattggaaatgaaaatggttctggttggtccaggggaagataacattgtctaccaaagcgacactagtaacgagagtttacagggtagtcttcaacgt

SEQ ID NO: 107466 - DNA, 374 bp, Arabidopsis thaliana columbia
  unsure (1)..(374): unsure at all n locations
gaagncacgagaancaacgangacggcgacgaacaagcaagncagggggaaagacnacgnggggggggggccnacggaanccgagggcgannncacnaccaccaccgncgaacnnagggnnccggaagggaccaacncnnggcnagngaagaancncnacnngncangcganccnnacangagaanncgcanggggaaaccnganccnnccacngcngcncnngcncaagcnnacacncccggccagccaanccaagggnanggaggggcnagaanaanagaancnggacanccagannacaagaaaggagannnacccnggggnanagnngcangggaggaggacagngnnancacnccaangacncacgcgc

SEQ ID NO: 107467 - DNA, 395 bp, Arabidopsis thaliana columbia
  unsure (1)..(395): unsure at all n locations
cacgcgnacgaaacttctctcttacttaccctctcaaacctatgtttcttccacctaaacaatctatattttcgttgagactctcaattgtgcggggctatcttaacatcaacaaacctgcaaaagatttatctattggtaaaacgaataagaaagctacagagaaggcgtggtgctattacttttatagagagcttgatcatcagaagattcttgtgcagcattagaaagctaagcactttaagtgtcatgtctttcataagaagctttctacagctagtggcatggtgattcatgttcttcatgttcataaaaagaatgttacaaaatgtcctaatgctaaagaccgtctatattcaactgatattgaaatatatggaatgcaaggaattcca

SEQ ID NO: 107468 - DNA, 420 bp, Arabidopsis thaliana columbia
tttaaaatggggagaaaggttaaagctggagacattataggggagaatgggggtgttatgctacagaccacaactgtgtggtgtgaggaccaaacgtttgggcgcaactgttgcgtatgaaccgtacaactttcttgaatattattcaggccaatgttggtgatggtaccataatcatgaattatctacttcagcatttggaaagaaatgaatgatccggtgatgacgaatgttctgctggagatagaaaacatgcttgcacggggtaaaatggatcttcctctcaaaatatgctttgctgcaataagagaagacgatttacttttacatcagttactaaagagaggacttgatccaaatgaatcggataacaatggcaggacacctttgcatatagcagcatcaaaaggaactctaaaa

SEQ ID NO: 107469 - DNA, 263 bp, Arabidopsis thaliana columbia
aacaaataactcaacttactacaatcactttccctttgcatgaatcaatcgcatacctaaaaaaatcttactacacctcacacaaccactactcaactaatccatttttaaccccaacctcccaaactactccacctccacaacctaacataatcaactaacccccacaaactgcgcataaaaacatccccatcataaatcacaaactcatcatacacaacccctaaagctaacaaaagctataaataacttttaaaaactct

SEQ ID NO: 107470 - DNA, 228 bp, Arabidopsis thaliana columbia
  unsure (1)..(228): unsure at all n locations
tcctcttattaaaggattctatttttttgngctncgactnccatcgctggggtttcttctacaagtgtgtcgggcaccaataaactcattcttactaccaaacatcctctaccatctctgaccacttcatattcatcccttccctccaacatatctactccacataaaccaatctattccccgctaagcactcctccagaatgtctagaccttaccctccctgttaac

SEQ ID NO: 107471 - DNA, 221 bp, Arabidopsis thaliana columbia
atttgatcgcacttcacgcaaaggtccaaaggcttttgttatagaatatgctgttaactgtaaaagatggtggtacaggaagccttcgtgcctctcttgcagaagctgcgtttctcatcggtcttgtaaagaatagtgacatttttgaaatggcacgttattctccactctttgtgctcacaaatgatcgacagaggcaccttgttgcacaattgtttatt

SEQ ID NO: 107472 - DNA, 138 bp, Arabidopsis thaliana columbia
gcgtccataaccctaatcttcaatagtgttcaaaactcgtattattttttagcaggaggtcccatcttcgacggatcatatctagaatgtgggggcttcaaccgaaaagaaccattatgtagcgatcttccaccttaa

SEQ ID NO: 107473 - DNA, 314 bp, Arabidopsis thaliana columbia
  unsure (1)..(314): unsure at all n locations
acttctcagagttcttcactttttctggttatttttctcatcaccatcaaccctaattgggcgcgattatatattctcggcagagcacattaacattacntatattaatatatcagaagcgttaatcttacattccttctaggtttcaaagaaactccaaaaggaagtaatatcaccttcgcttgttctccttcaggacccagtgtctcttgcaattccttctaatagagaaaagaaaagtatcgttacattgaaactgtttatcgtatttctctcaaatgtaaagaggttagagaataaattctattcacata

SEQ ID NO: 107474 - DNA, 251 bp, Arabidopsis thaliana columbia
gggcgaccacgcgtccagaactatcttatgtacaagaacattcactttttttttatcttgcactctaacatttcccgttgtgttatctaatatagcagggaagagtacacttttcaacctcattactccttaatcgcacccaacttaattaatttaactactatacaaccacttagaagatttcttataaccatcaacatatttcttaaaaactatacattcaacaacctttacacatctacatcatattt

SEQ ID NO: 107475 - DNA, 464 bp, Arabidopsis thaliana columbia
gccactaaaaacctatctcccggacggggatatctttcttactgtcctaactaagcaaaatatgggtgacgatttttatggacaattgtgcagtaggcttcaaaatgaagaaagagaatctgaattccatgcaacagatgttcagtttatccctgcacaggtcaaggtcataaaatgcaatatcaggaacattgctgttgatatctcttttaatcaaacggcaggtctctgtgctttatgttttctggagcaggttgaccaactctttgggagagatcatcttttcaagcgtagcatcatccttgtcaaagcttggtgctattacgagagtcgaattcttggtgctaacactggattgatctcaacatatgcattggcagtactagttttgtacatcatcaacctgtttcattcatctttatctggccctttagcggttctgtataagttcttggattactatg

SEQ ID NO: 107476 - DNA, 310 bp, Arabidopsis thaliana columbia
  unsure (1)..(310): unsure at all n locations
agttaagaagcctgagatgaaaggtcctgaaatgtttatttttgaggaaattaaaaccgagtttggggaatccttgcttgctagagtaggagtaatgggtgtgacctatctgaaaacgatgccacccaaaggctctggtgaagagaaagaaactgagttctcattccgtgttgagggtactactgcagttaagagatttgctatgcagagttctcggatcagtagcttagggaacggtttgtttcacgtgagaactgctccatcagaagaaccaatccctatncttaaatatagcttgcaacctaaacta

SEQ ID NO: 107477 - DNA, 351 bp, Arabidopsis thaliana columbia
  unsure (1)..(351): unsure at all n locations
tactgaactactttcggaggtttcagaactcttttcatttggacactcggggacacggtttgtctgggtcggtttttggaagcgtgagagggtgaaggagaggaagcatttagagagtgtagacagatagcgtgtaaaaaatgtggcaatctccatgcctggtttcttacaaagaaatcaaaatctacagctagatggtgccaggattgcaaggaattccatcaagcaaaagatggagattgtttggttgaacaagctttccagcaacgttttgttcgggctattttaaaaagtttgatattctcncttgcttattgtttgtgcataccagcaaaattatatttaagcttt

SEQ ID NO: 107478 - DNA, 186 bp, Arabidopsis thaliana columbia
  unsure (1)..(186): unsure at all n locations
agatttcctcactggaagtgaactcaaaattttcttatacaagaccaagaagnccaacggggtggataatttctaagaagagagcgtgcaacaaatctactcagatctttttctctcaattgacaagcttcaggagattcaagacgaccncaacaagattaacataaattccattgactaactctt

SEQ ID NO: 107479 - DNA, 214 bp, Arabidopsis thaliana columbia
  unsure (1)..(214): unsure at all n locations
gggcgacccangcgnnncnnnactctctatatctctactcttcttctattttcctgatttctccaccaatccacaaacccgacgttgattaataatgatagtcacacatatcaaaacagtaaggatttatatcaaaaacatcgagaataccaacattttacaagtcactttctctttaacaccaaacggtatgaacaacaccgctaaataactt

SEQ ID NO: 107480 - DNA, 341 bp, Arabidopsis thaliana columbia
  unsure (1)..(341): unsure at all n locations
gggcgagccacgcgnacgcggacgcgtgggtccaattctacatcaatgtttttttatttcgatgcacctcactccatncgaacgactattatctacgtgactgtacaatttacaaatcatcctcatatcctactcacttaccatcacctttatgtacgtatctaatctatcttatgataattatacacaaccgacaaataatgtctacgactgcctctctggatcgtctgatgtatctcaatttgtatttgtttatttccgttacttccttcaccagcatacaattcaatcattacaacccttcaacttttaatgtttcttccaaccggatgagtgtttct

SEQ ID NO: 107481 - DNA, 454 bp, Arabidopsis thaliana columbia
gaaggatttcaaattaaaaaatttttcaaattttttaatgggggggatcaaatggaccaattggtcttccaagggttttttttttggtggccaatttaaccgccaaaaccttggttttaagaaacttaaaataaaatcttggaaccagggctggtttcgattgtgggcgaagaatccaacttgggcattgggtacctatgggaattttctttggatcggttggtcagctactcaccgggaatctggggttcatatcaagcttcgtcagatcaacgaaattagactcttggagcccggagcagctcaggacaatgatgttttggtggtaacaaccgtgctcaggttttcttcaagcaacatggatggactgatggtggcaaaattgaagctaagtatacttcaagagctgctgatttgtatcggcagattcttgctaaaagaagtgcgaaagcga

SEQ ID NO: 107482 - DNA, 330 bp, Arabidopsis thaliana columbia
  unsure (1)..(330): unsure at all n locations
cacgcgtccggtgaaacacaaaaagatgcttaatctgagcttttttattcaagaagaaagaatcgtgctgggtgatataacatattcttgcgggtgccacantcttacctctgcaatctttgcatgcttcttggatatgaagggttatcggataaaatttactcgttagcgtgagaggtacttaaaaagttttctgccgtagatgtcactcatacgaagttatctacaaatgaactctcacagacggcgagtttttttatttcctcaactgnacgtgtgcttgcatcccttagtctctacacataatataaggttttaatacattttcca

SEQ ID NO: 107483 - DNA, 158 bp, Arabidopsis thaliana columbia
acccgttcttttaaaaccctggtcttttccgatttttttcttaacttccgggtggttccgttttggggcaggtaaagatggaaaattaggttctgtaatggcttaacaaagcctgggttttggttggttaacttggagccaccattttttttggccgt

SEQ ID NO: 107484 - DNA, 398 bp, Arabidopsis thaliana columbia
gaaaataatggctatgacacaagtttttgtgatttttattcttctagcaacgtcgttgtgcaagtccaatgctttgccttcatcggtaatcaacggatttggatatgattattgcattgtagaatgttcaataacttttttagatgatgcatgcaagccattgtgtatagacagggggtactcggatggaggatgtattggtttatcaccacattttaaatgttgttgtaagaaatgatataaatcaatagttaactggcgatttgatatctggtttgttttttgatgaaataaataaagcttatgcgttgttgtggagattttttatttttttcctatatttttttttattttttaaattgtttttttttttaaatataatattttatctaattttt

SEQ ID NO: 107485 - DNA, 280 bp, Arabidopsis thaliana columbia
cagagaagtaagaagaagaagaacaaaagtttaaattatttacaacgagagggaaaagcggttgtacttttttaatctctccgagcaaacctaaatatactattaaatggtggattcgattaataaagttgctcatcttgatgtgtagctaactgtcgaagagaggaattttttatcttttgggtacaagtatgtgatttttgcaagtagagcatcattttataatactatcttccatttgtgcagattgaatagtcctatcgaaattatcaaatttttt

SEQ ID NO: 107486 - DNA, 198 bp, Arabidopsis thaliana columbia
cggggcggccccacccgtccgattgggaagctgcaggaggaagaggaagctcccaggctggaagaacctgaaaggctcaaaagggtggaggctgaccccaaggcaacctgggttaaagcttttgggaaccaaagccggagggggttaaacctggagaagaaaagtagccggaaccaagaaaagctgttggaaggacct

SEQ ID NO: 107487 - DNA, 410 bp, Arabidopsis thaliana columbia
gctctctcaaaagtcgaatatcccaaattcgttctcttttccggcgataatctcctagctagatccgatggcgaaagaaccagggggtgtgctcgttactggagctgcaggacaaatcggatatgctcttgtacctatgattgcaaggggtatcatgcttggtgctgaccaacctgttatcctccacatgttggatattcctccagctgctgaagctttgaacggtgttaagatggagttgatcgatgctgctttccctcttcttaaaggtgttgttgctacaactgatgccttctttggatgtactggagtcaatgttgctttatatggtttgttggttttcctaggaaaggtatttttgttccatgttttttaataaatttctaaatattatttccatttattatttt

SEQ ID NO: 107488 - DNA, 260 bp, Arabidopsis thaliana columbia
  unsure (1)..(260): unsure at all n locations
tcgaaccgtataattacatttgtatttatttgtataaaaagaagaccacactacggntcgctatctttctttctctctagtgggtctctatctatcttatttcttcctacatcaatgtctactcaaggtcatcttatcacttgcaaatctgctgtggcttactatcctaacaagcctcttgtcatctaatattttcaagtctctccacctcaagcttttttttttcatatcaagatcctccacactgctctttttcacac

SEQ ID NO: 107489 - DNA, 359 bp, Arabidopsis thaliana columbia
  unsure (1)..(359): unsure at all n locations
gaaaaaaaaaactttcattttattcgtcgtcttttttatcttgttgcttcggagcgagcgagagttatcgtcggagaatttatcggctctctctctgaaaattctgatcggtgaagaatcgtcggatcgaaagtttcataagctttccatcaactagcagtatctgccaatatcacagacagataattcgtaatgggagacgtatatttcaaccatttcgctcagcaactgcagatgtctgaccaagagaagggtgaaatgtcaagacattcacaccctcattcaatcaatgaacaatctgagtcgtcaactctggaaagggtatctncataatcattaaccaacaaagtccttgatag

SEQ ID NO: 107490 - DNA, 214 bp, Arabidopsis thaliana columbia
gtactgcctcacttccaagattccactcgtttttatatttctattcctccattcaattgtccgcgtaatttttctgtatcgaaggtcgctcctcctttaatctccttaaactcccttgtccttaaacctccaactcaaatatctttaatttgtcatcacattttacatttctttcacttatccccattcttaaaattttttatcattttcatta

SEQ ID NO: 107491 - DNA, 329 bp, Arabidopsis thaliana columbia
cgcgtccgcttcgatcgtagaaaccttgaaaatccgagtcttctacaatgccgccaaagttggatccgagtgagatcgttgacgtgtacgtgcgggtaaccgcgtgagaagttgcagcagcgagttctctagctcccaaaatcggcccgctacgtctcgcaccacagaagatcggccaagatatccctaaagaaaccgcagaggcatggataggattacttggaaccgtcaagcttacattgtcgaattaccgagctaccttaccggagagtcatccgcagactacacttgggacaacgccttactatgatctgaccccggatacgttc

SEQ ID NO: 107492 - DNA, 138 bp, Arabidopsis thaliana columbia
ccgtccgaaccaccaaattttaaccgtttaactttgggctgatttattaaacctaaatggccgcttaaccatgggttttttcttcccttgctttggccgtgaaggccgcaaagctttcccccgcggattttgaagtcc

SEQ ID NO: 107493 - DNA, 275 bp, Arabidopsis thaliana columbia
ccgatctatcagatggtttggttggttatattctttctagggttccatttacatctctaatctcagtgcgatctacttgtaaaaagtgtaatgctttatcgaaaaatcagatctttggtagaaaaacagcatcaaggaatcaatttctagagttcatgattctagattctagagtttgttctttgagattagatcttcaaggaatccgtaacgaagacaaagaagacttcgttgatccatctatgaagctaataagtatacctagtaatgatgat

SEQ ID NO: 107494 - DNA, 141 bp, Arabidopsis thaliana columbia
tttagatggcctcttggttccgtcgaaatcttctttagttttaattgcccttgggggattcctggggggggcaagcttaagattctagaccgttttgcttacataaacacaatggttaatcctttaacttttattccttta

SEQ ID NO: 107495 - DNA, 304 bp, Arabidopsis thaliana columbia
gcttacatcaacacaattgtttatcctttcacttctattcctctacttgcctattgtactattccggccgtttgtcttctcaccggcaagttcatcattcctacgatcaacaatttcgcaagcatatggttcttagctctgttcctatcaatcattgcaacggctatcttagaactccggtggagtggtgtaagcataaatgacctctggcgtaacgagcaattctgggtgattggcggtgcctcagctcatctcttcgctgtctttcaaggtcttcttaaagttctctttggtgttgacacta

SEQ ID NO: 107496 - DNA, 174 bp, Arabidopsis thaliana columbia
caaacgcgaaaacaactctcagacctgaaagaagtttaaggtttactactggccaagactgctgggaggggggtttcgaagaaggatgtgaaggcaagaagactactgaagtatccaaacacacacttggcgtccatacgccagaagatgccagctaaatgactttgcgttcta

SEQ ID NO: 107497 - DNA, 404 bp, Arabidopsis thaliana columbia
  unsure (1)..(404): unsure at all n locations
gactttgtagagtaaagacagataagttttgaacttactgaagcaatttttagattcctcaagtcaatttctctccccaaacaggttccntgaatgacaaattgctaaatctaaggggtttgcttcagaatgcttttgaaacattaaagttcaacacttcagcacttgggatcttaatgctgtttcttgtttactctgatctaggagtgtagcttttaccatttacttgtgtctgtttttggtgctgttgtttgatctgtaatgcatacttcaatttcttttctttgggaattagttcaagaaccaggcatgcttactcttttcaagattcatatgatactcataccaatactcttctttatattgcctcctccccccattgctctacattgctatacctaaaa

SEQ ID NO: 107498 - DNA, 200 bp, Arabidopsis thaliana columbia
actttaaacttttagagaaaaaactttgaatttgtcatatctttgctaagcgttaacatcggtcttgagattcgttatttactttgactatttcagactattaaactttgcgtttttttcttgttcatgtgttttgaaagcctttgctgtttaaatcaacactcttgtgtgaggtaatattgggtgagggctttgtgctg

SEQ ID NO: 107499 - DNA, 423 bp, Arabidopsis thaliana columbia
aaaaaagtttgcattttttttctttgttgtgataatcgaaaaagagactaaaacctaagaatcgtgcagaggagaggataccacaccacacccagaaattgaaactaccaaaaagtttatgaatttgatttcaatttcaactttttatgagacccatttgattctttagggattttgaagatcgttgtgaaatttggttcgtgattcgttgcattgcaatagctagacggatcgggattgacccactttaggtttctcatcttaaagattgcgaaattttctaatttggcatcggattgtttggatttgattgcttataagctatagttggagcatgagtgtagcctgaagctagattgctggctggtatgtggtgatcggaatggtctcctcaaaggtcttttaacttttgttctatttact

SEQ ID NO: 107500 - DNA, 447 bp, Arabidopsis thaliana columbia
agagaattggtcccttgcttatgcaaatggagaagagaaatggtaaggctgaagatactggtgagttaacagagaaggagatcataagagctgagagaaatgccggatacattagcagtagattgagagagattcagatgcaaaactatttgaagaagaaagaacagaaagctcaacgggagaaggatcttcgtgaagggctgcaattttccaagaatggtaagtatgaggaagcattggagaggtttgagtcggtgttaggttctaaaccaacaccagaagaagcatcagttgcaagttacaatgttgcttgttgctactcaaagcttaatcaggttcaagctggtctctcggctctggaagaagcattgaagtcaggatatgaagattttaagagaatcagaagtgatccagatctggaaactctcaggaagtcgaaggatttct

SEQ ID NO: 107501 - DNA, 430 bp, Arabidopsis thaliana columbia
cggacgcttgggagaagcttctcttttgattctctttctctctctttcttcatcgcctgttggagcttcgatggttgggggtaggctcttcaccggtggtgctggttacatcggaagtcacacggttcttcagcttcttctaggatgctataacaccgtctttatagacaacctttacaattcctctctcttttcgatccaactctttaaggatttttccgcaaatcattgacaatatcttaccgttcaccatgttcactttttactattaactctcactttgataaggttttctcctaaacaaagtggggggcagcaatgccttttgctttaattttaaccaatttattaataactctgtccaaaactcttttttttttattaacaataacttttatttttgcccttttttactttttttaactaatta

SEQ ID NO: 107502 - DNA, 415 bp, Arabidopsis thaliana columbia
aagaaacaatggcagctatgaagctcctactctctcaagctcgccgccaaggtctaagggaggccttttcgtctccatttcaacgaatcccaagactcttctcttcatcttcatcttcatcttcatcttcatcttcatcatccgattcgaatccatctcccgattcaaacgaatctcgcaaaaaggctgttacaatcgagccagtatcgtacgcggccaaacccaaggatcagaaatctgaaccgaaaaatgttgaatcgacggagaaccttcagtctccagaatcagcgaactggactcgtgaagaaatccgatatgtgaaagactctccttcgatcaatccggtttcttacgctcagcgtgtggctccacttccggaggatcgtgtcgccggtgagaatgaaggagatagaac

SEQ ID NO: 107503 - DNA, 410 bp, Arabidopsis thaliana columbia
gttgtagtatatactggagactagtgtgtacccactcgagccagaggttctcagggagcttaggaacattactcataacgagccctcaagctggtatggctactgcaccagacgctggccagttgatggggatgctgctgaatctggtaaatgcaagaaagactatcgaggttggggttttcactggatactctcttctcctcactgctcttacgctaccagaagatggcaaggttatcgccattgacatgaatagagactcgtatgaaataggattgccggttataaagaaagctggtgttgaacacaaaattgatttcaaagagtctgaagctcttccagccctcgacgagcttttaaacaataaagtgaatgagggtggattcgacttcgcatttgtggatgcagac

SEQ ID NO: 107504 - DNA, 432 bp, Arabidopsis thaliana columbia
atggagaaagcattgtaagaaatcttaggggttctatttttagagttatttacgcacacaaggtgtgtgatgaattgacggtgagagagaaatcaagaaacgactctcccaacatgtcttacgcgatgtttgaagaagcctaataggaaatgtgactagactttatagaaggtcagatcccttgttcatcttggtattttttgtttaatggaagttttaaagattgaggaaggggacaaatatgttaaaatagttgaagataagaagaaactttttgcaaatttgagtcaagtcttgacgagaatttagtcttattaatttttttttgttcggttttgtagtgaggattaaggttcacggaggtcggtgttgattatgtgtcattgagaatgacatacctaatattgtagtcttcctttttaacaccactta

SEQ ID NO: 107505 - DNA, 425 bp, Arabidopsis thaliana columbia
ggatagtgttagttccggttccagcacaaagacatttaactccaatgatgcagcttggcacagccctaaacatgaagggcttctgtattactgttgttgaaggacagttcaataaagtaagctcatctcaaaactttcctggttttcaatttgtaaccataccagatacagagagcttgccagagtctgtgctcgagagactcggaccggtcgagtttttattcgagatcaacaaaaccagtgaggcaagcttcaaggactgtataaggcagtcgttgctgcaacaaggcaatgatatagcatgtatcatctacgacgagtatatgtacttctgtggagctgcagctaaggagttcaacctttctagtgtaatattcagcacacaaagtgctacttaataagttttccgttgcgttttaagaaaa

SEQ ID NO: 107506 - DNA, 252 bp, Arabidopsis thaliana columbia
gtgatggccaaagcacttcaagatggacggctattttacgtcccattgagtacagcgtgttagaaacttattcttggtcaggaggttgatttgcatgatattgtattatttgacgctgaacttggcaagaccttgcaagagctgcgtgttgttgttgcccgcaagcactatctggagggagtaggtggtgtcaattattatttcgatttttgatttattgtaactttttttcttctttaatttttcattttt

SEQ ID NO: 107507 - DNA, 416 bp, Arabidopsis thaliana columbia
  unsure (1)..(416): unsure at all n locations
cgacaatggcggaaactatcaagagcgtatctccattattcgaccccgattcaccntattatctcgctccagatattaatcaaccgtgggatttctctatcgaaaaactcancgaagccgaagacaactacgtcatctggaaatttcgatttcgctcttttctcgaactcactaacaaaatcggtttcattgacagtactctcccgcagccagaaccttcctcgccgctctatcatccatggaaacgatgcgacacaatagttaagtattggctgatgaatttgatgagcgaagagcttttaaagtctgtgatgtacgcgaatactgctcattaagctttggaaaaacttaaacttatattcgtttctttgcgtttatttgtagatctaccaacttctttttatgctttttacttt

SEQ ID NO: 107508 - DNA, 392 bp, Arabidopsis thaliana columbia
  unsure (1)..(392): unsure at all n locations
cgctcnnaatccagcncannaatccgtcagaaatcccgcaggannagatgagggaccatnncatggttagggaagggcttcctcaatgtgacnccttaagganntcttgttgctatagttcaattcctgaaagctttattggcagggagaattggagaaaggcaacctcaagggcnnatctacccnntcttcagnnnatgttttcatcccgtaaaagtcaaagaaatcctcaaaggcccctannaattcgaccctttggcaagggctcaaatggattgttcaccggaagattacctttcagcagaaagaattgttgtgtgttaaaggtaagacaaggccccggctgatgaagatggcttgttgaggaacctacntgaaatcatctggagctt

SEQ ID NO: 107509 - DNA, 420 bp, Arabidopsis thaliana columbia
  unsure (1)..(420): unsure at all n locations
caaagttgaagaagaagaagaagctcgtgctctctcactttcttttcctacggngttttttttccccctgagctgcaacattcttcgtcggaaatcttcccggagaaaattcttactagctctacataactgaaaatggaggtcttccgcaactaaaatctgttcaacggagaaaagggttgtggaaagatgtacaaagcactgatttttacaggcttgttggtgtcggcaggagcttcggtgagatctctagacccgcctttaaacgacgacgttttagggctcattggcttcaaaggcgatttacgagatccagagcaaaagctagcttcttggaacgaagatgactacactccttgtaggtggaacggagtcaaatgccatccgaggacgaatcgagtcactgagttaaatctagat

SEQ ID NO: 107510 - DNA, 259 bp, Arabidopsis thaliana columbia
atttgattcgcatgcttgcttttctttttttttttatcattaaatttcaatctactgttacactcttatgtttgatctcatgacctttttacgacattactaacgttcaaatattctttcacaaactttacaaaattcttccattcttactatatctcatctatactccaacgtaccataattttcatcatcaacaaatatttaccaacttttaactatttattcctctttttaatttattctccatattcacaaaacc

SEQ ID NO: 107511 - DNA, 344 bp, Arabidopsis thaliana columbia
cccacgcgtcccggaaagagcttaaccttctcttccctccttccatttccactctatgttcagctgcccaagctaagcgcggatctctatccagctttggtatgcagcgtctgacagttctggattttgttttttttttctttccttatttagggtgggagcttgatgtctaaattgttactgtcagtggtttaattagaaaagagatgagttacacgagcactgacagtgaccataatgagtcaccagctgctgatgataatggaagtgactgcagaagtagatgggatggtcatgctctcaagaaaggcccttggagttcagctgaagatgatattcttatt

SEQ ID NO: 107512 - DNA, 436 bp, Arabidopsis thaliana columbia
  unsure (1)..(436): unsure at all n locations
gagaagtgagagaaagacgaanaagatgaagagcatattgctttttctgtccccagccggatgtttaccgagtccgtaaccgaggttgaacaanttagtggatggcttcatcgtcgtctagaactaggagtcgttctcctttctcgcaccgtagacctccgagtccttactcttcggcttcgtctacttcttcgtctcttataaataatcgtctattacctcgttcttctttcacacctacttctaccgtttacaattccggcggtgtaaccgggtcccgatctatgtcgattactcgcaccatttccgattccggtcccatcggcggctccgggacttatggagcccaatcgtacccatcggaggggctcattggcgagtctgggcagacgattacctctgagcgagatagcatctccctcaccgttcgatttcg

SEQ ID NO: 107513 - DNA, 441 bp, Arabidopsis thaliana columbia
  unsure (1)..(441): unsure at all n locations
cacaaacttggtcttgaagaaaccaataccaaaaccccaaaccgcagcgtttaatcaagaatggactatggcttctactaccttacgttccttctacttcaacccaattcctcgaccgaactttctcaacttcatcttcctcttcgagacctaaacttcaatctctatctttttcctcaacacttagaaacaagaaactagtagtcccctgctatgtttcttcctccgtcaacaaaaaatcttccgtctcgtcttctctccaatctccgacattcaaaccaccgtcttggaagaaactatgtaacgatgtcaccaacttgatccccaaaacgacgaatcagaatccaaaattaaacccggtgcagagaaccgccgctatggttttagacgcggtggaaaacgccatgatctcacacgagcgccgncgtcatccccatccta

SEQ ID NO: 107514 - DNA, 144 bp, Arabidopsis thaliana columbia
accgaaaaacagatgccaaaagtggtggtggtgtcctactagggattttcaaaaagggtaagagtggtaaccggagatgaggaggaagagcgcttgggaagaaaagatggcccattgcggggtaataaggggtcaaatcttcat

SEQ ID NO: 107515 - DNA, 438 bp, Arabidopsis thaliana columbia
agtgcctcctacgctattcttcattttctccggtgaccaatccttttctttttcttctcctgtgccgtccttaaatagttatgtgggagcaggcattgttccttgatcaccaagaaatcgctttgacccctatctccttcttctgcaactctttttcagttttcctcaacacaatttctatgcctccgacctactttcctctccgttgggagagcaccggcgatcagtggtggtacgctactcccattgattatgctgccgccaacagccagtacgacctagtccgtgagcttctccgaatcgactccaataacctcattaagctcacttccctccgcagaattcgccgcctcgaaaccgtctgggacgacgattcccagttccacgacgtcgccgcttgcagatcacgcgtcgccagaaaacttctcgccgcctgcg

SEQ ID NO: 107516 - DNA, 224 bp, Arabidopsis thaliana columbia
cttccgcctatttttatcgacaaagataagagaactcagaagcttttactcttaaaatggcaactttctctgagttccaaaactaccctcagtcggttcttgatcctcttcttttccctacacctcactcctccattaatctcactaggttcatcgatcaaaaccatctctatccactaccaaacatttccacagttgaagacatttcctttcttgaatataat

SEQ ID NO: 107517 - DNA, 419 bp, Arabidopsis thaliana columbia
  unsure (1)..(419): unsure at all n locations
ggaatacccacaggaccgacactgaagacctggatgcttgttcttgacgtatcattccctgacacatcttttggaggtaaacgaaaactcttttatttatcaaaacaacaagttgtaggtttacactgttccacaacttacactatatctaatcagaatacttgagtggatccaaaatgttccaattgattagagtgacatgtggctagagtagcatcatttgactatcaatcacaatgacaacatanataggtgtgttcattagaagaaatagagactgttggtgcgaattcaaatngtttgtaggataatagtttggtagatagaactatngacaacgtttggcttgtgtaggtgaaggcagtgaacaatcaatgagccttacgcaaccaagggagagcgagaagatgtcattgcct

SEQ ID NO: 107518 - DNA, 345 bp, Arabidopsis thaliana columbia
ctacaatctcacacatcatcaaatcacaccatttttttctactatcttatccacaactttcttgggcaaattattcaagagccggcgcgaactttttaatttatataacacaaatcctaattacttcacaaataatatatctaccaccttctctaacaagaatacttcacacaataacacctatacaatatctttatccaacatttattccacattcactccacatcataacatatccatccccactacctatatctcaaaatactttacaaaaaactaatactctacatactataaactttataatcatttcaatatcctctcttaattaaaccacttgtccaa

SEQ ID NO: 107519 - DNA, 194 bp, Arabidopsis thaliana columbia
gacccttccgaacaaatcttattcaaaatcccttacctacttacttttattcgggtataaccaaaaaacaacagaggtgtgtacaacaaaaatggtgggctggcaaccactgattattataaacaccttctctttccatatttttttcaaacctcctttttatcttgctatcatcgacaccatacttgttgcat

SEQ ID NO: 107520 - DNA, 417 bp, Arabidopsis thaliana columbia
  unsure (1)..(417): unsure at all n locations
aaccgaaaagaacataagaaacacaacagacttgtattaattttggcgatcaataataacggagtgggtctactgcgcattggtggtgttaccgccnatagtctgtggtaagaaacccgataagaaggtcacaatttcatcctctgggaggaaggaagatgacctttgaaccacctatggacgctcaaccaccagttaacttgaaacactacgccccttacatgaatatacagcctgaacagaatcaaaaggcacttttctattggctcttcgaaactcaacaaaactcttatagacgaactatcctgctttggctcaatgtacgacccagtagctcataaatagcctatagagcttcacaataaactatgccctttgttgttaagacaacggtggcacacttaacgacaatcattt

SEQ ID NO: 107521 - DNA, 486 bp, Arabidopsis thaliana columbia
  unsure (1)..(486): unsure at all n locations
cgggtgcgccgccacgcgtnccgcggacgcgatgtgtcaaaacacaattcgtagcaaattatttatctcaactcaattgtgttatcaaccgggaggtagattatctaaacacatatggcgtgttcgcttttgtaggttcattcacactgctattgttcttgacagttgttcatctgttgcatcacgtggatgcaattaataacatgntggcacatgtggcatagtagcttgagtccatgtctaggctacctatcaaagggtggggtggtgccacctccgtgctgtgcatgagtcaaaaagttgaacgttatggcttaaaccacacccgaccgtcaacaagcattcatatgcttacagtccgctgcaaaaggggttaatccaagtctagcctctggccttcctggaaagtgcggtgttagcatcccctatcccatcttcacgagcaccaactgcgccaccatcaagtgaagtggggaataacgacat

SEQ ID NO: 107522 - DNA, 444 bp, Arabidopsis thaliana columbia
cttcttcttcttcctctctgtatttttctcattctcttcgatttgtttgcttgctagtgactagtgagtgagagagtatggagagaagtactccggtgagaaagccacacacatcgaccgcagatctacttacttggtcggaagttccaccgccggattctccttcctccgcttctcgctccgccgttcgttcccaccaggtacttgcaccgtttcgaaattcatgaaatttcactttgattttgatcaatctggtaatagtatttgtttcaattttggtttaatgtgtttgtagccatcggatgggattagcaaagtggtgtttggtggtcaagtcaccgatgaagaagttgagagcttgaaccgcaggaagccttgctcagaacataaaatgaaggagataactggcagtgggatcttttctcgtaacgaaaaagatgatgc

SEQ ID NO: 107523 - DNA, 297 bp, Arabidopsis thaliana columbia
gcgacggccgaatccgggtcgacccacctcggacctgcaaaacacagctaaacaaaactcaactaattggtataccaggggagacacactggtgtctttagtttaatgcttgttgacaggtatcgtgatagggtgcacaatacttgccaggcagtgctggtcatttaggtccttaagggggggggcactcggctggcagataaaagtgacggttggtaaacaaccccgcacagatcaatctacagtcgtgaaagggtatcagctgcttggcttctgaaggcggttgatcctatcatt

SEQ ID NO: 107524 - DNA, 139 bp, Arabidopsis thaliana columbia
cgacccacgcgtcggaatctatccctcacggaggagctatactaaacattaggggggacaaagcccgggtggtcttaatcttaacatacttacacaccagtcctaagaactcctataccacaagcttgtgagaaaagct

SEQ ID NO: 107525 - DNA, 282 bp, Arabidopsis thaliana columbia
  unsure (1)..(282): unsure at all n locations
gggcgacccacgcgtccaangactcttaatcccaacatacacttagaattttctattatcctaatgaacatatcaccgacgggataatataaaacactggggcggctcctcttaaaatctctacatcctttacttttactactaccatctacctaaaaataaactcagccttactacctaacacattcttctcttgcttaaatccttctatacaatacctatctaaatccttaactctcaactcagcttgctcataatcttacaatacatccaactcaattt

SEQ ID NO: 107526 - DNA, 136 bp, Arabidopsis thaliana columbia
gaccaatgctcttcaatcaaccctacgttcttacttagaatgggcaagaaccgaacatcaagcgggtgtgtgctaataaatgtggggctgagaaacacactgagtctcaagcacaccttgactattcatatattca

SEQ ID NO: 107527 - DNA, 425 bp, Arabidopsis thaliana columbia
ggaatatctgtgtactgttcgatgtggtgttttttttagagatgaagaagtgcttcagggccgtcttacatagtcagctgggtggaaaccaataaacgatttgatcgagaggaaggttgcagataatggtaatggacggacgagcgaagatgattgggttgaagtgaaagctagtgatgattctctgttgaataatgaaaaacaggatttttatgaagctactgcggagatcaatgatgcggaaccttgcacttcgattacagttcgtctcctctcccttcaggataaaagatgtgcacttgtagatgaagtttatgtatttgctgatcctgttgatccaagtgagtcagagaatgaagaagcaactggaacaggaaattcatctagtagttcgttgatggctatgtttatgcctgcttttttgc

SEQ ID NO: 107528 - DNA, 303 bp, Arabidopsis thaliana columbia
gcgcggccgaacccggggacccacgcgtcgaatttcgccaattgatttatttttttttggtgtcactatttgtgggttaaaagaaaatattgggtaggtattgtgatcaggaagagtacaagaagaagagggataagcttggttggtaggggtggtatgactgtttgtggtggttcttacatgggcttcgctgtgcttttcaacacataggagcatgactctccggttggccttgactgatttgtttttggctaactaaacaacattctggtcgttatattattatctagcttttactgatct

SEQ ID NO: 107529 - DNA, 320 bp, Arabidopsis thaliana columbia
ctgacacctatgccaaacacaagcacacaactcatatttacctaaacatatatcacccaggggagaagaaccaacacattggggttgcgttttagcttcttcacatccttccacactacagtgtttattattgcatgattcactacattaataacatctttcacatcgtcatttagcatcgaatccatctctatgctacctatcaaaggggtgttctactccactctacgagttctcaatactcaaaaagatgatacttatgtatcaaaccatacacaagctccaacaatcatacatatgctcacactcatatgcaaaac

SEQ ID NO: 107530 - DNA, 375 bp, Arabidopsis thaliana columbia
gtccgttccaacgaaccaccgcgaaaaaccgaccaaccatcgtcttcatcggcatcggcatcggcatcgccggcattgtttttgtcactgcgcgtggaaatcatttcgatgatcttagcccgcgtcccaaaacgatattacccaatcctctgctccgtctccaagaacatgcggagtcttgttcgctcgcctgaaattcacaaggctcgatctttactcggaaaagattatctctatatcggcttcatcgacgaaaattatcgccccgtatacgactactggtacactctccggagaatcgagaacagtacgaccgagaatctcttcgaatccattgagttcccttatccttccgagcctaatcgattttccatg

SEQ ID NO: 107531 - DNA, 322 bp, Arabidopsis thaliana columbia
atgctccacaatcaatcctcggattttaatttttatttgtcaaaatcagatcctcagagagggtgtttctaatgggattggcgtgaaaacaacttaatttgaatcaaaacttgattaacgaaatattcaagaagcttaatcttctttgagagaaagatcatctctcaatttctacgaagcaagagcacttattggaatattgcaataccaaagagggaatttataattctcacttctagtctttgaaagtatcgacctttaaacaactatccaaccactacaggtttacatgccttttgagaaaccggctactaataaaaac

SEQ ID NO: 107532 - DNA, 295 bp, Arabidopsis thaliana columbia
atcaattccttcatattcacaaagctcttcattactttatcggtgatctcatcatcttctgcgggtttagcctacaggaggtgggggtgataacaactaattccaaaacatacctaaagagaggaaaaatcggtccgcttcttttgataagtataaacgatcatcactgagttgtgaggaaaccctagctctgaatccgagtgagaaacaccttaaagaatgtttagaggctccacttcctgtctgtatagaacatgctcacaatgcaattattcacatttgatcttcttatgaa

SEQ ID NO: 107533 - DNA, 179 bp, Arabidopsis thaliana columbia
gaaacaatgctactcaatcaatcctcggattttacttatactgtctaatattagatcaccagacgggtgtatgctcattagattggggtgaaaacaactcaacttgtatcaaaccttcatcaatgaaatattcatgaacatcaatcttctttgagagaacgattatcactcaatttcta

SEQ ID NO: 107534 - DNA, 265 bp, Arabidopsis thaliana columbia
  unsure (1)..(265): unsure at all n locations
aggaaggnccgacccaacccacccatcctctgttccaaccgccaaaccaaattctaccttttttttttcaatacttcatacattatggggggactataatctaactccggggggttacaattcaacccctaatctacatacaccctaccgtcttaattgttctataattcttcccattaacaatatatccttcctagttattatccaaaaatctctttctatgctactcttttcttctaattctacttctatttcaccaattatc

SEQ ID NO: 107535 - DNA, 350 bp, Arabidopsis thaliana columbia
ctcacgccttgtccaaacacacacataaaatacatttctcacaccattgtcaaacactccctgagagaatccacacacagtgggtggtgcttttaggcactaaaactatctccacctgacagattcaatctctgcattacacaaatcatatctaacagttggcacaatttcacggtctcttgtcccatgtgataatacacactataaaatgcttgaaagggatcacactaccagatgatctgcattgactacaaaaactcaatgatctagactctaactgctcattctcaatcaactttaaactaacaggtcgctactataggcactgatttaagtatagcctacgatct

SEQ ID NO: 107536 - DNA, 177 bp, Arabidopsis thaliana columbia
aaaagttcaaggaagttgctgagtctgaagaatttttgttgagagcattgttgccgttgacgctgttggccttcttgagaaattgactgtagaagagacaaaaaccgaggatataaccgaagcgaaagctgttgtgacagtagatactgtaatgaaagcagacgagatgaatgagag

SEQ ID NO: 107537 - DNA, 365 bp, Arabidopsis thaliana columbia
  unsure (1)..(365): unsure at all n locations
ntaaaaatgaaaagcctttctttcaacttttttattttcctctctctatcaaccctcgggaccatcttcaacacacggaagggtaatgttaatcacatttactcgtttgttacaaacccacctctaaactactaatcttggtctgtcaaaaaccacttccttcttcaccacactctatattttagctacactaatggaactaactctcttctcgatctcaacacggctttttacactcttgtaatacaaaaaatcccttctaaacagtgtactattgacattctgagaactttcttgatctatatagtcccttttactttataattggctatcaagataacttcaagaagcgtcaaaagcttaat

SEQ ID NO: 107538 - DNA, 265 bp, Arabidopsis thaliana columbia
  unsure (1)..(265): unsure at all n locations
aagacaaccatatctacatgacgggncctgcagattctgttttctatggatcagcgctgctctaatgggccttcacaggcgaggacttctcctctctctgttgttgttcttttggggtctgtgtgttctaattcaaacgtgtgaagctcttacctgtcctgctagattgtgtttcatggattttgtttatgtacttttattgttttcagagtatccaaaccttttgatttgttgctgcatctatgttcataatttaaatctaaaa

SEQ ID NO: 107539 - DNA, 444 bp, Arabidopsis thaliana columbia
attgttcattttataggtagtttttttctcataatccgtccattttattgatattttaccttgatatatatttttgttatagaggtttaattatatatttcttttttatatttcaggttttattatctatagtaattaaaatggatggatcatcggaaaaaactaccaataaattagtatcgattctaccaaattataggattggtaagactcttggacatggatcctttgcgaaagtgaaattagcactgcatgtagctactggtcacaaagttgctatcaaaattcttaatcgctctaagattaagaacatgggtattgagatcaaagtacaaagggagatcaaaattctcagatttttgatgcatcctcatatcatccgtcaatatgaagttatagagacgccaaatgacatttatgttgtgatggaatatgttaagtctg

SEQ ID NO: 107540 - DNA, 457 bp, Arabidopsis thaliana columbia
aataaattcgttttacgtactacacaaatcattttattatggtgatggcaaagaaccttaccagcgtctacgtagtgtttgtcgcgcgtctgatgatggtggtatcgctattgctagccattgaaggacgaccggtcaaggatagttcgagatcgttgacccaaatgagagattcatctatgttcaatggaagcgttataatgtcctcatttaaaccagttgagtcttctgtaaaagatttatcgtggttagccacagtgaaacagtccgggccaagcccaggggttggacatcatcgagccaaggggtacaaaatgtttggacgagccaatgattctggtcctagtcctggtgttggacactagatataacaaattaatctcatgaactgaaattatagataatgcagatacaactttaccacatgttcaatagcctctaagatgtaatcttcttt

SEQ ID NO: 107541 - DNA, 416 bp, Arabidopsis thaliana columbia
cgggccgacccacgcgtacgctatatataacttattcagatatggacacttttgtgctgaactcaacaatcaaattgcgctggggctatatcggtaaaatggctcctaacaatcacaactgtaaactccattacaacacctgtcacactcgcgttctcaccattcctttctccgtctcatattcctgttagttatacgctcttgatctcattgtcaatttgcaattttacaaaaaaaataaccaaatccattttctgtaaagagaaattaatgccacacgtgaggtgcgttttaacacaattagccccaattaaactcacaatttgctggggcgttgacggatctataaccgttaccatccgatgtcactcttcccttgatgaactcgaccctttattttcaattacctccgatca

SEQ ID NO: 107542 - DNA, 452 bp, Arabidopsis thaliana columbia
ctctactcccaacaaaaccagtttactcctcttaagaatcatgtgtaattcaaaaccatcttctgcttcatcttccttattatcttgtaaagacaaaacccatatctcaaaactcgaaacctgtgatacagataatcctcattattctgaattcagggatactgattctctagaccttaaaagatggccaagttttctggagggcttagaggaagtgaaggcgatcggaaaaatctctgggccgacggcgatgaccgggcttcttatgtactcaagagcgatgatatcgatgctgttcttaggctacctcggtgagcttgagttagccggaggatctctctccataggctttgccaatatcaccggctactccgtcatctccggtttgtccatggggatggaaccaatctgtggccaagcatacggagctaaacaaatgaagcttttaggac

SEQ ID NO: 107543 - DNA, 440 bp, Arabidopsis thaliana columbia
agaaagaagatgaaagtccatattggaggatatgtgttgatacttgccttgacggtttctgttatattacagcagcctgagttggtcactggacaagctagagttcctgctatgtttgtacttggagactcattggtcgatgctggtaacaacaactttctacaaactgtagctcgagccaatttcctcccttatggcatcgacatgaactaccagcctactggcagatttagcaacggcctgactttcattgatctgctagctcggttgttagaaattccatcaccccctcccttcgcggatccaaccacatcaggcaatagaatcctccaaggagttaactacgcgtctgcagctgctggcattcttgatgtattaaggctacaactatggtggaagattcagcctgaaccagcaaatggtgaatctagagacgacac

SEQ ID NO: 107544 - DNA, 414 bp, Arabidopsis thaliana columbia
  unsure (1)..(414): unsure at all n locations
ggtgttttcagatcgagtgtcgagtggtgagagtagaggaacagcgagtgcaagtgaaacggcgtcgtattccggtagcgggaattgtgggccggaggtgtcgcatcttggatggggccgatggtatactctgagagagcttgaagcggccacgaatgggctttgtgaagagaatgtaatcggagaaggtggttacgggattgtgtatcgtggcattttaactgatggaaccaaagtcgccgtcaagaacttgcttaacaataggggtcaagcagagaaggaattcaaagtagaagtggaagtcattgggcgagtacgacacangaatcttgttaggcttttagggtattgcgtggaaagtgcatacaggatgctcgtgtatgactttgtcgacaatggtaatttggagcaatg

SEQ ID NO: 107545 - DNA, 431 bp, Arabidopsis thaliana columbia
tctgcttttatcttgaccgtttctatgttgctcggagaggtcttccaacactgaatgatgttggcttgacatcctttcacgacctagtttatcaagagatacagtccgaggccaaagatgtgctactagcacttattcataaagaacgtgaaggcgaacagattgatagaacactagtgaaaaacgtaatagatgtctattgtgggaatggggttggacagatggtaatatacgaagaggattttgaaagcttcttgcttcaagatactgcatcttactattctcgcaaggcctcaaggtggagccaggaggattcttgtcctgattacatgctaaaggctgaagagtgtcttaaattggagaaggaaagagtcactaactaccttcattctaccactgagcccaaactagttgagaaagtacaaaatgaa

SEQ ID NO: 107546 - DNA, 281 bp, Arabidopsis thaliana columbia
ttgttcaactttaaagggggggatcactataggttactcaaatgacagaaaaaggaagaggaaggggtcggccatcgcacctatggttaggaacttcaagcacaattaaaccatgaactcaggatcacagtagtacaggcatgcacacaagtgacgggacaaaaaaaacagaaacatgtcagactgcacacatacaaacttactcgtggaatctggctgaccatgatgaccatagcacgtaaacgattcccagataagttttgttggcatcatatcttgat

SEQ ID NO: 107547 - DNA, 446 bp, Arabidopsis thaliana columbia
gaatgactcgtttacccttacctttccttttcttcttcctcacgtcaatacccttatctgtcttttcgcagttcaacgaccagtcaacgcttctgaacctgaaacgcgatctcggagatccaccgtctctccggctgtggaacaacacatcttcaccgtgcaactggtcggagatcacttgcaccgccggaaatgtcaccgggatcaatttcaagaaccagaacttcactgggacagttccaacgacgatatgcgatttgtcgaatctcaatttccttgacttatcgtttaattacttcgccggcgagtttccgacggttctttacaattgcacgaagcttcaatatctcgatctctctcagaaccttctcaacggctcacttcccgtcgacatcgaccgtctctcaccggaactcgactatctcgacttagctgctaacggattc

SEQ ID NO: 107548 - DNA, 317 bp, Arabidopsis thaliana columbia
  unsure (1)..(317): unsure at all n locations
acgacaagaggnaccctttttttttttatatttttatttataagaaagtgtggaaaggccggttggggtgacttgttgtatggggagggaatttgatattaatgggatctctttgtaaaccaaattaggggtctatattccaaaaactactaccattggccttggagctcagctttctgcaactggcacaacttacagcaccagcagtgtcgttagctatgctaatggttttaacaatcccaaaggtccaggggccaattcattccaaagtgccgacacatttaccatcttacatatcactgcctaaggtcaattgg

SEQ ID NO: 107549 - DNA, 269 bp, Arabidopsis thaliana columbia
acgccttttcagagagagaaacagtatcactaatctattacaagttacacagctcttacgatgtgaagcgttaagatactaaaaagaaagtgcataacacctttattctgtaaatgacattcgtaaatcttctagtgttgtgtgatgctatagaaaacagatttataacataagagacattctcagtataaaataacacattggtttggtaaaaaaaaaaaaaataaaaattttaaaaataccaaaagaacaaagggccaattaattct

SEQ ID NO: 107550 - DNA, 452 bp, Arabidopsis thaliana columbia
gaagaatctgccccaaggtaccgatttctcttcttcctctgattttccgatttcttctctgtttataatcgaatccgaaattttaggttttttttccgtgggaaaatctcgagagaatatgttcggagagaaagaaaaaacacttcgatttggttttaaatcaattggataaggataattaatttaggtttatggctctgattcccgataaaatcgcatgatgaattttttttacaaaaagatcgagaaactgcgttgactttgggtgctaattttgagaatttagggtttgggtttgtttaaaaattagtgtttgattcgtttaattatttgtatgaattgtaaagttttaattttttttactgggttccatggattggtctagattttgcttttttttatttattgtagtgttggttggagaattttgattttttttaatgatgaattgg

SEQ ID NO: 107551 - DNA, 173 bp, Arabidopsis thaliana columbia
gcccctaagggttgtggtttcttttggaacacgagcacggtggtgagaaaacagcaaaagctgatggcactgaagcacctgccataaaatcttcttatacaaaagcagaggatgccattaatcatcttggcgctgattcggttcttggccaaactgatcctcagaaaatgaaa

SEQ ID NO: 107552 - DNA, 379 bp, Arabidopsis thaliana columbia
ctgaagcgtagctctagatcccgtatcttgaacaatcatctctttcttggttgccaagctgtgttaacgcaggagcttcaaggtatggtcgtcgctgtccctgaagctaagccttgggatattccgtaagtttttgttcttgaggatctcataaatgttgggttcgttctcaatttggctaataaaattcgctttggaaatttcggtactctgaagataactccatttgaatctgtaattttcgtttgcttacatttaaattttgtaatgaggtaaagaactctgcttgtttaaacgattccctgcttcaagtatgggtgaatgttgttttcttggcacaaaaattagctttttatttcccccaaataacccaaaaaga

SEQ ID NO: 107553 - DNA, 426 bp, Arabidopsis thaliana columbia
aaaaaggagaccaagtgatcatatggaggaagatcttgttttagcaattaagataatagtatttggagtcatctcatggggtgtggccttcattctcacccggagaatcttctcaagctactcattcagcttcagcaaccgtcttctctccacggctcacgcgactatcgctgtcactttagcaacactctctgttcaagatttgtcttgccctgtttgtccccttgcttctaagccatctcataaacagatggacgtgatggcgttttcgttgtcgtacatgatctacgatctaatatgttgtcatttcgatcaagtgtttagcattgataacgcggttcatcatttcgttagcattcttggttttatagctggacttgcataccaaaagtctggatctgagatcgtggcttcactgtgggtagc

SEQ ID NO: 107554 - DNA, 131 bp, Arabidopsis thaliana columbia
gattccaaacaagagactagaaacatccgccaccagctcggtttattgatggagcggatctaaagaagtggtctttctacagagcatttatcggagagtgcgcagcctctctcctcttattatacatcacc

SEQ ID NO: 107555 - DNA, 331 bp, Arabidopsis thaliana columbia
ggaagctgtgatctggagagggccaccttataacgtccttatcaagcagttcttaaaagacgggtactgtggagagatggatggcctcatttttgatgccccacctagaacctcagatgaacacatattcatcgcacagtgccttctacccacggtgatcgacggagccatcatttgcacgacaccgcaagaagtctgcttgagtgatgtcagaaaagaagtgagctcttgcaggaatgtcggagtgcccgtgcttggagtagtaaagaacatgagtggcttatctcagccgtagtaggatgtcaagttcatgaagctggcgacagagacc

SEQ ID NO: 107556 - DNA, 216 bp, Arabidopsis thaliana columbia
  unsure (1)..(216): unsure at all n locations
cacacttgaaaaaaaaacatcttaattataatancttctttgagagacataaanatnaaggctagtaagttttctatactgtggaagaattacacttctctctctcaatgctggtgcaatttagcaactctagaaaaaatccaaatagaccctattaagcgtctctcttcccaaaactaccaaaagcgttggaactgtatttacaaatactgttta

SEQ ID NO: 107557 - DNA, 314 bp, Arabidopsis thaliana columbia
cacgcgtcgttaaactgtgcaaagaggtttgtttgggcagaccatagcgtggtcatttaggtagggggtactgactcaacgatgaacttctaaactcattgtggcccggctggtcactggcctgccaaaatcggcccttacgtttttaactgcaacggaaaacgcttgtacatgaatgtcctccatctacagtttacagaacatcactgtggttctttttttttcacaccctactctgccgttggctgggtggaaacaaaagtggtaagtgatttaagattaccaaaggttacacaccaaaagcacatcttgtg

SEQ ID NO: 107558 - DNA, 435 bp, Arabidopsis thaliana columbia
gttgatcagaagtttcaagtcacagagaattcattttcagcaatagctgctgctgagcagacgagtgagcaatgctggttgtgctataatgaaaaaccggtatgttttaaccggtgccacgtgggttacgggtgcgtttaacagagtgagtaaagctgctgaagaagttggacaaaaggcgaaagagaaagttggtttggctgaggaagaagaagaagagaagaagaaagtggttgatgaagttgctatagttcatctgactgaatcaccaaaggctttagaccaatcagaacaagattcaaaactccctgaatcaaaatcacagccacacatggagcttaacgcaagtgttgtttgagctcaaccttgagatacgtataaagaaacttctccaaacgttttttggaacaatgaatctgactctttagacaaggc

SEQ ID NO: 107559 - DNA, 447 bp, Arabidopsis thaliana columbia
tgtttcgatatcttcaagtctagtttttttttttttcaatcgagtttttgatttagatcacaaatcgacagatctgtttaggcgtttttctgggtatcgattcttttcaacatccatgccttaatttcaagttttccccaattttcttaaccctaatatttatgtgttcatcagatctgcaaatttatttagggcttttgttcctcgtgctgaaagttaatcgattgtttgaatttggactcttgatttcatgtttttagccgcggattgaaaaatctagggttaggttttcgaatttggggttttttttttatttttaatatctgtttaaagtttgactttttgactaaaaattaaaaaattacactaccctagattgctaaatcaattcaggttgttaaaataaatgggatttaagcgaccttatgatgctgaaaagatgcaaaa

SEQ ID NO: 107560 - DNA, 230 bp, Arabidopsis thaliana columbia
  unsure (1)..(230): unsure at all n locations
gaaaagatatcttcaagnccaatcaagttttttttatataaaaaatagacagagagcacggatttccttatacaaagagaagattgttccagccatacgtgttctcatacacgcatggctgtagtccatgtggagctccgacttctcaagccctaagagtgatggtggatccaaagctctgcactcattaccctatagatatggcgatcctacagatgatgatgtcgttt

SEQ ID NO: 107561 - DNA, 112 bp, Arabidopsis thaliana columbia
cgactgcgaggaagcatacaggggcctcgaaccttttttctttcgagaaccaatcatatttgagagttgtgtcgcgctgtcttaacgaccgaacaattccctccgcacgact

SEQ ID NO: 107562 - DNA, 393 bp, Arabidopsis thaliana columbia
ttgaaaagaatcagggctgtatgcacatgacttgttctctgtcttgtaaatatgaattttgttggctatgtcttggtgcatggatggatcacggtgaaagaactggtggtttttatgcttgtaaccgttatgaggtggccaagcaagaaggacagtatgatgagacagagaggaggagagagatggccaaaaattcgctagagagatacacacactattatgaacgctgggcaagcaatcaaacgtcgaggcaaaaggctatggctgatctgcagcaagcgcagatgcagaatctagagaagcttagtgataaacagtgcacaccaaagtctcagctcaaattcattttagaagcttagcttcagatcatcgaatgtaggcgagtcttgaaat

SEQ ID NO: 107563 - DNA, 275 bp, Arabidopsis thaliana columbia
aatttaaaggggtgcggttaattggacaacacaaggcgaggacaaaaaaactgtcttctggaagcaaagagagagtatgagcgatgtcagagaagattggatgtggcttcgttggatagagacaagtccactggatgtaatacaccaactatctcgcaccgcacgtttttcacataaaccattccgactctaaccgacggactgcagcagtgagcgaaaaacatctgcattggtcggctaccgcagggggaaaatgctaaaatcgtgtctcgaaa

SEQ ID NO: 107564 - DNA, 445 bp, Arabidopsis thaliana columbia
tccgctgtgggggtgatccgtcggttacttaaacggaatctagtttctaaccgcctgtccgaaatggtcagcttaaggccaacctaagttccgtattccccaacccccgccaaaggtggtcattctgcggattcttccatgggattgcgtcgaaaaggagctcatcgacctttgcaaacgattcggcaagatcgtcaataccaagagcaatgtcggcgccaatcgcaatcaagctttcgtcgaatttgctgacttgaatcaagctatatcaatggtttcgtattatgcttcatcttcagagcccgcacagattcgtgggaaaactgtctatattcagtactctaatcgccatgagattgttaacaatcagagtcctggagatgtccctggaaatgtcctcttggttacctttgaaggagtggaatctcacgaagtcagcatcgat

SEQ ID NO: 107565 - DNA, 228 bp, Arabidopsis thaliana columbia
  unsure (1)..(228): unsure at all n locations
ttccatttttttatcatttttaaactcantcattaggagaaggagacttatataaaaaaagagacgaaacatttaaataaaactatctcaagatcctttttgaaacacctcactccttatttatcttatcatattagaaaaaatcatctattacttaataattcttctatcttcctctatcaaataaccatcttcttctttttcattccaacctcaatcattttttaa

SEQ ID NO: 107566 - DNA, 185 bp, Arabidopsis thaliana columbia
  unsure (1)..(185): unsure at all n locations
attagatagaatcaagcgatgatgaatcttttgtctcctttcctcgctctcctnctaggtgcatctcctttgctgcaaagagcgagacctcaatcctatgcccatgatcattcaagtcttcttgaccatgttcacacaccaaacacttatgattctgtttgatgaatataaccatgatttggata

SEQ ID NO: 107567 - DNA, 398 bp, Arabidopsis thaliana columbia
  unsure (1)..(398): unsure at all n locations
gaaagaagctagctagggccaggtattggatgtcattggccgttgacatgtcttccaaacaaccaaccaaagactttttctcctttccagccctctctctatctctcgctgggatattccggaatgcatcctccggcagcaccaaccctgaggaggatttcctgagcagaagagtagttgacgatgaggatcgcactgtggagatgagcagcgagaactcatgacccacgagatccagatcagaggaggatttggagggtgaggatcacgacgatgaggaggaggaagaggaggacggcgcatctggaaacaagggcactaataagagaaagaggaagaagtntcatcgtcacaccaccgatcagatcagacacatggaagcgctattcaaagagaca

SEQ ID NO: 107568 - DNA, 406 bp, Arabidopsis thaliana columbia
ggagctttggccggtggatttaggaacattttgactctcccaccctacagaatgagttcggcatcgtccaaagctgaaaaggaatatatccaaatcgatgattttggtcagtctagcagaaaagatctttacagtaagaaagcaagcaacaccgagacaagaccaagttttatgcctcctcatccatcttctagtgatgaagacgactcagacatgcaacatccaggaagaacagaaacaaaatcagattccttatatagtcattcccgtgtcaaccatgatgactcggaggaagaaaaactcccaacacggtcttcttcaagaattcaagagaggagtcataagccatcaacaggaataagggttcagaagagaacgaacttcaagatgccagtttcagcatcgt

SEQ ID NO: 107569 - DNA, 371 bp, Arabidopsis thaliana columbia
gccgaatttgtttgttgatggtcatctaattttgtttcctttatctgttttatcgagttgtgaaattcagagaaaaaatatatgaagttttgtacgaagtatgaagagttcatgcatggacagaaggagaagaagaatcttcctggagttgggtttaagaaactcaagaagattctcaagagatgcaggagaaatcatgttccttctagaatttcttttactgatgcaatcaaccacaattgttctcgtgaatgcccagtttgtgatgggacttttttcccggagcttctgaaggaaaaggaagatgttgttggatggtttaacgagcatgcttaaaaactttttgagcttcatttagcttctggttttac

SEQ ID NO: 107570 - DNA, 234 bp, Arabidopsis thaliana columbia
ttaatacacattaacaaatctgcttctgtttctcatgtcatcaggctgataaaaagggtcgaggcttgatcaaaaaaaagaaacgaagggctgttacctcctgttttacactatcctcttatattcagattcttactcttcaccaaaaccctaaagaaaataactgttttcttttgagaaatatgaagattcaatctatatgtctgtgaaaaagctctctccactctcatattt

SEQ ID NO: 107571 - DNA, 247 bp, Arabidopsis thaliana columbia
tttgtccatcccaatggtctctttttttttggtttccctaatgttttagacaaacacaattttccataattatttatttattcaatttttatctgtttttgggttacatatatcatcatcattggagactgccatatttgttaatcgggatattaatttaactaatgtctcaaacaagctactaccgatcaccgttcggagacacgacttacaccaaagtgttcgtcggaagattagcgggggaaac

SEQ ID NO: 107572 - DNA, 422 bp, Arabidopsis thaliana columbia
  unsure (1)..(422): unsure at all n locations
accacgcgtncgtttctctgatgggaggaaacagtacgacgtggatgaacacggcggttctggttacttgtataagaaacttgcggcgaaatcgtggtcctgtttcagggattcttaaaggatacgttggtttaagtactgcgattttcacggatctatgtaatgctctgttttcctctgacccagcttcgtttcttgtcctcctctccgtcgtgccttttgccgtttgtcttacggcggttttcttcctccgtgaaatccctccgtctactaccttcgccgaggataacgaagagtctaaatactttgctgtgtttaacatcgttgcggttgttgttgctgtgttcccttcagtcttacgacatcattcggattcaaaacaggagctttctcaatcgcattcgttttcatacttcttatac

SEQ ID NO: 107573 - DNA, 185 bp, Arabidopsis thaliana columbia
ttatagaagaggtagcttcaccaaagtctgagaagaagaagaaaagaagagcatagtcacccgagctgctgttgactcacaagatgaatcagcggcagagaagagtgagaagaaaaaagaaaaaagaaggattatgaagaaggaagaacaaattccgtgaggatgatgaggaatgagatgggttt

SEQ ID NO: 107574 - DNA, 208 bp, Arabidopsis thaliana columbia
accattattcttacctaaaacatactttgtttaacttttcaaactcacaccccaatgtgactacggtctgataaactgtggctctacgtatataaaatctatttatatatgcctttttatccttcaatgaacttaaagcacggtaatcaatctactaatacttttgcaaacactcacacacgctttttaaaacgatttttaagatctc

SEQ ID NO: 107575 - DNA, 335 bp, Arabidopsis thaliana columbia
cgtttttgtgggttataactgataaatccaacagttaaacgaaaacagaaggagaagaagagacagagattgagaagatagctggattcagacacgagcttgaagaggttgggatgattgtgtcgtggtgttcgcagatagaggttttaagtcaccgagccgtaggttgttttgtgactcattgtgggtggagctcgacgctggagagtttggttcttggcgttccggttgtggcgtttccgatgtggtcggatcaaccgacgaacgcgaagctacttggaagaaagttgaaagactggtgtgagggtaagagagaacaaagatggttttgttgg

SEQ ID NO: 107576 - DNA, 310 bp, Arabidopsis thaliana columbia
gcatatgagactactgcaacagtggatactaatcattttgaccactatctggtaagcggttctgagccttctgagtgacggctcacttgtaccctttcctcaaagatctgatggatcgacagaaccggactcctaccattgttgaggtctgatctgtactctaggcttatatcttcacggcgttgtggggtaggagtgatccctacactagccgagtcactggcccgaaaattcttgaatgtggaatcaactgttgtgaagcgagcaaatatttacctgtcttgagggttcaaaaaaacacacaatttaa

SEQ ID NO: 107577 - DNA, 438 bp, Arabidopsis thaliana columbia
  unsure (1)..(438): unsure at all n locations
cgcgtccgcaaaattgctggctcccagattttatttttttacttttagtgatgaagtctttcttcgaatggaaactgatggcgttttgagatgataggaacatctcatatatgctgattttttaaactctttgttcagaggttattacggttagaagaagaggagaagaatctgattgaaacgacacagaggaaattctttgcagaagtactcaatgctgttcgtgaattccagttgcaaattcaggcgtctcatagacggtgtaagcaaagaaatgatggtgtccaggccttgcatggaaagcaaaggcaacgtgccacccgagctgaaaaactaaggatcatggcccttatatctgaggatcaagaggaatacatgaaactagcanaggaaagtaagaacgaaaaactaaccctttttctagaggagacaaacaaa

SEQ ID NO: 107578 - DNA, 275 bp, Arabidopsis thaliana columbia
  unsure (1)..(275): unsure at all n locations
gtccgcttctttctctcgtctctgcgttaattctctctggttcgaagtagtaactttacgtccgcgattgggnctctctctctctctctctttctatccgataaatctcaggagaagttagtcgaggtagtctgcttctatgccattttgccgagaaaatgggagaagttaagggatgttggaaattaggacgaatgctttcaaaggataactctgcaaactcctacaacgtctnccttctcttatctcctggtggttctgtttgggattgtatt

SEQ ID NO: 107579 - DNA, 332 bp, Arabidopsis thaliana columbia
gcttttgatgccctgcaagcattggccgaattgacttctctattgcttccaacaaatttgatggagagagagttatctgctcagttgaaggaagaaagaacagaatacgacatggacgagaaatctagcacaccagaagctacttgcacaagcagtcatggggaaaaagcaaatgtatagccagatgatagtctccttcatgcaatatcttctgctgagaatgctaacaagagaaagtcaaaaccttcaaggctggtatccactgattgtgatgatgttcccacagggaagcttcaaccacaaactagtggcagtttaagaaaacttaaacc

SEQ ID NO: 107580 - DNA, 256 bp, Arabidopsis thaliana columbia
tgttctgggtctcctgctgttgttgaaacgaaggagtttgctgctttgtttgatagagattatgggagtaacaatgcttttaagattgattttgatagggaaggatttatagatgcacttcatcgatctaggagttcgattaagctcttgtttgattactagcattctccggatcatcctgatacacctgtgttttgtggtggaacactttgtaatgaagccgttgtaacgtttggtaatgagaattttgtttctt

SEQ ID NO: 107581 - DNA, 452 bp, Arabidopsis thaliana columbia
cccgatcatcagtccgttcctctgcctttcctctctgttttcttatgactagattgtagattcatgatcttgccactcaaatctggttctcttcttttcttttttttatccccaattctggtttatctggaaaatcgatctttgatcccttttcgatgatctcaagaaaattggggaaataaatcgtaaaacatttccgcatacattggtatcatgatcaaatctgcaatcttggtgttgatttgtgttttgtttcacattggttgacaaaagtcatggtgaaagagactgaatactacgagatcttaggcgtcaaaactgatgcttcagatgctgagattaaaaaggcttactacttaaaagcaaggaaagttcattcagacaagaaccctggagaccctcaagctgctaaaaactttcaggttttaggtgaggcttatcaggttctaagc

SEQ ID NO: 107582 - DNA, 233 bp, Arabidopsis thaliana columbia
  unsure (1)..(233): unsure at all n locations
gacagccacaccgncaggagacaagggagagagaatnggggaagaggcagaagctttggccactactgcaccgctagctccaggcaccaatcagcgaaaagtacagaacaatctgcaggaaacaatacacaaaaccatacatggcaagagcattatcagctgcagatacagagcactctaatggaacaaaatgtcacgaccgcaaacgaatgaggtataggcaacaacatgtt

SEQ ID NO: 107583 - DNA, 431 bp, Arabidopsis thaliana columbia
gtcactgatgaacttgaatttcaagaaaaagagattgaacattgctcacttcaagaaaagttggatatggagctaaaggaattggataagagacttgaagaaaaggaggctgaaatgaagcgcttttcaagtggtggtacatctgttctcaaacaacactatgagaaaaaagtttatgacctagaacagaaaaaaagagcactacagagagaaatcgaaggtttgagacataatcttgctagcataccatctggaccaggagatggtgcccagaaactgaaggaagaatatgttcagaaactgaacacgcttgaaacacaggtttctgttctgaagaagaaacaagatgcacaggctcagcttatgagacaaaagcagaaaagtgacgatgccgcaataaaattgccggatgaaatacacagaattaagtc

SEQ ID NO: 107584 - DNA, 435 bp, Arabidopsis thaliana columbia
attttgaatacattatatataacaaaaatagtattttaagagatcgtcgcctacgatggcttcaaaagcattgctttttttaagtctcattgttgttcttcttatagcttctgaggtggtagccagagacctcgctgagaaatcggcagagcagaaaaacaatggtacataataaaattcagactagttttatttttgttcccataaagttataaattactcgagatcgttgtatatttgtaacataacgaccatgttattctatagatcactttcaaagtatggtttattgtacaaagacctaatcctccttattcacaacccttaataatttggcctgctttaattacaaaaaaactcatactaatcacgaatcgctcatgtttattacaaatactttataaagtagtgacaatatctgaatatatcattaag

SEQ ID NO: 107585 - DNA, 255 bp, Arabidopsis thaliana columbia
gtatataccacatactaactgaccaatttttgttctcttgtcaccaacccaaaacacgtgtctggtacatttataaacggcaagactaaaactcgaatctagtctatgttatgcaccaatcagatagacgaaaataatgctgttacagactaactttataaaatggacattattctaaataggaattcctatctagagatattgtcttcttaaattaaacaccataactattaccgatatcatggtataaaacaa

SEQ ID NO: 107586 - DNA, 341 bp, Arabidopsis thaliana columbia
caataatataatggtcacaaaactgatgtctctatcattgacgctcatcttcgtcctcctcggatctaccgtatccgtgaactcgacaccaagaaacctctcgcaggctgctgaaaacaaaggagtatggtgcatagcgggtgacaaagcgacagataagcaactgcaagcgaatatagattgggtttgcagcgacgaaggaggattccgtgactgtggagcgctcaattccggtggaccttgctttgaaccaaacacggtaagagatcacgcgtcgttcgcaatgaacttgtattaccagaaccttggtgccaccaaggaacaatgcaatttcataacac

SEQ ID NO: 107587 - DNA, 403 bp, Arabidopsis thaliana columbia
ggataatagctgaagagcttttactcaaatcgatacttcgagatgcgatttttgcttcggttgccacaaattcattttcggaaactctcgtgctcgatgtctgtactcatgggttcgaagcaattcctcgaattttgtcttcttccttcttttgcctcatacccttcttctccttcttattcttcaagtagacaagtatcttccgtttctagaagatttcgaccagttttggcctcgagacctgtgtccaaaaacagtccttattaccaaaggaccaatggtttatcatcttacaattcaatccccagagtcccaactcctgttgatactgaagtagaagcagataagagggttgttctatctagattagtgactttgaggcgtaaattggcggacagggagt

SEQ ID NO: 107588 - DNA, 465 bp, Arabidopsis thaliana columbia
cttgacccggacgacgtgagtgaacaattaaaacgccaaggtgcatcaatccctctagtccggcctgggaaaagcactgctctctgcatcaaaaccgtaagatcttttctccctctctccttgatcaatttttacaaacttcccattttggtttatcatctaacaactatctgaaaatgtctcgctctgattgcaatatcaggtccttggccggatatcggttcttggttctgcatttctggctgttcttagctgctggtcctgctgtagtcgaacagatcactcacttgacagcattcagaggatttgcaggcacttctgttctgatccttgtcgggtgtgcgacagatactgcaagaaaggttcaagcagagataatctcgcaaagtacaagacattgagttttacgagcttgacaggtatgatccatgaactggaccttctgttttacatataatacccatc

SEQ ID NO: 107589 - DNA, 384 bp, Arabidopsis thaliana columbia
gatcaaagccttgcctggccattcagatgaggatggtctacctgagctccaagataataccgtgctggctagagctgagacagatggtgagcagcttgcgcttcttggagctgcgtttacaatacttgacgaacttttaccaagatcacttgttaaagtctggaaactccagattgaaaatggcggaggagaaggtgagaatagtgccgctctaaacagtagtgctgcaccggaactgaaagaatggaaacgccatatggttcaagcatttgacaaactcagaaactacttctgtctgcagtttgtcttgagcttcatctactctagggaaggactaacgcgattagacgcactcatttatttaaccgaaacaccagatgactt

SEQ ID NO: 107590 - DNA, 325 bp, Arabidopsis thaliana columbia
taaaaactcaaaaatctctgctaattcttgtttcttcggagccggagagagtgagagagagagaggggtactaactaaggtaacggttcgtttcaccggcgacggagagaaaaaacgcaggcgaggttgaagaagaactcaacatcgcagattctcaggaagaatgagtcagaagcgatctttagtcttcgccattcgagactttccaccaggctgtggaactcacatcgatgtttcgtcgagtttgaatcatccagctgagaaggccttcaagcatccaagaactggtgatgtctctggcgagaatctgagttttgctgaggct

SEQ ID NO: 107591 - DNA, 276 bp, Arabidopsis thaliana columbia
ctccattggacctacaataaacattctccaacctttttcttcatcactatatccacaattggggcgagacctaaagcccgcttcattaagccctccagaatctatcactttaattcacaaccccatcaacctatactatattaacccaccattcaccaacgctggtcgaccaattttccaacggtaacgctacggcactgctaatagcttcgacgcagacctctactctttcttgagctctgcctcagcggcgtattcaacacacaccgaccaaga

SEQ ID NO: 107592 - DNA, 459 bp, Arabidopsis thaliana columbia
cccacgcgtccggaagatctcgttgacgccccaattaataaccagaggtaatggttccgcttgcatgggagctagaggaagatagactgtctcgacttgcagcccaatctcttgttcgattcagatccgtttgcaaacgatggaattatcttttcgatgaaaagagtttcatcaaaaaccacttcgctcgtgcttgtcctcagttcatcttcatgaccgattccaatatttattcgatagagatcatcggtctcgacggcgttgatccaacgattaagttacgtgtgctagactcctctggtatcccttaccgtgactggaaatttgcttacataaccatcactgcttgcgatgggttcttgttttgaactcttgggctagtcctaaggggcagctttttggaatcccgggttgaaacaggttaaatggatcgagtacgaggataaaggtttcaatgtc

SEQ ID NO: 107593 - DNA, 422 bp, Arabidopsis thaliana columbia
ctttagtgctctctgttttcttctgcttatgaaaaaacttcatggcgaattttgaggatatggaagagaatcagtggggatggtgggttttcttttctctttctcagttcatcgaaactataacccactaaacatacaaaaccaaattatttataaaaagcaaaagcaaacaaaaacaaataaacggatcaatttctttcttttgtttgtttcttcttcttttctccaatctctagtgtaacgtttcatgtcacttgataaataaaatattttaggaagaaagtgcgagaaactcgggagttatacaaaaaaataacatttttgttgaaaaaaaagctctcgtcttttcagttacttttctcttttgtcacactttcatatatttttctctatcatggatgcaacagaattgcattaacttc

SEQ ID NO: 107594 - DNA, 304 bp, Arabidopsis thaliana columbia
  unsure (1)..(304): unsure at all n locations
acgaaaccaagtcntggcccgtctttcctcccttcttttttttctcgacatctcgttccatttgcagagctttttctaattcgaggcccggcaaatctatatccctctcacgctcccattctagatctctctcttcatcttcatctccttctcgaagcgtcagatcttatattctcattcctccacctcatggaaaaaatcctgctttacctgctaaactaggtcgctctccttctcctacaccatctaaagtaacatcttcacctttcaagaaatcttttcaataatctcttatttcccattt

SEQ ID NO: 107595 - DNA, 377 bp, Arabidopsis thaliana columbia
tggatttcgaggagggtagctacagtgagatggatgatgaagtggaggaggaacaagtagaagggtgtgaataggaggaagaagaagatgatgatgatgatgacgttggcaatcagaatgccgaagaacgtgaggtggaggattatggtgatacaaaaggtggggatatggaagatgttcaggaggaaatagctgaagatgacgacaaccatattgatattgagacagcagatgatgatgagaaaccaccatctcctattgatgatgaagatagggaaaagtatttccaccttctttcacttccttctgatggttctgaagtttttattggtgggctctcaaaggggatgttggagaagaggaccctgagggatcta

SEQ ID NO: 107596 - DNA, 198 bp, Arabidopsis thaliana columbia
attacaaacaaaaatggttttgcaaaagcttcctctcattgtgctgttttgctcctgaccaatggcgggctttcaacaaattgagattggccttttttgccgccctcgaacaaactataaccggccaggtttcctgaaggttttttatttggcaccgctactgcgggataccaagtcgaaagtgccattaatgaaact

SEQ ID NO: 107597 - DNA, 462 bp, Arabidopsis thaliana columbia
  unsure (1)..(462): unsure at all n locations
cggacgcgtggggtttggaatctctgctttttcctgttaatccaatgtcagatacacaacaaaggctgagagcttttggttgataacggtgattacggattcgagagaggatctagatatggagaatacgcgagattacgagaatcaaaacttcgtatgaaacgagacttcgagaagattctaaaggaagaacaagtgagatttgggttcaccagagaagaagaaatcagggttttgccggagaagaagacgagattcggatttaaccctaatcagaggaaaacgtcgtcgtcttcttcttcttcgttggctcaatctgttcctgatttctcttctatgattccgaaagagaatcgtcgaccaccagttaattcgaatttgcttcctcggagaacatacttactccaccgtcgatgaagagtagaaacgccgncgttttcgctggatctgtgattagaggaa

SEQ ID NO: 107598 - DNA, 372 bp, Arabidopsis thaliana columbia
caatcgcacttcctttaccagatcagacgtcaatttcaactcttcagcgaagagatttctttcaccgggttttctactccgatcgagcaggtgaagattgaaatggaagctaattcaggccgaggaggaggagctgaaggcggaagagcggtaaccggaggaggaggaggaggaggagggagcgatgtggaattggtgagcaagacgttgcaagtggtgcataagactatactattttgatcataaagagaatcctccgtattaggtttcttaagatattgctacaagaccgctcgctacttagtacaacacatcattgtgtccgttggtacggctatctttttgttgttccttgatcttctttaaccttct

SEQ ID NO: 107599 - DNA, 440 bp, Arabidopsis thaliana columbia
attccatatagaagtgattctttgtttagtttgatttagcaacattacaaatagtcttgtttggggttcaaagacatggggattggtcctcatcctactccatatgcaggaaatggacttttgggttgttattactattaccctttcacaaacgcacaattgaaggagcttgagagacaagcaatgatctacaagtacatgatcgcatctattcctgttcctttcgaactacttgcttcttcaccatcctctgcctcttcttgtaacaataaaaacatcgccggagatttagagccgggaagatgccggagaacagacggaaagaaatggagatgcgcgaaagaagtcgtctctaatcacaaatactgtgagaaacacttacacagaggtctcctcgttcaagaaagcatgtggaacctccttattctcgccctaacaac

SEQ ID NO: 107600 - DNA, 289 bp, Arabidopsis thaliana columbia
cagaggaggagcgaggacagcctccatgtatccagtttgttcatcggtggccagcgcaatcggaggaggaggattataaattcgcggtggggaatatttattcattgaaggttatcacctcagatgaattcaaagggatcgtcatgtcttacgaccccatccccaactttgtctttttttaatagggtacaaaacctatacctgtgcattttaagaacactctgatggagaatgcgagttttattacagggcttttttatttatgcaaaacttaaaatccactttattc

SEQ ID NO: 107601 - DNA, 428 bp, Arabidopsis thaliana columbia
cgaccattttagaaaaagcttctcaaattctctccttatccccaaaaattcaaacttttttctggttggaaaattctgaggcaaggatgcggcgtaattgctgccatgtttcatttgcttcaaccctcaagatccttaattttgtccaagctttcattggtgtttcgatcattatctactccatatggatgctccatgaatacagccgtcaccttcccgtggacccgccttcgtcagcttcatcaagctccggaaccgagatcgctactagtgtatctgagcccttgaagaatcctattgattttgtggcgagtatcattctcgggtctaatggtggtgatcatgggtttaacctacgctcgttggaccttcctgctccatggttcatctctctttcatggcggttggtatattggtctgcattggta

SEQ ID NO: 107602 - DNA, 471 bp, Arabidopsis thaliana columbia
cgcgtccggcaaagcttatttcgatttttgattctcttattgaacaatgtgcactatctagaccaattaagggtgagggtgctcttaagggtgggcggaaaccaggaagaatgcttcttaatttggatgaggatgaacagccaaagaagaaaatcagaattggcagtcctgcttgtcagtggatctcagtctataatgctcgtcgtcccatgaaacagagatatcactacaacgttgcagactcaaggttgcatcagcatgtacagaagggtaatgaggatggccttttaattagctgtgtagcatcagcagctaatctctgggccctcataatggatgctgggactggattcacctctcaagtttatgaattgtcaactgtcttccttcacaaggactggatatggaacaatgggaaaagaactactatatcagttccatagctggttcagataacgggaactcattagt

SEQ ID NO: 107603 - DNA, 459 bp, Arabidopsis thaliana columbia
aaacatataaacataaacgccaatcgcagcttttgtacttttggcggtttacaatggagaaaggtttggcgatgtcttgtgttttggtggtggttgcattcttagccatggttcatgtctctgtttcagttccgttcgtagtgtttcctgaaatcggaacacaatgttctgatgctccaaatgctaacttcacacagcttctcagtaacctctctagctcacctggcttttgcatagaaattggcgagggaaatccaataggcgcttcatggttaataccacttacacaacaagcggaagtagcgtgtgattaggtgacgcaaatggaagagttgagtcaaggatacaacattgttggaagagctcaagggagcttagtggctcgaggcttacttagttctgcgaaggtgggcctcctgttcacaactatatatccttggctggtcctcatgctggcac

SEQ ID NO: 107604 - DNA, 321 bp, Arabidopsis thaliana columbia
acggaaaggtcaaaacaaaaatatttgtacttgttttttatatcgccgaacccttcacaaaaggcgagtgggaatttattcgtggggaagccgaacatcacagattttgatccagcgattctctctctcaaaacccaaaaactcaatctttatcaatatcaccaacacctttttaaatttattcaagcataaaaacaagctgcaagatacttaatccctgataagcgaaattacatgtctttgttagcattcaagaaaaaacttacacaataagagttgttgaaacatttatatcagtggctcattaatgttctacaacaa

SEQ ID NO: 107605 - DNA, 283 bp, Arabidopsis thaliana columbia
  unsure (1)..(283): unsure at all n locations
ccgggnccgacccacgcgntccggaaaaatggangaaatagtgaccggtgtagagagagagttatacttgtaaaccgaagccaannagcaaagagaggtcgacgtagtaatatctgggagatgtgtctgtcacnagcttccacaattttcagttaaaaggtcttcaaccctttgcnnagaattttccctctataaggttcacgacttttggggtaaaaggtgtcacacttttggcgatgtggtctttgaccggaaaccacatggtggaaggtggtttggttaa

SEQ ID NO: 107606 - DNA, 309 bp, Arabidopsis thaliana columbia
aattatcttctcctactatcattattctctataatttttctcaacctcttcttgctcgggatcgctcttcctccaaaaaaggatggggaccaataacttaaattctactaacggtgacgcacgctttagtttccctaaaagacctaatatgccgaacataaccaccttttcatcaaacagaggtagcgaaatctcccacgacaattgtgttccaactataaattccacaaccatctattagcctcattcgttacagaataaacgatctcctcctaccacaccatacaaccaaaactccatcccttcttt

SEQ ID NO: 107607 - DNA, 486 bp, Arabidopsis thaliana columbia
  unsure (1)..(486): unsure at all n locations
aaaaaaaaaaaaacnttctttctttttttaaatttttatttattatnnctaccaattacaaccggaaggtgtttattaaatatgttcccggacacaaaacaactttcnnnttaaaattattaatttttaaaatctattttcttacccanaaactctttaaacacatcttaaaatttttttattaataanctcncattcatatccttattttctattttctttactaatttatataatcctaattttccaaacaatattattttcacctttctacaaaatccttatatcattttatctcaccttttctttctcaaaaactcaanctatttattttcttttttaccaattatttcttttaacttctttcatcatttctttcttttccttttttccatatattaattatttattattcttttttttttattctcctttttcttcactctctctaccttttatttaactttatatatattacttttattc

SEQ ID NO: 107608 - DNA, 307 bp, Arabidopsis thaliana columbia
  unsure (1)..(307): unsure at all n locations
taagaagtcaagctgatgaggctttcaagcctttctatgttannaccatgattggtagaagttaagtgacagggttgtttcattagaaggggtgtcaggagattatnnaaagattgtcttcagtncttcagccccctaaataccttagtatcactttgtttcgtgctatatagcaatacccttcactttgatgcttacaatatgtttcgttcttcaaaatatctgtgttgttttgtgcacaatgatgtagataaaaggattttggtttttggtgttctaaaaaaaaaaaaatttttaataaataaat

SEQ ID NO: 107609 - DNA, 170 bp, Arabidopsis thaliana columbia
  unsure (1)..(170): unsure at all n locations
ccgggtccngcccacgcgtcacaagcaaattccactacatcttcacttcccatttttctcacatcacaacaccttaaactgggggcgtgtattttaaaaagactgctgggaccaaccaatctcccttcaacatcatcaactccaccatcttcaaaaccaacaaacccaac

SEQ ID NO: 107610 - DNA, 445 bp, Arabidopsis thaliana columbia
gagaaaccagtcacaaatccttcaccgacgtaacctgcgtctgcatcgctcgatagagacgctaaactaactgacatgtgagacgacaatagattgatttttgactgacccaggaatgaaagcataaagaacaacataacaaccaaagctgtgaatacaattgcctatgaacatgcttgggaaaacagcaagaaagcagttcacgcacctcaacttatgaaaatcgaggagcaactagagaagaagaaagcatattatgccctgcggatgaagaatacatttgcaccgattcacatggaatccgcagacagaagagcactgctcgaagctgagcttagcgaagacgtccttcaagcataagaaacggatgttatatacaaagccactggaattcgtccaatagcaacttctggatgtcactaatctcgaattagcgaatcaaagt

SEQ ID NO: 107611 - DNA, 434 bp, Arabidopsis thaliana columbia
  unsure (1)..(434): unsure at all n locations
aaaaaatcttcacccgccactgaaccatgaagaagaagatccttctctaattcctatcgccgggtctgcaaaaacaaatcacaagtcaaatcaatggaagaagaagatctgattctatctccatctccatacgatcttctctttcaagctctaactctcatcccgattcgtcactacctcatcgctctcttcgttctctgtaccatcttcttctacaatttcgtcgaatttcacttccttggagatgcgattcttcgttatttcagatgtcgcgtcaatctcatttacaatccagattctcctctttatcacggtgttgnttctcggtgtcagattcttcacggccgatatgtggcgacgccatggttagcgagccctcatattcagacttgtttcttgaatttccatggattgcctccagttttcacctatac

SEQ ID NO: 107612 - DNA, 445 bp, Arabidopsis thaliana columbia
agaagtacctctcttttcaagatgttgaagtgaagcgtttcaattcttcaaaaacggtttggggattgtcaaaagctcttccgggtgaaacactcaaagaccgtgcaaagggatttatcttgtacggtgaagaacatgagttcggtgctcatgtgaagattgtttcacgacccgcctcttttggtgaagatctcccttttcacaaattctcttggactattcgtgatttcgctcttctggaacagaatgattacgtatccaaaacctttcacatgggagaaaaggattggactctaaagttgtatccaaagggggactctgaggcagatgacaagttaattcagcatttgcatttagctgacggtgaaactttagccaagggtgagctgattttcgtgcgagtaaacctgaaggttctagacccgcgtggatccaatcacctaac

SEQ ID NO: 107613 - DNA, 187 bp, Arabidopsis thaliana columbia
tgtttttactaaatagtgttagtcagcgttcattggctcaaacccttgttctttctgcttatggaatgcgaagttcagatgcatcaaatcaatatgtgaaggacctcatggctcatatgacatcatctctagtggacttgtccaatagtagtgaccttaaaaaattgggctcaacaaccctgatatt

SEQ ID NO: 107614 - DNA, 364 bp, Arabidopsis thaliana columbia
gatatataccgatcctacaatctaaagtatcgaattttatctttccgctacttcgggggtttgggtacaagttcctggggtgcgtacttacagcacagggctcaccctttcaacctatcacctggcatacaggtaacataacccaacttatttcgccagttaccactgctccattggccagcggacgaaatagggaactgggtgcaaaatatcacaccttgagcacaaaccactacactgcagcgttttctgtgacaaagatctgaagccctcacctctatacggtcatacgaaaatcatactcgcagaacgctcggggggctctccggattcatgcaagcacaactcttaaagtactaccgtt

SEQ ID NO: 107615 - DNA, 272 bp, Arabidopsis thaliana columbia
tatatatacctatcctactatttaaatcatccaattttatcttcccataactacaacggtatgggtacattataatgcggggtcgacataaataactcacctcacttttacaaccttctaattctcaaaccattaacattacttaacttactaccacagttacaacttctcctttacccagctaacgaaatacagaactggattctacttatcagatctataaacacaactactacaatatatgcctatttgacaaacatcttaactctcac

SEQ ID NO: 107616 - DNA, 456 bp, Arabidopsis thaliana columbia
cggacgcgtgggctctccagtctccactatgggcatttttctctccttctttcttatttcttgtcgaacactaaccctcgtcctgatttccgtcacaggagaaacccttgaatctaatttcttgcatcacaagaaagagaaactaactcatttcagagtatactggcacgatattgtaaccggccaagattcgtcttcggtgtcaatcatgaatcctccgaaaaaatacacgggggcaacgggctttggtctcatgcgtatgattgataaccctttaacgctcacaccaaaattaagctccaaaatggtgggaagggcacaagggttttatgcaagcacatctaaagaagaaataggattattgatggctatgaattttgcgattcttgatgggaaatacaatggaagcacgatcacagtgttaggaagaaattcagtgtttgataaggtgagggt

SEQ ID NO: 107617 - DNA, 154 bp, Arabidopsis thaliana columbia
  unsure (1)..(154): unsure at all n locations
tatatataccaagcggacactctaaaggatccaatcttacgtacccgtgaatacaagggtgtgtgtataatatagtggggggtggatacaaataactcaccacccttttacaaccttntaactctaaaaacccttaaattacccaaccttaata

SEQ ID NO: 107618 - DNA, 450 bp, Arabidopsis thaliana columbia
ccatgatggaagagactccaccattgatgcaacatcaaggtggtgtgttaggagatggattagtcagaacgacatcgtaccaatgacccggtttaaattggtactcttcttaatcaaatgtgtttcgccgccggtgtgaagaattttccggtgacagtgaagatttttttccgattggtggggtcatttgcatgcattatataatttgagatttgtgtatatgttttgggttaattaattggtcacaggggttagaggaagaagattatttagagagcggagaagaagtgaggcaacatatagaaaacataggtttaaaaaatattactgtttgttaagtttaatgattaaatgtataaatcttatacttagatgtttatatatagtttgtatagatgcatatagtttctctcaatgctattttgagattgtattttcttgtaaaggaat

SEQ ID NO: 107619 - DNA, 451 bp, Arabidopsis thaliana columbia
  unsure (1)..(451): unsure at all n locations
atcaggcagtggcaaaaccactcttctatcacctcttggtggccgtctctccaaaactttctcggggtgaagtcatgtaccaacggtggaggcgtttctcntggctgcatcatagcgcacaacagggatcttgttgctcagggatgatgtccctgtacctctcaacctcacgggtttggagagactcttcttctttactcgcactttctacgggctacccaagcaagcttgacgaggagacgagaatagcaagagcattggggacagaagttattgcttgaactccgattgaattcggtgtacaaacagcatgataggaggacccactctcagaggaatatcaggaggtgagaaaaaaagggttagcatcggtcaagaaatgctgatcaaacctagcttgctccttcttgatgaacccacttcaggtcttgattcaaccactgctcatcgc

SEQ ID NO: 107620 - DNA, 189 bp, Arabidopsis thaliana columbia
ggaaatgttctgatgagaaaacatttttcaaatgcacaaagcaatggcgactgactaaggggtttcactattttgacagattatccactaccctaaatacccttgttttttcgtacgtcttatttgcacctatgtgcgaggagaattaagaaaaagaaatatatatgggtgtacaaacagaggctactt

SEQ ID NO: 107621 - DNA, 323 bp, Arabidopsis thaliana columbia
gaaacttatcatgaatccactgttttctactgattctgatattgctgctactttagcgtgtgggctcacttttattggagctggagttacacaacatacaacttctggtcaacctttcgaatgtatcgcaagtcaacctactgcacctggaaaaatacgaaccactttatcgcttatcatggctattatggaagctttaacaatttatgttctgattgtaagattcacccacttattgacgaatccttttgacaaagaccataaatcacaaaaatctggattttatgtgcagcattcttaaagctactaagattaacttctac

SEQ ID NO: 107622 - DNA, 254 bp, Arabidopsis thaliana columbia
gaatcacttcgctctaataccaaacttctcagtgtattagggtgagccaagctctggggggacatcaaagaacactttaccttgctgtaacaataatgactccctcgcacagtcacagacctctccagaagaaagtgcctgagcaattcaacgaagtcactcacagagcgttctgcaaaacttgcctacgtctaagtttcgactcaacttgggacttaagaattcagatcagaagagagtttgttaaccgtcaa

SEQ ID NO: 107623 - DNA, 274 bp, Arabidopsis thaliana columbia
  unsure (1)..(274): unsure at all n locations
gatatatatctctcctactacttaaatcacccaatttctttttcctgntacttcaactttctgggtgggatctacttcaatcacgacaggcataacacatctcacctttactaccttctctttctcaaacagctcacattactgaacctactactctagtaccactgctcctttttccatctgactaaatacagcactgcttactactcatcacatcgatagatacaactactacaatatatcgttttcttcacaaacatcttcatcctcactt

SEQ ID NO: 107624 - DNA, 138 bp, Arabidopsis thaliana columbia
tatatatccctatccgactctctaaatcatccaatcttacctacccgttcattcaacggcagcggtataatatagtgggggctggacataaataactgacctcccttttacaaccttctcactctcaaacccctcaca

SEQ ID NO: 107625 - DNA, 178 bp, Arabidopsis thaliana columbia
gaaatccacctctcctactacattacacttccattttccaccaacttttacttcatgggtggggccacatacttttccggtaactacatccatatctctcatcaaattgtttaccatctcttccttactcatatctattcacttaacctacaataactggtacaacttatccaacttt

SEQ ID NO: 107626 - DNA, 368 bp, Arabidopsis thaliana columbia
gttaataatgacactatgcgtgactcaaactgaagtagaagagcaccagcttccaaatgggcgaggtcacacatgaaaacggctctgattccttctcgagacatgtatcgcggagtgattgattgagtaacatctctacatgttattttcagaacatcggacttgacccaccggtagctggttaagagcatagatctatcctttaagagttgatcagagctgaatgctctcatgtgtgacatcaaagccttgcctggtaagctctagatactcttatcaacagattgatccaagctaggaaagtttgcgacagagaaggggtccctaggacttcgagagtattggaccaggtgccgtatgaggcgaaa

SEQ ID NO: 107627 - DNA, 334 bp, Arabidopsis thaliana columbia
gatatacaccgacccgacatcataaagtaaccaaccttatctcaatgctacttaaagggtgcgggaacaagctcctggggtggggacacacaaaacagacaacaactctacaaccttataactctaacaccattgaaatcactaagcctaagaaccaatgtaccacatacccttctcccaacgaacgaaagcttaaacaggacactaatcatcagatcgatagctgcaactactacaagaagacgtctccttgacaaagcacctaagccctacgatactaaggtctgacgaactacatacacgcagcactataccgtaactctccagactcata

SEQ ID NO: 107628 - DNA, 223 bp, Arabidopsis thaliana columbia
gcgaagctattgaattggcagagtaacaacaaccttcagctagtacctgaaggagtggcttgggctccataattggggggggagggaaacaacattccggtttctgtcctttcaactgcacattgtgttcttatttaattttctattatcttgcttctactttattattttttttttcctttattaatttattttattttttttttttttctaattgcttttt

SEQ ID NO: 107629 - DNA, 403 bp, Arabidopsis thaliana columbia
gaaaaaaccaccaaacaagccattcctcaattgctctattttctccctctgctttcctccttagcggcggttacatcaacaggactgatggctaactccactaatatgactccaccctctccatccatcctacacaccaaataccaaacgctgtttcattaatcacaataactaacatcttatcagcaatcgatgctcatgcaaaacacgcaacgccctggtgttttttacatccctcgacaacgagttttatttgaaagacgacatcgacaacccacaatgtcttcagcaagaacaccatatccttcagcagtgctgcaacgagcttagtcaggaagagccactttgagtttgccccactctaacacaggctgactaggccgctagccttcaaggacaacac

SEQ ID NO: 107630 - DNA, 448 bp, Arabidopsis thaliana columbia
gatcaccattccaggaccatccattttgaggagttttcttccaccaaaaataaatgggaaacgtggggctacacttaatggaatggcatgtgtcaatccaagcacccccatgaggcttgcggatgaccataaagtgaaaggagattatatgttagattttccagacagaccacttgatgaaaaacttccacgtttgtccagctctatcatcaacgcaacatacaagggctttatacaagttatcttccagaacaatgacaccaaaatccagagctttcatattgatggatatgcattttacgtggttgcgatggactttggtatatggtcagaagacagaaacagttcttataacaactgggatgcagtagcacgaagcacggtggaggtctatccaagagcatggactgctgtacttatttctctcgataatgttggagattggaat

SEQ ID NO: 107631 - DNA, 352 bp, Arabidopsis thaliana columbia
ccggggcgacccacacgtacaaccatcccaaaatcttttttaaaacaactttttatttctccctccaacacaaaaaccgcgatggattttatctcatacgtgtccgcacacaccacaccaaaatcccatacacaacccaataataacactctattcactaaaaacttttcctctacattatccaccaccaaccctaccaaccataacctaaatccaaccccctataccaccatttttcaataattcatacacaccaccaacactctcttcacactcataaacctaccacctctcccaattaacaaaatactcaaaaaactttccactaactcaaaaacaccttacactcatt

SEQ ID NO: 107632 - DNA, 457 bp, Arabidopsis thaliana columbia
gatatttacctctccaacacttactttcacccaacctccttctactgctacttcaactcttggaggaggagctcctccatttccgacatgcatatcagaaatcactttaattaccttcgcatgctcagacaacttagacaactgaaccttactacacagttaccacacatccgttgatcaagtgatcaaagcaagcactataatcgaatcatcaaatctagcgctccaacttctacatgatgcgtctgcttgacaaagatcttaattcctcccgctctctaagtattacgaactccatacttcaagcactctaaggcagacctcgagattcaagacacgatgaaccttatgcttcaaccgtacgtagagatgaatggagagtctcccaaacttgtgaaaacaactacgagcgactctttattcaacgggaaggcgactactactactactactacta

SEQ ID NO: 107633 - DNA, 426 bp, Arabidopsis thaliana columbia
ataattctctatctctcttctcaggctcccattatctttctctattttgcaaatcagtgtgggtgagttcacaaccattggcatgatggctctccttctttgctctacgctaacctacgcagcaaggctgactccgacgacaaccaccgctttgtccagagaaaactccgtcaaggaaattgaaggagacaaggttgaagaagaaagctgcaacggaattggagaagaagaatgtttgataagacgaagccttgttcttcacaccgattacatttatactcagaatcacaagccctaagtttctgtattagagcaattaattaactaattacattatcaaacctatcactgtagtactttctgttttctgttcctcttttagttttggtttgtttatgttatggctattctaaaggttcattgttt

SEQ ID NO: 107634 - DNA, 370 bp, Arabidopsis thaliana columbia
gatatatacctctccggcgacttaagtgattcaacctcctcctgctgctactacatcggtgcggggacaagctcctgcggggtcgacatacaaaacagagatcacctgaattaccttcgcctgctcagacagctgaaatgactgaacctacgtcgacagttaccacagacccttcgtccaggggaagaaagcgagcgctggaagcaaatcatcagatcgagagctacaactactacaagaagcgtctacttgacaaagcatctacgccctcacattaatcaggttttacgaactccatactcgaggaactctaaggcagctatctagattcaaaagacgatgacccttatgctttaaccgtacgaacaga

SEQ ID NO: 107635 - DNA, 184 bp, Arabidopsis thaliana columbia
gatggtgacaagaaggttccgatcatggattcgacgtcctcctgggatcaaggaccggagacagaaacaagatgtagcggtggcggcatacaaaagagctatcagacagagtacgttagtgatcacatgcagctgaatagacggttcctgaaggcgcagatagcacaaggctcgtcagcaaagg

SEQ ID NO: 107636 - DNA, 481 bp, Arabidopsis thaliana columbia
  unsure (1)..(481): unsure at all n locations
ggggcccgacccagcgcgtccgcttcggaaacttgtcctcaaacacaccggttggtggggtttttaatgaggctgtgcaagcacctacactttggtggcgaacataaancttgggttcattgtactttgtgggcatgccagtcgctattctgtttgggtttgttttcaaacaagggtttccaggtctctggttcgggttgcttgcagctcaagcaacttgtgcttctctcatgttgtgtgcacttttgagaacagattggaaagtccaagccgagagagctgaagagctgacgtcacaaactcccggaaagtctccgccccttctccccatcgcaagctcaaagagccggtctacctccggtacagaagatatgatgagaaccatgttggtttagattgatagctattctctggaggcatttgccatcaacattgacgtacatatatgttcttgtcatcattttttggagtttatagtgct

SEQ ID NO: 107637 - DNA, 300 bp, Arabidopsis thaliana columbia
gtaaaacacctcacttgctactggacttttcaaacttactgctcgtcttaccaaagggtttcgtgtacactctcttcggctgtgtgcatccaaatcatagatcacctgcattacctgtgcttgctcacccacctgagacaactacgcatactgctaccgataccacagacccatcatgcaggccatgaaaccgagctcaccaagccaatcactagatcgcaagctccaactactacacgatgcaccttaccggcaagtatcttcgacactacgtattggacaccttacgaactctcaact

SEQ ID NO: 107638 - DNA, 283 bp, Arabidopsis thaliana columbia
ctcataaccctactgctctatgtctagatatctacttaactaacactcgactatgcttgggtggtaacattttcctttgcggggtgcatcctcttccataaagatttccactacttctgctttctttgcctaccattgtcatatatctctgcctttcagttaatactgttccagatcattgagaattacatacaaccttttcatctaatgtatcgatccttatctgctctactacaatcagcttttactatgttgaggactgtgctcctcatctatggtgaaa

SEQ ID NO: 107639 - DNA, 266 bp, Arabidopsis thaliana columbia
ttcaagaaaaattttggaacttctcgaaagtctttttaaaaacggacccaaatccagagggagggtttttcctttgtacacagagctattatctctaaaaaatctttgttcagtattggtcaaaactcgaacaatatataccaatggactgcagtgatcccgggcccaaattgcactccctatgaagggggcatgttttatctccaaatccagcttgctacggatcattcttttaaaccacccaaccttcatttaaaaatcccatt

SEQ ID NO: 107640 - DNA, 254 bp, Arabidopsis thaliana columbia
tgcttaatcataaactactctttcttccacgttctttctttgttagcctttagaagaaaaatggctaccaattacaacgagaagcttcttcttaagtatgttcccggttacgttatgcttccggtgggagttgtgaatgaggctaatgtatttgcggacgcataaacgcttgtaacgcatcttcaacgtattaaagaagatgctagccttgattgcctgatgggcctacttcgagggggacacctacacttcaa

SEQ ID NO: 107641 - DNA, 396 bp, Arabidopsis thaliana columbia
cccagcgtccggaaaaaacactttcgtatttccctcgacgaaaaaattggcaaccatttcgaatctcgctaatggtcccggcgccacctgcgtgggctccaaatcttgttcctcttcctccggcttacctagatccttcggcaatttccgcgctttgaatgcaaagctttcctcttctcagctgtctcttcgttataaccaacgatcaataccttccctctctgtgaggtgttcagtgtctggtggaaatggaactgctggaaagagaacgactcttcatgatctatatgagaaggaaggcagagccttggatgataatcttgcgtcagcacagatctttccgtagatgtcgggtgtagagggtactagaccctggacttcaaagcattcactcaa

SEQ ID NO: 107642 - DNA, 404 bp, Arabidopsis thaliana columbia
cttccaaggaaatagtttggagatttctcgtaaagatgtttaagaaaatggataaaaaagcagcgcagagaattgcgatggaatacagagctatgatctcgaaagaatctttgttcagtattggtcaaaactcgaacaatatatacgaatggactgcagtgatccggggtccagatggcactccctatgaaggaggcatgtttaatctcagtattaagtttcctacggattatccttttaaaccacccaagtttacgtttaaaactccgatttaccatccaaatatcaatgatgaaggatcgatttgcatgaacattctttaagacaaatggactcctgctcttatggttgaaaaggagcttctgtcaatactttttactattgggaaaaccaaacccagatga

SEQ ID NO: 107643 - DNA, 273 bp, Arabidopsis thaliana columbia
acagcgatccaagtctgaagttcacttacctttttatttctcgactctgacctatcggaaaggggacattgtcctcatatggagggaggctaatcgctactgtttttgaggcttattgaagtcttgggaatagcatattgaggatgctattgttgttaagaaagtatggaagatcttcttctatcaccgctgaaattaggtagctttaagtcttcattgtcagggaggtctactccaaagggttcacctacacttcaaaaagtgcattcaggc

SEQ ID NO: 107644 - DNA, 319 bp, Arabidopsis thaliana columbia
gtcagatcaaaaaataccttcgagagcgcctttcgtcctgtaaattgacaaaaatgcgggctgggctcgctgcaaagcgtctggtaaggatccgtcaagttgtccatcatccaacctctcacgtgactcgtcgctgatctacgggcttaaactaccatcgggattctgctgataacaaacccggtcctccatgggagtgtgcagaggctaaccaatgtaaggttcaagagattgtctgttactatgcatgcaattacaagcagtacgcagttattcctctgctagatcttgcgcaacagcagcatggaggctggctccc

SEQ ID NO: 107645 - DNA, 367 bp, Arabidopsis thaliana columbia
gagcatgaagataaaatttattcaagtaactagtaatatcatttaactcggttgtatgctgaaacaacaaacagaaaaaaaaaaaaaaaaaaatctaaggaaatcaaacgttttgccgtcttggtcaagtttccaagtagatgaagctctcactcttatccatagaattcaagtcgaaatagcattctttatcaaaccaagagtctggtactcctttgatttcaacctttctcaagtcattgctttgcaagttgtaatacagaatgtagaatcgagaatgcatctccaccggtgccaagatcaccttgccgtcttgagttgtaccttttacgatcaattcaatgtcttcgactaaatgcctttgaca

SEQ ID NO: 107646 - DNA, 268 bp, Arabidopsis thaliana columbia
  unsure (1)..(268): unsure at all n locations
cgtccgatatacacttcatatctaaacatcctttaaagccttttttaaaactcatccatcccaagcaggtggggaagctacaactgtgctgacgaagacccantgcataaagatgggaacctgctacaccttcgacatcttcatgactcacgtgagctacaagaaggccatgatcattgactactagacctaaaagaacaacgcaaattgcaagtgctagtgcagctcctcttgcagcttccttaactgcacttactatcccaactaa

SEQ ID NO: 107647 - DNA, 254 bp, Arabidopsis thaliana columbia
tttcgatccaaattaattaaattatttcactttatttttactttttttctacacaataccataagagagacaatcttatttatacaagtagtccacattctctttattatttctattcttattagcatattcaatcttcttctgatgtctttattaattatttcaagttttcattttcctacattaattaccatactcattctactgtcattatgtttcatttattataaaattatctcttataaccatctttc

SEQ ID NO: 107648 - DNA, 401 bp, Arabidopsis thaliana columbia
acataaacaaactgaaattttcaatcacattttctttatgctacactctctccatcagggagggatgatcacaagccaaaggtccagtcaaccaccaattcctagtgatcaacataagtcgctacaccaattacagtcccatctaatacaaccctgacttacgtggccttcgcaccctttattgtcaacttccaactctttttctacaacacaaccccaatcgcatacactctcaatctcagaatcggaaacagagtccaaaaatccactctcatatgactttaagaagcaaactcattctctccggtcaaagaagacagccactcttactttttattcaatactgatacctcgaactcgctgaagtcaatggacgcttgttttggcaaacttacacattt

SEQ ID NO: 107649 - DNA, 464 bp, Arabidopsis thaliana columbia
caaaaacaaacgaaaagaagcgacttttgcctcttttggtctctccccttctccggagagatctgctctctctatctatctctcaatctgtaagaagaagattcccacttcagtaaaagccctaactttacttgggaaagttcttcatctatcatcctccacctactcaatccgatgatctatctcactcccactctacttcctctactaccttcagcttcttcttcctcagatccatcactcttgaggtctctctccttaagtcgactcaacgccggagctcctgagttcgttcctggtcgaactactcctccgctgcctcaacctccgaggatgattatcccgcctcctccgccgcacggtatgcttcatatgtatcaccacaccagaaccaataccagaacaacaaccacagccattaccaaaaccacaaccacaatgggcgaggatatcatcatcatcat

SEQ ID NO: 107650 - DNA, 217 bp, Arabidopsis thaliana columbia
  unsure (1)..(217): unsure at all n locations
gcggaaaaaaaacagagctttacaatttctctctacaggagatcgaagatttggaaggcaaggaagaggacgttagagttggagctaacaggttcccggagagacaaccaatcggaacatcagctcagagtgacaggactcaggaanaccacagctcgtttcgaccgggagttttaggctttgaagtggacgtggtatgtcttttttttacatatgt

SEQ ID NO: 107651 - DNA, 261 bp, Arabidopsis thaliana columbia
  unsure (1)..(261): unsure at all n locations
tctctctctacccaaaaccttttacttcttcgaaacggctctatttctcttctctcttctgtccacacacagaattatctcgacctaggtttctaaaatcggattctctatctcaaacgctaatcgaagagttttctctgaatcgttttcttaaatctaatctcgcgaagtttcagtgacagattcaatcaaacttcaaatcatcatcagntctggaatattacgagatatctcccgtttcaagcttaagcatttcgaaat

SEQ ID NO: 107652 - DNA, 392 bp, Arabidopsis thaliana columbia
ctctctcagaacgccgattgatgataaccggtaaagggttttaacttcacctgacgagcgggggattgactcagtggcttggacgggtaaccaaagcatgccacgtaaatccatgtctacaggttggaaactagctgaattgtacagcccggctagttcaccgggccaaccggaggagaatctcgactggtatacgctgaggttaccacaagagatacatgaccagcttgtgaactccagcctgggaaagcaagggtcaaaaggccaactggccttacctcaagaaaggagctcggttagagggttcagaaccggaagcctttggacctgaaaagaactatttctactttgaacggtttgatcaaaacggtcggttggaccggagaccattt

SEQ ID NO: 107653 - DNA, 357 bp, Arabidopsis thaliana columbia
acttatctcacggatctccgccgcgcaaacctacccaaatacaccagctgcttcatcggggtgggaggactctactactgcgggaacgttgactaagcccggtggagttaaagagggtaaaggaaaaagggcaccagaaagttgcaggacaagaaaagcttcacaggaaccgttctatccagatttagatgcacttgatgctgtgctagagacgatcgaagctctgactacgatcgtgttcagcggagtagctagattgctcgaggtacgattaactctagcagagctgggtgaagcgtttatgttacatggaggagatcgagcagagaggagcaaagaggttaatgcgaagaacat

SEQ ID NO: 107654 - DNA, 464 bp, Arabidopsis thaliana columbia
acctgcaatcactctcaatggctgtatcacttccaaccaagtaccctctacgacctatcaccggcatgccaaaaagccaccgtgcctcgcttctccgtgtacgtgtcacctgctctgttactaccaccaagcctcagcctaatcgtgagaagcttctggtagagcaacgcactgtgaatcttcctctgtccaacgaccaatctctgcaatcgaccaagcctcgccctaaccgtgagaagcttgtggttgagcaacgccttgccagccctcctctgtccaatgacccaactttgaaatcgacatggactcaccggttatgggttgcagcgggctgcaccactttgtttgtctctttagctaaatctgtcattggagggtttgattctcatctttgcctcgaaccagctttagccggttatgcagggtacatcttagctgatctaggttccggtgtctaccactgg

SEQ ID NO: 107655 - DNA, 406 bp, Arabidopsis thaliana columbia
cagccgaagaaaatgctctgccaaaagaaactgaaaatatattctctgaggaatctcagttacgtgatgttgatgttggggttgagagtgcacaagaagtagcatgttcccctccaagagccatcgaagaagctgaaactcaagaggcattacctaaaccaaaggaacagataacagtgcccatttctagtgttgcacattcatctactgaagttgcagcagcaaaagaccatttgtctggaagccttgagggcgataaagcaaagatggtgaaactaacagcgagtgaaatgtcatcggtactaagtaagctcacaaaattgggtccgccgcagagtaaagaaagggcagatgcattagagtgtttattggagaaatgtgcaaggcttgttaagcaagagaaata

SEQ ID NO: 107656 - DNA, 323 bp, Arabidopsis thaliana columbia
ctccgatttaaagaataaagcaaacacatgatccatttttttatagggtgacaaatagtagacttttatgggttttgtcatctttcatgtctcatctatcttattatgtttcccaagatttatactcctctttttattcattttttctctttataattttctaatatatttattttctcttattctttatttttcttaattttcatttctttttttcttttttttttattaattttttttttatttttatttattttttatttttctctttttgagttagggagtttttttatttatctttttttttatttctttattttatt

SEQ ID NO: 107657 - DNA, 444 bp, Arabidopsis thaliana columbia
gctctgaggaaattttatcgacaatccaagattcaaacactgaccccataaaggagactgaaggagacgcttcttatcctattgacgtcattgagaaggccattacagaagagaagcatgtagtggatgaaccagcaaatgaggaaaaaccttctgaatcaagagctgctttgtcccctgagaaagttgtaccaattaaccaagattcagacacaaaacccaaagagggaacctgaaggagacgctgctgctccctgctgatgtcattgagaaagctattactgaagagaagtatgtagtggatgaaccatcaaaggatgaaacaacttctgaatctggttctgctctgtgccctgagatagccgtacccacaaaccaagatttagacacagaaccccaaataggaaactgaggaagacgtttcttcttctgctgatatcattg

SEQ ID NO: 107658 - DNA, 408 bp, Arabidopsis thaliana columbia
aattccgaacaccaaatttcgaatttctgccacttgctttgtgatctgatcgttcgaaattgaccggagaattcttctgtgttcttagatctgtcgcgaatttgttaaagctcctcagaaggttttggttacagatcttctctgtggtcttcaccactatggccgctccgtttttttcaactccatttcagccttatgtctaccagagtcaacaagatactattacaccgttccagattttgggtggtgaatcccaagttgttcagataatgttaaagtcagaggagaaagtcattgctaagcctgcttccatgtgctacatgtctggctccatcgagatggaaaatacatacactcctgaacaaagaagtggagttctgcagtggattctgggcaagagtgtaagca

SEQ ID NO: 107659 - DNA, 461 bp, Arabidopsis thaliana columbia
cggacgcgtggggaaaaaaaggatatcttacttttgttttttgtttgttttccaaacctatagtgggttaggattcgaaaaaggaaataaagattaaaaaatttattcataaaggcaattagatctcacatgccaaaactaaatttttgtaggaatccaaacaacattcgagattttctcttataaatagagatttagttgatggcctcctcacacagactctttcatagactttagatcatcaccatcatattactcaaagcaagaatgtctgttgcagagatcttcgagaagagtcgacaaaaacaaagatgggaaaatctcatgggacgaatttgctgaagcgattcgcgccttttctccttcaataacatctgaagaaatcgataacatgttcagagagattgatgtcgacggtgataaccaaatcgacgttgcggaatatgcttcttgcttgatgc

SEQ ID NO: 107660 - DNA, 265 bp, Arabidopsis thaliana columbia
cttactacttttttcttcttactcccaaacctataagagagaaggattatttcaaaaaagaagaaagacatttaaaaacctattcatttattcaattagatcttacattccaaaactatcttttctctttaattcatacaacattcaattttccctcttataaatatacatatacctaatatcctcattacacatactttttcatattcttttattacttcaccatcatatttctcatatcattaattccttattcaataatctt

SEQ ID NO: 107661 - DNA, 406 bp, Arabidopsis thaliana columbia
caaatcgtgtcacatctccttcttctccactttaccaaatcgtgtcaaattttaggggttttggttttcgtacttcatcaaattctggaatctggttttttcttagttttcttctatatacctttgaatcgcatctttgatccaaattcattttagatatcaccttgaagtcgaatttgtgattttttcttttcctctcgaattctcaaagtctcacgcaactatgaaagaagacatggaagtactatcgctcgcttcactaccggttgggttcagatttagtccaacggacgaagagttagtccggtactatctccggctcaagatcaacggtcacgataacgacgttagagtaattcgtgagatcgatatctgcaaatgggagccttgggatttgcctgatttt

SEQ ID NO: 107662 - DNA, 434 bp, Arabidopsis thaliana columbia
gttagatgacatcatcaggtatggatcaattttgctttttgctagtgaagatgatgaagcaggggagtctggaaaaattcattatgatgatgcggctatagacaaattgcttgatcgtgatctcgtggaggcagaggaagtctcagtggatgatgaagaggagaatggattcttaaaggctttcaaggtggctaattttgaatatatagatgaaaatgaggcagcagcattagaggcacagagagtcgctgctgaaagcaaatcttcagcaggcaattctgatagagcaagttattgggaagagttgttaaaagataaatttgagctgcaccaagctgaggagcttaatgctcttggaaaaaggaagagaagtcgcaagcagttggtatccattgaagaagatgatcttgctggtttggaagatgtgagctctg

SEQ ID NO: 107663 - DNA, 382 bp, Arabidopsis thaliana columbia
aaaaaattggttagcacggaggttagctgcagatccatagggccttagagagcggttgaggagttcgggcttaaaggcaacggttttgagccaccatcctttagatctggctcattttagcatccatcgagccggattgaatcgtcgaaactcatgttgtttgagtactttcggtttggaagagaacggctaccgcccagaggattgagttgcttcttcaggatccgatttcgtcgatgtgcctagtcagagcaactagctttccgggagatctgctgtgggttggtgcatctgagggatggttttgatgatgatcaccggtctctctcagtggaagattcccgatcttcggtggtgaccacgaaacggtagctcttgagcc

SEQ ID NO: 107664 - DNA, 452 bp, Arabidopsis thaliana columbia
acgatactttctctgcaacacgcctacaatacgccatcgaatatttatatcatcaaaccactctattgtgttcatttttcaacaaaattcatctttaatttttcgatccaaggagcttctctgatcctaattaacctaaacaaaacattcattacaggtatcttaaagattatggaggaagaagacaagaaagtgatgaagtgttttagcttctagagaatcatgaagaggaagaagaaagaggaggaggaggagaagttgatagtgactagagaattcgcgaagagatggcgagatcttggcggtcaaaaccattgggaagggatgtttcagccgctggatcaagatctccgggaatatatcatacattatggtgagatggctcatgctggttacgatactttcaatatcaacaccgaatctcagttcgccggggctagcatctactctag

SEQ ID NO: 107665 - DNA, 443 bp, Arabidopsis thaliana columbia
gtcaaaaacaacagaacctatctttatttccttcagagagagagagataaaggaaaaatcttgtgttcttgtctgaaaaaaacctcacgacagatcggaaagagtaagcttatcaagaatcattgttcaatcagacaagatcttaagttggaatgagaagagaagtttttgagtcggtgagcaccaatgcttctaatgaaagggttcacgtggctcccaaaatagcggcagaggaacaagattatgaggagaaagaatgcactgaggagaattctctctctcagaatcataaatcttctaatgtaatcacagagaatgattcgaagaagaagaatttggatgaagaggatgattgttctgttgcttcttcgatgaagaatgctaagtctaaagtaactcatggaaccgctccacgatttatgagtgcttagcgcgctgagaaa

SEQ ID NO: 107666 - DNA, 424 bp, Arabidopsis thaliana columbia
ccacgcgtccgcacctacactctccggttacaatggcgactttacttacagatgttagggaaatcaaacctacaatatatctcattcacattccgaatcctgaactcctgggtttttccctgttggtgtcaccatcgttctcgtttcttcgatcgatcgttgagtcaccggcgttaagcccgactcgagttccttagataatcttaagattaggttgtaaaaatttgaatttggtgggtttggtttgatgatgttgacccaaactgttggggtttgaagttatttaggagtggaagatttacacagaagaagattatgacgctttatattcgccgcgaagctttcaagctatggaggagattttgttcggaaataacaacggagattggtctgctcgctgagaactggaaatacccttctgctg

SEQ ID NO: 107667 - DNA, 453 bp, Arabidopsis thaliana columbia
gaaggaaacaacggaggtgttaatgtcgtcgttaaggagaagagactttgtgctggtgatttgagcagttttaaaagatccaacgagcaagatcaaaaattctttatcgggtggaaatcgaaatccgggttggatctagagacgggtcgggttatgagattgtttggggttgatatttctttaaacgccgtcgttgtagtgaaggaaacaacggaggtgttaatgtcgtcgttaaggtgtaagaagcaacgagttttgtaataacaatttaacaacttgggaaagaaaaaaaagctttttgattttaatttctcttcaacgttaatcttgctgagattatttatgttggaagttgtaacaagtggaaaaaattaattaggtgtcaaacaaatcttgtgttaatattctttgtataatggatggatgagctgttattaattactgtaatttttt

SEQ ID NO: 107668 - DNA, 417 bp, Arabidopsis thaliana columbia
ctctacagattcatcgtttgaggagttctgtgagtttatcaaggtcagatatgtatcatcatcttcaaacgaggatttttctccaccaacaaaatgatttgctgagagcagaaaacagagctaggattcatgctatgacctctccatcaatctgcagatcttgtgaggagcccatcatttcaaccgaagagagggagctatggttggagaatgctcgtcttcggtccgagattgatacattgacttgtttcatatggagattaaattcgttcaggaacctatatcccgcatttgctacgtctttgactgaagtgggttacggagtggcggttatgacgtcactttcgctgaaagaagttgtttttcttgcgaggcaaagaactccgatgtggacaagttacgggagattgaatctcg

SEQ ID NO: 107669 - DNA, 459 bp, Arabidopsis thaliana columbia
ctttgttgaaccaaatcattccaagcctttgccgattaattctagcaagccgatttctagaggactagaaatgaaattatggggttggatctcttaatcatagccttggcagtattttgatgataaatttgtttttgatgacgagataagcggaagacagttgtagatcgccgaactcattacagaagtcgacaacggctgaaaagaagatgatgattaagctgatgaagatctaagcttgaagattttagagaaagcattatcgaggcgtgatgttgggaacaagcttgattctgatctcttctccgattctggtgtagttagtactgtgatggttaatggaagtaagtctaaggttaaaaagtctgagagtagtcagaagatgaagagaaattagcttggagctgaccatgaaattcctattggttggaatgaccaagatgaagagtaagtggtgga

SEQ ID NO: 107670 - DNA, 240 bp, Arabidopsis thaliana columbia
cgcgttctaaagaatcaacataccaaaattcgcagagactctatttataaccttcgtttgtgtctcagagggggcgaaagctttgagtcaggggagaaattccgcgaatcgtgacagatccatgatcagcagctgcgaacggtaacccaagcataacggctaaaggatcgagcacagaactaatacttggaagaaccgctcacaacacgtctttttcttctttgaggaaaaaatcagacc

SEQ ID NO: 107671 - DNA, 474 bp, Arabidopsis thaliana columbia
cccggggaagctcttttcaatggaggtccttgcgagctcttcattatccccaatttcttttactaagcctaacataataaaccctaatttctcaatccaggtgaaattgtgggtaaaacaacctccaaagatttcaaaagctagcaaatttagttatgctcgtagtcggaggtacatttcaaggagcaatgcagcaaacccaggagtcgtgttcgtctgtaatagatttctgtgtgttatcgaaagaaatgatcagaggaaattatctgggaaggttatgatgaaatcttctgttaatttcagacagaatctctctgttgcattaattcggatcgtttctgttctgcttgtctcttccatttctgttggtaccactgattcaccaccatcatggggtcttactgaagagaatcttctcttcctcgaggcttggagaacaattgatcgtgcttatattgataaaacctttaatgg

SEQ ID NO: 107672 - DNA, 182 bp, Arabidopsis thaliana columbia
  unsure (1)..(182): unsure at all n locations
ggggaagaagaaaaatgtataaatcaccattaacgttgctcacacttcttactatttgttttggatgcttcgatctcagcagtgctctggatggatcttcgtcacctgtggttcagctcactgcttctaactntaagtccaaggttcttaattcaaatggaagttgtttggtagagttcttt

SEQ ID NO: 107673 - DNA, 341 bp, Arabidopsis thaliana columbia
ctcgacggtcgcataacaaaagtccatttcttcgttctgttaggaggatcaccatctatggaggaagagcactaagtcatagttcgggactctgctctcaaggatggcatcctcagtggtctatcttatctacgatggccttaaggtacttcacatctgcagtaatgactactactgatggagagtcaacttgatttaaatccaatcaggtgtggaaaaagttcagggaataatagatggccactgcctattgttggtctagcgcagactacaatggtgtcatgctgccatagttcatgacatctaactgcaagctggttcagacccttattcatacggat

SEQ ID NO: 107674 - DNA, 385 bp, Arabidopsis thaliana columbia
ggcacccgtaaccgaactcgtagctccactctcttttttcaacactcgatgcaacagacgatgcaagtaccgtagagatggacaggcgactcctctcaccgatttgtctgagccacatgagaagctcatctacacaaccgtctgatacaccaactcaggaatctataaaccttattatttgccaacggtggatgtagatccaatctcgccttagtattcaagtgttattcatagattaccaataccttttgttgatgatgagctgcatcatcttggttggaactcttttagttatcgccattgtgttgcatctgatgatagactctttctcttgctaccgtcccttatatctggtcgcatatatgcgatagatacttaggaaaac

SEQ ID NO: 107675 - DNA, 373 bp, Arabidopsis thaliana columbia
ggcaccagtaacgttacttgtccctccactttctttaaccaacacttggaccaaaagaggatgcaagtaccgttgagaacggcacgagactcctctaacatatttgtctgaaacataggcaatgctattctactcaaccgtcttttacacctgatctgaaatatataatcctgattatttactaacggtggatttatatccaagactgtatatagctacaaacgttattcatagataaccaataccttttgttgatgattagcctcatcatcttatctggcactcttgtaggtatcgccatggtgatgcttcctattacagacactttatcgtgataacgtttcttacatctgaacgcatttataagatctat

SEQ ID NO: 107676 - DNA, 394 bp, Arabidopsis thaliana columbia
aagcttggtacctctggtgggtatagatgtttgggagcacgcctactacttgcagtacgagagaggtgaggcctgagtatcggaagaatgtatggaaagtgatcaactggaaatatgcaagcgaggtttatgagaaggaaaacaactgaatcgtttacacgatgacataaggagatgaaccagttccagctcagcttttgttttaaggttgtctgaaacaaacttacagtgtctctttggtttttaagatttgctcaactcagctgtgtggtacgttgttttacaatgaaagttttcaagaataaaaatttgctattattgtcagaaagcgctattgtttattctacgaagaaaacaaaacggaatcttattggtataataattacctcatttc

SEQ ID NO: 107677 - DNA, 439 bp, Arabidopsis thaliana columbia
cggacgcgtgggcggacgcgtgggcggacgcgtggggtctcgttctctagtcttcttcttccggtttgttgtctaggtcgtcccgtgtctctcccatggaaccggaggagaccacgacgacgatgaggcttcgcacgttaagagttccgatctcaaatccaaatccttaatctccgtcaagatcgcatgtcttgtcatcatctttgtcctcacgttcataagcggagtatctgcttatttctagaaatggagccaagggtttttggttcttggtacacaattcgccggaggcgtgtttcttgcaaccggcttgatgcatttcttgtcggacgctgatgagacgtttcgtggttttgtgaccgcagaaggagagtcggagccatctccggcttacccatttgcttatatgttggcttgagctggtttatgttgaccatgc

SEQ ID NO: 107678 - DNA, 455 bp, Arabidopsis thaliana columbia
ttggtattctattaagaattacaaaccggagagcttggagttaggttctaaaggtgttggttgagttgctgctggtgaggtgaagaagcatgatggttttgggttgaagaagagcggaaagaactggtctaaaggatggaacttttggggattgattcagaggaaaactgatgtggcgaagaacgaaatgaaaaccgagcaaagtttgaaacttggaggaaatactatggagggttctcttgctgagtctttgttgaagcttaggagagtggctaaaggagaaaccaatggtgatatcagatgcattgtacgagaaagtgaacaaaaactgcgatttcaaacaaaaacttgtgaccaaggaatgcaacgacgctttagatgagtattttgatgtatacaagatccttgacatgtacagtctgtacgctccaaagtgtgttcccaccttcacgaac

SEQ ID NO: 107679 - DNA, 307 bp, Arabidopsis thaliana columbia
cgccccaagagcattctcaagcccatggggcttttttccgtacactaggaccgaaatggaaagcacttactgctagggacggaacaagccatatataacatatcagcgttaaagatggccactgctattgttctgtcccgacttgtacagatggtcccaagagcattctcaagcccatgaacgccctctcatttcctactcacgactctataaaacaacaaatgtttgccaaatccaaacctaggagagtctccatcaatctccccgacaacgaaatcagccaccatctcaacttccgcgaggatgc

SEQ ID NO: 107680 - DNA, 277 bp, Arabidopsis thaliana columbia
cgccccaatagcattatcaagcccatcgctctctcttccctacacttgtacccaaatgggaagcacttattgctaaggacggcaggagccacctctaacatatctgcgttaaagatggccactgctattctattgtccagttttatacaaatggtcccaagtgcattctcatgcccatgtactccagctcatatactactcacgactctataaagcaacagatgttagtcatatacagccctataacagtcttcatcaatctcccctacaacgagat

SEQ ID NO: 107681 - DNA, 459 bp, Arabidopsis thaliana columbia
  unsure (1)..(459): unsure at all n locations
cttaacaaagggaaacgtgtaccccgatccattattctttctaattccatggatccaacaaggtgggctgtttctgctgtcgatttaaacttaaagttaatgagatggcgagcattaccgtctcttaacttaaatgtattgtcctctgtcaaatgccttcttcttggagctggtacattgggttgccaagttgctcgtacccttatgggttggggaatccgcaatatcacctttgttgactatggaaaagttgccatgtctaatccagtcaggcaatctctctataattttgaagattgtctaggtcgtggtgagtttaaagctgttgctgctgttaaaagccttaaacagatatttccagcaatggaaactagtgnagttgttatggctataccgatgcccggacatccgatttctagccaagaagaaaattctgttctcggtgattgtaaacgcctt

SEQ ID NO: 107682 - DNA, 310 bp, Arabidopsis thaliana columbia
tacagatatgatatatacgtggtttgacagaaaaacaaattacattattcattcatgatcctggtttttcttcttcttcttcgcggttccttttcgattcatgcgcatggaaccaaacaagctaaaaagctaggccttctcttccttgttgaagaatggataaactcaggaggaatcttgtagagatcttcatcaacgggcttaggtggcttacaagtcagagcaacgtcggttttgaactgcttaacaccgttgacgtcaatgtaatacttgtccgactgtgcactgacatcacgcacacgcctttgtg

SEQ ID NO: 107683 - DNA, 379 bp, Arabidopsis thaliana columbia
attacttacgacaccgcgagctctcaatcttcttcttacactctattgcttgagtttcctcttcactggaacagtttcgtgtaccaaaggcagttctttcttttgtcccaagagctaaagaaaacatgggaataccagatgcagctcaagacttgtcgacagagatggaagttgatgcttttagaagaatcttccctcttcgtttctttgagcgtcatctctctgaatctcttcgtcctgatggaagacaacttggaaaagctagagacaccattgttaatcttggacttgtttcaactgctgatgggtctgctcttgctaagattggttccactactatgctggctgctattagaatggaagttatgactccttctac

SEQ ID NO: 107684 - DNA, 289 bp, Arabidopsis thaliana columbia
gcgccgccggttcccgtcgacccactcgttcttttgaagcgttctttcatttgttcctgaaaatcaggactaacacagagttattcaatttttgacggaaattaattgattggaaagtggggattactgttttttgtgtgggctatttggttttgactgttatgagtggttcgtatgactattgtggatgtctgatgggttttgagacttattttttacattggaggaagttggaagacaaagggatcttaaactcgatcggaatggcattacttgtagagctttggtg

SEQ ID NO: 107685 - DNA, 453 bp, Arabidopsis thaliana columbia
ggatgatctaaagatgatcgcgggttgtatgatatcatctggctacagcaaagaatgctttaaaaggtacaaaagaatccgtaaatcgatcattaacgaagcgttaaaccaactcggattcgagaatttaacgttttcgcagattcagaaacttgaatgggaagttatggagaagaagatacgtaaatggttaagaacaacaacaagagcagtgaatactctgttttccggtgaacaaatcctctccgatcatgtcttctcttcatcatcatcaacaattcgtgaatctgcatttgcagaaatcacatcacaaaccgctttagctttgttcactttcccggaaaaaatggcgaaatgtcgaaaatctccggagaagatcttcctcactctcgatgtttatcaaacgatcgttgatctattacctaagatcaacgaactctttagctttgattc

SEQ ID NO: 107686 - DNA, 441 bp, Arabidopsis thaliana columbia
ctccgatcatcggaaaaagcagtaatcaagatgcagaagctcaacgacatcttctccggtggaggagacggcgacggaacaaccgatagtttccttgaagatggatcggagggtctctgtgctctctccaccacccagagaatgtacggattcgccgcgtctttagccactggtctgctacttatgttcctgtctatgattgtatttgggatccccatcaaatttgcactgctcttcacatttggaaatgttctagctattggaaggtatgttgtcgcctgaagattgcggcgagaagaacttgttgttcgactaacatttcgagatttcattcatggcgattcagttatttacatccatagaattgaatggttctctttttatcttatctttcatggactctcaattaagattagtcattttgatttctgatgctaactg

SEQ ID NO: 107687 - DNA, 411 bp, Arabidopsis thaliana columbia
gccaattcttgatgttgagtttatcgcgggtgggaagcagtttatctcgtggagtgatgtttctggcagaaatataagtgagaatgctgttatagtttgggatatttcgagagaggttcctttatctaatcaggtctatgtagaagcatacacatgcccttgcatcaaacgtcacccgcaagacccagtcttcatcgcgcaatcacacgggaactacacagcaatcttctcaacaaacccacctttcaaactcaacaaatacaagagattcgaaggtcactgggttgcaggtttcccaatcaaatgcaacttcagcccggatggagaaaccttagcctctggctcatctgacggttctgtatacatgtacgactacaaatccactgcgctcattaagaagctcaaagctta

SEQ ID NO: 107688 - DNA, 383 bp, Arabidopsis thaliana columbia
  unsure (1)..(383): unsure at all n locations
cgacccacgcgnccgaccaattctagataataagtttattcttttcgaaaaacattttatcttgtggagggatttttttatcataagggtagattataatacttttatagtttataatattttttgataacttcctttatctaattaaatctatatttaatcatacacattccctttcattaaacttcactcacaatacccattcttcatttcccattcacacgaaaactacacaacaatcttattaacaaacccaccttttatacttaacatattcaaccattttctatatcactttatttacttgatttccaattcaatttcaacttttacctctaattgatataccttatcctttctttcatcatacttttctgtataca

SEQ ID NO: 107689 - DNA, 371 bp, Arabidopsis thaliana columbia
gagtttatagacttgttcattgctaagcaatttttgttccaaaggcagtggcagagagggtggtgagtatgcacggcggcaaggagttgatataatgggagatatgcccatttatgtaggatatcacagtgcagacgtttgggcaaataagaaacatttcttactgaacaagaaaggctttcctcttcttgttagcggtgttcctcctgacttgttcagtgaaactggtcaactgtggggcagccctctttatgactggaaagcaatggagagtgaccaatattcttggtgggttaatcgaataagacgcgcacaggacttgtatgacgaatgcaggattgatcactttaaaagatttgcaaggtttttgg

SEQ ID NO: 107690 - DNA, 381 bp, Arabidopsis thaliana columbia
  unsure (1)..(381): unsure at all n locations
tagagatggagaactcagtgacccaagatggtatcgcgacagtattagccaatcagtccggggattcctcctctggtagacccgaaattgttgttcaagtcgtggatcttaagcctgctggaaatcgatatacgtttagtgccaatgatggaaagatgaagattaaagcaatgttaccagcgactttgacttctgatatcatctctggaaagattcagaatctgggtcttattcgtctccttgagtataccgtcaatgatattccaggcaaatcagaagaaaaatatatgcttataacaaaatgtgaggctgttgcttctgcacttgactcagagattaaggcggagattaaagcttccacaggcataatgtngaaaccca

SEQ ID NO: 107691 - DNA, 241 bp, Arabidopsis thaliana columbia
ggagggaagaaaaaagttaggttcgaaactattgtaaactagttaggtgaaaagcgaaacagcactcttcatatctattgccgcgttctcttgccattacactaaatcttacttacttcttatctcctaataaattcttatctaatgtaccttcttaaacattcatttattattatattttccttttatttttttatttttattcttttaaatttttttattacattaataatattttatt

SEQ ID NO: 107692 - DNA, 302 bp, Arabidopsis thaliana columbia
cttccaacagagggccacattcatgctagcattgccaggtttcgtttaggtcaaggttctttccgttccacggcggttccttgtaccctaccaagacacgcaacctttttaaaacccgccgggaactccgatgaaaaaaaccctttctcttacactatttatctccaaccattacccatatatccaccgccgcaaaagatttcccaaccgtattcttcttcaccgcagccgtaatcgacgtcgacgatccatctctagataatccagatctcggtcctttccttctaaaattagctcgtgac

SEQ ID NO: 107693 - DNA, 348 bp, Arabidopsis thaliana columbia
atgagaatgtaaaacaggcaacggcatttgggatgaagagtgtggtgtatgtacctgggattaagccagagacagtatctgcgttgtctgcactatgtgacaaggccaccatggtgagcacaggggatgtcttgtagcaccaactctatccataggatctatacttcttcaacaggctgtgatcatggccttcttccactacaacaatgtaaagctagtggagtcaaggcctaatgcagcggatcttccttctgctgaagctatccaaattgcaaacaacatatcaaatgttggtcagatctacaacagagaggataggtcaactgatgtttaggcaagaggtcaagt

SEQ ID NO: 107694 - DNA, 425 bp, Arabidopsis thaliana columbia
gctgatcttgagagaaagaagtcacaagaattcaatttttttcttggttattgacggggagggaaaagttgagattcttgagtttcctattttgatcgtagatgccaaaaccatggaagtcgtagacttattccacaggtttgtaagacccaccaaaatgagcgagcaagcaattaacaaatacatcgaaggcaagtatggggaactcggggttgatcgtgtgtggcatgacacagctattccatttaagcaagttgttgaggagtttgaagtttggttagctgagcatgacttgtgggataaagatacagattggggtctgaacgatgcagcttttgtaacctgtggaaactgggatataaagacaaagattcctgagcaatgcgtagtttcaaacatcaatctttcgccatattttatggagt

SEQ ID NO: 107695 - DNA, 449 bp, Arabidopsis thaliana columbia
  unsure (1)..(449): unsure at all n locations
cggaanngcccggggcgagcccacgccgtccgaaaaagatgaagtgattgattaaattgaaatcgatcacatcaaccatctctttctggcgcgtgcaaagttatctccgtttcaaaccgaaccaatcaattcgggaatcttcatctttctacgtgttttctcagctatgtatctctgggttcgacttcagtcaaagcttcaccagccatggatttcgttaggggtttttcggaggaagcatagaaggaaggtcttggtgacggctggttgtttgggaagtgggtatttactctacaaactatacaattcccatactcgtaggcttgctgatttggaacgagaactcgctcacgagcgtgaaaatgacgaaatcatcaaaacccaaatgaaagcacatttcgagagtattcagatgattgcggattcgaccacactgccttacgcaatgc

SEQ ID NO: 107696 - DNA, 321 bp, Arabidopsis thaliana columbia
cggacgcgtgggtgattttattttttccggaattttgaaaatctgtgagctgatggatcttcgctaatcgcagagacgaatctgcgaaaattccaacaccagattccggcgccggagcgccgatgaacaatcaggtcgtttagtaaaattcgatgaatctcccgcggaaataattagattcgatttcgatttccgtggggaagttatgttccatttgatttttgtttcttttgtttcttgatgtgttttgttatattatgttttttgtagacttttatatatctatttttgttgtttttattattttaatttattattatt

SEQ ID NO: 107697 - DNA, 379 bp, Arabidopsis thaliana columbia
  unsure (1)..(379): unsure at all n locations
gtnataaatctctcctcccttttattttttacaacaaatttcattattgcatggcttttcaaaaacaaaggcctctcaatcatcctctaatcaacactattcttatcttcaatcttcatcttcttccacctactatctccatcgcaatctttttcaaactactctctcctcctattcatctttcgactttcattcttctttctcttatttatttcctaccatcctcttattttaatttatcatttctatttttttttaacctttttttattcatattttctttaaaaccctaactggaaagactattactcttgaggtggagagttctgacaccatcgacaacgtcaaggccaaaatccaagacaaagaaggtattcct

SEQ ID NO: 107698 - DNA, 399 bp, Arabidopsis thaliana columbia
  unsure (1)..(399): unsure at all n locations
ccggnanngcaggggcgacccaggcctacgcagacctgtattacacatcaagaaacacatcttttgtagatggagatcactaacgtcggcgcggatgatgcaatcgcagagcagaagctgcctaagatggtgtacgactactatgcatctggtgcagaagaccaatggactcttcaagagaacagaaacgcttttgcaaggatcctctttcggcctcggattctgattgatgtgagcaagattgacatgacaaccaccgtcttggggttcaagatctcgatgcccatcatggttgctccaactgccatgcaaaagatggctcaccctgatggggaatatgctactgctagagctgcatctgcagctggaactatcatgacactatcttcatgggctact

SEQ ID NO: 107699 - DNA, 295 bp, Arabidopsis thaliana columbia
  unsure (1)..(295): unsure at all n locations
gctctctctaagtncaaatctagatctttcgagctatagagacccaacggaaagagggatcgtacgcaaaagttagggatataactctctcgtctagagctaacaacaccgtagtggtggcgatcatcttcttaggatgtttacttgcgttgacctctgcaatataagaagctacgaacctaagatcaggattagggattgaacttaggactactgactcttgagttggagctaacaaaaacgatcctgtctatatcattgccaatgaccaatgaaaccatattaccccttttat

SEQ ID NO: 107700 - DNA, 420 bp, Arabidopsis thaliana columbia
ttccttacatataacaatctctcttcattacaacataagctacttcatttggatggtaacaagtttctgcttcccaaaagaaccaagtttcgtcgagatggagaggctaaactcgaagctgtactcgcaaaactgttatataataaaggagaacgagaggttgaggaagaaagctcagattctgaaccaagagaatcaacaacttctcttcgaactcaaacaaaagctctcgaaaaccaagaactctagtggatcaaatcaaggaaacaacatcaacaacaacaacctctcttcatcaagctctgcttctggataatcctgatgcaacaaaactctttaggacaagacttggattcggataattaggagaacccatcattcgtatctttgattttattggtgtaatgtaagaaaaattag

SEQ ID NO: 107701 - DNA, 425 bp, Arabidopsis thaliana columbia
  unsure (1)..(425): unsure at all n locations
cgtccggtagttcttcncactcccaccggacttttctctttcgncagatccatcaccaaagccaaacgttctcctttctctgctcccgattcatggctcctccctgcaccaaacactcaccggagtcgtccccgcgtcgtcctcgctctctctaaccccgacggaagcgtcaactcaaaaccctcaacctcagcttctcaaatcccttcttcaggagatgaaacagttttcgagggtcaagataatgttcctctcgagggcgtgattcaattcgataaaccgtcatctacttcatcttctaacattaccaaatggggtcgtgtggctttacttgcgggtggtgatgttttagctctgcttatcttctctgccattgagagatttagccatgggttccctgttttttctcttgatactcctcacac

SEQ ID NO: 107702 - DNA, 385 bp, Arabidopsis thaliana columbia
actacaggttactgctttatggagtatatgtcatgcttgagatagagagagatatgccaaaatgtctgacgtcggaacataaacgacgacggtgaattctgacttggcatccgtagccttctccggctgggagttgacataaatcgtcatgcactgactaacatgcgcacacagtgaattgactgattgtctctctcattgctgatggcttgcgtacgcggtgatatcttcaatctcggcggttgtcttcctgtaccagcttctttgccgtcccagttctacacagactggctttacacaatgagcactggagtatgggtgatccagactatttactacgattacatctacatactttgtagacatagacgtaccaagaattgtc

SEQ ID NO: 107703 - DNA, 416 bp, Arabidopsis thaliana columbia
gtttgtcatctacatcctcaaatgttgctaatctggctgactccttcaatgagcagagtcagagtttaagtcatcccatgacagatttacttcctcagttgttagcaatgcaagaaacgatgaatcaggtgatggcttcgcagaaggagatgcagagacaactatcaaatgctgccactggccctatcggaaaagaaagtaaaagactagaagttgcgttagggagaatgattgagaaatccagcaagtcaaatgctgatgctctatgggcccgcatccaggaggagactgttaagaatgaaaaggcattacgtgaccatgcccagcaaattgtgaatgcaacgacaaacttcatgagcaaggagttaaatgccatgtttgagaaaacgataaagaaagaattggctgcaattggt

SEQ ID NO: 107704 - DNA, 392 bp, Arabidopsis thaliana columbia
  unsure (1)..(392): unsure at all n locations
gaacaagaagncggttanagnnnnngattttaacatttaacatgtccgcttgactagatgggagctgatggcttatgctcacatggataacccgcatagtcctgatttcttgttagggaagctggaagaactgtaccccttcgttgaacaaatccatgaggaaacactgaaagagacactgtgttatgttatcaggatacttgcatgagggtttaagcagtctggatcaggagattgtgacacagctcttttactgattccttgttgcacgtctggactctcactacacaaagctagcagaactagtcgtaaaagctttccttctccataccctttaagaagcaagtggttaacacaacatcacaatcttcgcaccacgcaacgatgccttg

SEQ ID NO: 107705 - DNA, 346 bp, Arabidopsis thaliana columbia
  unsure (1)..(346): unsure at all n locations
gggcgcccacgcggncgaaaaaaacaaaaaacannnnccaacnctcncncnctcncncncgccagcnncaagaggaggaggcgcaaagnnccgaggacaggangaaannncncgacggcanggcnagcnccgacgaagnncnnnnnggcnnccccgacgaaggaaaccacncaccggaggannanaaccccgccgccggcgacgaanccgaagnagacaacganaccaccgannagaanncagaagagaacagaaaannnnggcaagaacacgaacaacnncnncaggcgacacngnanaggacaagnncaanagagacaaagnaaagacaagcaaccaaagaagc

SEQ ID NO: 107706 - DNA, 386 bp, Arabidopsis thaliana columbia
aaacaattgttagattaacgtaatctttttattgtttcccaagtcatggcaaaacggctggggtcttatctgttcatctgcatgtttgttctctcaggctttttggtattttcaagtgcaaagcagttaaaaacatgtacctcggtcataaaacttggccacccatgtgatattgaatcatgcctaaacgagtgttttcgagtttacaataccggatttgcaacttgtcgcggagacaagtactcacaactttgtacttgtgagtacaattgctaagcttagacgtactcctcatgtatgctgttaaactaaagcaaaaaatctttaatgttaagtaccttattctattccatgtaactggaggatatggtcaaatatatatgaat

SEQ ID NO: 107707 - DNA, 422 bp, Arabidopsis thaliana columbia
gaaaaagtaaagagaagtgcgctctctcttactctcatcgattttacaaaatatgagccatctccaaattacagagttctttctcaaacccaggtgtgttcctgtccctgcagagatggcttggtacttatgaatgtgtttatactaatcactaaactcggggattttggctgtataatcaagaatttcatttattaacattgtttggccttgaaggcggtgaggataaaccagagctcaaaacgggtgcactctgttgtattgtggcctcaaggccactggttacaacaaaatcttcaccccacagcggaagggatattcctcaatcaagtcaagctgaagccttgcaatggcggacaaatttcagcttctcacctgctgctggctatactagagatggtttgaacagggtatgagtgatg

SEQ ID NO: 107708 - DNA, 317 bp, Arabidopsis thaliana columbia
gtgagtttgttgattgtatttatcagttaatggcgacgtctatgatacggaggaggttcaagcaagggacgaatatcgtctgcttccgccgttactacgccgctcacgcctaagatctaggcaacgccgtccccaatgaaccagctatatttttgtagccaacatcatgatactttgaaaatggaggaacaattgatatcccacatcctttgaattcacttcaccatgaagtacaactcgctttagtgattgtacagatagcttaagatatacctgaatcaatagccatgtattacatttgaagatacgcggttgct

SEQ ID NO: 107709 - DNA, 414 bp, Arabidopsis thaliana columbia
cagaggtatgtccatgactcttgattaccattgatacgtacattagttatttacggtccttatctaataacttttctatttcatcatttatagtaaaatatgaaattcatcatattaattttgcaaaactcattgagttttctccgtctttcacaaatagatctcacttttatttctacgaaaacgtaaaagcaaagtactataagaaagataaaattttaaaaaatgaaaatgaaattttttttattttttgtgtgtggagacatctatattctaagtaaagaggaaatcttagtgcaataactaacataaaactaatatgtatggcatgttttttttaagtacttgcatagctagtagttctttttcagttcatggtagttaattcacctcattaaggaaaaatttattttg

SEQ ID NO: 107710 - DNA, 330 bp, Arabidopsis thaliana columbia
aacacacatacagaaaaaagatacatctatacaaatatctataatcatagctaagtggtaacacaacttaataaacaataaacaatagcctagatgagcagcaagaggagccacaacggtgatcaccactatcatattccttatcatattctctatcaccctttaaatcatccttaaactcataaccttcaaactaacacacaaaccaccaccgggaccacctatttgtaacatcatcgggaacatgatatagctctagaaaaacatccaatgcgatctccaaggcgttctccgcgacttaggccccagtctaagaccaaacataagact

SEQ ID NO: 107711 - DNA, 351 bp, Arabidopsis thaliana columbia
  unsure (1)..(351): unsure at all n locations
ggcggacaaatcaagcagancactgatatngnacggagacggctaggctcganngggcgagggggcaaataccaacatccatgctcttgcttccgtcgctacttgtggcttcttgagccttcctaatgcacctccagaaactgagaatgaaagaatagttcgagaattctcccacttgctggatgcatccgaagcttattccatagctagtggactaaaaccaaagggaaatggaaatgatatctcaactttggctgaaaggtttatgggactcaaagctgctttagttacggacagttctactctgacttctttcggaaactgattggctagatggattacagcttagtg

SEQ ID NO: 107712 - DNA, 421 bp, Arabidopsis thaliana columbia
cgtttatcctctactacaatggcgaaaaccctagacaaatctaagaagcgcaaactcgtgaaatccaaatccacgaatttcgataagaaacagaagattaacaaacaacaacaacaaccagaatcctcaacgccatattcaagttcaagctccagctctgattctagcgattccgaatcagacaacgaattcgacccagaagagctccgtgagcttctacaaccttattccaaggaccagcttgtcgatctagtttgttccgcttctcgaatcggatcttcgatctattccgccgtcgtagaagccgcagatcgtgatgttacacacaggaaaatcttcgtttatggtcttccatgggagacgactcgcgagactcttgttggagtctttgaaggttatggtgagattgaagagtgtaccg

SEQ ID NO: 107713 - DNA, 414 bp, Arabidopsis thaliana columbia
ggaaggagaggctatgaaactcccgtctttccctaacgccatctccatcggccaggggagcttctcccgcgttcggggctcctcttcgctatccgtttgttccgccgccgccgcttcctccgccaccatctccactgattccgaatccgtctctctcggccatcgcgttcgaaaagatttccgaattctccaccaggaagtgaatgggtcaaagcttgtgtacttagacagtgctgcaacttctcagaagccagcagctgtattggacgctttgcagaattactatgagttctataattccaacgttcatcgaggaatacactatttaagtgctaaagctacaaatgaaattgaggtagctaggaaaaaaagtggtcgtttcatcaatgcttctgataggagagagattggttt

SEQ ID NO: 107714 - DNA, 400 bp, Arabidopsis thaliana columbia
agtttggctctccgttcaatctcactctcagcctcctatctatctctggatcgaggttcctccaaatgagttgcgttacttccaccgtcgatttccgtacacacatccccaacactccgatcactctccatctcttcccctcgattcactctacgcgccaccgcctcttccttgccggaggaacaaaacaaacctcaacctccccctccttctccgccgcagccgcaaggagcgaagctaattcctctcgcgatctccgtctcaatcggcctcatagtcagattcttaatcccaagaccagaacaagtaacctcacaaggatggcaattactctcaatcttcctcttcaccatctcaggtctcgtccttggtcctctccctgtaggcgcttgggctttca

SEQ ID NO: 107715 - DNA, 346 bp, Arabidopsis thaliana columbia
cgaatttcccttccacccacgcctacgcttttatcccatgccagatttattctatattttactccagaaacacttcgcctttgtagcaccatttcacattctggttaactctacctgagattctcaatccaaagtaccctacgatcgcagacacatcagtcgaagatttcgatcatacgttcagtgtcaacacacaaagagcgttcctgtgtaacaaggaagctgccaataggctaaaacaaggaggtggtggtcggatcatacttctgacatcttcccagactcgatctttaaagccagggtttggtgcctattgccgatcaaaggcagctgtggaaactttggt

SEQ ID NO: 107716 - DNA, 209 bp, Arabidopsis thaliana columbia
cggcacctatagaaccacacacatataaccagcgcacaaccaagaagggggcgccccgagaaggaggctctctaccgagatcgtaatcggggatcgaaccattcggacctaacgccgctaccaacgactcggtaggtcaggagacgttgcctgatttctcaatcggggaacttgaagacgcgaaacttgggaccactacctcataaacc

SEQ ID NO: 107717 - DNA, 416 bp, Arabidopsis thaliana columbia
cggacgcgtgggcgagacgaagatggttaagatctgtgtcgcagtcagggtaagagcgccggcgccggaaaacggagcttcactctggaaagtcgaagataatcggatctctcttcataaatcactcgacactccaatcacaaccgcttctcacgcttttgatcatgtgttcgacgaaagttctacgaatgctagtgtctacgagcttcttactaaggatatcatacatgccgctgttgagggttttaatggtactgcatttgcttatgggcaaactagtagtgggaagacgtttacgatgacgggctctgaaactgatcctggaattattcgaagatctgttcgagatgtggttgaaagaatacatttgatttctgatcgtgaggttttattcgggttcgtacatggataattac

SEQ ID NO: 107718 - DNA, 364 bp, Arabidopsis thaliana columbia
gttgcttaatacttttaaggttgttgggacacattctttagtggtcgaccgcagtgtaaggaatagatactctaatacaagattggataggtccagcaacaagtctcatggtcggaagaagctaaatcctctggctcctcggttctcactagcagatcataaacaaaatgtatatggctgtgaggtaaaccaagctgcaaatgactttggtgatagacatggctgttccacatcatcaccatctcaaaaagtggatgttaagaaactacttacgacgattcatggattgtcagagttgctaacacatgtacacagttcaaaactttcgatttaccaaatgagcagtatcttgatctcatcaact

SEQ ID NO: 107719 - DNA, 414 bp, Arabidopsis thaliana columbia
atctttttgaagccgtcataacttgcaagtaaagaatggtcagtctaatgttcgttagttcggcctcacctttatgctcttctccatcaaaaattcccaaggctagtttggacttcgagatgaagaaacttggtggcagcacaaaacttgttcggaacgtgaatttggagaaactaaagaacaattatttgtttcctgaaatcaacagacgtgaacttgagcacattgaaaagcatccaaatgtacaattgataagccttgggactggtgatacaacagagcctattccagagcaaataacctcacatatgtctaacttcgcacatggcctatcgaccgtagaaggatatagagggtatgggttggaacaaggaaataagaccctgcgaaaagctattgctgaaacgttttata

SEQ ID NO: 107720 - DNA, 415 bp, Arabidopsis thaliana columbia
ggcgattattactactactactgttcgtttcactgatggaacctctcccaccttctggtcctcagcttcgacaaagggttataatctccattttctctactcgaattcaacccaacgacttacgaatccgaaattcggaatcggcgggaagttgaaggtgacggtgaatccgtattcgtatacagaggaagtacggcctgaggaacggaagagtttgacggattttttaacggaagctggagatttcgttaattcagacggcggagatggtggtccgccacggtggttctcaccggtggaatgtggcgcacgtgctcctgaatctcctcttcttctctacttacctgggatcgatggaactggattagggctcattcgccagcataagaggcttggagagatatttgacatatgg

SEQ ID NO: 107721 - DNA, 418 bp, Arabidopsis thaliana columbia
gcttcaatctcgattgaatcagaaagagcgatcagatcacggagaaagagatgggtgacggagaagaagataaaagcaaaggatttgcttcggaagaaggtaaccagcatcatcaatacggtacctttcaaggtgtttccaattaccctccgccgcagaattctgctccggtcactgggtttcctcaaccttctgcgccacctggcgtttacgattctggagctccttattacgctcatggatatcaaactgttccaggtagcttcacttcctgtattggatattctgatttcatattttagcagatttgggaatttaggttgaactgttgtaaaattaatagtgatcattcattgtcttcataagattctaatttgattacgggatcgtgtttgtttagctatagaaacaagttttg

SEQ ID NO: 107722 - DNA, 418 bp, Arabidopsis thaliana columbia
gctctacctaaccagcaaaccgtggattaccctagcttcaagctcgttatcgttggcgatggaggcacagggaagaccacatttgtaaagagacatcttactggagagtttgagaagaagtatgaacccactattggtgttgaggttcatcctcttgatttcttcactaactgtggcaagatccgtttctactgttgggatactgctggccaagagaaatttggtggtcttagggatggttactacatccatggacaatgtgctatcatcatgtttgatgtcacagcacgactgacatacaagaatgttccaacatggcaccgtgatctttgcagggtttgtgaaaacatcccaattgttctttgtgggaataaagttgatgtgaagaacaagcaagtcaaggccaagcaggtaacat

SEQ ID NO: 107723 - DNA, 329 bp, Arabidopsis thaliana columbia
  unsure (1)..(329): unsure at all n locations
aaattatttgacaaattggagaatgttgtgattctggatgatgacgttgtaggccagcgagacttatctcccctttgggacctttatatggaagggaaagtgaatggcgcttttaagtcgtgcactgtgagaatgggtcagctaaggagtctcaagagaggaaattttgataccaatgcttgtctctggatgtctggtttgaatgtncgtgatcttgctagatggagggcattgggtgtttcagaaacctatcaaaaatattataaagagatgagttgttgagatgagtcgagcgaagcaattgcatttcaagcaagcttgctcacatt

SEQ ID NO: 107724 - DNA, 415 bp, Arabidopsis thaliana columbia
cgccacctctgtcgcaaatacattcgttaattccctcagaagtctcaattccaagacatatccggctaacgttccgatcaccgttgaccacgatcttctattcaccgttggattaggaatcaaccgatgtcacagctgtaaagccggaaacttctcacgagtcgtcgccgccataaacaacattacattcaagatgcctaaaacggctctgcttcaagcgcattactttaacctaaccggaatatacacaaccgattttcctgcaaaaccaagacgggttttcgattttaccggaaaaccgccttccaatttagcaaccatgaaggctacaaagctttacaagcttccatataattcgacggtgcaagttgttttgcaagacaccggaaatgtagcgccggagaatcatccgatt

SEQ ID NO: 107725 - DNA, 330 bp, Arabidopsis thaliana columbia
gggttggttgttttttttttaaaaaggaagggatttgcaaattgcaagtccacatctaaataaatggcgcaaaaaatgtttgttgcgttctcaaaacaatatttttagagggaaacttttgccaaatacaacttaagcaaaattgtttttttttaaataccaactttttcatttttttaaaggttccactggaaaagcaaagggctttaaaattgcttaatgtgctcatttggcactttttttcagcgttggggccttaatgattctcataaacttcgagctttatgggagcacccccccacctaaataactcttcattcattttgtctt

SEQ ID NO: 107726 - DNA, 418 bp, Arabidopsis thaliana columbia
ggcagatgaggaatccatgggcggatggtccataatacataacccagtgcccaatccaacgaggagggagttacacctacaggtttaccatggaagaccaagaaggtacattgtggtggcatgcccacagtagatggctgcgagccaccgtgtatggtgctctcattatccgccctccgctctcttctcctcattacccttttccagttattcccaagagagagattaccctcctcttaggagagtggtgggacagaaatcccatggatgtcctcaacttagcccagttcactggagcagcaccaaacatctcagacgcctttaccatcaatggtcagcctggtgatctctacagatgctccagccaagaaactttaagatttctagtggggtcaggagagatagtcctcctcagggt

SEQ ID NO: 107727 - DNA, 412 bp, Arabidopsis thaliana columbia
caatttctctgaatgagaaatcggtgcttctgctgttaaggtcttctcttgggttgcgaagcacagattggcctgtgaaaggcaatccttgtctgaactggaacggcatcaaatgtgatcagaatggtagagtaactaagatcaacatttcagggttcaaaaggacaaggattgggaatcaaaacccggaattctcagttggttctctcgtcaatctcacccgtctagcttccttcaacgcctcaaggttctatcttccaggtccaatcccggctttgtttggatcgagtctgttgactttagaggtgttggaccttagctcctgttcaatcacaggaaccatacctgaaagtttgactcggttatcacatctcaaagttctcgatctttcaaagaatgcgatcaatgggga

SEQ ID NO: 107728 - DNA, 286 bp, Arabidopsis thaliana columbia
gaccctataagcacgaaactaatttacatcatatttttcaaagcacacaatcacttcatctggggtatccacccatccaactgttatttctactcaaatctcttacttaatacattatttcacttataactacccctgctacctcaaacttctactgtctgcattatcatttcgttaaatactttcactacaaaccttgcttttgattatcctcttgctaacactacctcagcaactaatattgtcaattaatctatttctttaaaacacaacaaatccaccgaat

SEQ ID NO: 107729 - DNA, 290 bp, Arabidopsis thaliana columbia
gcgcttctgagatttttccagaattcaatctttcgagtgttgttcaattcagcagtggcggtttcgtctgcactcaagctctcatcatcgtcatctccttgcatcatcaaacattaaggttcttcatcaagtattgacataaaactctctaagtacacctcacttactaaacccattcttcaacttgatgataaaagtcgacttcttcttgaccaacaagtttcacattctctatagctaaggccttacagaaaacgtgtcacttcgaaaacatgttcttaagtttgcca

SEQ ID NO: 107730 - DNA, 199 bp, Arabidopsis thaliana columbia
  unsure (1)..(199): unsure at all n locations
cgnntccggaaatcctaataaccttnngaatcttttcatattatctttctagaagcgtgtcaaaaagcaattcaagacatgtgttaaactaaacaaaacagagtagagtatggctttttcgtcgagaaaggtctattcgggaagcaatagaaagtattctatagcgcgcttccacttcggagcagggatgcttgcggca

SEQ ID NO: 107731 - DNA, 411 bp, Arabidopsis thaliana columbia
aaagaaaacaatggagaagaacaacaagttagcggtttgtcctcgtccatgggctgtgccacggcgcttggtgttggtacaaggtgaaaacgcatctggaggctgtaggtcactgtgtgaccgcggtggatctagctgcatccggtataaatatgactagattggaagagattcagactttgaaggattactgcaaacctttgcttgagttactgaactcacttggctcggatgacgataaggtgattcttgttgcgcatagtatgggaggaatacctgctgctctcgcttctgacatattccctagtaagattgctactattgttttcttgacagcttttatgcccgacacatgaaacctacctgcttatgtttaccaaaagctaatcagaagcgttccacaagaaggat

SEQ ID NO: 107732 - DNA, 529 bp, Arabidopsis thaliana columbia
  unsure (1)..(529): unsure at all n locations
cgtcccccgcaataatnngtgcctnnatgatttgaccgatcttgtcttgtaacannagaggaanngcgaaagggatgtggtgtacggccttttctttcttgtgttgtgcgtatttagctatnttngaatagaagtttcaatcctgatctcctacgattcctgtctttctgagccttcagaatcatttaaaagcngnngaatccgnnaatctgagtctnncatgtctttctttcattnncttcaagcaccnntctaggccnnntaaaacgccnnttcaagaggttngnnttaatagcctatctagtagacangggtcttatggctttctcgacacntccaagaccgnntcgtcgaagttaaaagcctcttcgagaaaggcttttggaaagaaggttgagaganngaatttttcttcttctaagagggaataccttttctggaggatgggtgaagaccctgaaccaaattgcttgatcanggcttgtacaagttaggcattatagagttttgcaaaagaagattgttgtct

SEQ ID NO: 107733 - DNA, 297 bp, Arabidopsis thaliana columbia
gtccctataagcacgaaactcattgactcataccgtacaaagcacactatcactgcgtgcgggtggatccacccatccagctggtttttctacttgtatctccgacttaatctatgagtccactcaccctgcccccgctgcctcaaactccacaggtctggatgatgatttgttgaatgcttgcgctgcaaacctcggtgatgattgacttcttgtaaacaatgccccagcaatgagtatggtcaatgaattcattgctggagtcggaacaaattcaccggtttttcattttggaga

SEQ ID NO: 107734 - DNA, 449 bp, Arabidopsis thaliana columbia
  unsure (1)..(449): unsure at all n locations
ggaannncccggggcgagcgccacgcgtnccgacaaaaacacttnttggttttnttcttcttcttttcttctaaatcataanaaacacaagttttgggcagatcaactgttttcttcgttacctgttcttcaatggcgtcacttcactgattctattcctatcaaacccacttacccattcccttttatatgcacaaattctcataaagttttcaattttattccatttttctcggaagccatggaagctgctaatgagcctgttaatggcggatccgtacagatccgaacagagaacaacgaaagacgaaagcttcctaatttcttacaaagcgtcaacatgaaatacgtcaagctaggttatcattacctcattactcatctcttcaagctctgtttggttccattaatggcggttttagtcacagagatctctcgattaacaacag

SEQ ID NO: 107735 - DNA, 217 bp, Arabidopsis thaliana columbia
gaccgactgagactccgacttcatttcttctaccatctccgacaaactatgggtgagggaccatgaatgaggctgagaagctcaatatattcaggaacatcaccctccgaccaatgtaagcagtctcattgtccagacagcctctgtgtcactctgttaacacatcaaccgcttgtaaatgaatactctccaatgagatgtggttggtacagttacc

SEQ ID NO: 107736 - DNA, 357 bp, Arabidopsis thaliana columbia
ggcccgataagcaccatgctcattgacttataccggacaaagcacactatcagtgggtgtacagggtccaccggtccagctgttgtagctactgggatctccgacttaatctatgagtgcactcagcctgccccccctgcctcaaactccagtggtctggatgatgatttggtgaatgcttggtctgcaaaccttggtgatgatggtcttgttgcaaacaatgccccagcaacgaatacggtcaatgaattcattgctggagtcggaacagatgcaccggatcatgaggaggaggaggtgctttctatacctactttcgtgattgattacatgcgggcttaaactcttttagaaact

SEQ ID NO: 107737 - DNA, 412 bp, Arabidopsis thaliana columbia
cttgttccctcccaattatctgaactatcttcttttatcaaaaactatattcacaggctgccgtgtaccttctccatccaaagatggcaactatagctactggtcttaacattgcaacccagcgtgtcttcgtcaccagcgagaatcggccagtttgtctcgccggtccggtccatttgaacaattcgtggaatcttgggtcaagaacaactaaccggatgatgaaacttcagccgattaaagcagcaccggaaggagggatatcggacgtagtggagaaaagcattaaggaagctgaggagacttgtgcgggcgatcctgtgagtggagagtgtgtagctgcgtgggacgaggttgaagaacttagcgcagcagctagccatgctagagacaagaagaaggctgatggttc

SEQ ID NO: 107738 - DNA, 357 bp, Arabidopsis thaliana columbia
ctcaatttatatatgttaattttcactttttttatttgtaatgacaacattaccagggcaagtgatctgagtgagcgggaagatctacaactctatatttgtgaattagttccttatatgaacccttaaacttcaattcatcaaggagactaacaaccttactaacatatactctttcatgctcattatgattttcaaacaaaacaactgttaccattcaattcttttacaaagactattctgttagtcttgtcacctccaataccaacaagcataacaagtctattctctttttcacaggggtattcttattaaataatatctcatgatttttaatgctgaatctatccaattttt

SEQ ID NO: 107739 - DNA, 126 bp, Arabidopsis thaliana columbia
ggagataagtgcagggatcccattgtttgttttaatgactggaacgaacacatggaggaatgcataacctgcaccactgctgacaactcactcagcttgactgattatttgtggcactccattctg

SEQ ID NO: 107740 - DNA, 415 bp, Arabidopsis thaliana columbia
cttgactggttttgctcttgttggtggacctgcaaggcaggatcatcccagggctatcgaagccctgaaaaagctcgatgttccttaccttgtggcagtaccactggtgttccagacgacagaggaatggctaaacagcacacttggtctgcatcccatccaggtggctctgcaggttgccctccctgagcttgatggagcgatggagccaatcgttttcgctggtcgtgaccctagaacagggaagtcacatgctctccacaagagagtggagcaactctgcatcagagcgattcgatggggtgagctcaaaagaaaaactaaggcagagaagaagctggcaatcactgttttcagtttcccacctgataaaggtaatgtagggactgcagtttacctcaatgtgtttgcttcc

SEQ ID NO: 107741 - DNA, 252 bp, Arabidopsis thaliana columbia
atctctttctctgctgcagcttaaactttaaataacactacaagaacaacttcttcaggttctataaagagattccgaagaagaatcttttccagaaacagcgctttaagatgactgctgaagttaaggttgaggagaaacatgtggtgtcagaggttggtattgctccagctggtgacactgaggagactactgctaatgctgctgtggaagagacttatgttgtagaagatgagagcaagcctcagggtg

SEQ ID NO: 107742 - DNA, 230 bp, Arabidopsis thaliana columbia
ctttcggatctatttattctattgtcttgtctatactcacaaattctccattctttgtgaggggagttacttcttcagacactaatattcaagtcctctctttggatggagaagatgcacgtagtctcgagcttcgatattcagacttcgccgttctcacacagcgcccgagagattctcattttttcggtcgaccaccgagagttatcctcacacggtgacgcgcttga

SEQ ID NO: 107743 - DNA, 330 bp, Arabidopsis thaliana columbia
aagacaagagggaatgtggtattctctgtttttatcaatacgaaaacaagcacatgtgtgatgctgaaaacgcagaagactggtaatcttactatatagactgtgtataaggcagtgagctccatcttagaaactttgcgtcatcaccacatccagatccttcttttgcaacttaaaaacctagtatagatttcttcagaatgcgggaatctggtgaccctgatcgttcccagctttatctttagccctgtgcagaaagcgtgatgagttagggtctaggtcttaccgcagatttatgtctatgtgtggtaaaagctcttacctgttttt

SEQ ID NO: 107744 - DNA, 426 bp, Arabidopsis thaliana columbia
tccatctctcagccaacaacgactcgagtcgaggagatagattctcaaagcttccatgaaacgttgtgggtatttttttagctcaaatcaacagctaacatggttacaggcgataaagaatcttccttgatgaagaagaggaacaagagaagccataagagaaagcgagaggaggatttcgaacgtatagattcacttccttggagctcttctatacccattggagaagacgacgaaggcgaatccttctccactctattttcaggctcaggccagctcgacggaggttttctatcacttgaggagattgatgaagctgattaccatctaactctccctaccattgaaagtgaaataacagagagaaaacaatctccagaagatgatgatgataccaacgagacagtggatgagatgattgaagga

SEQ ID NO: 107745 - DNA, 425 bp, Arabidopsis thaliana columbia
  unsure (1)..(425): unsure at all n locations
gtaactgctggtcccgtattaatatttattgcttcattccttattactaagcaacaaaagtcacgcgtgagatataaaagaagatcctttgcagtttctctgttcttgctccttcttcttcatctccctttattgatactgtctgagtaataataaaaattcactctttttgtcttctcaagacagatttcaaaatagaaatcattctccttttttctttttgaaaatttcgagtgatttaaggagggaaaataaagacagaaacaagaacaaaagcatcgtttgcgaataagacttctcgtactctgttttcttttctcgtgttcttatgacagatttataaaaaagattaggtttttgtcttgtcttggcgataatgcctagagagtgttttaaagatttgatttaaatactctnttatgtta

SEQ ID NO: 107746 - DNA, 426 bp, Arabidopsis thaliana columbia
gtcatttagtggagcgagccaacactcactcctcatttcgagacaaaaacgcggaaggcgacgacacgccgttgaggaggatccgactactcggaagtttcctgctcatctggaaattggggatcgttgctgagagagtttaattgagtgatcaagttccgttcgtcttccataaaccctaaggcgattgggatttctgaaaggtttcggcaaaaggaaattcaatgcttaagaaaaaactatccctagaagatgaagatgacgatagatcgtataacttaaggtcatcgcgttctaatgccaagtcgaaacccaggtcctctgctggtaccgcaacgaatcctagagcgtcaaagagagctcgcctttcgggtgctagtgcgactcaagaagactcgagtcttgtagataagattagattgtctt

SEQ ID NO: 107747 - DNA, 422 bp, Arabidopsis thaliana columbia
caatttttcagacaattttcttccaaaatcttttcgtaattctgttttatttttcaacgttttaggtttttaccaatccgccgtagttatatccaacattaatttttttccctcttctcagaaaaaaataaattcaactcatctctagaggttttagggtcttccaagaaattgaatttggaaggaggctttgatgggtttgaattttccataatcgtcccttgtttacgactcttgttgtttgaaaatgctatggctcgtgaggggatgttgttttgattttgggaaagtcttgtttgaatggtcacggcttttctgaacattcgcgtgttctttcttgtctcggctctgcttcgaaatgtctctcggccaagaaaatgttgatcctgttgaagtttcagggtcgcatgcttgcttatatg

SEQ ID NO: 107748 - DNA, 326 bp, Arabidopsis thaliana columbia
  unsure (1)..(326): unsure at all n locations
cagcagtgaagcatgatgtgtaagtcgttatcgagctgaagttgtagaaagctgtaaccgtttgacaatggtgaatgaattattgaagtggatgtgtattagctcttcttgtctcagattctctcttcaactcttttttttttcttttggattatttttctttcgcgtggctattgttgagtgtccttgcaagtcataacaaaaagcttaaacccaagtgttttttgtcatgactaatatgaccattatgttttcttgctgtaccatttcttcttgtatcacctatgacttccaattattcagtagtaccctcataatttttcnnt

SEQ ID NO: 107749 - DNA, 215 bp, Arabidopsis thaliana columbia
cgtccgattcccggtcgacccacctccggacataactcccatatctcttcttctgtcttttttatttctttgaaccggagaagaagaagaagaagggaaggatatatggaggctgacttccaaaccttcctctcgtcaaacctaatccttacgcacccaagaccggttctcaaaatgcattctacccctgctcatccggaaatcaccgttcgtca

SEQ ID NO: 107750 - DNA, 230 bp, Arabidopsis thaliana columbia
caagaatcatgacgagctctattagcgttaagaagatcaagaccaacaggatttggttgaaccttgctcagaaaggcgtcgaacaatggccttgtgatctgttactacatgggttcactgagacatggtactcttggcgtcaccagatcgataccttgactagccatggttaccatatgctcaggccagatctgagaggctactgaggctccgattatctaccgagccac

SEQ ID NO: 107751 - DNA, 410 bp, Arabidopsis thaliana columbia
agcacttcgtcttctttcatggaaatatagtcttttcctttcacgaaaaataacgagtgcatgctgatacacattggacaggctggtctccaggtcagaaacgcttgctgacagctgtactgagtggaacatagcatccatcctgatcgccagatgcctggtgacaagactggtagtggtggagacagatctttcaacacatgatgcagtggaaccgccgcacgtaagcacgtcccacgagctgactttgttgagcttgcaccaactgtgatcgactacttcagaactggagcacaccgtcagctctgtcaccctgaacaacgtatcagcggttaagaagatgcacctaacaatttcgcccgtgggcattacaccattgcgaaagagattgtagacctgtgcttagaccg

SEQ ID NO: 107752 - DNA, 354 bp, Arabidopsis thaliana columbia
caaaaattccaaccagccatattagatatcattttttccctaccgacctacttcgtttgagcgttgctcttaaacgcatctgcgtaattcatctgtctctctcactccatccctcacgtgaacatttgtctcctatcgtcaccagatctggacctctgaccgccatggtctaccatatcaccaggttcatatcttgagaggctactagaaagctcctactatctatccgaaccactgaggaaatacactcgttggtgtatgctattctgctgcataacatcgcaattacatcgatcactactccatctactcaccgctgctgtggtttggcataacttgggaccaaacataggc

SEQ ID NO: 107753 - DNA, 416 bp, Arabidopsis thaliana columbia
accaaactctcaaatttctcttctcgttattagcctgcactctctaacacgagtgagggaacatatatcatcagctcacaatctcagccgtcgattatatcgccaccgtcgtagaagaagatggagaacactcaagatttctcgccaccacacatggatgcttctcggccgtcactaggattccctcttggcacagctctgcttcttatcatcattctcagcctctccggaatattcccttggtgttaccattgggacaaacatcgatctctccgccgctctttggccaatggtcgtgcctgcgccgacatgctatctaatccttacaaacccaaaccccctttttcggaaatgaagaaaccccataatctgagcgtaccggtgttaatgccaggagataatacacccaaattcat

SEQ ID NO: 107754 - DNA, 158 bp, Arabidopsis thaliana columbia
caaaaattccaaggagacatattagatttgaaatcattcatagcaacataatgcgggggagtcttgatcttaaaggcgtctgacttaaacatggtgtgtatttacataatgggttaatgtgaaaatatgtagcttattgtaaagagatctggatcttg

SEQ ID NO: 107755 - DNA, 181 bp, Arabidopsis thaliana columbia
caagaattctaagcagacatattagatttcaattttttcctagcagccgaattcgttggagcgttgatctttaatggcgtctggcttgattaatggttatcattcacatcactgcttaaagctattatatgaactctattgtaaagggatctggaccttgaacctcctagggttcaatatc

SEQ ID NO: 107756 - DNA, 245 bp, Arabidopsis thaliana columbia
caagaatcataacgagttatagtagcttgtagaggatcaagaccaacgggatgtgggggaacgttgatcaaaaaggcgactaactaaagaccttggactcagttactacatgggtgtactgatacatgatactcctggcgtaacgagatctatatcttgactagccatgggtaccatatgctcaggccagatctgaggaggctactgtaggctccgatccatctacgcgagccactgaggaatta

SEQ ID NO: 107757 - DNA, 276 bp, Arabidopsis thaliana columbia
gaacaaacaaccgacgtgacggttaattgaagactgagccacagaacaaatgtctggagccaactatgctactgatacaaatcgatcttaccggaaaccgatgatcgtactcatgtggaagtatagtggaagatcgactctaaactgatgaggagtctgacgacctagcccacgattggccgagctaaacaattaggcagcctgagagggtgaggctatactctgtgcctatcatgaagctcatgacaaaaattaatgcactagacatgaggatca

SEQ ID NO: 107758 - DNA, 434 bp, Arabidopsis thaliana columbia
tatcagcacgaaaagcccaacctgcctggcaaaaatcttgggaatctatcaggtcgcaacaaagcaacttaagagcgggaaagaaacaaagatggatgttctgattatggagaatcttctgtttggaagaactgtgaaacggctttatgaccttaaaggatcttcgcgggcgcgctacaatcctgactctagtgggagcaacaaagtcttgttggatcaaaacttgattgaagcaatgccaacttctcccattttcgtcggtaacaaagcaaaacgattgttggaaagagctgtctggaacgatactgcttttcttgcattgggtgatgtgatggattattcattgctagtaggcgtggatgaagaaaagaacgagctagttctcgggattatcgacttcttgaggcagtacacatgggacaagcatctagagt

SEQ ID NO: 107759 - DNA, 214 bp, Arabidopsis thaliana columbia
ggccaaatcaatctttttactgttttttgatgaattaacccggaacataaggtggggtgcaaaccaaggagctcatacaatcactctgagccggttatggacgcgtctacacatggggaagacgaatgtcggacatgctcgaactgagagaggtgtcagacgacgcatgttgctgatttagtagtggcccaaatgaggcgccgagatcggagca

SEQ ID NO: 107760 - DNA, 279 bp, Arabidopsis thaliana columbia
caaaaattccaaggagacatattagctttcaaataattcctagcgacctactgcgttggagccttgatcttgatggcatctgcttcattgatgttgttattcacataaaatccctgatgtgtgaagttgtagcctattgtaaagtgatctggaccttgaacggcctagggaacaatatcagaaggttcatgctttggagggactgaacggaagtagcatcccgcgaacgttgggaaaacagcggttgagatctaatttgcacataaacgccaatggatc

SEQ ID NO: 107761 - DNA, 178 bp, Arabidopsis thaliana columbia
caagagtgctaaggagacatattagctttgaaatcattcatagcaacagaatgcgttggagcgttgatctaaaaggcatctgacttatgcatgggtgtcattaactaaatgggttaacggataaatatgaagcctattgtaacgagatctggatcttgaactgccgtgggttacaata

SEQ ID NO: 107762 - DNA, 254 bp, Arabidopsis thaliana columbia
  unsure (1)..(254): unsure at all n locations
cagnggggtactnnncggatggaggtattgtatttgtgtttatcaccacantttnntaaatgtgtgttgtaagggaaatgatatttaaatcaatagtaaaccttggcgatttgatattctggtttgtttttntgatgaaatanaatannaagctaatcttattatacctttgatannagcttagaaagttttaatatattttacaaanagctccccattatcataaggataagtgggtataataagatatttgc

SEQ ID NO: 107763 - DNA, 160 bp, Arabidopsis thaliana columbia
caagagttctaaggagacataggagctttcattttattcatagcaacactaatacgttggagcgcagatctaaaaggcgtctgacttagacatggttgtcactaactaaatcggttaactgatacatattacccctattgtaacgagatctggatcttga

SEQ ID NO: 107764 - DNA, 418 bp, Arabidopsis thaliana columbia
cggacgcgtgggcttccaagttttttcctttggctgtctcttgatcattggtgactatttcttgtctcaaggaagatccaaactctttgtaatcttcgaggtcgggttttatggtggtatcgtcttccctctccttaccatgttcccaagaattgcccttatgatatcgcctggactagcagcgacccacgagggtgctttaatgattgttggaaacaacgttggagttactattggacacacaatctttgctctgacaatgcaatggggagcttgtgttatctttggtttgactagtcctaattcagatccatcaatccgaagaggatctatcaaaagaacatcctctgacacaaagaatccaagaagaggattttacaggatgaagatactaaaaagtgttgttgaagcaagcgta

SEQ ID NO: 107765 - DNA, 427 bp, Arabidopsis thaliana columbia
attcggtggtggaggaatgcctcctgcgtctgctcaattccgatcatttaatttcggagctactcgtcagagaacagctaataacaatcaagcacctgatgcaggtttcaatgctcgtatacttctccagcttcttcctgttgtcttcatacttctgctcaacttcatgccttcttctcaaccagtttaccaactctctgcaacttatccttaccagtacaagttcactacacagaaaggtgtcaattactttgtgaaatcgtctaaattcgagcaggattatccacgagatagcaacgatcgacacacgctggaagaacaagttgagagagattatgtgtctatacttagtcagaattgtaggtatgagatgcagaggaaacaatggggatttgttcgtgaaacgcctcattgtgacatgatgagg

SEQ ID NO: 107766 - DNA, 394 bp, Arabidopsis thaliana columbia
ctttagagaacttgagaagatttataatttaacagagagcttgagagattcctctggctaaacccagatggagtttggatcttttcttgtgtccttagggacatcttttggtatctttgtcattctcatgcttttttttaccttgcttttttgaaattttttaattgctcccattttttacccgatttgttttcttatgggctgttttcatttttatgcacttttttattttatatcctttcacttttttttatatttgtttttttttagtttttaattttttttggttttttttttttttaccattcttttatctattcatttatatatcttatttattttattattttttttttttttcttgtattttttacttaatttttttctttttatt

SEQ ID NO: 107767 - DNA, 452 bp, Arabidopsis thaliana columbia
cttccgttggccaggttcgcgaccttggtcggaaaattattaatcgcttctctgcaatcgcattatcgggtctaatggcagacccagagaccttagcggcgttgaagagagcctacgccgatacgatactgaacacgacgaaggaagcggcggcacgtgtgatggtttctgagaagaaggcgcgtaggtatcagcaagaacttgtgacggttagaaatgaagcacttcatacgttggttaggcttaaacagatgcttgattccaaggttaaggagacagagatgcaatccttgaagcagcaacagaaggttgaggaacttgaagctcagcttggagaagctgaagatattgtaggagagctgaggttggagttgagagtactttacgatgagctcaagaaactcacggatggtcagaaacatcttaaaaagaatcatgaggaaaaaccttgt

SEQ ID NO: 107768 - DNA, 340 bp, Arabidopsis thaliana columbia
ggcagcctctgttgccggtacagctgtttttattattagatctctcatacccagatataaatccgtggtgccaaagaattatgttgggagacgaaactgaccctcttaagaaagctgatgctaaacctaccttagctgaagaagctgtagctgcagccaaagctgcttctgcggctgcttttgatgtatccagggttagtcaggaaatgatgataacaaagaatgaagagaggaaatattttgaggacttaacgcacctgttaggtgttcaagtacatcaaatgaagtccttgagcaataatattcgtaagccttgaggtgcatctaacaacatcccaaa

SEQ ID NO: 107769 - DNA, 443 bp, Arabidopsis thaliana columbia
  unsure (1)..(443): unsure at all n locations
gcggatttggtatagcttctcgacctcagttggacaagggtttgtcggaaaacaatatagggttcacggaaagagttttctctgccgccggagctgcggttttgtccgccgttactctaaatcctcttgacgttgtcaagactcgattgcaagctcaagccgccggaatgtcgtactctcacccactcagtaactccattggacgcatggcattttttggcccaaacatgatgtttgcagacttgagatgttctccttcatgtgcacgcgctggtgttgaaggtactgtttctatttgcccaccggattgtttccagtacaaaagaacatntgatgtcttcaccaagatcatacgacaggagggtctgggacgcctttggagagggactaaagctggtcttgccctagcttggcccattggtgggatatatcttccattctat

SEQ ID NO: 107770 - DNA, 374 bp, Arabidopsis thaliana columbia
attaaaacacctacccaaacaaaactgtagatctgaaaagctcagctatgaaaaggacgaaggcggggtagtaatcctggggggcggaatcggtggtctgcgtcacttacatggctctgcatacgaaacgaataacgagtgcggtgtcgtagagagcaaccatagtgtgatcggcacgagctggaacaggaactctgtacaatggttggagcgcccttgatcagagaggcgtaggggatcgcctctgactcaattcgtttgttacacgcaacgcacggtccttcttgatctgaacaggatattaactggaactacatacagatatcatatacgcacactcgtgtgtcaaatggaacgtgctatgtggaggtctt

SEQ ID NO: 107771 - DNA, 192 bp, Arabidopsis thaliana columbia
cattctcggatcactccaccatgaacgatccattcaccacttaaaattcattctctacatttcctatcacccacacaaccaacacgaacatctcttccatctcaagcaactttttatgaattagctccatgaaccaatgtccaccaattgtaacgaataattttcatactctattttacctccctcacctta

SEQ ID NO: 107772 - DNA, 287 bp, Arabidopsis thaliana columbia
aaagataactattcttgtttttttttttctgccaactactttacaggggcggtttatgccttgatggggataaaacatcgcttgaaactgtttgtgaagctgcagaagactggagaagtgatgatataaaaggttttcttggacgctgcaacttcaaagcatacatgcttgatcgaaaggtctctcttttaagtggtggggagaaagcgcgtcttgctttctgcaaattcatggtgactccatttactttacttgttttggactaaccaaccaatcacttagacatt

SEQ ID NO: 107773 - DNA, 448 bp, Arabidopsis thaliana columbia
catttttattctcgtcgcgcaacaacaaattcagatcgaaaaaggaagaagagatcgaaatggcgttgagaagggtttacagtgaaatcagagggaagaaggtgactgagcttccaggctatatcaaatcgactttttcaatggagaccgtgaagacctctgttaagagaggactctataactacaacgtagaatacatttagaccagctccgttgatcctatccttcatatctgcttatacggcatggctgtctcttaccttgacgatctccctaatgagcgctggcatcttgagcattaacagcatgctatggagcacggtagttatcgatcttgggccaataactaccatctaggcaagaacgtacgatcttctgaatttcaaaatgctggattagaaactggttcaaaagaaggcgaagttaccaatgttaactcaaactgtga

SEQ ID NO: 107774 - DNA, 331 bp, Arabidopsis thaliana columbia
gtcgtttcctttcttccatggaaagtaataggaactgcagtcggtgcggtgaattactttctgagctcgtacttcctgaaatggataacctggaaatgcctaacatgtcaaaactggccaacattttggttaccgaagcaccaaggcaggagatgagggatttatccccaactgctgttggctaaggattgccagttactggggggaaggggtctgggttccggaaatgtacttaaaagatgcttaagtggtccccaataaaaatgccagacccttttgttacttggaattgggttgttcaggaacttaattttattgagcaggttaacgg

SEQ ID NO: 107775 - DNA, 444 bp, Arabidopsis thaliana columbia
ctgcgataatcgctatattttttacaacggttggatccagcatactgcggggagctgttaccttgagagggtgtagcttttatgtctttgtgttttacgacgctgaggaggctacactctgctcgttcttcacttctcctattcgacgacactcagttacagtttaaagaaagtgtatccaagtttgcgcaagataatatcgctcctcatgcagaaagaattgataaaactaattcatttccaaaggatgtaaacttatggaagctaatgggtgagtttaatctccatggaatcactgcgccagaagaatatggagggctaggtcttggttacttgtatcattgtattgcaatggaggaaatcagtcgggcctcgggttcagttgctttggcttatggtgctcattccaacctttgcatcaatcaattggtgaggaatggaact

SEQ ID NO: 107776 - DNA, 459 bp, Arabidopsis thaliana columbia
caaacaaacaactatctctgcaaatttggctgaaacctcttaaaagttctttgctctgttgcaaattatccatattttctactaacaataatgtcagaaacatcaaagtcagagtctttagatccagaagtctctgaagggctttgttcaaagaccttgatgcagagcattgttcatgagctgaagctgcagatgagaattggtttgccattggtggttatgaatttgttgtggttcggtaagatgaccaccacatctgtgtttcttggccgtcaaggtgagcttaacctagccggaggttcattagggttttcctttgcaaacgttactggcttttctgttttgtatggtatttctgctgcaatggagcctatttgtggccaagctttcggagccaagaactttaagcttcttcataaaaccctttttatggcagtgctcttgctactcttgatttcg

SEQ ID NO: 107777 - DNA, 449 bp, Arabidopsis thaliana columbia
cggacgcgtggggggaacgataccattagtcccaataccaatccttgcaaaattcaaactgcggacaaaccgtttatctcacgcgccgccgtactcgccacgatccgtctttggagaccaatttatggagccgtcgaagggagataccgtagtgaagactgaggtcccggtgaaggatccatcgctaagcgtcgtcgattcgaaaacgaagggagtcgaggatgcgaacactgagatagccttgttcgatgaggttgaaatcgagacgaagggaagcgattcgacaccggtgaaagctccgagtcgaacatcgtctggatcgaagaaatctgtacattggagccccgaattggtgtctggatctcaggaaccggatcagaaagctgcatcgtcttcttcggctggatctaatccgtatattgctcgttcttcagctgagactctagatg

SEQ ID NO: 107778 - DNA, 353 bp, Arabidopsis thaliana columbia
ccagaattacaccactattcgttatggcaccagaccggcctttagagagatatttgagtcattgaatgggaaatgggggagtgtggatgttggagtgatagtatgcggtccagcgactcttcagacgaccgtagccaaagaaatacggtcacatagcatctggcgatcggcgaatcatcctcttttccacttcaacagccacagtttcgatctctaacgatgctctcaaggccaaagaacattatggaaattcgaagatatattatcgatgcatataatttatataatcacagtctggatgtattatggaaacaactttaactaatttttgagattgatgcctacttcatgat

SEQ ID NO: 107779 - DNA, 176 bp, Arabidopsis thaliana columbia
  unsure (1)..(176): unsure at all n locations
caaacgcgtccgcnntccgttgcaccgtatttatctcaaaaaagcgagtgttctccnntcgtcaattacctanntatgtatcagtggacgggaacatntaatttcgacacgaaccacgcgcggtgaggttcaaatggcttcnnaagctatgacatatgnnacgctctctctcgatg

SEQ ID NO: 107780 - DNA, 345 bp, Arabidopsis thaliana columbia
cacacgtgcatgggatacaaaagaccttacatggcactcatagcatgaataaacgttggggggcatatagacatgccctctgacttttaaatgggtgtaactaactaaacccgttgactcctcatgattaaccctattgtaacgggttctggacttgagactcaccagggttcagtacactgaagcatcgcaattgaccgttatgtaagccaaatgaatggcgacaactatgtgtacggatcctccctgagcgaatatgcacaaatcgagcaacggattgatttctcttcattggagatctatgcaagtgtcatgaggtggttcggaccaagaatgggctttatg

SEQ ID NO: 107781 - DNA, 220 bp, Arabidopsis thaliana columbia
aagacaaagggggggatcaaaatccataggacgaaaaaaacgaggaagaagactaagaataagattctgaggcagaaacaagcgatacattatcatcatctgccaatcctactagaactatgaaggagactactagtggtggtgctccaaagaagagttttatgttcatgttcatacagcattttaggaatttgtacaacactgttattttttcatcttc

SEQ ID NO: 107782 - DNA, 399 bp, Arabidopsis thaliana columbia
  unsure (1)..(399): unsure at all n locations
cttccgtttaatctgttgaaaaatcttctccaccgcatacccaaaaaaataatattgttttctttatccggtttgtttgcttcttataagagattgttgttgtaagctcaccaaacattcagatttgagctttcttcttatatatctgngtaggggaccagagaatcaaatcacttttcaagtgaataatacttttgatttctccatttgaacgattctggtttttgttgtaaaccaacaaccatcatgctcagtttccaagaagaatggatgcctacaattgtatcgtcgtgatcttctgcatctccttgtttgcaatcaatttagtgttttcttgtttcacttgcttctccattcttcagagctccatgaaagatgaaaaccaggatttcagtgatc

SEQ ID NO: 107783 - DNA, 392 bp, Arabidopsis thaliana columbia
gtttaaaaactttctccaccgattttttaaaaaaccaatagtgaatctatttatcgccgctaaattatctcctttataagacgctattgtaaataaactcaccataacatctatcactaagcactactcttttttatatatctaacctataactaccagcagaatcacaatcacacctacaacatgaatacactactttaagataaactccattaataacgatctctatttttccgaagaaaacccacaaccatcatcctcacattccaagaagaatgaatgcttacaactttatcgatccgatcttatgcatctacttgtttgcaatcaatttaatgttttcttgtttcaacttcttcttcattcttcaaaactccatgaaagattaaaac

SEQ ID NO: 107784 - DNA, 435 bp, Arabidopsis thaliana columbia
ctatatgtatgcaagataaaggcagcaagatacgtaatgatgatgataaagcttgagagaagggattagtctgtagaagaagaagagttaaaaccattcaccaaagaagaaattgagaactagagacagtcatggagatcaaatcttaccaaaatcaagcagagtattttgttgaacactatttattagcagatccatttcttccatatacttctgttcttgttggaatctgtctttgcaaattggtatatgatcttacggagttattcagctcaattcatgtcaaatcatactcagctctcacaaaaataaagagaattgaatggaacaacaggggaatttctacagtccatgcgatctttatctcattcatggcattatactttgcgttcttctctgatttggtttctgaccaaagaagccttgaaaccctta

SEQ ID NO: 107785 - DNA, 424 bp, Arabidopsis thaliana columbia
gttttcgccacgagttatggaaatggggtctattccttgcaaagaggatgaggagcaaagggccttacattgcgttgcatctgcggatggagaaagatgtgtgggtgagaacaggctgcctttctggtttgagctcaaagtatgatgagattgtgaacattgaaaggattaagcggcctgagctcttaacagccaaatctagtatgacatctaacgagagaaaactcgcgggtctctgtccgttaaatgccaaggaagtaacaaggctgcttagagctcttggagcaccaagagatgcgaggatctattgggcgggaggggaaccgctcggtggaaaggaagctttgaaaccggtaacaagtgaattcccacatctctacaacaagtacgatattgcgttgcctcttgaactcaaacctttcgc

SEQ ID NO: 107786 - DNA, 420 bp, Arabidopsis thaliana columbia
gatcaccaaacgtgaaacggaaaactttgcgctgctctactcaagctcaagggccgcctgaccattggttgtgtcctaccttgccttggccgaagaggccggcaagctttcccccgggctatctgaagtgctcggaagcggtcgtgtgacaatgaggaagactggggccaagccaaaggggccatcaagcagcccatggtacggatctgaccgcgtgaagtacttgggtgcattctctggcgaatcaccgagctaccttaccggagagttcccaggagactacggatgggacaccgccggactttcaggtgaccccgagacattcgcaaggaaccgtgaactagaagttatccacagcaggtgggccatgctcggagccctaagctgcgttttgctgagcttttggctagaaacggagtc

SEQ ID NO: 107787 - DNA, 269 bp, Arabidopsis thaliana columbia
cttcccctatttatttctatcatttataaaaattttttttttatgtaaaaccactacttctctacagggcctactcctcctttttctaagggtcgatacctcctttccctaaaaaatcctttttccatttcttttcccctctatcatattcccaaaccctaccccattaacatacacactcatctttaccaactcgctctaaaatatcatccaaacaaaaaaccatcacaacctcctccctcttgatattttagtaatactcccaccca

SEQ ID NO: 107788 - DNA, 253 bp, Arabidopsis thaliana columbia
ttcaatcctttcctttcattgttttttttcaaagattacgattatggccacgtcaggtatccaacaatcctggtgtgcgccggccaaacggctctcaagccctccagcgacctcatccaaatggtgggcgtcttgggcggtggccgtgtgaccattctttgtaccgtcaagtctacttcccaaattatttgttttggaccttaccgtctctatgttctttatccattctcggtgatctctactttttacttat

SEQ ID NO: 107789 - DNA, 354 bp, Arabidopsis thaliana columbia
  unsure (1)..(354): unsure at all n locations
aaaattctctaacaatcatttcatcttttataaatcagaacaactctnataaagaacactttactgactaaagcgagatacatttttccgttttttagtcttcgtctataattactctctccttctaaattattggtaaataatgtcaacttctgatgcatgatcagtgtttcaaagaacaattaattctttctttatccatgatgacactaaaagatctcccaagctaacttattgccaatcatcttcatcctcaactgcttcttcaactaatctagtgaaattatcttgttattcttcttcagttactgtttaaccactaactctatcatctcgagcaagattcattccttt

SEQ ID NO: 107790 - DNA, 418 bp, Arabidopsis thaliana columbia
  unsure (1)..(418): unsure at all n locations
cggacgcgtgggtgagatttgatctttttgcaagttttttggttgtttttgttatggatattttgattttgatgcctgtgatggtgttaaatatactttgagagatgcgtctctacgaaaaaaaaatcaactctgaggcattttttctctctctttacacatctggtttctcttattttactgagatctttgagcttattaatgatttggttttggtagctcttctagcttctgatttgatttggttgcctgatttatgcaagtgatgatgaaaagacagggacatcagaatctccttgttaggagatgagaatgatgactaatgtctagatgggaatctctctgatgcatatctcacagactgtttatcaactntgatctagtattttctggtttgcttcgttttgatactcttttg

SEQ ID NO: 107791 - DNA, 426 bp, Arabidopsis thaliana columbia
gaaccgtcgggctctcttacgcgtctttctccatggcgctagggggtttctacatgtggagatacacattccggctgattaaagggtccgcaatgaaagttcaagccatagaagaatctgagaaaatagcaattaaatcatccaatagtgacttagaagctgatcataagacccatctcctcggtgcaccggaagacaaggaaaacaaagtggttaaggaaaagacagggttttggagaaaaggagtagacttcctccatgagatattggaggagctttttgcaccacctacacttggtgcaattatcggtttcattttcggtgcagtaagatggctcagaaatcttatcataggtgatgatgctcctttacgaatagtacaaagcactgcaaaacttcttggagatgggaccattccctgtatga

SEQ ID NO: 107792 - DNA, 414 bp, Arabidopsis thaliana columbia
aaaaagcacagggccttaaaaatttcttttacttagacttccctaattttaatcttgtgggccggaacttctgaataatattagtagagatccaaaacctcacaaatttcgaccgagttttgttgaattccgattagatctttcttccacgaaacccccccaagtacccattccatcttctccggtgagtctcccatgttggcattacgctagggttcttcttctctgtggtttcgcataacccaataatccaattttctacttgggcatcaatgggtcgctctcgagggaacttccaaaatttcgaagaccctactcagagaacgaggaaaaagaaaaatgcggcttatgtggagaactttgagtctacttctttggtaccaggtgctgagggaggagggaagtataactgcg

SEQ ID NO: 107793 - DNA, 440 bp, Arabidopsis thaliana columbia
cttactcgtgccagccactcgcatttttccagatttaattatccttcctcgaaacagtaggttagctaagatgacggagaactacccaaccgtgagcgaagattacaagaaggctgttgagaagtgcaggaggaagctcagaggtttgatcgctgagaagaactgtgcacccatcatggtccgacttgcaaggcactttgctggaactttcgattgtcattcaaggtcttggggtccatttggtacaataaggttcgactttcttatttgttttttatcatttcattggattttagagatgaattaagttttttaaccttatgtaggtattctaattacttttgttctttatttttttatcgtgttattgtatttgtgttagtagttttttaacttctttctattagttgtaatatttttttttactagatttttatata

SEQ ID NO: 107794 - DNA, 444 bp, Arabidopsis thaliana columbia
gaaatcccgggggggacgaacgcttccgaagaaatgaagtccttgagcaataatttccttaagctggaagggcattccaccacggtcggaaagttttattcagctgatgaagaggtttataatggttcggtcactacagcaaggaaaccctatacaaatggcagcaatgttgattatgacacacgttcagcacgatctgcatctcctcctgcggcaccagctgattcgtcggcgccccctcatccaaagtcatacatggatataatgtctatgatccagagaggagagaagccttcaaacattcgggagattaacgacatgccgcccaatccaaaccaaccactatcagatccacgcattgctcccaaatcaaagccatgggactatggtcaagcgccgcaagacgagagttccaatggtcaatggtggcaacagaaaaaccct

SEQ ID NO: 107795 - DNA, 212 bp, Arabidopsis thaliana columbia
gcgtttcttcaccaaccctactttttcttagatagatagaaaccttctacagaaagggcttcttttatcagaggagaattctaatcttcttttcctctttttgagattctctaattatccttttggaagagtttcgtgtgagagagaagcgcaatgtactgctttttttgttgtggtattcttttattccttttcttcattttcttcttccc

SEQ ID NO: 107796 - DNA, 378 bp, Arabidopsis thaliana columbia
  unsure (1)..(378): unsure at all n locations
tcttcttcatctttcctcaaaaataaaaacattttctccaattggttcttctttaagaagggggagaaaaaaagtcttagctaagactgaacattatccggtgaagaatggcgactccggcatggagtcatgccaaggctcaatgggtagtcgccatgttggcgttactcagtggctcggctatggctaccgaaccttattactatagctctcctccaccaccgtatgagtataaatctccacctccttcggttaaatcttctccaccgccttatgaatataaatcaccaccaccttcggttaagtctcctccaccaccgtattactatcattcaccgccgncgccagtgtaatccccttccccttcttatgtttaca

SEQ ID NO: 107797 - DNA, 396 bp, Arabidopsis thaliana columbia
aaaactataaaatccaaataaagccttttccctaatttctctcatctcccagggttggcttctctattcgttgggggttcacccccaccaaatatttagattctatcgatttttttttcttaattttttttttgtagtttcagtacttagaaattgcttcttcctctcatatcatcatcatcgttgagctctgccagtctccgagaacagaattatccttaaaaaaaagatcgaagcgaatcataacaaacaaattttcgggggctatttttttttgcatggcgttattcatcgtgtccatagctaaagcaagcttcaattcgttttcctcttcagctactaagggaagaagaagatcatatgtgacatttgatcttttcgtttactagccagatg

SEQ ID NO: 107798 - DNA, 335 bp, Arabidopsis thaliana columbia
gaaaaaaaaaactcacaaatcatcgattctttcttctgggtttttgtaaaaattcgagctgtttgtttctttctattgattgagtgtgtttcttgcttcgtgacatttcagagtttgcgtgtatttttgtttctatttttaaaagattctaatcgaatttgttcaatttcgctcttaaaaattgtaaatttgatctctcccccgtctttctcgtcgattcatttttgcttggatatatctcaggcgtcgatatagagaataaaaatcgacactttgtttcatttggaggctaaagatcaaagctttttgatagtgaagagcctccttcaccatta

SEQ ID NO: 107799 - DNA, 398 bp, Arabidopsis thaliana columbia
  unsure (1)..(398): unsure at all n locations
gaacagttctgcatttnaaantanntttttttttttttatttanncatnnntccaagggtggataacaacaacaaaaggggagcacaaagctacattctctcaccacgtcattgtacgaatataaaaaccaaaggggtaaagaagtgcatcatcataacaaccatttgacttcttaattctaaaggtagacactcaagttttattcaaagctacaacagcagcaaagcagagagggagagagagatcattacttgacatgcttaatgagatttagttgtaaggattggaggcaggtagtctgatttggtgccgaggatacaggcctttgtgtccgggaagaattcaaatcctggaaactcaatgatgtcgccttcgctggctacaccgatcgggttgc

SEQ ID NO: 107800 - DNA, 427 bp, Arabidopsis thaliana columbia
ggcaagtcctaaaagaaaagagattgttgagataagcaagagtgtaagagagaaggagattaaacaaaactcaaattggtttgccaaacacttaaagaggatttacccaatcacgcttcaacgaagcacttcttcttcattttcactctcttctatatctctatcactctctcagaactcgaccgattctgtttccacggattcaaattcgacgttggaacaaaagatctctctggcactcggtttaatctcatctccccacagaagagaaatatttgttccaaaaagtatcccacaacaactatgtcaggatttcaatagtagtgatgaaccaaagaggtgcaactggatcaccaagaaaagtgacgaagtctacgtaatgtttcatgaccagcaatggggagtccctgtctatgatgataacctg

SEQ ID NO: 107801 - DNA, 162 bp, Arabidopsis thaliana columbia
  unsure (1)..(162): unsure at all n locations
tccnggggcgggggagacccacgcgtccgttcttcatttataaaactagctttagtgactgatgttttgcatgagtcctaggatgcgtacaatctgcgttggttgttggcggttctcaagttatcaaatgtgaagttgctgtccgtggagaaaatgtcaaca

SEQ ID NO: 107802 - DNA, 219 bp, Arabidopsis thaliana columbia
cgggggattctcttacttaaaccataaggcttttttcctaacccggggttttaaaaccccgggtggcttttaccccgttctttttaagggggttccaaaggtttctggggtttaatcaaattctttttttattttttggggattttacccccggggttattgtcccacctttggcttaaaaggtggtcttagggaccaaaattggggtaaagccggttt

SEQ ID NO: 107803 - DNA, 183 bp, Arabidopsis thaliana columbia
  unsure (1)..(183): unsure at all n locations
tcgcaaagggatcttcacttctttttctagaagttttagtagtcattaatnncaagctcatgnnnactgttggagttgtgcgatcatanttggaaacgggtgtacctaatcgtgactcannagtttcttgggaagactcatctctaggtggggacccgatgtnntctcttggtnncttcaaca

SEQ ID NO: 107804 - DNA, 279 bp, Arabidopsis thaliana columbia
  unsure (1)..(279): unsure at all n locations
gggccgacccacgcggacggaaaaatcaanacttttttaaaacntanataatacacccaaactcaaaaccacaaccccgcccctttattaaacaaaaggcagccctacaacaatcnatctatatcattctctacctgaaccccttctaaaacaaacaactactatctgcccccaccttatattaatccacgagtgttacacacgacccgcacctgataacaacacaccctactacttactataaactcctccaaccctaaactccttaatcacaaacac

SEQ ID NO: 107805 - DNA, 384 bp, Arabidopsis thaliana columbia
ctgccgacgctagccgttctcctccgccagattcaaatatttcctccgccgtcgacactggtgggcgcttcttcggctcacaaacttaatccaccaattttaccatgctttagaaccttgggcatatatcaatggagaagcgagtcaaatacaagagctttgtgaaggatccaggaactcttggatccctcgaattaagtgaagtgatgctgctctttgtcccaaatgatcctaaatcagatttgaagcttaaagttcagactcacaacatcaaaagtcagaaatataccaaagaaggatcaaataaacctccttggctcaatctgaccagcaagcagggaaggagtcatatctttgagtttgaaaattattctgacatgcatg

SEQ ID NO: 107806 - DNA, 358 bp, Arabidopsis thaliana columbia
ctctcgtagccctcctctgttccatcttctttctccgccgatctccctctgctcttgctggttcttcttcttcttcaattctgtttttatttatttctttataaaccttctctcttaaaacccaaattcaaaaaaatcaaacgaagaaaaatctccgagttagaatcgtccataatcttgagactaagtgagaaatagtatccaaggtgatcaaacaatgggtgcaaaatcagaagagccgatgatgacaacaagagatagtatatacagagctgcaaggaatataaaacgactagacaacagtctctacaacgctcttcgatctatctaccaagactccatcttcgtccacgagatc

SEQ ID NO: 107807 - DNA, 236 bp, Arabidopsis thaliana columbia
gaccacgcgtgcggaaaaacacgcgcgaaagctatggtaggagcttttagaacaatcctatccctatctctatcatcggtccttttcaccttctccaaaatccctcacgtttttccatttcttcgccttcacaaacccagattccaccacgcctttcgtcctctttacttcggcgccgcaacaacttttttttcgacgaccgagacttatgttacagatccggatcaattgaaaca

SEQ ID NO: 107808 - DNA, 237 bp, Arabidopsis thaliana columbia
tgaaaaagtgttctgctatgtaggaactcttagttctttcggacgagttgagatctgatgttatttttaatgtttcgaaaactggaggacacttgggttcgaatcttggtgttgttgagctcaaccgggcccttcattacatcttcaatactcctcatgataagatcctttgggatgttggtcatcagtcttatcctcacaagattctaacgggaagaagaggaaagatgaagacaa

SEQ ID NO: 107809 - DNA, 359 bp, Arabidopsis thaliana columbia
aaacagagcaaattttattctctcagtttatatatatacatattaatcagaatcagggagggtgaagaagcgaaagagagagagaagatcggatgggagtggattactacaaagacctccaagtcgatcgcagcgcaagcgacgatgatctcaagaaagcttatcgtaaacttgccatgaaatggcatcccgacaaaaatcccaacaacaaaaaggatgccgaagctatgttcaaacaaatatccgaagcttacgaggtactaagtgatcctcagaagaaagctgtgtatgatcaatatggtgaggaaggtttgaaagggaacgtgccaccttcggatgcaggtggagctacttacttt

SEQ ID NO: 107810 - DNA, 326 bp, Arabidopsis thaliana columbia
aattcatttccatgctaatcacagttctagttatcttcaaaacatcgttagcgtttgaaaacttttcatctgtcgatggtaatttcccgttctcacctaaacatgttataatcatcaacactttgcacccacatggaaaattatacgtgcactgtaggaataaaggggaagatttagggcttcataagatagaatatcgagaacaaatagatttcaggtttcgtgtcaatctacgcagaacaacaacatacacttgtaaattctcgtggccaggaaatgaaaagacgttcgatatttttagagcggatagagacgatagttcaaaa

SEQ ID NO: 107811 - DNA, 223 bp, Arabidopsis thaliana columbia
aaacaatgaagaagaaagactctgtaacagactccattaagcaaacaaaaagaaccaaaggtgcactgaaggctgtaagcaatgaaccagaaagcactacagggaaaaatcttaaatccttgaaaaagctgaatggtgaacctgataaaacaagaggcagaactggcaaaaagcagaaagggacttaagctatgcaccggaaaatcgaaaaagattgggatga

SEQ ID NO: 107812 - DNA, 283 bp, Arabidopsis thaliana columbia
agcaatctcctcgttgcaaccttcggggttcttctcgtgcttaacggctgccttgcgaggcaggcacttggggttcctcctcagctacagaacgagtgtaacctcgacaacctagatgttcttcaagccaccgaaactatcaagagtgaagccggtcagatcgagtactgggaccacaaccacccttaggttcgatgtgttggtggttcccgtgctcggtatgtaattgaacaaggcgggctttacttggccaacttcttcactttcccaaaaatttcctacg

SEQ ID NO: 107813 - DNA, 120 bp, Arabidopsis thaliana columbia
atttactaaaacttttccaaaatgtccatgaccttcttcaatttattcctaatctgggctgtcctttacaacaattgcgttgcgcatcactatacattcacggttagggaagatccatat

SEQ ID NO: 107814 - DNA, 367 bp, Arabidopsis thaliana columbia
aaagcctttcaagttggagctggttgtgtatgctagtctgcaagatgcacagccacgcacagtgatgcctttgtggaaagcaaacttggaagaaccaaaagcgaagcagtccgatacttcagtgatgatcgttgataactccacaatcccaagccgcaggatgaagaaacgaagggtctgcgcctcccacgggagacgtaggcctcaagtagttaggcaaacacgtcttaaattcgcaccttcgactgaaggtgacagccaacagctaaagtggttttgtgatgcatgtaaagggattccacagccgatgcatccaccggtctttcttcaagcaccaccatttgcttcaccaccaccattagaagat

SEQ ID NO: 107815 - DNA, 384 bp, Arabidopsis thaliana columbia
cccacgcgtccggaaatctcgaagtcctctataatacatcgttatcttttctccatctatgttatctgggcggtccctatgcctcccagggcttgctgtctcatctttctcaatttcattcctcgacaaaattggcatctgggttcgattctttgtgtccgtcgtaaaaaccagtgattaggttctcgtcttcgagtcggagacaatggatataagcaacgaagcaggcgttgatgcgttcttaattataggacccacgactataatcggaagaacaatcgccgtccggatcttgttctgcaacttcgtgtctatattcagacacaaagctttcacaaatcttaaatttttccctcagaggaggtagggttttacctataccgt

SEQ ID NO: 107816 - DNA, 362 bp, Arabidopsis thaliana columbia
gccgggacaagttttgttgtctctctagggaagacgtgatccgcttccttataggtgtccttggagcattagctcctttaccactcacatcaatctccactctgggaatcatcaatcaaaactataacttcattgaagcctctcttccagccattgaagccactcgtaggccactgtgtgaccctagtgcgatcgccgtgttggaacaaaccgaaaacgaacaacagttcaagataataggagaaatctcagcttcaaagctctggaaatgtgattatctagctgcagcttgggctctagctaatctctatgcaagacaatttgtgatgggagttgaggacaacatgtcatcaagatcattc

SEQ ID NO: 107817 - DNA, 181 bp, Arabidopsis thaliana columbia
gatctaattgatgtagggactgtgtgtctcatcgggggagaattctcaatatgactactcgaaagtagcggcaagcgagtttgtgagctccataaacacaattgtggttgagataagacaagtgacgtcaattatgtctcaattcggtgatttcagcgggagatcgccggctggagaaagc

SEQ ID NO: 107818 - DNA, 275 bp, Arabidopsis thaliana columbia
attcaaagctttcttcttttgtacgttattccattaatccaatttgaaactgtcaagattttcccttttctctggctgtcgagtttttctcgattcctttctccattttattctttcccctcttcttcaacatctcaatataaaccctaattttgattctagtttctcaattggtgtgaattctcaaaaattcaaaaaaccctaatttcctttttttctcttttccggttttttttgattgattcgatttcctttgattcttcgatgaggattta

SEQ ID NO: 107819 - DNA, 454 bp, Arabidopsis thaliana columbia
  unsure (1)..(454): unsure at all n locations
ggtaccgaacggcggggcgacccacgcgtacggcagcttcattcacgagtttccgtccgtggaactgaacactcagactataagtcacgcacagtagccagactcaaccgtgacacatcccnagtcaaatctctcataacccgtttagatctagccatcaacaacatatccaaagcagatctcaaacccatcagcacaatgtacaccactgaggaacaagatatcgaagctcctttaatctccggcacgactcaaggaagtggcgagtacttcacacgcgtcggtatcggaaaaccggcgcgtgaagtttatatggttctagatactggaagtgacgtgaactggctacaatgtactccttgcgctgactgttaccaccaaaccgaaccaatcttcgagccatcggcgtcttcttcttacgagcctctctcttgtgacactccacagtgcaatg

SEQ ID NO: 107820 - DNA, 381 bp, Arabidopsis thaliana columbia
gaagaatcattctggtttggaggatatgtaagaaaaactacttgatctccaagttatgtccggtcttctgttactggagtgcgcaaattcccaagcttgacaatatttacgcaaagctcaaaacccaaaatatttgagaatcaaaacaaaatcaagggtcttgtctttttttttttttttggtgtgaatcaaaggtcttgtctttgcaagtaaattcgttcctaatgaactgtgtgagtcgtttaaagtgtttgataagcaaagcacgaagctttgcacggcttgttggtgaatccactctctctcaaccgccgtctttcgcctacgccgcgttttttttatccgccgtcatgaatggtcttgaaactcacaacacaaggc

SEQ ID NO: 107821 - DNA, 434 bp, Arabidopsis thaliana columbia
  unsure (1)..(434): unsure at all n locations
ctctcttccctcttcatcaagtttctctaggagagtgaagaatttggtttgagattagtctttgattaccctttttgtggtgtggttttcgttatttcgaggagtgataataataccgttatgagtcatcactttacatgtgtttgatcaattactcttaattcactttctgggtttcttcctttgaatctctcctcaaagaaaagaaaagaaaaatgaaggaggaacaaacaagatctctgtttggaatctctttgtctgataaaccaacttggcaacagtttctcatttgcacttctggtttcttttttggttatctcgttaacggtgtttgcgaggaatatgtttataatcgtcttcaatttagctttgggtggtatttcacgtttatacaaggatttgnnctacttgttctaatctaccttcaagcttta

SEQ ID NO: 107822 - DNA, 430 bp, Arabidopsis thaliana columbia
  unsure (1)..(430): unsure at all n locations
accgttacaacacagaggagtattcagcagatgcaacaaacaagtttaacatgtatgcagaacagatccctacttggcttgtcnactggattcctgataaaggcggttacttcataggaaatctccagcctgctcacatggatttcagattcttcacacttggaaacctctgggccgttatttcgtctttgggaaaccaagaacagaatgaaggagtcatgacattgattgaagagaaatgggatgatcttgttgcaaacatgcctctcaagatctgttttccggctctggagaaagatgaatggcgaataatcaccggatctgatccaaagaatacgccttggtcatatcacaatggcggatcctggccaactctcctctggcagttcacattggcttgtattaagatgggaaagctagaactggcgaa

SEQ ID NO: 107823 - DNA, 419 bp, Arabidopsis thaliana columbia
  unsure (1)..(419): unsure at all n locations
cggaannnccggggcgagcccgacgcgtccgaaaaacatttttcgatattctttacccaaccattaaacataaaaatttggcccactaccaagtgtgaaaagagttttgtattatatcgtaatgcgctgaaataggattacaaaggtatcaaagaaagtggggagatatgtagaaaggagaaagtagaaagattcaagaaaaagatttgatttaaccaaccttggtttcagaatttcaacccacactgatgaaagaacttataacacaactatctaagaccaaaggttgtaaactcttttttctctgctatagctattggtgaagttgatctcaacaaagtcgagccttgggacttgccttggaaggctaagctttgggaaaaagagtggtacttcttttgcgtaagagaccgaaaata

SEQ ID NO: 107824 - DNA, 387 bp, Arabidopsis thaliana columbia
aaatatgtttccggccggtgtaatttgtctgcaatcgacttctctgatcaaagatgttgacataaatctcaaatcgagtcaattactttagagatttcccaaattccgtctcgaagatgtcaacggagagacgtgcttcgtcgaatccaatgaccaacgaagagaacgctatgttccttgatatattgcatgaagcaccattatttggtcacaggaaatctagaagccttgttggaagttacctctatatgcttctattggcaggttatgctattttagctgctggtgctccttggatgtttcaccgagtccaacagttgaccccttcattgctctgctgctgcgatgttgcgcttttggttgtcacaggtgtctttcaacaatact

SEQ ID NO: 107825 - DNA, 228 bp, Arabidopsis thaliana columbia
cataatgacatatatcaagttttctgttcttgtcggacttcgtggggccaaagacgagaaaagaatgccattgcacagtcgccattgatgcaagttgaatcgcccaacctcgtatgcagaccggttggcatgcggacatatacactgctcgacttcgttgattcataccatacattacaattttgtactggaggggacgaagaagggaaatcttgagatgaaaagaca

SEQ ID NO: 107826 - DNA, 340 bp, Arabidopsis thaliana columbia
gaaaaatgtatcctgagaagcaaaacctttgatgttgctagcgattatgggtccttgtggtggtgggaaaacaacattgctgaatgttttaacaagacagcttaatttatctccacgtttgcatttgtcaggtctcttggaggttaatggcaaaccgagctctagcaaagcttataagcttgcgtttgtgagacaagaggatctcttcttttctcaattaactgtcaaggaaacacttttttttgcagccgagctttaacttccggagatctcttcttcttaagagagggatgagtatgtcaacaacctcttgcttcaaacttggtctggtcagctgtgc

SEQ ID NO: 107827 - DNA, 184 bp, Arabidopsis thaliana columbia
  unsure (1)..(184): unsure at all n locations
nnnnnnnnnngagagcaaagtggcgcgtttaaatcacagtgaaagtacatatacagctgcttaaatattgcaccgtccaaaaaaaaaaaaaaggtacgcattcgncactatttttcttttttcttgttttcttctataaatatgaaggagaccagagatgagtttagataatggggtcattttt

SEQ ID NO: 107828 - DNA, 432 bp, Arabidopsis thaliana columbia
cacaccttgaaacgcagacgactcgatttcaccgattccatggaagcttcttcttgagctcaggctaaaattgctgatatgcgagagaaattagggcgagaggttcgtgttttcgagacttcgagtatctcacagagaccaagtcaagtttctagtgctgacgatgaatctgatgatttctacgagttcacacctgcagatttttaccgccttttggctactaagaaagaaggtaacatgttctgaagaatctgtatggtttagtttacattcttcagccatttccatgaaaattttgcaaatctttgatcaaatccaactgtgtttgtcataatcggaatgtattgcttgctctaaagaaatcagtaccttggttgtttaattcttctaacatgtaatgttaaattacttatacaaaagataaatcgttga

SEQ ID NO: 107829 - DNA, 410 bp, Arabidopsis thaliana columbia
gttcccatcgagttctctgccaatgaaccttaacttccaccgacctccaaatgtttggtcagaaccaaaggtaatagtaaatgctcaaccccaacaccaaccctattccgcattccgtacatctgaaatgaactatgttcaatcatcaattggacttggaaggggtcctcaaaccggtttcaattcttatccaatgaactttagccgggcagatgcaattggtagcgctaaaccagtagtacaacctatgaagggtctagactatttcaaaaaccttataaaggaacatggcacagataatcatgaaactaaccaataccattcacaaactgggatattcaacggacgcattgataataataataagattcatcaacaatgtatctacttttgcactgcgaatggatgta

SEQ ID NO: 107830 - DNA, 388 bp, Arabidopsis thaliana columbia
  unsure (1)..(388): unsure at all n locations
aggaagcggtggcggctgaggccaccgtttatgtggtggcggtggataccgcagcggcnggtttggaagttactccggtggaggtggtanctaccgaggtggcggcggtagacgcgagggtggaggaggatacagcggcggcggcggcggttactcctcaagaggtggtggtggcggaagctaccgtggtggaagacgtgagggaggaggaggatactgtggtggtgaaagaggaggtttctgatgaagcggttgtgagtttatgatttgttaatcctttaattattgatattaatctcccggtgtattgataatatctcttcttttgattcatctatctaatatgcttgtctttttgattcttttatttttttttccttactttctc

SEQ ID NO: 107831 - DNA, 385 bp, Arabidopsis thaliana columbia
aaaacgttatgaggcttcaaaactgaatctatgtataaataatacacacgcatatatgtagcggtgttttttcttttggtttgcatataacaaaccaaacactactcttttctaaccaagagaaaggttttatatatgcagaatgaagtttgagagagcaaggccattcatagccattgttttcatacaatgtttgtacgctttgatgtctatagtagcaaaattagctttgaacaagggaatgagccctcacgtcttagttgcttaccgaatggcagttgcttccgctctcattacgcctttcgctctcatcctcgagaggaacacaagaccaaagttgaccttcaagattttgttacaaatagccatccttagtttatttgag

SEQ ID NO: 107832 - DNA, 301 bp, Arabidopsis thaliana columbia
  unsure (1)..(301): unsure at all n locations
ccatttnggacacagaagngaatggccccattgattagcaagggagactggcggacagcttctcaaaagagcatctagttcgcacattccacttactgggcacccagctccattatctatggaatacctttctgacattgcaccgggataattacacaaaaatcttggaatatcttcgcgatatctggactaaagatcgaagagcggaatggtcaatatggatggtgtactccaaggttgaaatgccacatcattttataagtggaatggaggacatttcaaaccataagtcacacaaaag

SEQ ID NO: 107833 - DNA, 382 bp, Arabidopsis thaliana columbia
ctccgatctttccgcttctatcagattttcagatttgatgaactcagattaagaagagtgcgtattttagaataattaaagggaatggattctgcaagaagttggtttcacaagtttcaaccacgagataagcctcggaaaaaggatatgttctccggaagcacttacggcggtggcgtgacagaaaccaccgtccccgacggaggaaatgatacagaaacggcaacgaaacttccaccactaggcggtgacggagaagcactctcaaattcaacaaaacagaaagttgctgcagccaaacagtacattgagaatcattataaggaacagatgaagaacctcaacgagaggaaagagagacgaacaacgtttgagaagaagc

SEQ ID NO: 107834 - DNA, 234 bp, Arabidopsis thaliana columbia
ctcgttattaattcgtttctcttaaaaacttaattctttttttttccaaacaggttctctggaacttaaaaacttttacagagaatccgggtgcttttctctgattcttctactctttcctaatttaccgattttctcgggaattcaaaaatccgtttctctttttctcgagtttaaaaactttcgatcttgagtcaattcagattcttcttggaagctctaagaagaagaaga

SEQ ID NO: 107835 - DNA, 277 bp, Arabidopsis thaliana columbia
cttttgatttcacattttacttaaataccattttcactgaacttgagatggtttaggctttgagagggcagacaagttgcatcatagtgtaatttcagtgagcgtgaaacttggagctgccacgagagaataggctcggggcttgttacccgtcaacgatggagaatggcgtgggggttgtacatttatcggtgctaggcctttggttctttcgaaagtgaaactgagagcacagagtacttggggagaacgagtttcaattgatgacgaccaccat

SEQ ID NO: 107836 - DNA, 268 bp, Arabidopsis thaliana columbia
ctcttttctctctcttctctctctcttgtggaagaaaggcaacaactattgaagctatgcttgtggactgtgtaaacaacagtcttcgtcattttgtctacaaaaatgctattttcatgtgcgagcgtctctgcgctgagtttccttctgaggttaatttgcagctattagccaccagctacctgcagaataatcaagcttacagtgcatatcatctgctaaagggaacacaaatggctcagtcccgatacttgttcgcattatcatg

SEQ ID NO: 107837 - DNA, 455 bp, Arabidopsis thaliana columbia
  unsure (1)..(455): unsure at all n locations
caacgcgnntccgcaaaanntcttaaaaaccctttctcttcatattcttctctaccnnngtgatcaagatgcnagagtcgtttgtgtaagaccctctcacgcggaaaggaccaatcnnaccctcgaaggtnnggaaagggctccgacccaccatcganncaacgttaaaggccaaagatcccaggataaaggaggnnngcattctctccggatcacgcaagagggcttaattttctgccggcaaggcagcttagaggatgtgccgtaccgtttggctgattaccaatatccagaaaggaatcnncaccctccacttgtgtcctcagagcttccgtggtggtatgccagattttncgttaaaaaccccctaacgggaaagacgattacctcttgagggtggagagttctgacanccatcgacaacgtcaaggccaagatccaagacaaagagggta

SEQ ID NO: 107838 - DNA, 137 bp, Arabidopsis thaliana columbia
caaaccaacgacacgcgatggcgcaaccagaacctgattcttattgtgcaaaggcgacaaagccatggttaggagcgattctttcgagccgagccatgctcagagaacatagactcgtcttcgttctcggcggcatt

SEQ ID NO: 107839 - DNA, 303 bp, Arabidopsis thaliana columbia
ctctgttctactctctatcctaactctgttcatcaatggtcctgtgataacgacagctcaatctgcaccttcttcttcaacttcatgtaaccgtatctgtggaggaatcgagattccttttccttttggaatcggacgaagagactgttttctcaacgactggtacgaggttgtctgtaacagcaccacctccggtaaatccttagctccgttcctctataagatcaacagagaattagttagcatcactctttgaagcagcatcgacagtttctacggagttgttcacatttaatctccggt

SEQ ID NO: 107840 - DNA, 383 bp, Arabidopsis thaliana columbia
ccctctttaggttttcaaatctatcaataaaattttttttggcctttcccttaaaatcccggggaaagccaagggaaaacgcctgaaaaaattaacataataatgttaattgttgcttaaaccttccagctcaagtttggtagtaagtaagcagacatttaaaccccccaagagcaattgaagaagacttttaattcttttgaatttcttttccaaaaaccctttttagaaaaattggttgcatcataaagattggttcatttattcccaccggagaagatcatcaaattcgtcttctcacctatatcgccgacgacattcttcacgttggaaaaaaacaaagcaaaaccctagaaatagtggctgatgaggtcgcgaggcga

SEQ ID NO: 107841 - DNA, 300 bp, Arabidopsis thaliana columbia
tctttcactactaatatgcaactcttattgtttatagaaaacaacacctggatggggaggggaattataacaatgcacgggaagctattggactatcatattcatcaaacccaacaactactgataaccaccctactaaacctaatcctacatctgctgttacaaggccacagcctccataactagttctaatgtgtccacattacgactaaacaaacacaaatttttgttactacaacatctacagtctcactcatcctcgctactttatcaaatcattccttatatcttgaactaaag

SEQ ID NO: 107842 - DNA, 423 bp, Arabidopsis thaliana columbia
atcgcttgaggcatcctgctaataaaatggtaagtagtttgtcaagaaaagatgtgtgcttcgttgtgtttgtggacgagattaccatgcaaacactttctgccgaaggccaagtacccgacggagctggattcgttggtctgtggaagttggttgtggtgaggaatcttccttacacagatatgcggagggtagggaaaataccaaaactgttaccacacagacttttcacttcggcaaggtactcaatctggttggacagcaagttacgtctccagttggaccccctagtcattttggaatactttctgtggcgtgaagggcacgagtatgctatctccaatcactatgaccgccattgcctatgggaaggaagtgcacaaaacaaagagcttgacaagtacaatcacactgtcattgatc

SEQ ID NO: 107843 - DNA, 225 bp, Arabidopsis thaliana columbia
cgggtgtttccactcgtccttcaaaacacaaaacaaaaaaaaatggctttcactgttttttcaagctccatcttcgggactgtgttcattcttctgggcccagctccaatcatattctcttcccttccatcatccaacacacaattcctctttcgtctcaaatcatgcaccgctctaggtggacttgttacaaccattgctacatacaaattcaagttcatcaca

SEQ ID NO: 107844 - DNA, 229 bp, Arabidopsis thaliana columbia
gcattggctttattaaacgctctaactttatatccctgcttatcccagcgggacgtgtcgctcttcaaacctgctcagatcatctgtaaagctcaacagcttcatgaagacgataactccggcatatcccgccagtttgctctgactctactggccagtgccgctgctgtccattccaaagtatctcctgctgatgccccctacactgaaactgcagacctgtttggga

SEQ ID NO: 107845 - DNA, 337 bp, Arabidopsis thaliana columbia
  unsure (1)..(337): unsure at all n locations
acgggaagatgctcagatcggaggttctaagtttgagaatttaaagccacggnactaagattgtgctgatatttcgcaagggtatgatgtgactcatcatggatgatcatctggagcgatgaatcttgtgtctcacagggaagagctcanagatttgaagcgttgtcacagcgacactgcagggcatgatggacaatattcattgggagatgattcgctagtgttccagcactagacatacgttgcaccacacaaccacctacaccaaacagacaccaaatcattataagatcttagttctgttccgactgacttggattgctctgtcgtcgcacta

SEQ ID NO: 107846 - DNA, 355 bp, Arabidopsis thaliana columbia
ctattctgatattcacctctcttatattttttttttgaagatccacacaaaaaagcgttccggcatttttttttctgagctgggattattaagctatctacttgatttttccgctttcactggaagaataaagataagaaaaaatgtcacgtgatgtcgttgaaatatcaaatccacctctaaaacaagacgatctttatcctcatccagtgaaagatcaactatacagtatcaattactgcctcacaagtccttcttcttggctcgatacaatactatcatgtgttttcaacacttacttagtgatgcttataaacaactgtatcttaattctaaccaatgtttatcttttcaa

SEQ ID NO: 107847 - DNA, 444 bp, Arabidopsis thaliana columbia
gaagatctagaatggagggaaatgaaaggcccatttgttacgatatggcttcacaatgttccctggggttctgagaacactttgactgctcctgctgcaaagttttctgatggctacctggacttgattgtcttgaaaaactgccctaagcttgtcctgctctcacttatgagacagacgagtagtggaacacatgttgagtcaccatatatagtgtatataaaggtgaaggcatttgtgctggagccgggtgcacttgtagacgaaccagacaaggaaggaatcatagattcagatggagaggttttggcaagaggaaaaagaacatataaatgtgatcaaaaggccttgatgtcttacgacaagcttcaagtaacagttgatcaaggtttagccacactcttctctcctgaatattgataatgttaacaatactcgtgagat

SEQ ID NO: 107848 - DNA, 227 bp, Arabidopsis thaliana columbia
  unsure (1)..(227): unsure at all n locations
gaaaaacaaaaaaggcngncaaagccnctacggtcgancaaaatccaaccacaccagagagactcatcgattctttcttacatggctcagccatctacgcagctcctatctacatcagtcgcaaaccaccaactttctacgttcgcgccacaaccgcaggttacgactagagcgctttcacgctcgacccgatcaaagaatagagcgtgtcacgtgagatgacgaga

SEQ ID NO: 107849 - DNA, 443 bp, Arabidopsis thaliana columbia
  unsure (1)..(443): unsure at all n locations
ttcccttattattcggagagcctataaacgctctcaccaaacaaaccaaaaccaaagccaatccaagaaaaaaaagaaacctcaaagaagaagaagaagaagattctctctgtcgaggtaaatatgaagcaaatgtcgcatcttgatgatattccttcgacgcctggcaagttcaagccctacttccaccgtacgcggtggcaatcctccgtcgccaagctcgccttttggtctctcgtcttcgttggtttgatcttcatcttcttctaccgatctcccgtttcctccaatcccgccgatccttctcgccgttctcttcgtacctactcctggggtggacccgcttgggagaaacgggtcagatcctccgcccgtctccgtacccgccgcggtttctctggtctcgtcaccggagccgncggtttcgtcggtacccatgtctc

SEQ ID NO: 107850 - DNA, 443 bp, Arabidopsis thaliana columbia
gaaacccacagcaacaaacagagaaaatgtgtggcggtgctattatttccgattatgcccctctcgtcaccaaggccaagggccgtaaactcacggctgaggaactctggtcagagctcgatgcttccgccgccgacgacttctggggtttctattccacctccaaactccatcccaccaaccaaggtatgtactctcctattaatcataaacaaaaatacaaaatcattcaaaaacacaaacatatagttttttctaacctttttagcaaaaaggtaaaataatatttctggaacttacggaagatgataaaaaaaaaatatttgtggttttggtaatgtaatttatcaggattatttaattatctgtgtggggttaaaattgtaaattttgaactttggggaatccggtgaaaatttgaagttaacgtgaaagaggaggca

SEQ ID NO: 107851 - DNA, 377 bp, Arabidopsis thaliana columbia
  unsure (1)..(377): unsure at all n locations
atcttattcaacgaatcatttatcaccaaaaggttctctcttttttgtttgtttctgtcttgtgtgaatgactcgtcggtgttcgcattgtagcaacaatgggcacaattcacgcacgtgtccaacgcgtggtggtggcacgtgcggtggaagtggcggaggaggaggaggtggtggtggattatttttttttttttttttttttttttttttttttttttttttttttttttttttttttttttttttttttnttnttttttttttttttttttttttttttttttntttttttttttttttttttttttttttttttttttttttttttttttttttttttttttttttttttttttttttttttttttttttat

SEQ ID NO: 107852 - DNA, 498 bp, Arabidopsis thaliana columbia
  unsure (1)..(498): unsure at all n locations
caaacgcgtccgcgccggctttctcttnntctctcctctcgtggttgggagaatggatgtngnngccattanngtgatgatggtgacgcggtgannatctcnngaatcggttgggaagannaaagagaggatnngaagaaaccctgtggannagaatnnngccggtgannagaagannagaagccacnngttttgggatgtaggaagttgaanntagagtgnngcggagattgggtattggggtgttatcggcnnattgcggaagggattcgaggggtgggaaanccccccgaccgggaattggaagattggatctannatggtggaagggctaaatcgannaattggttgaccatggtgtcaaagaagtttactcccaaagggatattattggtggttgatnngctattggaagctgtcattgaaagnaatctcggtttcaattggtaaagcttaagggatcaagagaattaggggttttcgaggctcctaaaatta

SEQ ID NO: 107853 - DNA, 440 bp, Arabidopsis thaliana columbia
  unsure (1)..(440): unsure at all n locations
gaaaatgacgctcacattaactctggcatagacacagaatcgggctttgactcaatgtggctccaccctctgtagacaagcactcgccagcttctaagcttaccaagctgctaccaaccaggtgctcttcctcacatcaatcaccgttactctaacaaggagatcttccttcgtgaactcatcagtaactcttctgatgcgtcttgctagaagcctccttcataaccctcatgtacatattgagccatatctgcatcagttgatgccgtctattatcacttgccttattgccaagcgcttaagaagaaggtcatctgataatcactgggacttgagaaacttcactgccagcacagttgcttcaacgtgcaaaaggtttggacacgtttatcacaatnttgtttcctgttgctcaagatcactgcttcatacctttttgg

SEQ ID NO: 107854 - DNA, 425 bp, Arabidopsis thaliana columbia
ctcgtctggaagaatcaggagaaaattgtcatgtgttggtatcttctttgatcaagcacttggatcataagaatgtaataaagcaacaaggtcttcaaattaacatggtcaatgtagccacatgccttgcactacatgcaaagcagcaggcttcaggcgcgatgactgctgtaatagctgacttgattaagcacttgcgaaaatgcctgcaaaatgcagctgaatcagatgtgtctgttgataaaacaaagcagaactcggacctccagcatgcattagaaaattgcatagcagagctctcaaataaggttggggatgcagggcccattcttgatatgttcgcagtggttcttgagacaatttccactaatgtagtcctttctaggaccacagcatcagccattctccgagctgcacatatagta

SEQ ID NO: 107855 - DNA, 216 bp, Arabidopsis thaliana columbia
gttcaaacctgaaagaaacagagttaaattacctctcattaccagcgatgagagcggagtaaaaaaccgtgatctgggtgaaaagaaaggcaaacactaaaccattgtatcgctatcattggacaacgaaaacaaatccaacgacgaccttcaactgacccttttgatctctaaaaatacactctattgtatcgacatgatacgttcgactgctaa

SEQ ID NO: 107856 - DNA, 419 bp, Arabidopsis thaliana columbia
  unsure (1)..(419): unsure at all n locations
gcgattttctccacatcacatcttctcttcatctccttcatcatanccacatgtagaatgtctgtctccggtacagcctggaccttaacaaaccattgcggctccacaatctggcctggaatcctcaccgcaaacggcgcacaactcggcgacggcggatttgccttagcttcaggatcttccgtaaccttcaccgtttctccaggttggtccggtcgattttgggctcgaacgtattgtaacttcgacgcctcaggctcaggtaaatgcggtaccggggactgcggcagcaagttaaaatgcgccggcgcaggaagagctccaccagccacactcgccgaattcacaatcggctcctccggaaagaaaaacgccgtgcaagatttttacgacgtgagcctcgtagatggttataacgt

SEQ ID NO: 107857 - DNA, 312 bp, Arabidopsis thaliana columbia
  unsure (1)..(312): unsure at all n locations
gcgtccgccgnttcaagtcaacgttcccttcgtttccttccaccttcttcttcacaaaaatcgtaggtttcatataaatttggccatatttttagatctccatttgatctgagtttgtattatcacaaagttttatcttcttttttttcactcttcagtcttgatctctcgattattgcccaccaagtgatcgatcttttgtctcactgaactcggttacgcttgagatttgatctaacagctgaaagtttctgactttttgggtttttgatttcgattttcatggcgtatcatccggcttattactgagac

SEQ ID NO: 107858 - DNA, 408 bp, Arabidopsis thaliana columbia
attgtgattcaatggatatctttgtgagttttgttgtgtttatcctttcagggtggtctgttgaatctacgatgcgtatgaaatccatcaagttgggtaaaaatgttatttacgactgcatggatatttataagcaaccatctcttagtcatccattgctcaaacatcataatattcggatgaaaccaacaggatgggattctcaatcagagaataaatttgcagaaagaagacacaacaataaaatagaatgtccaaatggaaccgttcctattttaagagccaaggaaaaacatgtcatacaatatcaagaataccccatcaataattttaccgttcttacagctaaatatccgggtacccatattgcgggaatgaaagttgtagaaaaacataattacagaggcg

SEQ ID NO: 107859 - DNA, 416 bp, Arabidopsis thaliana columbia
gaaagattttattgatgggtatatagaaactataggttataaataccatagtggggaataaatctataacggtggaattcacatgaagctcaccaatttcacctatatacttagctctcaagatagactactaaaaaagaccccaaatttagcaaaaaatggaagccttgtggaagttggaggagaaactgaagctaactacgaaagaagccgttgtgatcttggtcggaacagcggctgcggtaacgctactctgcatagccgcagcgtttctcaaccgcaattctcgagggaagcaagtagcagacgcagagtgggcgtctgaaacagcgtttgggtcaaggactatggaggaaaagaggaaatgtaagtggagcaaagtgaaaagaacgttgatgggttctttttgttggagc

SEQ ID NO: 107860 - DNA, 320 bp, Arabidopsis thaliana columbia
gtccgttctaagttcacttcaaacctaccacccaagtcaatgggagctagagtcagagtcttcatgtaccctagcgacatatgaggaggctagatttcaacaagtatcggaaggaatcgccattatcatttctcaggagctgtagttttatctattcacttttattctagactctctgttggttttgattttatcttgagacgaagtaaaacattttttttcttgagatcatatactatcgagtattaatggaacttgagaaaagctatgaaaaaaaaaaataaatatgtaatatttatattaaaaaatatattattaat

SEQ ID NO: 107861 - DNA, 417 bp, Arabidopsis thaliana columbia
gcgacttaacggcttccctccagcgactctacgagtggttatgtctgatgctgcggggggattatcgtttgggaagtttctggagctcagtttctcaaatcacgcagctgctagtagagtagcttgttgtggccattctctgcatagagattgtcttcgcttctatggatttgggaacatggttgcttgcttccggtacgctactatagatgttcattcggtctaccttccaccatcaattcttagtttcaactacgagaatcaggattggatacagagagagacagacgaggtgatagagagagcagagcttctgttttctgaagtattaaatgctattagtcaaattgcagagaaaggtttcaggcgacgaattggtgaactcgaagaagtgctgcaaaaagagaaaggcggatt

SEQ ID NO: 107862 - DNA, 290 bp, Arabidopsis thaliana columbia
ggaggccacgatgggggtattgatgtttttttcctaggaaaatctattataaacacgtgtggttattttattaaaaatgtgaaacaattacataactactctttatataaattaacttctacatcatcatacatatattttctaacatttatccttaaaatatatttttttttacttatcttttttcaaacattaatcctatacacttaatttactctttacttatattttatatctttaactataacatttccatttatttatttaacaaatcaacttttttaaatttc

SEQ ID NO: 107863 - DNA, 419 bp, Arabidopsis thaliana columbia
gggaaccttctggaaagattcctcagtcatctctccacagtggaaaaagtgggaaagagagagaacggagagattgtggacgacaatcatctttatttttggtttcccttactatcaggtttatcagagcttagtttcgatccaagaccagaaatcaggaaaagcgcactacagattatgtttgataccttacgcaaccatggccatttattttctctgccgttatgggaaaaagtattcgagtctgtattatttcctatattcgactacgtacgccattctattgatccttctggcgaagacgaatctgctgatcaaggaagttctggtggtgaagtggatgagctagatcatgacgcctggctctacgagacctgtacattagcactacagcttgtagtggatctctttgtcaaatt

SEQ ID NO: 107864 - DNA, 403 bp, Arabidopsis thaliana columbia
  unsure (1)..(403): unsure at all n locations
cggacgcgtgggcggacgcgtgggcggacgcgtgggcggacgcgtgggttcaatgtgcgagggttggggaccaccagatgcttccnacacttcctccaccagcgtcgcggcggcgaatctcctcccaaacgtccccttcgctttcttctcacgatccgaaaaactcggacgcgttgctgattggactcgagctctctcaaatccatcagctcgtccttacaccggatccaaatcagatccatcagcgatcttcgatttctcagcttttgcagtagattaaggatttggtctaacaaactcaagtggaaacgcctactaagactccgctttccgatttgtcgactgaaaaccaccgccgcgtcctaaaattcgacctaaatggagattcaatcaattccattac

SEQ ID NO: 107865 - DNA, 277 bp, Arabidopsis thaliana columbia
  unsure (1)..(277): unsure at all n locations
gattaactttaagtaccaaaaatggcggctacaacctgaactatcaaggggggctttgaaagacgatgtgggtattgtgatcccaaccatanagcctgcttttagagcaatgggaccatttgcaccattaccacctgatcattgtccaagatggagacccttccataagaccggttccggggtatactacagctctacaaccgaatgattaacaggacctgtccagactatgatctcacaagatgggtgcgtgttgctcatggtctaaagaagatat

SEQ ID NO: 107866 - DNA, 526 bp, Arabidopsis thaliana columbia
  unsure (1)..(526): unsure at all n locations
ggaanncccggggcgacgccacgcccgtccgtnatattcctaaaaatgatngggaagctggtgtatactatcnntcggcttagnngcagttccaaggcgcctgagtgcatngtcttaccataggagcgcgcannaatctcnnctgcatanntggaatnngcgagatagaaatttgaaggcccggataatanntctttctcaaaccaaatcncnnatggctgcaccccagttggcttcaagnnggtgatccattnnntaagaagaccagnnntatctctganntattctggattgggagtagtctcttcttccctacccacttttcttctatnctgcttnngcaagaagtatctcaatttgtcgtccctaacccgtttagtttgagaagagtaaccgttaaagtttaaagaacccctgcttagttnngctgtgtttttaaatggtttctaattcggntctttggtgatcacactttcagagaccttcaaagtttcatgacatttaggagtacacgaagaaaataacg

SEQ ID NO: 107867 - DNA, 409 bp, Arabidopsis thaliana columbia
cgaacccagtcaactcactcaacgtggcagtgatcggagccggagccgggggacgcgtagctgcaagagagctcggccgcgagaatcacaccgtcgtcgttttcgaacgtgactcaaaagtcggaggtctctgggtatacacacctaacagcgaaccagacccgcttagcctcgatccaaaccgaaccatcgtccattcaagcgtctatgattctctccgaaccaatctcccacgagagtgcatgggttacagagacttccccttcgtgcctcgacctgaagatgacgaatcaagagactcgagaaggtaccctagtcacagagaagttcttgcttaccttgaagacttcgctagagaattcaaacttgtggagatggttcgatttaagaccgaagtagttcttgtcga

SEQ ID NO: 107868 - DNA, 198 bp, Arabidopsis thaliana columbia
  unsure (1)..(198): unsure at all n locations
cggaatcgccgggtgcgaccgcagcgcgtaccgcatggctgagtcttagcaagggttatccgcataccacagnnttgaagcagcttcctgctatgagtggaaggccannaagacgtgatgtggtccggtccnnnagaaggaagaaaatctgatcacgaccgcgagatcaccgcaaagtgatccgctcttgagaaaacc

SEQ ID NO: 107869 - DNA, 416 bp, Arabidopsis thaliana columbia
  unsure (1)..(416): unsure at all n locations
ctctctctttctcgtgagcttcaattctaatcggccgttcttcttcttcttgctggaatctctttactccaatgggggaggaccatgagttcggagatctatattccgacgttctccagccgtttcaacctcccgttgttctccctcctccgcctcctcttcctcaccgttcaatcgacctcaacctccgatcccaagatcaagatgtctcagaacctaattcagctccaatctctagggtttcggacaacgatgccgtaaaattatctactcaggacgcgactcgtcaagcaattgtcgatggtggcggcgacgataaggatatgagctntgatatcgaagaacccgatgccgattctacacctacgattcctggtcttttcgttactggagcgttacctggtttggctacagat

SEQ ID NO: 107870 - DNA, 412 bp, Arabidopsis thaliana columbia
ctttgtcacaagctttgaggaagacggaagaagcttatttggagaatgcaggtatgatgctcgacgaaaatgctggactagctttaatgggttcttgtgttttggtaatgttgatgaaaggtgaagatgtttatttgatgaatgttggtgatagtagagctgttcttgggcaaaaagctgagagtgattattggattgggaagattaaacaagatttggaacgtatcaatgaagaaactatgaatgattttgatggttgtggtgatggtgaaggagctagtttggttccgactttatcagcttttcagcttactgttgatcatagcactaatgtagaagaggaagttaatagaattcgaaaggagcattctgatgatgcgagcgcggtttctaatgaacgggttaaaggttc

SEQ ID NO: 107871 - DNA, 425 bp, Arabidopsis thaliana columbia
  unsure (1)..(425): unsure at all n locations
atcagaggcaaatcaatcaagattaagaagacgacaatggaagagccatttcttccgagagacgagcagttagtctcttgtaaatccacatggcaaagtggtcaggtcaccgtcgagctgaagaaagtgagccgcttggccgctcctatggccaccgtaaccatagctcagtacttattgcctgtcatctcagtcatggtcgccggccacatcggcgagttggagctcgccggtgtcgcgcttgccacgtctttcacaaacgtttccggcttcagcataatgtttgggttagttggtgcattggaaactctttgtggccaagcctatggagcagaacaatacgaaaaaatcggaacctatacatactcttgcatggcttncaacataccaaatttgttcatcatatcaattctatggattacatc

SEQ ID NO: 107872 - DNA, 377 bp, Arabidopsis thaliana columbia
ggatagggagacggctggctcgcacggcttacgaggctaagctcgggatggcgcttggaggggaagctgcacagtctcagtgtcattctcagatactggctcgtgacccatgaagggctagatgcggatgcaaatcaaggcagcagatattcagcttgaccacgagatgggagaacagcgacgtgacatgaacccggatgagatgatgaatggatggggtgacagcagtcagagagaggacaggggaccttcaggagatttcttgaatgatgaggagaatgacaatcgacagacaggggaacaagaaaaccgtcgtgaagcaagagaatttgctttgaatagccggcaaatgaccaaggtgaagactttttgcagtc

SEQ ID NO: 107873 - DNA, 421 bp, Arabidopsis thaliana columbia
ctttgacattggatccttcaaagttctgtagcagagagttaattcaacacgagcttgatcaggtggtggaggaacttgagaagattgctgttgtaaatctgcttcgacacagatcaattatctctctcatcggaaatgttcagagatcatcattcatattagagaagggcttccgagtacttcgaaccaatgggattaatgtccagatgatctcccaaggtgcatctaaggtaaacatctcactgatagtgaatgatgatgaggcggagcattgtgtgaaggctctccactcggccttctttgagacagacacttgtgaagcagtctcagaatgcccgaccggctacatcgctgcctctttgtgaaacctctaggtgcaacctgcaaggtctgaaagtactagctagtttgatgttatgat

SEQ ID NO: 107874 - DNA, 454 bp, Arabidopsis thaliana columbia
gtcgggaatccggggggacgcacgcgtccgcttttggtatcagaagacgacgtcatccccttaaaaagctcttcctgttagattcagggaaatcttctccggccaaagctatttctccgacgacgtcagagcttgacaatgtttctaaatctagctacctactaacagaaatcagtgagagtggatctgatgctgtagctgaattgagaagaagcttttcattgaggttgttatgcctgatttgaggccaggtgtttttagcaaatcgaaagagacaagtactgaatctatgaaaaagctcattgctcgagaaatgtcgaaagatgttgttgaagatagacagagttctaacaatgtagttgctaaactaatgggtctagagacttctgcaccaaggagcagatccaaaagctcttcacgttgttcgttgacttgtgttggtagtaaggaagct

SEQ ID NO: 107875 - DNA, 426 bp, Arabidopsis thaliana columbia
cttcggcgaaaaatccacgagtcagcttttactgatttgtacaaaaaatggatggggcagggcatccatcagtctttgagaagctacatggacaatcttacttgatcaatagactttctccgagtgtgcaagctcgtggttactgtgtctctggtgcttatgtcaatggaggtttgcagagtctattgcagccaactagccatggcgttggctcgtctcttatacctcatggttcatttcctgtattagctcacgctcctagtgagaaaactggtactggtttcttgatcgatttccttatgggaggagtctcagctgctgtttcgaagacggcagccgcgcctatagagcgtgtgaagctcttgattcagaatcaagatgaaatgatcaaagcttggcgtctctctgagccatataaaggaatca

SEQ ID NO: 107876 - DNA, 342 bp, Arabidopsis thaliana columbia
ctcggagccgcgaaaggactcttaggcttaatgattctctcccaaaaatgcttatcggtgcctcagcagatttcgacggcgatcacttctttaggtgttcgaaggcattagaaaggatgcgagaccctggcaaagatgaaactatggctgtggcatttcaacgcgaccgtgctatggctgtgacaaacctaaagacccaggattctcagacgtacaccttacgtgtcgatagatgcgtgtcaacaacgagccatagtggttttgatgtattctgacgtggcatgaactgtgtgcatgaactgccactagcacctcgtacgactggctaactgcgagtgcatg

SEQ ID NO: 107877 - DNA, 424 bp, Arabidopsis thaliana columbia
aaacgggtgccttcgatacaacaaatgatggcatgaaaaagaatcaggacaatcaagtttgtctgcttggaggattctcagtatctggacatggtacttcaaataatagttcatctaatgtgagcaatttcgaccagcctgtgactcagcaaagagtctttcattctgagcgaactgtacgagatccaacagaaactaaccgtttgtctaaatctgatgattcccttgcttctcaatttgtaatggctcaaacaacatcagatgctttcctgcctatcagcgaatcatctgaaacttctcatgaagcaaatatggagtcccagaatgttcatcctactgcgccagtaataccagctcctgatagcatctggacagccgagggtagtatgtcacagtctgaaaaaaaaaacgtggaaactaacac

SEQ ID NO: 107878 - DNA, 342 bp, Arabidopsis thaliana columbia
ttttcttctctctaaccaaacaagaagaggactccattttcgcaagaatggggagggtggagcaatgttggtcaagtctggtagtattggcagtgttggtgatcggaactggagccgttcccatcacttatctccaaagcgccgtcgctaaaggagccgtgtgtttggatgggagtgcaccagcttaccattttgacaaagggtttggttcgggtgttaacaattggatcgtccacatggagggaggaggatggtgtacaatgaagggttcttccaaattcatgaacaaagactgggggtgtttccgtatcttgggtggcaagcaaagcactaacccatatt

SEQ ID NO: 107879 - DNA, 513 bp, Arabidopsis thaliana columbia
  unsure (1)..(513): unsure at all n locations
cggaattncccgggtgcgagcccaacgcgtctcgctagaaacctagaatacgctttgtcaatgtttgtttatagctatatttctttgacccagtcatgtgggggtggttctagtactaactgcacgagagcacaatacctagagnncagttgttggagaagggtctttatgtnncattgtagatgctttnncagaagctgnnaggaattcaaagtgaagtaaccttcataaggctccttaaactttcacttctcttactgattcactccggtctaagctnctttgtggtttttgtagaagccagcttggggtcccctgcttgtttggaaagttctccaacacanttgacntttcgttgttaaggaaggttgacccaagcacagtgtgaagcaagaagatgatggagtagaagatgagtaccagctagaggatcttgaggttgtagctggagattacatggtgaaagtgggtgtcttcaatttcaggaatgcgtgggaaagcatggatgaagaa

SEQ ID NO: 107880 - DNA, 369 bp, Arabidopsis thaliana columbia
gcaatttctgaattttgaacgaattctctttcacttcacagtgatgggtaggagaaagcaatccaagccccagcgtgcagtgggtttgatcactccaactggttctgaatccgatagaaatcaattacccggcgacgaagctgagggttcaggggacaagaatgttgaagatatcgataagccgtattatgtgaacatatgtttaagtagtcgagtttcggagcagcagcagaactttgatttagctgaagttgttctaacgaattttagtgtaagagaacgtgtaggaagtggtagtacattcacaaaacctattgaggttgatcatgatctggattgctcgttacgggttcggctttgcaatgtgac

SEQ ID NO: 107881 - DNA, 431 bp, Arabidopsis thaliana columbia
  unsure (1)..(431): unsure at all n locations
ntcagagtttagacgagaaatgcaaaggaattcggttgcagtgcgcaatctattccggtacaaggggcatccagatcctttaaaaggagatgcacttaataaggctgtacgggaaactgctcatgaaacaatttctgctatattctcagaagagaatggtactaaaccagctgctcctgaaagcatcaacagacgcattgaaggattcgggaatactaactttcaggtgccctctaatgataataaatcgttccttagccggggnnncgtattggaagtgcatctataaagcaaggaatcagtaattttgctcaaggccatttgccaaagaagaatgagaatggcagcagcagctacagaggtccaaatctccacagatcattaactatggaaaatgagaacttcagtagatatgatccagttaagctggg

SEQ ID NO: 107882 - DNA, 424 bp, Arabidopsis thaliana columbia
ttcttcttctcagagctacgatgtttttcccaacttcagaggggaagatgtccgcggctcattagtcagccaccttcgtaaggaacttgatcgcaaattcatcaatacattcaacgacaacaggatcgaaagaagccgcaaaataaccccagagctgttattggctatagaaaactcaaggatctcacttgtcgtcttctctaaaaactatgcttcttccacgtggtgcttagatgaattggtgaagatccaagagtgctatgagaaattggatcaaatggtgattcctattttgtacaaagtagatccttctcatgtttgaaaacagaccggagagtttggcatggtctttggggagacctgcaagggcagaacagagaatgagaagcgaaaatggatgctagctctagcagaggtagcacat

SEQ ID NO: 107883 - DNA, 451 bp, Arabidopsis thaliana columbia
aattcctggccggacccacccatccgtacaccatcataaataccatcaccagagatttacatgattcatgcatacacacttctgaggctgtcactttcttcttcattgtttgcgttttgtctttttgatttatttttgttgaagatggagaactaaaagcaatgtctgcaaggtctttatattaatgctagagtcagtctcgcttattatcaagttgttttctttatcagttacttgacatttaaggaacaaaggagatcatgaacagttcaggaggttcttgttcgtctttaatggatgtggtggcttatgatcatcatcttcatcatggtcatgatgaagagcttcatgttttagctgtagatgataatcttattgaccgtaaactcgctgagaggttgcttaagatctcttgttgcaaagtgacaacagctgtagaatgcgcttagag

SEQ ID NO: 107884 - DNA, 428 bp, Arabidopsis thaliana columbia
atatacgcatgtgtgttctgtcttagaacagctcttgttacaacctttgtatctacgtgatatggtgacttctgcaatgtggttcaacttaagtatgctgtggagagctgtacggggctctatctggggatccgttcttctttttacgttcccgattcgctttttcgcctctataccaagggaaagactgcttgagcagagtatttatgatttgaggtatgacctagagagtcttgaatggaatagaaaagagatagagaagaatctccgggaagcaataaaagaatatcgaatcatggaacaggacttagatgaactagaagatgaacatgatgaagccatttccaaaatagaaaagctagaggccgagctacaagaactaaaggaggaaaatcttcaactgatggaagttaatggaaaagactata

SEQ ID NO: 107885 - DNA, 395 bp, Arabidopsis thaliana columbia
tcttggggcgcatcatgagaatccaaagactatttctgctggaagtgttcgtgaagataaaaaggctaaacttggtgataatgaggcttcaggatacccaaggaaagttggcaaatacaaaggcagcaaagcttctgattcagtcaaaaaggaatcgagtgcatcaaaggcgaaaagtggtcataaagtggagctagaacatcctcttagaaagcagaagtatgaccagatagaacaggagccaccgtcttcatcaaagttcaaggaacagcaaacctctgttgtttttgagactaagctgaatggtcaagctgagaagaaagaagtggtagccgtgaaaccacaaagtgatagcaaaaaagccgaggacacttacaaagacttttttggagaca

SEQ ID NO: 107886 - DNA, 410 bp, Arabidopsis thaliana columbia
gccgctcaggtttcgtgaaaagaatctatcttgagcaatgtctccagctaaagttgatgtggccaagaaagccgaccctagggctaaggctttgaaagctgcgaaagcagtgaaatctggccaaatcgttaaaaagcctgcgaagaagatcaggacacaggttactttccacaggccaaagacattgaccgttcctagaaagcctaagtacccaaagatcagtgctactccaaggaacaaattggatcattaccagatcctcaagtaccctctcactactgaatctgccatgaaaaagattgaagacaacaacaccttagtcttcattgttgacatccgtgctgacaagaaaaagatcaaagatgctgtcaagaagatgtatgacattcagaccaagaaagtcaacaccc

SEQ ID NO: 107887 - DNA, 182 bp, Arabidopsis thaliana columbia
aaccctaggtactttcttttcgagcggtcctcgatatttccgcggggaattcacgaccaagagcaatccgcttttcagattagggggtatatctctgggttgcgatgagatctgcctcgtgaagtcatgtatggcggcgattgatctttgcttcagcttatgatttcgctttttcgtcaaaa

SEQ ID NO: 107888 - DNA, 458 bp, Arabidopsis thaliana columbia
aacgccattcccgacccagacccacgcgtccaagcgagggcgacgaaggagtcagaagagtattctcaagtgatcatcgttgatgagattggcacagaagctgaagcacttgcttgtcgttccattgctgaaagaggagtgatgctaattggcactgctcatggagagcagctacagaacatcataaagaatcctactctttcagacttgattggtggtattgagactgtaacgcttggagatgaagaagcgagggcgagaaggagtcagaagagtattctcgagagaaaagctccaccgactttttattttttgatcgagatgagagaaagagattattggattgcacatcaaactgaaaagagtgttgatatgttgcttcgcggaagaaatcccatggttgaggtgaggagaagggatgaagagtacaaggtggtgatagaaagaaggaaggcata

SEQ ID NO: 107889 - DNA, 404 bp, Arabidopsis thaliana columbia
ctcttgagagtgttcttgtataataaaagctttctcttgtaaaaatacttatcccgcggggatctcttccataaacactgcatccctttcatatactagtttatatatctcgatcttataaaacctccttcatgattgtacctactatgtgtttgtaattttggtatcagagctatggcagtctaaactttggctcttaacttctcaagtcgtgatacatcttataactgttttctaccatatgctattatggaaagtatgctctatggttgccatattaatggatcctctacatcagaaatccgttttagcaagaaaaagagaacataaaaaaagaaatcaatgaggtcttagagctcgaagtaccttgagacttttaaggttgataagtgttttgccttagt

SEQ ID NO: 107890 - DNA, 181 bp, Arabidopsis thaliana columbia
gacaaaatggctcgagactcttatcttctttatgcatgctcaacactattgcacctggaagatgtattctctgcattacagggaagcaacatgaaagacaattcaagctggtcttggtcttgctcttggacttcgcggaaaatatgataggtgtctgttctctttctcaccgagacgatca

SEQ ID NO: 107891 - DNA, 231 bp, Arabidopsis thaliana columbia
ttcaaaaccaaaaaaaataagaaaagaatgtgtttcacaaaaatcttagtgaccttctttggtgtaggtttattggttattgggtcgtccccacaaaacgctatagcatcagagatcaaagcaaagatcaatggcctagaatgctttaatacatgtacatcttattatgatgatcataaatgcaatgtggactgcctatcatcggggtacccggcaggagaatgttatact

SEQ ID NO: 107892 - DNA, 361 bp, Arabidopsis thaliana columbia
gaaaaagagtcgatatcaactgaagaaacttaggagaatgaagacttgggatctggaagagacgacacaggtcatcatgtatacaacgagggacacgaagaggtactagagtatctgaaacaagagagactgaaagatgctgatatgcagaggaaaaggcatgaaacagagtcgaaatccattgagggcacaactcctgatattaggctgagtgattcagggaaagggtctgatgaaatacagaaagcagactcagtttacaaacgctctaacgctgacacgcgagtgagtctgccacaacagagacgactgaaagatgtggtggaggcgcatagggtacgccgtgaaacagagtcaagat

SEQ ID NO: 107893 - DNA, 337 bp, Arabidopsis thaliana columbia
gtgaggactattctttccataagtacaccatacgcagccctagttggtgccttgaatgaccgcctattgcttgctcatcccactgatataagtccgaagcagaaaaaggggatcgaaatcaagagctgccttgttgggctacttgaaccgcttttaattggattttctacaatgcaacaaacatttgaacagaaagtagacctttctgaaatattgtatcaaataacaacaaggtttgatagcttgcgaattactccaagatctcttgatattcttgctagaagcgctccagtatgtggagatcttgctgtatcactagctcaagcaggccctcaat

SEQ ID NO: 107894 - DNA, 308 bp, Arabidopsis thaliana columbia
  unsure (1)..(308): unsure at all n locations
tccactttttcgacgaacctgaaaaatctttaattttagaattagtcaataccggaaaatgcctgggttgtctcttgcttctggattttgtcaggtctctatcacaaaggaggaacaagagttttgcaccaagaagagagaggaaggattctggtttacgggagctagtgaaaatcttctgtgaanatggctttcctctctcattctctgtgaaatttgaaagtattgatttcgaagatatgggtgctttctgttgttgctttcaaagtgatctctttgagaggtatgtgaatccaaacactttcata

SEQ ID NO: 107895 - DNA, 130 bp, Arabidopsis thaliana columbia
  unsure (1)..(130): unsure at all n locations
gttaaaaccctcaatttgtccgacggtgttacgcgacggctatattcggcggcggaagcgtgtttccatctcactctctntcgactaatctttccgccgtctgaagaatgtcttcttcgaagcggaagcg

SEQ ID NO: 107896 - DNA, 311 bp, Arabidopsis thaliana columbia
gctggatctttacctacgagtcagagtcctgcaacggcaccgttttggagtagtggtgacaacacacagaatctttgggctgttaatattaatcctcatcattccggtgttgtcgccggagatgtttacaaccccaacagtggtggtagtggcggcggtagtggagttcatttgatgaattttgcagctcctattgctttgttttctggacagcctttggcttctggttatggaggaggaggaggtggcggtggataacatagccattatggagttttagcggcgttgaatgctgcttaccgaccggtggc

SEQ ID NO: 107897 - DNA, 296 bp, Arabidopsis thaliana columbia
ccgggaggacccacgcggtccggttcttcctattttaaccaacctggggtttttgggtggtctcctccggctaacattaacggccaaccgggtggttggaaaagttgccaaggtaaacctcaatccttactacgaatcactttgtcccggttgtcaggaattcatcgccgatgccctaggtaaaatctttgactacgatctctacacaatcactgatctcaagctgtttccatttggtaatgccgaactctccgataatctgactgtcacttgccagcatggtgaagaggaatgca

SEQ ID NO: 107898 - DNA, 319 bp, Arabidopsis thaliana columbia
  unsure (1)..(319): unsure at all n locations
gtaaaggatcgtctgttggccttaggcaactttaaatccaagatgctgccacctccgttggggtctgcatttgccagcccagcacggnccgacccangaggtggaggagaaacttgtgcagaaactggaatcaatattttcttcacaaagattaataaattggctgctgtaagaatcaatggaatggtggaaagactacaactttcacagcaaataagggagagtgtgtattgtttcttccaacatgtacttgctcagcggacttctcttttattcagtcgacacattgaccagatcattctctgttgcttctacggag

SEQ ID NO: 107899 - DNA, 348 bp, Arabidopsis thaliana columbia
gttggatgtgtatttttttggccacaaaaaattgttctttgcttggggaaaaaaatattagataactggcttttttgtaaggggttttccccttttaattacttttaagatatagaagattactcatttaaaaaaaaaaaactgagattgattaagagaaaaatcttagtaacattaatcttgttgatataaagccacgccagtggtaatcccctagtcagagaaagaggaccaaactttgagaaacgacaatggcgatgtccgatcttccaaatgatttggtggaggagatcatctctagggttccggtaaaatctataggagcagtaagctctacttgcaaaaact

SEQ ID NO: 107900 - DNA, 364 bp, Arabidopsis thaliana columbia
accaacgcgtccgtggtgggggaggaaggttggggaaaaaaattgggaggcattggtgtgatgatggtggcgatgctttgcctttgggcactctttgcaacatctgaagcagtaccagaggctgagccaggtttgatgatgaacttctacaaggacacgtgtcctcaggccgaagacatcgtccgtgaacaagtcaaactcctctacaaacgccacaagaacaccgctttctcttggctccgtaacatcttccatgacttgcgccgtgagtcatgtgatgcgtcgcttttgctggattcgacaagaagagagctaggagagaaagaacacgacaggagcttcggacttagaaactttaggtaca

SEQ ID NO: 107901 - DNA, 423 bp, Arabidopsis thaliana columbia
tcatctttgtgttgatttatctgtttcttgaagggtaagtccatcgaagacaccagtaaggccgcattttccccgcgctgagttcaagtgaaactctagccggagatcttaaaattatatagcaaacgagagagagagagagaaagcagaagaagaagtctaaagaagaagacgaggttgatcgatcttgatggggaaaaccgacggaagctcatggttcacggccgttaagaatgttttccgatcgccggagaagttaatccctagaagaataaatcgtcgacaagacaacgacctcgtcgaagaagtagaggacgaactacaccaacgaccgaagagaagaaaaagaagatggctatttaagaaagttttttctgatccttgtgcaataaacgtaggaataacaccacttccacggttttt

SEQ ID NO: 107902 - DNA, 366 bp, Arabidopsis thaliana columbia
  unsure (1)..(366): unsure at all n locations
gtttttgagccataaacataaattaaatttgacgcatgcaaagaaagcaaaatggaaaatggaagcgggaaggtgttgaagccgatggactcaaagcaattgaaagagtacggacatttgatggttgatttcattgctgattactacaaaaccatcgaggatttccctgttcttaccaagntcagcctggtattttcataagcttttgctgatttgacctgacacctgaactctgacaagtctgtgtgtcagcaagatatgctgagaccattgaagcgagttttgtatatcttacgatgtgtggtctggaagtaggtgctgatgtgttagtgtcttcgtgcacaatgatgcgttgtgtgtaattac

SEQ ID NO: 107903 - DNA, 363 bp, Arabidopsis thaliana columbia
ataaactcatttgtcccatgtcttcttctttttcaatggactaactcatgtgtctgcttggtctaatctctccggttgttcgggccaagtcttcttccaccgtccctgctatctttaccttcggtgactctatttttgacgccggaaacaaccattacaacaaaaactgtaccgctcaggctgattttcctccttatggttcttcctttttccaccgtcctactgggaggttcaccaacggaagaaccgtcgctgacttcatctcggaatttgtaggcctttcattacagaaaccattcttggaattgcagattcaaatcttgaatggaacttcaaacttttcaaatggcattaactttgcta

SEQ ID NO: 107904 - DNA, 377 bp, Arabidopsis thaliana columbia
gagggattcgacccctcggtccgattaacttttccaatggattaccaatccaacgctttagtccactcagccatctttcctaatcgaaaggggatatttaattaggttccataaaaaaaaaaaaaggcttgaaaaagaaccttctccactttattcttaaaaagctttctttttttgttatagatattctttatctttatattatatatatatatattttttttcattttctatatttttttctatattttattatattattatatatatatatattctttttgattatttgattatataaatatatatatcctatatttaaatatataatatatatataatatatatcctatatataaattatataaatcctctat

SEQ ID NO: 107905 - DNA, 261 bp, Arabidopsis thaliana columbia
cagactcataattgaaggaataaagagaggaggctcagggagaaagcctaaagcccgatccttttcagttctttgactctagcatcaaaatgttggcggactgaatctaagctgggtgctcaacaatcggcgcgcttatatgaccataacgccgtagggttacagatgtactcaagtcaatctcgtcctaggaactataagatgctgtggggtccgagattcagcttccaagtggcacacctttgaggaatgcaatcaaat

SEQ ID NO: 107906 - DNA, 415 bp, Arabidopsis thaliana columbia
gactcggaaaaaaatcagtcgccggcgttcgaaaacgacaactcgccgaacgtctttctctcttcttcaagcaaacactttcacatctctctctctctctcatatttatgatgatcgtctgctactagagatcactataaccagatcatcttctttattcgtcggttaacgtctcaatctctctctgttcggaagttttgaatagagatcgttaaaaatggtggatcctggaccaattactccgggccaggtatcttttcttcttggagtaatcccaatatttgttggttggatatactcggagttacttgagtacagaaaatcttgggttcccttgaaacctgttgcattcttgttatgcagtcactcggataataatctagttgaattgggagacgtagcagagaaggacgac

SEQ ID NO: 107907 - DNA, 298 bp, Arabidopsis thaliana columbia
agaaaaactacggaagaagttgcacaataccattcttgaactgaaaggtaacatacgtgtgttctgtagagttagacctctattgccgggtgagaacaatggagatgacggaaaaactatttcttacccgacatccctagaagcacttggccgtggtattggcttggttccaaatgggccaaaagcttgttttaaaattggttagggttttggggccacctgattaacaggaggatgtttcaattgaaattcttaaattggttaaaggggttttggttggtaccagggggtcgatttt

SEQ ID NO: 107908 - DNA, 390 bp, Arabidopsis thaliana columbia
gcctgattgttttcttggtcaatcactgtttttctcttgaggaaatcaaatgatatgagacgactgttgatgaaccgaaacctaagccccttgtgcagatccgtgctcagattcatcgatttatcagtctgtagagccatggcttgttttctcgactgcttccgcgccagagacaatcgctctactagtaatctcgtctctcattcttcactcgccaattccagaaaagcacaggactcgcagaatgatttgtcagctttgtttctttctgaagagaaatcagcttcttcgccttgccttgacaaaaaaagatttgatttagattctatacatattgacaaaggccttaaggatgaggcgcggtttcttaaagcttgtggtactataccg

SEQ ID NO: 107909 - DNA, 413 bp, Arabidopsis thaliana columbia
caaaatctgccaacagtttttgtctcattcccgatcagatctcaacgacgacgagccatggcttcaactttcagcggcgatgaaactgctcctttcttcggattccttggcgctgccgccgctctcgttttctcctgtatgggagcagcgtacgggacagcgaagagcggggttggtgtagcgtcgatgggtgtgatgagaccagagcttgtgatgaaatcgattgttcctgttgttatggctggagttttaggtatttatggtttgatcattgctgttatcatcagtaccggaatcaaccctaaggccaagtcttactatctattcgatggctatgctcatctctcttccggtcttgcttgtggtctcgctggtctctccgccggtatggctattggaattgtcggcgatgc

SEQ ID NO: 107910 - DNA, 230 bp, Arabidopsis thaliana columbia
gtctgaatggtttgatctacaattactttttttttttggaggtaatcaaatgatatgagggggctgtagatgaaccgaggcgtacacccttagtgcatcatccgaccatcattactatcagtttatcagactgtatactcctggcttgtattctagactcatttcacgcctgagacaagggctttactagacattttgtcgatcattctttacttttcaattcctgaaaa

SEQ ID NO: 107911 - DNA, 421 bp, Arabidopsis thaliana columbia
aatctctcaacataaaatcccacaacatttcacaacccgaaaaaagacagagacaatggcacagcccatgcgcttcatgctcaatcatatagaaacagaatcctacggcgctttcacccctcaaaaccttagtccgctgatcaatcgtgcgattccacacactcgagctcaaatctccggatcacctgtcgtagccgtcggccgaggatcatcaggtcggaccttctttggcgtcaatgtggaattaccaggtctgcctcttgaccactccatccacgccgaacagttccttctcgccaacctcgccctccacttcgagcaaaaactcgaatgcatagccatctgcactaacggctactacttccaggagccatgcggccactgctgccaattacttcataaaatcagagatatgtctgat

SEQ ID NO: 107912 - DNA, 410 bp, Arabidopsis thaliana columbia
ctccatttcagcgaatctcttcttcagatttttctcttccactaatcttttgcctgtttaatcggagcttagatatcatcagaaggtttttgttctatcaattctccttcattcgatccatttttacccctttctttggaatctccgattcgaccaagcttcttcgccgtctcatcggagacaaacacatattcacgcttaatcaactaaattaagcttagattgatatatagatatataggttaaaactcaactacgactactcggagatgttgggtgctggatttcagttgacgagaggcagacaccgcgacgatcctttctacacttccgcaaaaactcgcagggcccatcagcgcatcgatcagcttcgtagagcttagagcgacgtctctaacgttccattatta

SEQ ID NO: 107913 - DNA, 427 bp, Arabidopsis thaliana columbia
tggcagatgattctgactattcaagaaattccggcgataagtctagtaaacaaaaagtagttccaaggtcagaacaagtgagtgatgaagaagatgactccatatgggaatcattgcctgcatcattgtcagtgttgctcataccgtccctaaaagaagctcttggtgacgattctaaagaatctactgtgcgtacagtgtcgagatcccttgtgatgatggaacgtgaaaagcctggttcttgtgaagcttttgttgccaagctgattgaacttttgggaagttcaaaagaagcttcggtgaaagaattgcacgatatggcggtctgtgtttttgccaagaccacacccgacaatgcagagaacaaaatgaaacaagctaacaaggagtttagttccaacacaaatgttagcccactcggcagatt

SEQ ID NO: 107914 - DNA, 315 bp, Arabidopsis thaliana columbia
gctgtttcatgatcgattaactttaaattttcagctgattccaattaactgaaatctttcaggaaccctaaattcttttttttcctttcaaatgtgatccgtcagctcgatcttgggctgaagctattgctcaaagtaattgggaagctgacaagatgcttgatgtttacatatatgattatttggtgaagaagaaacttcataatactgctaagtcgtttatgactgaagggaaagtttcttctgatccagttgcaattgatgcacctggagggtttctttttgagtgggggtctgtgttttgggacattttca

SEQ ID NO: 107915 - DNA, 327 bp, Arabidopsis thaliana columbia
aaaaaaaaaaattgatttttttttctaaaaaaaaaaaaaactcttaaacacattgggtttggtttgtctaacttggaacagagatattgccggactgtcttcaggttgggtctagagaagaacactttgggcattatgatggagtttgagatttaagctattctatattatcagcttgaagttatgaactggatctgtctgcacttttacatttgagattaagatggtgtcttgaagttcagtgtttactattgaggtagaagaatattttttacaagttcacttgttaaaatgttgagcttaaagatggcttgatctcagatcata

SEQ ID NO: 107916 - DNA, 368 bp, Arabidopsis thaliana columbia
cttcttttttcactcatcaaaaaaaatctcattcctagaatgcgtatcgctttcttagacctgaatgagcaatcaaactactcttaaatctatggctcttgattcttgcggaaaacaacctgtgcagctgcaacaacaacaaccacgagcctcctctggaaacggcgaggcaagattgaagcttctgagaacccctaatgaagaacatgagcctgtgaactatgaagatctacctctggactatagtacttctctgctcacctatgttgagcgttacttacctgagcagctagtcaatttcacacgaatcgataaagctaggttcatgagagaccatcttctacgatattaccctgatactgagcgag

SEQ ID NO: 107917 - DNA, 381 bp, Arabidopsis thaliana columbia
gagagagcatagagcgagacgtgtagcttagattagtttgatgaagatgaggaacgctgcggttgaggcattgccggagaatttgaagaaggcggctttagtgcgtgatttgactccgtttccggtgagtcgaggtacggctacgcttactccacctattgaagggtatttggagaggattatgaatgctgcggctaggaagagctctggtaaagagaagttgagatgatcttgttaaggttagaggaatttgtctttgcgtcattggttttctcttgttttattagttgtgttgattggatttcgatcaatggatataactttgagacatttgtctttatttttgtgatctacttgaaataaaatggtcactggcagttg

SEQ ID NO: 107918 - DNA, 416 bp, Arabidopsis thaliana columbia
ggacgggttcggtttatggggtctggttcttctcctttgtcacctgatgtcatggatttcttgagaatatgctttggatgttcggtgcgtgaagggtatggtatgaccgagacttcttgtgtcataagtgctatggatgatggtgacaatttatctggccatgtcggttcccctaatccagcttgcgaggtaaaacttgtggatgttcccgaaatgaattacacatcagacgatcaaccatacccacgtggtgaaatctgtgtaagaggaccaatcatcttcaaaggctactacaaagatgaagaacaaacgagagaaattcttgatggagatggctggctacacacaggagatatcgggttgtggttacctggtggtcggctcaagatcatagacaggaagaagacatatttaag

SEQ ID NO: 107919 - DNA, 319 bp, Arabidopsis thaliana columbia
ctccaatggacctaaaatgaacattctttgatctccgacgtcatcatcatcttcgtcgtttcctccatacccaaagcccgtttcattaacccctccggtatctttcactctcatccacaaccccataaacctctgctctataaacccaccattcaccaacgctggtcgaccaattttccaacggtccgcctccggcactgctaatagctccgccgaagacctctcgtctttcttgggctctccctcagaggcgtattcaacacacaacgaccaagagcttttgtttctcctgcgcaatagaaaaaccgatgaagcttgg

SEQ ID NO: 107920 - DNA, 266 bp, Arabidopsis thaliana columbia
acatacaacaacatccacacacttttgtgttgtcaattcttcatatcgacagaggagttatgtaaaaacccaggtgagacaacacatttccaaaattcacacaaaaaaaaaagacttaagttaaaaaacaaaatgtaacccaaatacatatgacattctcatcagtgaacgcattattcgtatttttcagagtgagctagcattattaccaaagctcaatatgcgtcattagcaccataactcatagattgacctgctatatctaa

SEQ ID NO: 107921 - DNA, 401 bp, Arabidopsis thaliana columbia
  unsure (1)..(401): unsure at all n locations
gttgttccgttcactgcgatgatcgctatattgtgtacaacggttggatccagcatactgtataaagctgctaccttgagaggatttagcttttatgtctttgtgttttacgcttatgttggtgctacacttgtccttcttctactttcacttatctttggaaggtcgagaagtttgcctacagccaagtcttctcttttcttcaagattttcttacttgcgcttctcgggctcacgtcgcgggtagctggttgtaaaggtatagaatatagttccccaactctttcctctgctatcagcaatcttacaccagctttcaccttcatccttgccatcttcttcaggatggaacaagtaatgttaagaagctctgcaactcangctaaaatcattggcacaat

SEQ ID NO: 107922 - DNA, 404 bp, Arabidopsis thaliana columbia
gacaaacttcagaaaagcttatggattctatggaatctttgcccgaagctgccgcacagatcgatctttgggatgatcttgcggcttcccttgtcaaaatctcgaaatcacatgcctttgtgccggaggagcagctattgaaatttgtcgattaccttgagataaaactttcctctgtgcaatatctatggctggacatgttcaaagggtctccttgccccaagctgatagatatgattgatgttccattatctcatattcctgtatctgtctacgacacatcagtcgagtggctcgacaaattttctattgggttactctgtgcctttgtagtgtggtcgttgaatcgtcttctcacgattttggaaccaccacaacagggaggtcaccagcgacgtactact

SEQ ID NO: 107923 - DNA, 421 bp, Arabidopsis thaliana columbia
  unsure (1)..(421): unsure at all n locations
cctaaatcccgcatcagtacttctctttgctctcaagataattttgttctctcaatgtcattcttaaaccctagttcttcgattttttccgatctacgacaatggcggacgctgaaacctttgctttccaagctgagatcaaccagttgctttccctcatcatcaataccttttactctaacaaggagatcttcctccgtgaactcatcagtaactcttctgatgctttggacaagaaaaagaagaagattaaggaggtttctcatgagtgggatttggtgaacaagcagaagcctatctggatgaggaagccagaggagatcaacaaggaggagtacgctgctttctacaagagtctcagcaatgattgggaggagcatttggctgtgaagcatttctctngtgaggacagcttgagttc

SEQ ID NO: 107924 - DNA, 415 bp, Arabidopsis thaliana columbia
ccaccctgccaaagactcctgctaaggactttttttcataaaccacacaagataacagaaattcttttcttgaaattgttctctttcttgctttgattttttcaattttcttatactgagtttttgtatttctgtaaaatttgcttataggagactttctgggtatcttggcttcaatttgcagaaaaccaaaaaaaaaaaaaaactttttttctgggtttttttccttagcagagaaaaggttcttaatagttttaagactctggttttgtatattccaattatagctgaatattaaacacaatttataaaacttaaatttctttccaaaaaatctcttctttttaagtctataaaaattgcaactttcttctgaaattattcatttttgaaaaacacaaaagaaacaaagaga

SEQ ID NO: 107925 - DNA, 244 bp, Arabidopsis thaliana columbia
  unsure (1)..(244): unsure at all n locations
ggncgcagagactccgggcggaacgaactgttttccttccggatccacatctnctggatctgcattgataattaccgcacagagttattgggaggatcaatggagagttctacacaaagccgcccgggaagagaaaaagagtccttctccaatacagaagaaaaagccttggttcgggggaaaagaccctcagagcgagctggccactcatgcgccagcacccatggaaaggagcagaatatcg

SEQ ID NO: 107926 - DNA, 439 bp, Arabidopsis thaliana columbia
aggtaccgaaccgcaagttcgacccacgacctcacgcgtagatatgtgcttttggagtgtgcattacgaagacgttttaagcgcttaagcgttgcagcaaaacgccggcatggttgcgggatcttaccggagatatgagtttgttcggaacagagacgattccgatgatgggctaaaacccttgaaagatctgaatggtcagatatgtcagatctgtggtgacgatgttggactcacaaaaactggcaatgtctttgtcgcttgtaatgaatgtggttttcctttgtgtcagtcttgttatgagtatgagaggaaagatggatctcaagtgttgcccgcaatgcaaggctagattcagacggcacaatgggagtcctcgagttgaagtagatgaaaaagaggatgatgtcaatgatatcgagaatgagtttgattatac

SEQ ID NO: 107927 - DNA, 400 bp, Arabidopsis thaliana columbia
caaggcttagctcaggaccccactactcgtcgtatttggtttggtattgctaccgcacatgacttcgagagtcatgatgatattactgaagaacgtctttatcagaatatttttgcttctcatttcgggcaattagcaataatttttctgtggacttccggaaatttgtttcatgtagcttggcaaggaaattttgagacatgggtacaagaccctttacatgtaagaccgattgctcatgctatttgggatcctcattttggtcaaccggctgtggaagcgtttactcgaggaggtgctcttggcccggtgaatatagcttattctggtgtttatcagtggtggtatacaatcggtttacgtactaatgaagatctttatactggagctctttttctat

SEQ ID NO: 107928 - DNA, 357 bp, Arabidopsis thaliana columbia
ttctatcttacacgtatgtatatatatccacacatttcatatatgtatcctgtcttacacgtatgtatatatataagaatatatatatatgaaatgtgtggatatgtattagtctcgaagtaacgaaagatttttttcttaaaaaaaaaaaaaaaaaaaaaaaaaaaaaaaaaaaaaaaaaaaaataaataaaaaaaaaaaaaaaaaggggggggccgtttaaggggaccaaagttaccgtccgcggcattgcaaggtaaaagtttttttttggggccactaaattcaattcaatgggccggggtttaaaaacgtggggatgggaaaaaccttgcggtacccaaattaaaaggcttt

SEQ ID NO: 107929 - DNA, 398 bp, Arabidopsis thaliana columbia
ctaaaaaatgctcaatcttttcttctttcaaaattatacataatgcttcttttaagagtactcattatcatactggcgaaatttcgaataacataatgctgaaaatgttagttcagtcggctcggggccagatttataccatacttcagtcgaaatcaaggaaactatgggagatgaatgttaagcttttaggagagagcaaagttgagaaactcaagaactcttttgtttcgaggcctcgtatgagcttatggatgattcgtgctgttactgtattggtgctttggagctgttttgttcatttgatggctttgggagagatgtggggaccaagattgtttaaaggttggccttcttgttttaatcaccatcaactgtccactggcgcagagatgacg

SEQ ID NO: 107930 - DNA, 415 bp, Arabidopsis thaliana columbia
gtgggaaagggggatcaggatcaagcccatggtccatctgatacacatcctgaaaaacgaagtcccaccgagaaaccctctctgaagaagaggggaagaaaatccaatgcaagctcctctttaaaagatctatctggaaaaacacaaaagaagacttcagagaagaaattgaaactagattcccatatgatctcaagcaaagctacacaaccgcatggaaatggtattctaactgctgggttgaatcaagggggtgataaacaagattcaagaaacaataggaaatccactgtgggtaaagacgatcataccatgcaagttatagagaaatgctcaacgataaacaagtcttcatctggaggcagtgcacatttgcgacgatgtaatggatctttaacgaagaaattcacatgtg

SEQ ID NO: 107931 - DNA, 400 bp, Arabidopsis thaliana columbia
ggatcattattttcttcttactgaaagtcctcttactcctcctgaaagtcgagaatatactggagaaattttgtttgagacttttaatgttcctgggctttacattgctgttaattcagttcttgcacttgctgctggctacacaacatcaaagtgtgagatgacaggggttgtagtagatgttggagatggggcaactcatgttgtacctgttgcagaaggttatgtcatcgggagctgtatcaaatcgattccaattgctggcaaagatgtcaccctctttatccagcaactcatgcgggaaagaggtgagaatataccaccagaagattcattcgatgtagcccgtaaagtgaaggaaatgtactgctacacttgttctgacatcgtaaaggagttt

SEQ ID NO: 107932 - DNA, 406 bp, Arabidopsis thaliana columbia
aaaagcaccaatttcaatcctatttttttcttttgttttccggcaagatttggtaaaattttgtgttctgatttgttgttttgaatatcaactatggaacaacggaagaaaggttgtaagatcaggaagagaggtggttcttcctcttcttcttcttcacttgctcgtcgaaaccgcttcaaacgtgcaattttcgccgggaaaagagccgctcaagacgacggtggctcaggaactcctgttaagtccatcaccgccgctaaaactccagttctgttatcgttttcgccggaaaatcttcctatagatcatcatcaattgcagaaaagctgcgtgtcggcgagaaagctagctgcgacgctgtgggaaatcaacgacgacgcagaccctccggtaaattctgata

SEQ ID NO: 107933 - DNA, 409 bp, Arabidopsis thaliana columbia
cttgatgcgactgctcaaacagagtcaccggcgattacgatggccggaaacaactcggaatcgagtctctaccaggttttggtggagtggtgtcagaggatggagacgagtcaagcgagactaagggaggatgttgatgacttattgcttcaggaggagagtcgaaccggtaaggaatcggcgacgggattggagacggacacggagaaagaggctgaggtagaggtggaagcggaggcggcggattcctgggataatccgacggcgacttgggagagagctgtttcaggattctatttcgctgatagtgcgtatcggactttgatggattcaatgggacacgcgattcatgtaacatcagctgcgtctggagaaattacattctggagtcgttctgctgagaatctgt

SEQ ID NO: 107934 - DNA, 386 bp, Arabidopsis thaliana columbia
cattcctccttttattagcttcttctcttcccctacacaaaaacgaccatctacattattgtcatcatttcatattcaaaaagatttctaagtgttgagctaaaattctccttaataaagagaatgtcgtcgaagaaatatcgatattcttcatcttcttctttttcttcttcatcttcttctcagctaagtactccaagagcattgcaaaatgggtattctcaagccattgctaaatctcctctttgggatgttgaagaggtgaaatgcagctttaggtccttagtgtctaagtggaacgaagaacttattggagagatcgcggaacttgacaccgagatcttacaggtagagcgggatcttctctcgctatacagatcatcttt

SEQ ID NO: 107935 - DNA, 411 bp, Arabidopsis thaliana columbia
ggatggagttaagtaaagtgcgggagatatgcaaatgtatactgactggtctagagtatttgcaccgtgaactcggtatgattcactccgacttaaaacccgaaaacattcttctttgttccaccattgaccctgccaaggatcctatcagatccggactaacaccgatactagaaaagcccgaggggaaccaaaacggtacatcaacaatgaatctgattgagaagaagttgaagaggagagcaaaaaaagcggctgctaaaatatcaggaagaagagtttcgatagtaggtttaagtgaaacaccgaaaaagaacaagagaaacttggatgggattgatatgagatgcaaagttgtcgacttcgggaacgggtgttgggctgataacaaatttgcagaagaaatacaaa

SEQ ID NO: 107936 - DNA, 408 bp, Arabidopsis thaliana columbia
gttgatttagcccattcgtagacttcctccgcgccgccgttagacgccgcctcggaagtatcagcaaccgccgtggtgttcgtcgccttcaaagagatctgaatttgagatgtttaaaaaaatgagtgctactacaagcaagacggatcagaaagcggcattagacattgcatcatggctattcaatgtggttacttccgttggaatcatcctcgttaacaaagctttaatggctacttatggctttagtttcgctactacattaaccggtttgcatttcggaacaacgacattgttgacaactttcttgacatggcttggttatatccaaccttctcagcttccttggcctgatcttttgaaattcgttttgttcgctaacttctctatcgttgggatgaacgtcag

SEQ ID NO: 107937 - DNA, 414 bp, Arabidopsis thaliana columbia
cggacgcgtgggcgagaaagtggtagtaaaagtacaaagacccggactaaagaaacttttcgatattgatctacgaaatctgaagctgattgccgagtatttccagaaaagtgaatcatttggtacaaacgattgggttggtatctatgaagaatgtgccttaattttgtatcaagagattgactacataaacgaagctaagaacgctgacagattccggagagacttccggaatataaactgggtccgcgtacctttggtttattgggattactctgccatgaaggtcttgactttggagtatgtaccaggtgttaagatcaacaacttggacgccttagctgcacggggttttaaccgttctagaatcgcatcacgggccattgaagcttatcttatacagatactcaaaac

SEQ ID NO: 107938 - DNA, 440 bp, Arabidopsis thaliana columbia
cacgccgtcccggtatcgatctcatatactgcgccatgagcttcgtctatcgtcaatcgtccgtcgtggtttaacacatctggttcttcgccggccaaaatttcagctcttcgccgtagtaaggcagttctctctcgaccatttgtcctcagatctcacgtccgatcaaagtcatcgcgagaagcgccatggagacgacggcggagacaattaccggcggtgttcccaacaacacgatgaagttattgttcgttgagatgggtgtcggttacgatcagcacgggcaagatgtgacatctgcggcgatgaaggcttgtaagaatgcaatttcttcgaattcgattcctgcttttaggaggggttcgattcctggagtttcatttggagaaatgaagttgcagattaagcttggagtgcctcattctcttcaccagcagctg

SEQ ID NO: 107939 - DNA, 385 bp, Arabidopsis thaliana columbia
gataattctggaagaggaagcaatggtgttgtctcggcgatttgctcaagtgtcgagtgacgaagaagacgatgtaccgattactaggtctaagggaagaaactcggcgagtcctgaggaatctttggggaaacggaggaagcgtaagacggtgaagctatacgaagattttgaagagaaggaagcggataggaagaagaagagaaaggggaataaggaggatgaggatatggcggagggagatgatgatcaggcggaggaagaaacaaattcggaggctgaagaagaggaagacgaagtagatgaagagaagcctgatgatgcgtgtcctggtggtgtatcggttaatgttacgggtaaaggaaaaggggaatgaacttatttt

SEQ ID NO: 107940 - DNA, 405 bp, Arabidopsis thaliana columbia
ctctctttcttcttctttttctctcgtttcaaattccaagtctgtgtctgggttctgctccccccgataagtcgccggaaaaattatcttcctttggttttcgaacaccttccggaaccttgcgctttttttggccctattctccaccacctggcgggatttgaattttttttggcaaattcccacccttatacggggctaatacacccttggttggtttttttcttggtaggctttggttcaattccctcctaaaattaggggtatttggtttccaattaacaaacaaacccagggcctttctttcggtctttattctcttcggcttggtaaagagttttagcagtgagatacatacaaatggagactttcatggggaaacccagcttcttacggaatataatg

SEQ ID NO: 107941 - DNA, 405 bp, Arabidopsis thaliana columbia
ctcttgttctgtttttctgtctctctgcttcagtgttcttcgcggcctttaccacgttttcagttctttgacgagggtctttcattggtcctgaactcaggtttttgtatctatcttttgtttcttcgttgaaaactagaacttctttttgctgtgtttcaatggttgtagattggatctggagaatagacaatttagtggttgtggttaatgtcatttcttttagtaaagtttgaacctttttcgattttcatagcattgggtttgttttcactcaagtatttatggtttgctctctaattgaatacacttttcaattgggtacttgattttgttgattttgcttgtgttttgagtcgttgagtacaaagaaccaatccaataatcattagcttgtattcacat

SEQ ID NO: 107942 - DNA, 431 bp, Arabidopsis thaliana columbia
ggtacggaatcgcaatgtgcggcctagacccacgcgtccggttgaatagccatgaggtttttgcagatctgaggttttttctcgagaagtgagagagatctggaatttggcgacgatgagttactgatgggcgatataccaacgcacggtggtgatagcttcactaagtctcttacgatgggcaggtttatggtttcttaatcggagattatacaaagagtatgaagagaaacgcgctttggttcaaatcattttcagtgtcgacttccgctttctcttgtaatctattgcagctcgttttgttcgagatcatacctgctctatctagagaggcaaggatgataaactggaaagtggatcttttttgacttgatacttcttctgggtttcatgttgccgtattaccattgctataagatgcttcgtaatag

SEQ ID NO: 107943 - DNA, 407 bp, Arabidopsis thaliana columbia
agaagaatcaagctttttcctgctgctttcacgatgttgtcaaaactcaaattccggaaattccacagttctcattgttctcagtggtgtgataatgaccatatatttcagtgctccaaagtccctgatcactttccagatgagcttgtttaccttcactggcaggggtatccctatgattgcctgccatcagatttcgatccaaaggaacttgtcgatcttagtctgcgttatagccacatcaaacaactgtgggaagatgagaagaatacagaaagtttaagatgggtcgatctcggtcagtcaaaagacttgctaaatttatcaggtttatccagggccaaaaatcttgaaagattggatcttgaaggctgtacgagtttggatctcttgggctcagtaaaaca

SEQ ID NO: 107944 - DNA, 293 bp, Arabidopsis thaliana columbia
ctcaaaaactctctcttctaaatgagacaaaagggtcacagacacggaagaacagtatcgccttgtgccggctgtaaacttctccggcgaaaatgtgtgaaagattcatgcgtctttgctccgtattttccggccaaagagccttacaagtttgccattgtccacaagatttttggtgctagtaatgtcaataagatgttgcaggagctgtcggagaaccaccggagcgacgccgtggattcgatggtgtacgaggccaacgcgaggatacaagatcctgtgtatggatgtgt

SEQ ID NO: 107945 - DNA, 421 bp, Arabidopsis thaliana columbia
ctcaattggaaggtgtctttctttactgcagtttttggatgtatcatattgtagaaagctctcagataaaggattatcagctgttgcagaaggctgccatgatctaagggcattgcatttagcgggttgtcgtttcatcaccgatgaatcgttgaaatcactctctgagagatgccgtgatctcgaagctctggggctacaaggctgcaccaatatcactgattcaggtcttgctgatcttgtgaagggatgcagaaagataaaatctttagacattaataaatgtagcaatgttggagatgctggagtttcgagcgtggcgaaagcttgtgcatcttccctcaagacactcaaattgctggactgttacaaagtcgggaacgaatctatatcgtcgctggcgcagttttgcaagaatctg

SEQ ID NO: 107946 - DNA, 424 bp, Arabidopsis thaliana columbia
  unsure (1)..(424): unsure at all n locations
cggatctaaaaaaatctgggttgatcattgttcaatgagtcattgcaccgacgggctaattgatgctgtgatgggttctacagctataactatatctaacaattacttcacccaccacgacgaggttatgttgttgggtcatgatgataactatgctcctgatacggggatgcaagtgacgatagcgtttaatcatttcggacaagggcttgttcagaggatgcctangtgtcggagaagttacattcatgtagtgaataatgatttcactgagtggaaaatgtatgctattggtggtagtggtaatcccaccattaacagtcaaggaaatcgntactctgctccttctgatcctagcgccaaagaggtgacgaagcgagtggactcgaaagacgatggtgaatggtcgaattggaatggagaa

SEQ ID NO: 107947 - DNA, 396 bp, Arabidopsis thaliana columbia
  unsure (1)..(396): unsure at all n locations
nanntatnttttaacttatatggcacattaacattntcgggattggggatattgattcgggggaatggaccacaacaagtcatttaatctataagcttggacgtattgacaagcgttttattgataaaatctacaacgaatctccttatatcaacattaggtcctacaaagagagatttgtatttgatctgatatctcacattccaagatgaaaaaaggaaccctttaaccaacgacttaagatttagaccctcaagtactactgcatatttgtgcaactgtagtcatatggacatgggataaaactccaacctcggcctttctttcacctgaaagtcactatctaaagctgcaatcaaaagaaaaggttgagaaattacctactgcgctgaatac

SEQ ID NO: 107948 - DNA, 377 bp, Arabidopsis thaliana columbia
  unsure (1)..(377): unsure at all n locations
cgttctagttttataaannaaaattttatactttatatcaaattggcgtaaaaaagatccgaatattgattcgggggcatcggccacaacaactcacttcatctataagcttagacctattgacaatcttttcattttgaaattctaccaaacggtgccttatatgaacaataggtccataacatacacatgtattttcaacaaacttaaagcccatcgttagcgtactattaccatcaatatcactctattgaacgtctagaccaccaagtactactgcatcatcattgatgccccaaaactatcttatttcataaagaactaacaactcgtaccttccatgctgattctgctgttcttatcattgacttcaccac

SEQ ID NO: 107949 - DNA, 180 bp, Arabidopsis thaliana columbia
gtgctaaataggtgacaaaacgggtggacttttatgtttaaggtccatggtcaaattgggagtggagaacacaagggcattggacggagaatctaccttcttttgttgcctttgatctaggaataagctcaatgtactctgaagcttctagtgttgaccctcaagcaccttctctagtac

SEQ ID NO: 107950 - DNA, 410 bp, Arabidopsis thaliana columbia
gcatcttacctggttccagcggctgtcgttttagctatggggtactgctacatgtggtgggggggctggtcgtggggagatgcaatgtttgtgacaaagaaaaatatggctgatgcggttgcctctgtttcgaaacaactagacgatttgtcagacacattatcgtcaacaaggaaacatctttctcagaagctagcgaccttggattggaaggtggaagagcagaatgagacatctaaaatgatcttaagtgatgttactgagatgagatcaagcatttcgcaaattgggtttgattttaagcaacttaatgaaatgatttctggaatagaagggaagattgaaagtcttgaaagcaaacaagatgtgaccctctctggactatggcatctatgtcaagttgcacgcgt

SEQ ID NO: 107951 - DNA, 442 bp, Arabidopsis thaliana columbia
  unsure (1)..(442): unsure at all n locations
aaaaccgggccgggcgacgcgtccgnggacgcctgggaagaatttctcaaaccatttttcttacttcaggcgtcaccgccnnccagtttttgatgaacgagagcccgggggctcaacccaaaattcaccatctcttcctctctggaaactctccggttgcactaccatctaggagacaatcattcgttcctctcgctctcttcaaacccaaaaccaaagctgctcctaaaaaggttgagaagccgaagagcaaggttgaggatggcatctttggaacgtctggtgggattggtttcacaaaggcgaatgagctattcgttggtcgtgttgctatgatcggtttcgctgcatcgttgcttggtgaggcgttgaccggaaaagggatattagctcagctgaatctggagacagggataccgatttacgaagcagagccattgct

SEQ ID NO: 107952 - DNA, 416 bp, Arabidopsis thaliana columbia
atcacatattctaattcttctttctctttttcttctgatttccctcgtccgaccacaagttcctccaatggagcaattccggttccttaacaacggcgactttggagaatccacggtggagtacggtgcaagttacagagatttaggtgtaatacgtaaccaatttcgtctatgtttcttcaacaccacgccaaacgcattcacactcgctatcgggatggggacaggaagttctgattcaatcattcgttgggtttggcaagctaacccacaaaaaccagttcaagaagaggcttctctttcgtttggaccggagggaaaccttgtcctcgcccagccagatggcagagtcgtatggcagaccatgacagaaaataaaggtgttataggctcgaccatgaacgaaaatggaaatc

SEQ ID NO: 107953 - DNA, 414 bp, Arabidopsis thaliana columbia
  unsure (1)..(414): unsure at all n locations
atgctatcgaaaataaggataggatctgcatatttgcttagtcttgtagctcattttaatggagtatattaacatgtatcggtcatttttgattacatgttgtcaatatgtaatggatctgtctacactggtttcatattgcaattcgttcttcattttggggtctaagttggttattatatgtattgcgagttctcttccccgtatgtatggttatgtgattcaggaacacgttatggtgcgagtatcangaagcagattaagaagatggaggtcagccagcacagcaagtacttctgtgagttctgtggcaaggtatgaaagagattaacattcagctactgttttcatttctaaatctcttttggttttggattattggggtaactgtggcttgatcaaaatgattgcagt

SEQ ID NO: 107954 - DNA, 355 bp, Arabidopsis thaliana columbia
gcaccatcccgctccttctccggcgaacgttaccactcgtcaccgccaccttcgcaatgtacatacgccgctccgcttctcttcactgcaattccttcgtcaccacattagattgtggaggaaggattgaattggatgttacacggaaagatattcaatggttcaaattagaggcaaataagatgaaattgattggatgaatctaaattgatattcgctatggactagagcatacgtctgttcagggatccaggcacataatgaaactgaaaggaacttaggaacacttaagtgatggatgttggattgaagtccgtgagctaggattctttatcgccactcatcaaagatgatg

SEQ ID NO: 107955 - DNA, 242 bp, Arabidopsis thaliana columbia
ctatctctagactgctagcgaacagtattttttttcttactgttacgataaaaaggtgtgggcagttggagagcttgcttgcatcgtcactgttatgatcctagaggactatggtattgctattagcgctgactaagatccgaccttgggaatgattgtgtattagtattggtaatactggccaatctatttgtcagatggctgacaaacgtatcgtgctgatcttatgtgaactttagtgc

SEQ ID NO: 107956 - DNA, 422 bp, Arabidopsis thaliana columbia
tcttagccttggaggtgttttctcatctggtccagttgcattgctctctggtttaaaccctcgtcctctgagtttagttctccacttctttgctgtggcgatctacgctgtttgtcgtttaatgctaccatttccttcgattgagagcttttggcttggagctaggataatctcgagtgcttcaagcatcatctttccaataattaaagcagagggagttagacaaatgttcttccctcgtacaatccctgccatataccgtgctcctccttaatgatgcatcaagagttacatacattaaatgatctatgcaggcaaatgttgtaacttttaatctaatatcttagttgcttgatgctaatcatgtgggtgtttaggctagatagcttaggaaccagtgtaaacatagctccttaagtata

SEQ ID NO: 107957 - DNA, 413 bp, Arabidopsis thaliana columbia
gcgagaaagtacgatgatttactctgaagatatgacgatgctgcattgcaaactcagaagagtcttgcgtatttagattttggacagagttttatatttagtacagctgtgtcaacatcaatggtgttgtgttctcaagggattatgaatggtgagatgacaggtggtgatttggtgatggtgaatggtcttctctttcaattgtatcttactctttactttctcggtggtgattaccgtgaaaccgttcaggtcttgttgatatgaaatcattgctccagatgctagaggagagatcctatattggagataaatatacagaaactaagctacctcctcttgttctgagaagtggaagcatcagtattgagaatggacattttacatatctgccagagagaaagattttggat

SEQ ID NO: 107958 - DNA, 317 bp, Arabidopsis thaliana columbia
aagaagtcatgggaagatctccttgctgcgagaaagaccacatgaccaaaggggcttggactaaggaaaaaaatgagagactagtctctaacatcaagtctaacgggaaaggttgtggcgatctctttctagagccgctggtctccttcgctggggaaaactgccgtcttggggataactatctcgactgactaaaagagaaactttccatgagaataactatatcagctatagctctagcacaagggcttgatgcggagatacctgagacaatacggacagactctggaccacattaagagagctttgacaaggat

SEQ ID NO: 107959 - DNA, 291 bp, Arabidopsis thaliana columbia
  unsure (1)..(291): unsure at all n locations
gttttataacaannnnattggggtgtgttattttgtttaggggctaggggtttttttttgagagcccccaaaagagattttcaactgaaactgaataaaaagttgtgggtggggattttcccattttttttattttggaggtgtgccctctcatttttttagatttctttccacaagaaaaaaagggtcactatactattggtagagagtttgttaagagagagagagtttttttcttaatttgaggacacaaatttataaaaaaactaaaatgatgaagtctatattagg

SEQ ID NO: 107960 - DNA, 249 bp, Arabidopsis thaliana columbia
tttttattttctgtatgggtttatttttttttgtttttggcttttattcttttattttcgagcacccaaaaaaaaatttcaactgaaacttaataaaaatttgggggggggggattgcccaatttttttatctagaagggtacccctctcattttttaagattccattccaccaataaaaaatgcactagaaactatgggaagagtgtttttaaagagagagagagcatttttctgtattcaggaacac

SEQ ID NO: 107961 - DNA, 261 bp, Arabidopsis thaliana columbia
acagcgaaaggggaatgatccaacaatcgctttgtgagaactcacggacatccaggccgacattggcattcaggcaggagaagcgctgcatcacaaggcaaacctaagcgggtacctcgcataccacactggtcaaagcctgcagaagataaaccagcacacagaccgtgatttcttcatgagtgccaaagaagcaaaagagtatggacttatcgacggcgttatcatgaaaccctctaaagctctgcagccacttgcagc

SEQ ID NO: 107962 - DNA, 271 bp, Arabidopsis thaliana columbia
ctcctcatctttttatcttctttgattgatccacatggcggctgctgccgcaagttccgccttttcacttcttaagtccaccggcgctgttgcttcttctgacggatctcgcgcacttacttctgatcatccaatcctctatatctttgtttatgaacgttcaataggcttcgaaggttaccgaaatttaaccggcagctatgcggatgagttcgctattactcaaggaagccacggtaagactaaagcccgcaattttcttgttcctggt

SEQ ID NO: 107963 - DNA, 288 bp, Arabidopsis thaliana columbia
cgaaagcaaaagaattctcaaactcctgagaaaaattcgagctccgtgtgattaattagtttgtgttggtaaacttcaatcagatgagtttgatgatgaaagtttagaagagtgtttttgcttccaaagcaaaataaaaacaaatgaagcgttttgtgtacattaacgatgatgaagcttcaaaagagctttgttgtgataaccgtatatctaacagaaagtatacgttatggaattttcttccgaagaacttgtgggagcaattcagccggtttatgaaccagtact

SEQ ID NO: 107964 - DNA, 293 bp, Arabidopsis thaliana columbia
  unsure (1)..(293): unsure at all n locations
cacacatttnctattgctaacgaacataaaacactacctgagagatcaatatggctggagtgatgaagttggcatgcttgctatatcacctgcaaatattctgacctatcactaaaaaataaacgctgtgcttagatgcggcttcaattaacagcacctaggcagagtgcattggctacatgctccaaggaggtgttattcccccagcgtgttgctccggcgttaaaaacctcaacagcatagccaagacgaccccagaccgtcagcaagcttgcaattgcattcaaggtgcc

SEQ ID NO: 107965 - DNA, 287 bp, Arabidopsis thaliana columbia
tgctgattggttattcgttaatggctttgaagggttagaagaaacacaagattgtgaaaatggtgagtctgatgcaatgaaggcgacgttgatcggaccgatgattccatcggcttatcttgatgatcggatggaagatgataaagactatggtgcgagtctgttgaaaccgatatcgaaggagtgtatggagtggcttgagactaagcaggctcagtcagtagcatttgtttcgtttggttcgtttgggattctctttgagaagcaacttgcagaggtagctattg

SEQ ID NO: 107966 - DNA, 210 bp, Arabidopsis thaliana columbia
cgcgagcggcactccttttgattgaatctcaaaaaggaacgagatattgagaggtgaaatcggccaatcttattttgcttcgtgagactaaacttattaacaaagagaatatagactcatcggcgacaataacaactactcattggctgaccagatgatgagccgtgccgggtgcctttgtctgtggctcagctatcagatataaatcac

SEQ ID NO: 107967 - DNA, 280 bp, Arabidopsis thaliana columbia
ctcttttttcttttcttcctgggtttgatttcttggagtggttgattgcgcaagtctggattttgattttggtacaagacatttgcttgtacaaggaggaagggatttgttggtatacagtattgttattgcaaaggtttttcgaatgtcaaaacaagtttttggattattgattttggaaatctgagtggatggagaacgatgacatgtatcctgatgagcctgtaggttctgacttggaacctcaagagagtgatgttgtttttgcaagagagtcacc

SEQ ID NO: 107968 - DNA, 287 bp, Arabidopsis thaliana columbia
gtggtatcaagaatgcgtggacttgaacaggatgctgggaggcagcaagttactggagttaagctgcgggaaatgcaagatgaagccaaaagttttgctattgggaacaaagccttggctgcgttatttgttcacactccggctggtgaactgcagcgacagattcggctatggcttgcagaaaattttgagtttctttccgtgacctcagatgatgtatcgggaggaaacggtggccaactagagcttctttccacagcaattatggatggttggatggctggact

SEQ ID NO: 107969 - DNA, 286 bp, Arabidopsis thaliana columbia
gttctggattgaaaagaatgactttgagttcaccatctgatttgaaatcacttgtaggaatttgtcagagtacgcagcagctgactggtttgagttgtggtagtgttgttggtactgaagtgcagaggaatccagttactaataagaagagatctgtttctccgttgcctcatatggctctttctgatgcttttatcgaagcaaagtctgatattaagaggttttctactccacatcctagaagagtggaaccagagaagggaatgaaggccaagtcgtcgtcccg

SEQ ID NO: 107970 - DNA, 287 bp, Arabidopsis thaliana columbia
cttacttatcaatttgaagggtgggaaagggcggctatgtcaagtcattcaagaaaatccagaagagatgaaaaaatggattatggggttaagagtccagccattaccagctactggatacaaggtaaacacaaagtcgaaaacaatgaagactcagttcttgttagacctcggatacaaagaaaactctgaggaaatggagagagcactcaagaatttccgtggcaaaggatctgaactccgagagagatttaatgtcctcgtgagtttcggtcttactgagaaag

SEQ ID NO: 107971 - DNA, 288 bp, Arabidopsis thaliana columbia
gcgggaagctcagcgaagctgtagatctcttcaatgagatgaagaaccaaggaagtggtcccgatgtttatgcctacaacgccctcatgtcaggaatggtaaaggctggtatgatcaacgaagctaattccttgcttagaaagatggaagaaaacggttgcagggccgatataaactcgcataatatcatcctcaatggatttgctagaacaggtgtgccgagacgggctatagaaatgtttgaaactataaagcattctggtattaagcctgatggtgtcacttata

SEQ ID NO: 107972 - DNA, 290 bp, Arabidopsis thaliana columbia
cccacatcatctttcttcctgattctcatcatttggtttgtgttcgttcatagagaactccatctaatggcgaagaggaggtcgtggttcggttggatgaaaagactattcatctgcgaggccaaagcaagagcagagaagaagccaaggagattgagatgggtgtttaaaaggctgaagctgagaccgcagcttgccacttgtgggcaagagacaaggactttgaacgaagcaacacaggatcagaggaaacatgcaatgaatgtagccattgccacggctgcagcagc

SEQ ID NO: 107973 - DNA, 288 bp, Arabidopsis thaliana columbia
tagaaacgttcacatcttgaacgtgaagctcgataatgtaaagaaagcgattaggttcaccggtaagtacggtgaacatcctgatgagaaatacgatcccaaagcactcccagctatagagaaaatcacctttgagaatgtaaatggcgatggaataggtgttgcgggtcttcttgaaggtatagaaggagatgtgtttaagaatatatgtttccttaatgttactcttagagtgaagaagaattcgaagaaatcaccatgggaatgctcgaatgtgagaggttattc

SEQ ID NO: 107974 - DNA, 249 bp, Arabidopsis thaliana columbia
tcctaccataacaactcattttttaactacttcatgtattacacgaaatttctcaccggcgtggctcaatttactaacttcctacatataaacactttaaaacaaaacaatgactacgtttaatagattatctattttcgagaagttcatgattatctcaataatatactaacaaggctccattgtttatattatattattgtacctacgctttccttccttcatctacctatactatcatgatctctt

SEQ ID NO: 107975 - DNA, 289 bp, Arabidopsis thaliana columbia
gttctgcaacaatgaactttactctgttgaagaatcacgcaacatttttgaccattttacccctcaacacattctctcttcatcacctccaagtgatcttctcggaaccctaagtctctctcagcatattcccaccggattatatccaaatttctcagatttccaaatctccgacgccgtcaaaacagagaagttcttcgacggtcataatcaggcggcaacaatggcacgaagctacagtaccatagagaattcagggagatatatgcagagaagctttagcagcaat

SEQ ID NO: 107976 - DNA, 290 bp, Arabidopsis thaliana columbia
caaaggttgcttactattctcccccaccaccatacgtctagaactttttgaccccaccatactactctccttcacctaaggttgattacaagtctcccccaccaccatacgtctacagctcccctcccccaccttactactctccttcaccaaaggttgagtacaagtctccaccaccaccatacgtctacagtttccctcccccaccataccactctccttcgcctaaggtaaactacaaatctacaccaccaccatacgtctacagctcccatccaccaccatactac

SEQ ID NO: 107977 - DNA, 331 bp, Arabidopsis thaliana columbia
taccggcccggacggaattggccgcggacccacccatccgggcgtaagataagtgggagctgaagcgcaagatacaaacctgcaaccgcatcttggtgcagagagtcatccagcccgctaaaaccgaaagcggcattctcctacctgagaaatcctccaagctgaactcaggcaaggtgatagctgttggacctggatcaagggataaggacgggaaattgattccggtctctgtgaaggaaggcgacactgttcttcttccagagtacggtggtacacaggtcaagctcggcgagaacgagtaccatctcttccgggacgaggatgtttt

SEQ ID NO: 107978 - DNA, 330 bp, Arabidopsis thaliana columbia
  unsure (1)..(330): unsure at all n locations
aggttccggnacggaacggccgggacgacccagtcctacggtctttctactattttcttcttgactcccagaagagagggcctactttcttcgtgtcaggactgcttgaaaactgtagaagtctttaacgtttttttacaccaataagagtcctagagagagagagagagagaaagagagatctattcataaaaaagacaggtaatctcaactccgacgagataactgatataacaatttgagagaataagaagaagaagaagaagaagaccaagcttaagaatggttgcttttttatcagcttggccttgggaaaactttggcaatctc

SEQ ID NO: 107979 - DNA, 132 bp, Arabidopsis thaliana columbia
cgcaagaaccttgtgaagaagtgtcttgagctcttctttgagattgctgagaacaaggaggactacaacaagttctatgaggctttctctaagaacctgaagctcggtatccatgaggactcccaaaacaga

SEQ ID NO: 107980 - DNA, 374 bp, Arabidopsis thaliana columbia
gagagagataccgtatcttggaatgctattatctctgctcattctaaaaattctaatggtttaaagtattttgagcagatgcaccgtgctaatgctaaaccagatggtatcacgtttgtctcggttttatctctctgtgctaatacaggaatggtcgaagatggagagaggttgttctctttgatgtcaaaggaatacgggatagacccgaagatggaacactatgcgtgtatggtgaatctctacggaagagcaaggatgatggaagaggcttactcaatgattgttcaagagatggggcttgaggctggtccaactgtttggggagctctgttatacgcttgttaccttcatggaaatacagatataggaga

SEQ ID NO: 107981 - DNA, 199 bp, Arabidopsis thaliana columbia
ctgattcccattaacgagatgtctgagcacatgaggaagatgaagagttgccaccgcctatgacacttgacgaggttataaggaggagcaaagcatcagccatggaagaagttaagcttgttgcagaaggaatgagagcagcaaacctagaagagaatgttaagattgaaaatgtacatgatgaagaagcacctatgag

SEQ ID NO: 107982 - DNA, 141 bp, Arabidopsis thaliana columbia
aaaagctcatatcgacgccgcctgagctgttagttttgacccgctcctaacgccctcttgagcggctgatctcatcagagtagtcagggcggcggataaccccagcaatgccctctcatatagcttcagatctctcacatg

SEQ ID NO: 107983 - DNA, 282 bp, Arabidopsis thaliana columbia
gtgccagaaatgcctcacacgctaacttgatcgtcccaagggccacaatgatgactcaatgcatggacttgcggcttagaattcctactaatgttttgtcacctgacgcgattggaaacttacaaggggtattctttctcaaaagaggcccagggagcgagatagaaatcagtgaagtcgtggctgagtttaagaaggagaaagaagagttcaatgagatgatcaaagaaaatgttaatggcggccatactaacactacacttggtcagaaaatcatgagtg

SEQ ID NO: 107984 - DNA, 216 bp, Arabidopsis thaliana columbia
cgtcataggcaagaagacaccatctacttcagttttagcgacacagcgcagacaccacgcaagggctcgcctaacaggggagctcgttgtctacattctgcaagttcctgttctgtcactgagcagttcgtccgagagacagaactcatccacgctaaagtaggaagcaatgaacaccctacttagaatcctttcgtccttgagaacatctctcac

SEQ ID NO: 107985 - DNA, 105 bp, Arabidopsis thaliana columbia
tgcgtcgccgcagtccgtccgaattcggtgcccacgtcggattgggtctagaggcaggggagtaaagcggtattgcagctaagaacttatagaacattgtgaaaa

SEQ ID NO: 107986 - DNA, 176 bp, Arabidopsis thaliana columbia
taaaaattaaacaaaaaaataaatattttgcttgtgaccttatttaatcgaccaaacgtgggcgattatgattctgggggatggtgtgaaggttcgatggacggtactaccaaatctttaccaagattttgacgagagaagctcttatctttgtggctgatttacatagagagttt

SEQ ID NO: 107987 - DNA, 199 bp, Arabidopsis thaliana columbia
ctcggttcgagagacaacatcaaatcatctgtgtcttcgggattcacgaaacggagaagaaaacaacaatggcggatcaattgactcgcgatcagatctctgagtgtaaaggagctgttagcttattctacaaggctggtgctggttgcattaccaccaccgagctgggttctgagatgcgttaacctggacacaaccc

SEQ ID NO: 107988 - DNA, 117 bp, Arabidopsis thaliana columbia
cgaccacgcgccgctacactgtgactatgaaataaattcactttctcttccaaatattacactcatccatagaagcgtagagttcaaaatggttgtgggagcacaccaccccactat

SEQ ID NO: 107989 - DNA, 320 bp, Arabidopsis thaliana columbia
agatcttacaaaagaacaaatcgaggcttactgtacaaatgacgtaccatccatccgattagtgcatgagcgaatcgtggtgtggcagtggcaagacccgaaaggcactgcctatcaatgaagtggaggtagatccacctgcagccacacaaagatggaatcaagaggcgatgcacttctctctggcacaccgatgacaacttgtgggacgctaaagcacaaacaccgatgtgtgcacacctcttcaggcatgaagctatagggagtggtgagagtgttggaaacagagtgactggtctgaaccaaataaagcatgggtt

SEQ ID NO: 107990 - DNA, 185 bp, Arabidopsis thaliana columbia
  unsure (1)..(185): unsure at all n locations
gtagaagcttacagagaacgactatttctttttcaaaatcaactctctttcttcttgcattgtggcttcctggggttggcgggggtatcaccactcttttttctttaaatntcactcctacttttcttactatgcgttatcctcttccaatttctccatccaaagccctaattctttccttcctt

SEQ ID NO: 107991 - DNA, 132 bp, Arabidopsis thaliana columbia
agcattcccgactggacagagctgctacgggtctgacttagctgggcagacacagccgactctacagacaatgtcgcagcaccacccgtggcacccgcgagaaagtatacatccactgcagatgcactcacg

SEQ ID NO: 107992 - DNA, 433 bp, Arabidopsis thaliana columbia
tgcaaactggagttttgcccggatagaaggagccggttggggatgggctggagtgatctggctatacagtttcctaacgtacatccctcttgacttactcaagtttggaatccgctatgttttgagtggaaaagcttggttaaatcttcttgagaacaagactgccttcacgacgaagaaagactatgggaaagaggaaagagaagctcaatgggctgcagctcaaagaaccctccacggacttcaaccagcagagaaaaacaacatctttaacgaaaagaatagttacagtgaactctctcagattgctgaacaggctaaacgccgagctgaggttgtcaggctgagagagataaatacattaaaagggcatgtagagtcagtggtgaagcttaaaggacttgacattgacacgattcagcaacattacacc

SEQ ID NO: 107993 - DNA, 169 bp, Arabidopsis thaliana columbia
  unsure (1)..(169): unsure at all n locations
cgtaattnatttatagtgaaagaagaagtacgacttgtcattagaaagaaagagataacaggaacggaaacataggtgaacactctttttttagggtttattcaagggcccaaaacacataccaccaaagtttttcttgcaacgaaacattggactttttaagcataac

SEQ ID NO: 107994 - DNA, 272 bp, Arabidopsis thaliana columbia
tttctctttttcttaaaatccataatccaaccaaaagaagaaaaaaaaacaagaatcttgatagcaaatgaatcaagaaggtgcttcacatagcccatcctccacttccaccgaaccagtccgggcacgttggtcacctaaaccggagcaaatcttgatactcgaatccatcttcaacagtggtactgttaacccaccaaaagatgaaacggtgaggataagaaagatgcttgagaaattcggtgctgggggagacgcaaacgtcttctact

SEQ ID NO: 107995 - DNA, 356 bp, Arabidopsis thaliana columbia
tgccgttgcacatgggtgtactggaaaaggaaatgaccaggttcggtttgagctcaccttcttttcattaaaccctgaacttaaagttgtggcaccatggagagaatgggaaatccaaggccgagaagatgctattgagtatgcaaagaagcataatgttcccgtcccagtgacaaagaagtccatttacagccgggacagaaacctgtggcaccttagtcatgagggtgatctattggaagatccagcaaacgagccaaagaaagatatgtacatgatgagtgtggatcctgaagatgctcctgatcagcctgaatacatcgagatcgggatagaatctggactttcagtggcgc

SEQ ID NO: 107996 - DNA, 419 bp, Arabidopsis thaliana columbia
ttcacagtcgtcgatttcttcctctctccctccaaaattcactctctaactcgttttccgacagggttagggttttgctattcaattgctccgaagattggatttgtttgagaagaagacctaaggaagagaaatcttcgatggctagagcgagaagccggagcagaagctatagtccccgtcctcgtgacaggtcaccacctcgcgaacggaaaggctacgacgataatcgcctccgcgaacgtccgtcttctcgtgatcacgaatcctctggtccttctggtttgcttatccgtaatctccctctcgatgctaggccgaacgatcttagggattcgtttgaacggtttggtccactcaaggacatatacctgcctaggaattattatactggggagccgagagggtttggatttgtt

SEQ ID NO: 107997 - DNA, 276 bp, Arabidopsis thaliana columbia
attcagaatggaaaaagaactagagctgtcttgagcaagatgtttaaagtcagagagtgcttttaggagacccaaatcgaggaccctggccgggatttctgaatggttggtgatgctccctgaattattaggcgagatcattcgtcgcgtggaggagactgaggaccgttggcctcaacgttgtgatggagttacttgcgcttgcgtttctaagaaatggagagaaaatacttactatttcgctagatcctcttctaactctggcataattacttt

SEQ ID NO: 107998 - DNA, 383 bp, Arabidopsis thaliana columbia
gtttgatcaaacctttcaatccaatatcacagccaagcatgaaaagattttataatttgtacgtgatgccatacccagagtgtgaaagaatctttggaaagagaaaagagaatgtccgagtgaataaacgacatcccgcagggctttggaagcttatgaagccgcctagcaatctaacaacaaaagaagatgtgcagaacatgaagtcctttatagagtcacttgcttagtatgttggatcttggacttgcctcttactagattgaaagagatcggccactctttagagggttcttgctccctcactttgctatgagctgctctgaattgatatgggttatcaggaactttcagtgactatcgaatctgatcttaactcgctc

SEQ ID NO: 107999 - DNA, 403 bp, Arabidopsis thaliana columbia
aaaaaactttgaagattgatttgaagaagaaagctctctctcagcgtcgtcttctcttcttcttcttcttcactgtcccacctgcaatttctactttgactcttcctcgtaccttaaaagatcgagactttcgagctatagttcgattatctctcgtgggtctcctttgtttgtctctagctttggatctatgaccgttaaaagattctctagcagagtcggaagcaggagcaatgacggtaacgaacaatttggagcgttggagcaagaatctttcatcaacaactcatcggagatacggaaagacttggtcaccggcggtgggattgaagccattgttaatcgtctgagcaaatgggttgtgtctgttctaattggttcaatcattcttttgcgacatgat

SEQ ID NO: 108000 - DNA, 412 bp, Arabidopsis thaliana columbia
ggtggaaacgccgccgcggaagcaatacttgctaactccaacgccagagacatgatcggagaaatcgaaaaccgatcggtttatctcctcgcgataaaaaccgacgtagaaacgcaaggagatttcataaggttcttgatcaaagaagtcggaaacgctgcgttttcagacattgaagacgttgttcctttcgtcaaatggctcgacgacgaactctcttacctggttgatgagagagcagtgttgaaacatttcgagtggccggagcaaaaagctgatgctttacgtgaagcagcgttttgttatttcgatctaaagaaactcatatcagaagcttctcgtttccgggaagatcctcgtcaatcttctagctctgctcttaagaaaatgcaagctttgtttgaaaagttag

SEQ ID NO: 108001 - DNA, 432 bp, Arabidopsis thaliana columbia
aatttttaaaccaaaagagaaaaagctaaaccactctcttcaagatcgatcctatatacaacacaaaagaagaagaagaagagagaatcgaattggataacaactaaaaaagatgatcaaaggaggaggaggaaagtcttctggttactcagcagatttgatggtttgtttcccatcaagagcacatttgtctttaccttctaaatccatttctagcccttcttcttcctttaaccgccgtcaaaatgctcctcaccaccgtcgtagcatcagtaagctctctagcagcggcggtggagtacgtcagaatcgcggtggcggaagggaggtagttgaagaacctacgtcgccgaaagtcacgtgtgctggtcagatcaaagtgcggtcaaataaacgcgattgtggaggcaagaaattgcagtctttgatggc

SEQ ID NO: 108002 - DNA, 415 bp, Arabidopsis thaliana columbia
agcaaacatactttcttctcttctgtttccaagaaacttttgaagttaaatccgtttaaaaatgggtctaaggatacttcgcacatagatgaagatcttggaggtgttgacattactaagccaaggagacgaagattctcaatctcttaaaagaaaacgtttgatctaagtgcttttgtgtgttgtgtataactcttttagactagtgtgcttattgttcccttcttgatgcgtgattttttttttttgggcgtgtgtgtttattggttaatgagcttggtttataaaatgtaaatcgtaaccagattgtttacttaatattttattattttttatttgggcggtcgtttgcgatctatataaagagcttttgtgagttagggtttcactgtgtcttcaaaatggtagatattct

SEQ ID NO: 108003 - DNA, 436 bp, Arabidopsis thaliana columbia
  unsure (1)..(436): unsure at all n locations
atttctgaaaactcatcattgctagggtttcttcgacttatatgtaattcttttttctctgatgactgtttttagctgtccaaattgcttgactagagaaaagccttttcattgaagataatggcggaagtaaatggagtcattccaacaatagacttggaagaggttaatgatcagattctgaatgagaaaatccgtgaagcgagtgagagatggggatgtttcacggtgataaaccatggagtttctttgtctttgatggctgagatgaagaagactgttagagatctccatgaacgtccatatgagatgaaactgcgaaacaccgatgtgttactagggaatggttacaagcctctaagtgagttcaatcctttttatgaatcatttggtcttnttgacatggcatcttcttaagcttgtcaatagtttttgt

SEQ ID NO: 108004 - DNA, 384 bp, Arabidopsis thaliana columbia
ataaaagagagaaagataatctctttaatgtccacattatctctctcttcttcttcaccttcttgagaaacctcctctccccaaaaacgacgtagtttcacatttctcgacttcttgaatggagtttgaagacaacaacaacaacaacgacgaagagcaagaagaggatatgaatcttcatgaggaagaagaagacgacgacgccgtttacgactctcctcctctctctcgtgttctccccaaagcctcgacagaaagtcatgaaaccaccggaactactttcacaggcggtggcggaggattcatggttgttcacggcggtggagggagcaggtttaggtttcgtgagtgtctcaagaaccaagcggtgaacataggaagaca

SEQ ID NO: 108005 - DNA, 246 bp, Arabidopsis thaliana columbia
caagaataagtttagatcagcaaaaaaatacttaaccgattcaagcaagctgaacttaagaaatgttgagcgtttcatcaaggccggtgggatgtatgaaaatcaaatatttcagaagagagcacaagtacagcagaggcaatcagaaaggtttcgtcgtgacaaagctcgtgacaaagctcgtgacaatgctcgtgacaatgctcaagcaagcagacaattctctggcaagttggtgcaattaga

SEQ ID NO: 108006 - DNA, 453 bp, Arabidopsis thaliana columbia
cacaaaagcaaaagcatcgccggattttttaaatcgatagtggcgtctaaaagcagaaccgcgttccccaccaccgcaaacgcatttttttaacaaaacgcgaaacaaattgggaaaaagcggagagaaacgcaccttcgatactgcaccggcatgttcccagctttccaaatagcgatcttctcaaacgcttcgatcggaagcacgaaatgtttgttaggtggattacaatgaccaccaccgtcgggatcaaatccgtaattaggagcacagaaattcgtagcggtgagtataattgaagttccagggatacaccaacggagatcatcaacacatctgagctcgaaacaagcaccacagatctgaccacgctcaaacagagtctcgcttagaccaacagtagccataccgaacccagatttgacgagattctcgtatccacacgcaccgccc

SEQ ID NO: 108007 - DNA, 276 bp, Arabidopsis thaliana columbia
cacgacttcgctcaactctgcttagaagatcggaaacgaccattgaacttgtatcgctccttgtacgacggagcattggcggtctcgagactacggattggtattgtttagaagatggtgattgtggattctttgagcttcctttgaagctattgagatgcaaattctgcagatttggatcttcttctccaagcaagtcttgtaacctactgcagaagagtccatattggtgaaagtggcatgctacgcattgatccgtccagtattcccacaccg

SEQ ID NO: 108008 - DNA, 356 bp, Arabidopsis thaliana columbia
ggccggcgacgcgaacaggagcccttttactaatttattgatttttactaatgtcgaggctgcaagcaaaaatcagatgctagtttcagtgggagggttcttatcaatttaattccctcaatgtctgtggataagttggaggaatttagtccaaaggcggttggcacatttgcttctgctagtcattttgtcttacctaagatatcagacctgttgtcgacctttctgatgaagagaaagacagtttacaaaagctggtttttttgcgcattgtttaagcatataatcaaatatcaatgtcttgtgtctcacaactccccttttctcttcttgctcatttaggagttgagtttcct

SEQ ID NO: 108009 - DNA, 452 bp, Arabidopsis thaliana columbia
tccagagttggaatttgatcgtgaggtgtatcccttgggacttttaccaaacgtgggcgtcgttgttggagtttctcagagaatgtcattttcggcaagcgcagagtttccgtgttttgagcctacaccccaggctcagactatactacattgcctgctccgtcacctccttcagagagataaaaatgaagaggcgttactttagcacaattatcggcagagaaaccccactttcccattgtctggagtggcttctttttactgtttttgatgcagagatttctaggccaaatccaaacaggaaccagatttcaggacctggacatcttaaaaagttatcccttttgagaaaagcctgtgatttaataaaaaatttccccgagtactatgatgtggttgtgaatgtagccagaaaaaccgatgcccgtcacttggcttgattattttctggt

SEQ ID NO: 108010 - DNA, 246 bp, Arabidopsis thaliana columbia
tccagagtcagaaattgatcgtgaggcgtattccttttcacttttaccaaacaacatcttggttaccgaaccttcttcaaggaggtcaaattcataaactacatactctataaattgagagtcttcacctcgaactgactctattctacagtacctgctctggcacctatctaagagagataaaacataagagcacacactttacatctaccatttgaagataaaccacatttctccatcgtcttt

SEQ ID NO: 108011 - DNA, 258 bp, Arabidopsis thaliana columbia
atgggtttctgtgttcggtcagagttaaatttccttataatatcctctttgtagccagatctctaggttgcatataagttattgattggttaaattgtaggaaaatatcttcagcatagatctatgaattgaatctacactatacatgttttagcataatgaatttcggtcttaacgatgtcgtgtagacatgtatgttgtttggtttggtctccaattataaagtcaaccataagacgcgttgtagatatatgtttt

SEQ ID NO: 108012 - DNA, 447 bp, Arabidopsis thaliana columbia
  unsure (1)..(447): unsure at all n locations
gtctccagcaaaacgggaaatcaaacttccgatgatcgtcgtctccccgttgggaataattcgttcgcagggagtaactctgttaccgaattctcgtacggcctgcgaaagttgaagactttaacaaaatatatttttacctttcgccaagtgttcgacgaattgcctcagcgacttcgtttcctcttgaacgactaaactgatctcagcagctatggaggagaaagacgggaaggttctccgctgagtgaaaacgaagctggtttactatgctatgatgacgaagaatatcaatttggtggtccagctcccaaattacaattcagagtaggatcctccaaggctcgttggaatgctgaattagganttaggaatggccgaagttgaagtcaaaaggggtaaactttggacgacaactgggattatncgtaccggaaaaacatattg

SEQ ID NO: 108013 - DNA, 162 bp, Arabidopsis thaliana columbia
ttcagatctgcatttgttgtagatttttcttattcggtcgaagaagaataataaggacatgggactactaagaaaagggtgttgcaacattcctactaattcattactactttgctcataatgaatgtgttattagatatcatagtgttaatggacttttta

SEQ ID NO: 108014 - DNA, 234 bp, Arabidopsis thaliana columbia
  unsure (1)..(234): unsure at all n locations
gcaaggnganganagcaacagggangacanggagaagacanggcancacacncncaacagggagggggcgcacngcagcgggggagggcccggancnacaaccgaggcaccncnnaacccaaaagccaacagagagaagacgacccagancaggggggagaccncaaaaaccccagcgaaggaagaggccaaacaagcnngcccaacacaacacgccagggggcagacaaccgg

SEQ ID NO: 108015 - DNA, 405 bp, Arabidopsis thaliana columbia
ctcagacatgtccctaatgaagatggtaacaaaaatattgaccaggttaaccagattcgggactccttggctataatgggtgacaacagcacagcctttagcttaccgcagcctcatctcatgcgtacgaagctgtgtgatctgaaggatgaggacctggattctacatatgttgcaaggcgtgaccaattgaaaaagctcgttgctagtattatccgcccaaagatagtgcggggaaaacactaaacgggaaggaatttatttctttcctggaacagatattggatgcgttaaataaaggagagatcccatcaacaggatcactagttgaggttttcaataaagatattgttgagagatgtgtgaagctgtacaatgagaaagatgtaagagtgcgactaccta

SEQ ID NO: 108016 - DNA, 220 bp, Arabidopsis thaliana columbia
cccgggccgacccacacgaccgcacaaacaaaaaaatatggctgcgtttttctattatatgcaacgaaattgacatcgggtcggggtcttaccaagactgcgccggctcatccaatctttctcctccttcttatatcatctttctcactactactactaccacacgtttctgcggttcctattttcttccatcaaccaacccgaacttcgctcatttgat

SEQ ID NO: 108017 - DNA, 376 bp, Arabidopsis thaliana columbia
  unsure (1)..(376): unsure at all n locations
gtcttgtcgaaatgttgcatnaaatggcagtgtctgtttaactccctgtggatattacctgtgtgatgggcaatcatgaaagagcttggaacactcacgttatgcggtttcttgagaggcatggcatcccttatcattatgtatctacaactaaagagaataaaagagaagatgatattttggaattggttaaggacactgattcctagttcttgctagatatatgcagattttatcgggcttactttttgaaaggttatggaaaggatgtaatcaacatccaccatggtctcttaccatcatttaagggtggatattccgcaaaacatgcattcgacgctggtgtgaaactaattggagccactagtcactttgt

SEQ ID NO: 108018 - DNA, 281 bp, Arabidopsis thaliana columbia
  unsure (1)..(281): unsure at all n locations
tttctgaggatcttttaaagaaactgtatttttcctcgacagaaactganagatatggggggtcaaaagcggggtctgcgggccagatcaaanagcatctcaaagggtgatgatgtgaaaatgactgatgctgatggatcatcaaaccaaagtggcgaatcatcaacttgtgaccaacaggaaggtgcttcgcctccatgaccggaatttatgacctgcatcggttacagatttagtccgattctgatgccgctggcgtaattttggggcatgggtcaagc

SEQ ID NO: 108019 - DNA, 178 bp, Arabidopsis thaliana columbia
aaccaaaaaaaaatatttattactaacgaggactttatcatatcaatctttgctcacagaattgctgaacagaggaaagttattattcatgcataccacgaaaccaactgcgataccttctcaagactcttgacaaggagctctcaactatttctaagagagctatcttgttgattac

SEQ ID NO: 108020 - DNA, 374 bp, Arabidopsis thaliana columbia
cagaagacaaaccagaaagaaaagaaaaacagatcacaccgaaggctttctcatggaggaaacaaaaccaaagaccgttgaagatgttgagaccgttgatgtttatacagctaaaggctttcttagtactggtcaccgatatctcgacgtaaggacaaatgaagaatttgccaagagtcatgttgaggaggctttgaacttccttatatgttcaaaacagatgaaggtagggtataaatcctgatttcctttctcaagtggcatcggtttgcaagaaagatgaacatttgatcgcttgtaacgctggaggaagaggaagtcgtgcttgcgttgatcttttaacgaggggtacgaccatgtggctaacatggggg

SEQ ID NO: 108021 - DNA, 449 bp, Arabidopsis thaliana columbia
cagattgtaaatttagggaagagactttctcaagcaatctagaagcaaatcgatcgccaagtctccggattatttgcaagaatcgttcccagataatcttccccagattctccacttctccaggtattaatttcgtattgagtggattagattagatttcaagatatgagagcctcactggcgttctaatgtcactgttcgtatttttatcaatcagcttgaagaagacgagaagatatggctacttcgaagaaaatgatcacacgtgaagaatgggagaagaaactaaatgctgtgaagcttaggaaagaagatatgaatactttggtgatgaattttcttgtgactgaaggatatgttgaagctgctgagaaattccaaagggagtctggaaccaaaccagagatagatcttgcgaccattactgatcgaatggctgttaaaaaggc

SEQ ID NO: 108022 - DNA, 497 bp, Arabidopsis thaliana columbia
  unsure (1)..(497): unsure at all n locations
ggaaaacccgggctcgacccaaacgcgtccgatnngttctgctaccagttggtgttaacactcatgatatattgttngnnaccgcttannacaagggcgaatagtggacgagggctatatgtnnacccgtgaacgggcggcgtgatcagtatngnngctggtgttaccaaccagganannacgtggnngataccttnnngcgaatggcttatacanttgaagtnncaccaagtcanntcttaaatnncatttacttanncatgtttcnnagccaaaccatacannnattttgtttgggaagaggtcaatannagacaggagggtttagatttgtactnnntctgcaattggttttggtgggaacctggaaagtttaacccaataaaccaagtaatttaaattagcgcatttttttcgttaggcttgggcaataaaagcaanaagcctaaacgatgggatttttgggatatacaaaaattcgggattggttttctttc

SEQ ID NO: 108023 - DNA, 340 bp, Arabidopsis thaliana columbia
  unsure (1)..(340): unsure at all n locations
catgtnntgattctngnngaaaatacgaccccacaacnnntggtcanncttgatnnnctataangnncttggtnnggtattggacccaagcgtgtcannntcgagaggggttctgagaagcgatggtctgtctcgagatgaacacagagggtctctctctaagtaccgcatagtgcgtgttggacaaaccttaaagggctcgagccgtgagccgtggtatttaccaatcgatatttgcttctttatggaagggttcgagacnncaccaagtnnactactgcnnacagtcattgaatgctcctaggacaatctgtgattttcatcaaagaaccatgattac

SEQ ID NO: 108024 - DNA, 412 bp, Arabidopsis thaliana columbia
gcttatgttaaatattcttcatgttacatgctacaacttgttcttgttatgtatatccttgagtttctttagtctaccggaggatttttcgctgcatctagactagcaggagcaacagcgcctccagcacatgtcgtctctcgtagtatcggtctacaggttttatttccagacactaagaaagttttttttaatcttttcgtttctgttctctctgctaatgttccgaataagtctaaagctgttatattttcctttaagggtattggtgtgctccttgaaggaatatttggttccattactggcaataccgcgtccgtgtaagttctaaatatctcttgctatatgtgctactatcctttcagaatttatacaaagaaactaggtatataattcatcttgatgatatata

SEQ ID NO: 108025 - DNA, 370 bp, Arabidopsis thaliana columbia
gttgtcacatcaggtacgggattagctgtttctctctaactcaccgaggatcattcctaaacaaacggattgagacagaagagccaattttctatcgagctcactgtacctgttacatgaccggacacatctccgtgtctatatgggagctgactgatgatatgcgagatgactgctgctgttggggaaggacacgaccacgacactggtcatagtatcactagcacaacttgtggccgtacacgcgaactaaaacggacccaaagttacatgggggagccagacgatattacaggattgaaccggatcgctgttcaagacaaatgcttggagactggagacacctgaatatcaaaatcgttaagcaaga

SEQ ID NO: 108026 - DNA, 340 bp, Arabidopsis thaliana columbia
tcgaatggctgtgaccgcgagcagtggtggctgaggagctagaatacgttgaactaccttaccgatgctgctgtaaccctttcttgacgttcctactcgtgaacttcactaatccataatgaaccggcctacacgacgtttatggcgtcaaaaaacctgccacacagaccggtcgtttcgacagcaagaggcgtcagactctggttggtacaacgactagaggacagcacggagagggaaacgaagggtttgacgcgtagaacccgccctctcagatcgttatcaacgactaagattgctatagaacggtggcgtatacttcatctcagaggtcatccga

SEQ ID NO: 108027 - DNA, 264 bp, Arabidopsis thaliana columbia
  unsure (1)..(264): unsure at all n locations
cggggcgacgccacgcggccgacgacacacgaaaacggcaacaagaagccaaaaaacccggacacgcgcgccgacgacggggagggggcgaaaacgcggggggggggggcggcagaacancagaccccggaaaggaaacaacggccggaaagagagcgcaaagacaaacgcaagggaccaagcggcgacgcaaaaagcgagagggagcaagaaggggagcgaagaggaagccaaagcgaaagcgggaacaaacgagcgagcgaa

SEQ ID NO: 108028 - DNA, 460 bp, Arabidopsis thaliana columbia
ctgctctgaatgcaattaaaaacagtttcaagaacgcaccagctgactggagtggggatccttgtttacctaaaaattactcgtggtctggaatttcctgctctgaaggcccccgaattcgtgtagtcgctttgtacttaactaatatgggagtttcaggttcgctagcacctgcagttgctaaattaacagcattgtcctccatttggctgggaaacaattctctctcgggtagtttacctgacttcagttcactcaaacggctggaatcattgcactttgaagacaatcttttcagtggaagtattccttcatctttaggtggagtgccgcacttgcgagaactgttcttgcaaaacaataacctaactggccaagttccgagcaatcttcttcagaagcctggactgaacctaaggacttctggtaacccctttttgactcaaccgtcacgttgatt

SEQ ID NO: 108029 - DNA, 273 bp, Arabidopsis thaliana columbia
cttctcttactccaatttaaaaccgcatctgtttctcaccagctaactagagttttcatcgtggtttacctaataataacgcggcgacactaatattctgctttcaaatccccatcacttcttttcatccctacttacttctactcttatctcaattttaacatttctagcacctttttctgctcaaataactttatacacctttattatatctttttaacatttttcttctttatccttccccttaccttaatttacttcatacttttttta

SEQ ID NO: 108030 - DNA, 302 bp, Arabidopsis thaliana columbia
cacgtaaatccttcttatcctgtcttaccaacttttttgttcaaccacacccctgcaaacccaaaccctggtttcctacgtatgtgaaagcggggcattctctgatctaggtggtcgatcacaaggcacatccagctttaattctcgaaatcaaataactaggaacagacgatgagacgtcacttgatctttacatgggcattaccaaaattacttggaagcagaagtatgttcagtcagtgatctctctgtctcgattactgaaactgttcggactttatgttaccatgtttacagatttt

SEQ ID NO: 108031 - DNA, 321 bp, Arabidopsis thaliana columbia
ccacgcatccaaaaaaatcttatcccaaatcttctcctttttcttctactaagctcgtatcctcatccactgtctgcaatacaaaataagtgggggcccactctccttaacccccacaataacctccttttcaactccatcctactataactccgccttctgtttttcatgaccaaacacatttctttattcttatcaattaattaccaatttattttcctattccactaattaaatcatttatatctttaacttaactttttctttaaaataactacttatctaattcatcgatacctattaattttaaatatttttttc

SEQ ID NO: 108032 - DNA, 352 bp, Arabidopsis thaliana columbia
  unsure (1)..(352): unsure at all n locations
cccacgcgtccgaacatagttcgatactacgattataatctacatcttattcttagaatctcagaatttccaccctggccgggtttattctactgcggggactatccataacnactaatcatcatcattttcaacttgctaaattcatcaaagccctttataacaacgctcttctccagtctcgcttttcttcttcatactgatacccatatctaagccatgtcacttcttatacttatcatactctttattcatttacttcaccttaatatcacctccttatataaaccaccatatccaatacttgtatccaatccttcttttcctcactactcatttactttgattcact

SEQ ID NO: 108033 - DNA, 486 bp, Arabidopsis thaliana columbia
cggacgcgtgggttttctccggacaaaatgaaatcgttgtctctatctttgctataactgggatgttgtgggtttaactcaggtcagtacttatttcttcatattcataggcagcttctgggctcaaagttggggaatcttttgcaacagacataattagtcaggaagaacgagtttcaccgccgaaagagaaagctccatttattacatttgtactagggggacctggaagtggaaaaggtacacaatgcgaaaagattgttgagacttttggattacaacatctaagtgctggagatttgctcaggagagagatcgcaatgcacacggaaaatggggctatgattctgaacttgattaaagatgggaagattgttccttcagaagttacagtaaaattaatacagaaagagctggaatcgagtgacaatcgcaagtttctcattgatggttttccacgaactgaggagaaccgttgttgcattg

SEQ ID NO: 108034 - DNA, 460 bp, Arabidopsis thaliana columbia
gaaatggggagatctatggtgctaatctttgttgttgtactggcttttctagtggcggcgccggggccagaagtaacagccaggagagtatttattctgcgacaaaaagttctggaaccccaacattaactataccctatgggctcaaggcaaacatttctacgtcggagactggctttattttgtgttctatagagaccaacacaacattcttgaggtaaacatggctgattatgaaaaatgtatcttcaaccgcccaatacgtaattatacacgtggagctgggagagatattgatcctctatatgagacttgacgttattatcttcttgatggaagaggttgtagcatttaatgcatgaagcttgatgtttaatttgtgtacttttacttcttcagtctattttgactcacttctttttcagtataatatagtaattatttttatgttgtatttact

SEQ ID NO: 108035 - DNA, 479 bp, Arabidopsis thaliana columbia
cgtcaatataccaaccacatacaaaaatatttggtttggttctggttcctccaatgcactaggaaaaatccataaccaatatatgtttagaccatgcattgatcttgaataattgatgagagatacctgataaatgatcgatgcagagagggagttcaaatggagcgaggatgtcaaagttgaaagtgaagtgactgagatcgttcttgttcgccatggagaaaccacttggaatgctgccggaagaatccagggacaaattgaatcagaccttaacgaggttggactaaagcaggctgttgcaatcgctgagaggttgggaaaagaggaaagacctgtagctgtgtattcatcagacctcaaacgagccaaagacactgctcttatgatcgccaaaacttgtttctgtcccgaggtgatcgaagtacctgacttaaaggagaggcacgtgggtagtcttcaaggcctgtattggaaag

SEQ ID NO: 108036 - DNA, 479 bp, Arabidopsis thaliana columbia
aatcgaaataaataaaaaaattcaacccaaagcttttcttacatgagctcaaacaattggggagacagctaccaaagtgtaaggccacgtcataattttaccatactctgttcacggcctcttaaactcactggttcaattcgttaaacgtctagtattcaaaaacttcatactcacaattggcaccattacctacaccgtcatactcaattacatcaccatcacatttcgtcgaaccaatcttcgatggattctattttaacctcataggtattctcggttttagttgtaattcttactcattttttcttaagcttcaactgattttaaactctttttaaactatttgtgaaattttaattcactgatttaccaatctattgcttaatctacgattcgtttttttcttggtgacttgaatttttagaactatgtaactttatctgttactttttcactttttattttctgtgtttttt

SEQ ID NO: 108037 - DNA, 479 bp, Arabidopsis thaliana columbia
gtgatcttgctgcttctgttcgggttaaaagtcgtcgttgctggcttttgtaccatgatgcatttcaagacaagggcgtctcttacggattttttgacccagttgagaagaagaagacaaaggagatgaatctacccgagctatctaagtcttcaggtatcctttattccaaggatgggtggttactcatgaacgactctctttcactaattgccgacatgtactttttcaacccgtttacccgagagcgtatagacttgcctagaaacaggataatggaatcagtgcacacgaattttgctttctcttgtgctcctacgaagaaaagctgcttggtgtttggtataaataatatttcctcatctgtagcaatcaaaatcagcacttggcgtcctggtgcaactacatggctacatgaggactttcctaatctgtttacttcttacttcaggcgcttaggaaacatcttatactcagat

SEQ ID NO: 108038 - DNA, 479 bp, Arabidopsis thaliana columbia
caccgtcaatctttggagctaccggttcttcaccgttctttggttcgtcttcttcagccggttcaactccgtctctctttgcatcttcctcgtcaggcgcaacaacttcttcaccatccccgtttggagtatccaccttcaattcctcatctacatccaatacctcgaatgcctcagcttctccattctccgcttctaccgggttctctttcttgaaaagcactgcaagttcgaccaccagctccaccactccttctgctcctccacaaacggcttcatcttcgtcctccttctcatttggtacatccgccaattcaggttttaacctttcaaccggaagctccgcagcacctgcatctagcacatccggagcagtgttttccattgcaaccaccactactacttcttcttcgactccggctgctactagtgcaccagcttcttcagctcccgcttctacaatggctttcccttctttt

SEQ ID NO: 108039 - DNA, 445 bp, Arabidopsis thaliana columbia
atttgatttcaaactctcacacaaagagcttcagatttataagaccatgataatggctttaagacaaagattggcaagaagaaaaaactaaagagaaacgaccaaaatctcaagcaaacagtactaacttctgttgcaaaacagaagaagatgtcttgtaataatggaatgtcttttttcccttcaaatatcatgatccaaacctcttacgaagatgatcatcctcatcaatctccatctcttgctcctcttgttccctcttggtttctaacttaagaacttcaaggaattggttcggtttttgggaagagaacttccatggaaggggggtgtgatttataaacaggggacaatttgtatggaggagaggattatttagatgatgggtcacaaaagggagagaagaaaaggagattggacattgtacaagtggagacactttaga

SEQ ID NO: 108040 - DNA, 211 bp, Arabidopsis thaliana columbia
ctcagtttttgtttgtgtgtcggtgtcatcgccacttgacagtgcatatcttcgtgaggaaattcccttttttcaccatttccctatattattaatgggaatcatttgccacaaaatgggggaagtgaccctaaacaccaaaatcttccacgcttagcatgaagaagctgaaccctcttttgacacgaaaacaaacattcttcccaaaacc

SEQ ID NO: 108041 - DNA, 356 bp, Arabidopsis thaliana columbia
ggaagtaatgggagtatcttctgaaccactaggtataagctgatattcggagtcacgaagagaatggagaaagtgaggactcaaggcaagttattgaagtatctgctgaaccagtcgctaaagctgatattcagagtcacgaagagaatggagaaactgagggctcaaggcaagttattgaagtatctcccaagtccttctctgaagctgagccaactatagaaattttaactggagaagcacagggcatcatatgttctgaattccctagtgaacttgcagtagagactgaaagtgagaacctactacatcaaaagagcattgggtgaaacaaatgattgaaatttcgggagtca

SEQ ID NO: 108042 - DNA, 473 bp, Arabidopsis thaliana columbia
agcaaaaccaggttctgaaattggaaaactttttttgtcctgagggttcctggttgttgttgaagcagaggaatgggtggtgagagtaatgaaggaggagagatgggctttaagcatggagatgatgagagtggtgggatctctagagttggaattacatcaatgcccttgtatgcaaaggcagatcctttcttctcttctgcagattgggatccagttgtcaatgctgctgctgctggcttctccagctctcattaccatccttccatggcgatggataatccagggatgagttgcttctctcattaccaacccggttctgtttccggttttgcagcagacatgcctgctagtcttcttccgtttggtgattgtggtggtggtcaaattggtcattttcttggttcagacaagataggggaaagattgatcagagctggagaatcatctcatgaggatcatcattcaggttc

SEQ ID NO: 108043 - DNA, 357 bp, Arabidopsis thaliana columbia
ttggcattcacatggtttggcaggttacctgttagcaaggttaaaccttttggggacctgcgaaaggttctgaggaaaggaatatttctctctgctctacattttcgaattaatacgagatacaagagttcaaacccaccatttacgtctgttgaactggaccatagtgattcgggaagggaaggatgcactgttacgactcttactgtcaccgcagagccccaaaattggcaaaatgcagtcaaagttgctgtccaagaggttcgaagacttaaagaatttggggtcaccaggggtgaacttacacgttacatggatgctcttctaaaagatagtgaacatcttgcagctatgata

SEQ ID NO: 108044 - DNA, 319 bp, Arabidopsis thaliana columbia
ctttctcgtaacttgatcaaatctgcttacttttgagttatacaccttgaagagtctcgcggtaatgaagaaattctatcaaaatgctgatcatgagactgataaatccaaatcggcggagacgaagaagaggaagaacatgaggagattaggaggcggtggtctttctctccaaacttttgccaacatgaaatcggaaaataatcgctttaacccttctttgatcaaaaagcaaaaagagttctacatgaatgcaaagtatgtgtgcaagtttaggaagtcgttgtagcagcataacattcctgattagaatgtgact

SEQ ID NO: 108045 - DNA, 411 bp, Arabidopsis thaliana columbia
gctttgaggcgctcaatggtttactttcgtggacaacctgttggcactattgctgctgtggataattctgaagaaaaactcaactatgatcaggtgttcgtgagagattttgtaccaagtgctttagcattcttgatgaatggagagccagatatagttaaaaacttccttttgaagactcttcgtcttcaatcttgggagaaaaagattgatagattccagcttggtgagggtgttatgcctgctagcttcaaagttttccatgatcctgttagaaaccatgaaacgctgatagctgattttggcgagagtgctattggaagagtagcgccggttgattcagggttttggtggattatattgctcagagcctacacaaaatctacaggagactcttctcttgctgacatg

SEQ ID NO: 108046 - DNA, 197 bp, Arabidopsis thaliana columbia
aataagatgaactcaatgaatgacatgggtgttcatctcaggcaagactatggctgctatacggacattctccataaaaactgagctatgaccaatgcttcataagaaatactgtaccacgtgctataacaaagttgatgaatgtacacccagttatagataaaaactttcatttgaagactcttaagattgaatct

SEQ ID NO: 108047 - DNA, 165 bp, Arabidopsis thaliana columbia
ctagtttctgttcgcgagacgctaaacgacgctcttgccggtgcggcgaggtgtgaaggacgagatttagctgaaggtaagcttaaaacgcacagtgaggttgattcattcatggcgagactcgatcgtcatgtgaaagatgctgaggttttgattaagagtggt

SEQ ID NO: 108048 - DNA, 139 bp, Arabidopsis thaliana columbia
aatattttgaggttctctttctcgattgtgttatctgtctgacaagctagaataatcgctgagcgtgatcggatcgattagacaattatggtgaaggagacggagtcctacgatcacactaactttatgcctaccattt

SEQ ID NO: 108049 - DNA, 408 bp, Arabidopsis thaliana columbia
  unsure (1)..(408): unsure at all n locations
atctggatgggccgtgtctactacgtctttgtanttctttgtgtagtcttgatccttcttgtggtagtgtgtgccgaggtttgcctagtgctaacatacatgcacctgtgcgttgaagactataagtggtggtggaaatccttctttgcatctggatccgttgcaatctacatcttcatatactccataaactatctcgtcttcgacctcaaaagcttgagtggacccgtttcagcgactctttatctcggctactctctctttatggtcctggctatcatgctcgcaacaggtaccgttggtttcctctcttccttctggttcgtacactacttgttttcttcggtgaaacttgactaaggaatcagaccagaggcttattggcttaaagagattgtataacttttt

SEQ ID NO: 108050 - DNA, 371 bp, Arabidopsis thaliana columbia
cgttcgattatatttactcctaccctaagatacattttcctttttgtcgtttactcttttctatacattctgcagatctacaacggatccgtcaccgcttgttacggcgactaatcctcctccgttgatctattcaaaaaacgaacctaacgtaattcgtacatcctgatcgtagatggctcctactattcgaaaagctaatggtgctcttgtagaccaaacaagcatttgactctctaaaggatctagcaacatggcttcatattctagaagttaccattgtgtaagctacaagtgacgacttctattccttatgcttgaaatacattcttgggattttaatccttgacctctttctattgcggctttca

SEQ ID NO: 108051 - DNA, 219 bp, Arabidopsis thaliana columbia
tttgacaagacacggaaaatagatgatgatttggagattctggtgaaaagattgaagtcgcaacacgagaaagatggaaaattgaaagctgataataacaacaacaacgttgatgcgctttctgatgctcgatggtctatagagttaggtccgccttctgagatctctgagaagagaatctattgggaagaatcgagtcatgattatggagtgtttgtg

SEQ ID NO: 108052 - DNA, 138 bp, Arabidopsis thaliana columbia
atttcttttatagtgttgattctccgcaaatttctctcgagagaatctttcccaaaagacagtagatttgttggaagaaaagggctcttcttcttcttttttatgatcaggattgcagaatttatttaaattcttcct

SEQ ID NO: 108053 - DNA, 431 bp, Arabidopsis thaliana columbia
attaaacacacgtttattaagaatgctaggaaaagtccgaaacttcttgagaggttaagagagcggccaaagtaccaagtaagggaagatgaagagactcctaggaatggggccaaagctccagttgaatcatctggtactgttaggatagctagagatgaaagaagccaaggcgcgcctggatatagttttcaggggaataccgtcaaaaatgctggatgggactttaccgttggggggtcacagagtattggaacagttcgtgctttaaaacctcctcaagcaagggagaggcgccaagaagtttctcctaatcggatttcgcaaagaacaacaagacctagtggtaatcaatggtcatctgcgactgggagtacaatttctgaagcttctgaaggaaggtttgtcagaagacacccttttcagaatga

SEQ ID NO: 108054 - DNA, 305 bp, Arabidopsis thaliana columbia
  unsure (1)..(305): unsure at all n locations
gatgatttcgacgtcggtgatgttttcgccgttgtgaaaccattcgttttcacttttactggaaaacccgccgtctccgcgcgggcggaaggttcagtttttgggaanaaagttactgtcttggatggggacgctgagaaatctgcaaataggaagaggaagaatcagttccgagggattaggcatcgttctaggggaaaatgggctgctgagatacgtgatccaagggaaggagctagtatttgactttgttacaatcaatacaaatgattaatgttgtttagcttacattgctttatctcatg

SEQ ID NO: 108055 - DNA, 418 bp, Arabidopsis thaliana columbia
accgttccgagatctcctgcagtcgaccgcagcgcgcgcgaaaaaacaccagatcccaacgttacctttaaatcgtcctaaaaaatggagaaagcgatcgagagacatcgcgttcttcttgagcatctccaaccttcttcttcttcttcgcacaattacgaggcttctatatctggttctgcttgctcggctgcggacagcgctgcatatcagacgacctgtctctatggagatgatgttggcattgccgcggcacataagactccactatgcaagtccaaacgtggcaaattcaaggatacatatgccgatgatttgctcgcacctgttttgagggcattgattgagaagactaatctaaacccaagtgaaggatgttacatggttttgggtactggctttcctcctgtacctcaaa

SEQ ID NO: 108056 - DNA, 449 bp, Arabidopsis thaliana columbia
  unsure (1)..(449): unsure at all n locations
ccgacccacgcgnncgctcgtttcttcttttctccttcaaccttcttcttgcaccttcgttattttcataactcttgcttctccatcccttttcttttggtctcttcttcttactccgcctcgacatcgatccatgccagtgttattctagagagaattaaaacgtagtagcctaatcatcctcatccatggctattttaagtcaattctctccattgcatgtggtgttgactatggtagcacgttaggggcagattttgttacggagatattctcatccctcgccattgtcgtcaccttcttcttcgcagatccgctggagggagagaagagggtagcggctgcaagataccatgaacccctattgttaatgggctgaaaattaattattttgtgctgaaggttattttcgttttgggccctttattaatttggaaccggaatttttt

SEQ ID NO: 108057 - DNA, 289 bp, Arabidopsis thaliana columbia
tttccatacaaaaaattctccctagaaaagggctctttcaacgaacgaatggggaatcacaaacaaaatattccgaaatctgcttaatttaatcccattaataaaagtttaagtattatccacaacggcggttgattgttcttcaccacactcagcggttactcaatatgcgctcattccccatcaacctttcttgatccaaacaccacccttctcgtggcattcccaccgaaagttccattttttggaacctcttttaaattaaaaccttgtaaccttgtctcaacac

SEQ ID NO: 108058 - DNA, 196 bp, Arabidopsis thaliana columbia
gggacgcgtagacacagatgatgtgcagaaatttatggtaatgcagaggatacggttgttgagtattttcgcctaaactcggtgtgcgtcaggtctcttaacccaagactattactgaggcatcatcggttggtcctaatggggaggagaaactttaggggttcactggctcatagtatggactggggcatcataa

SEQ ID NO: 108059 - DNA, 146 bp, Arabidopsis thaliana columbia
ttgcgtaggatgccattattcattggttctctgacttaatgaaggacattgagtgtcttgagaacttatcttataccttccttcccgatgttgtcccatgctacctttgaagaaagtctgctaagacccggtggtcgttccctttg

SEQ ID NO: 108060 - DNA, 123 bp, Arabidopsis thaliana columbia
cgagctctcgtaagcctatgaatacgatcagaccggtcttccgtgcggaatatcctccattgatgaggtttttgtcaccgcacggatacgctattcatggagaagaaattgcgagatttaatt

SEQ ID NO: 108061 - DNA, 188 bp, Arabidopsis thaliana columbia
ctgcagcaccgtccgaattccggtcgaccacgcctccgccgtaaaattacccttgaaccaataccttggttgttccataaccaagccggggattaccagccaggccttacaatggcgaggacatggattacggttcaccctgttgaaggaccgtttgtctgaaatttcgccaacacacgccatttttt

SEQ ID NO: 108062 - DNA, 256 bp, Arabidopsis thaliana columbia
tcgaaaaaaaaaaaaacacaaaaagttgcaagggccgctttttatgggttttttcttcccttgcttgggccgaaagggttgggacctttgccccccggcatttgaaggtcttggaaggggccgtgtgacaatgagagaagactgtggtcaaaccaaaggggccataagggagaccatgggacggatccgaccgagtcacaagtacttgggtccattctttggagagacaccgagctcccttaccggagagttcccc

SEQ ID NO: 108063 - DNA, 198 bp, Arabidopsis thaliana columbia
aactttgcttgagagtataatattagggctaatcacagtatggatacgcttttcgttattgggttgggtataggacgggcatggcgacgacgatgagtttgatccaacaccatacaacgggggatactacattacggtgatctacgaccgttcgattccaccttacgatgagacttgttatcctctctcatctgatgt

SEQ ID NO: 108064 - DNA, 148 bp, Arabidopsis thaliana columbia
tcgagaaaacaagtagaaactttaaaacgagagagagagaatgtataatggcgacatcgggaacgtacgtgacggatgttccgttgaaaggatcggcggaataacactaatattagctgtctatttagtgataatcccatttttatta

SEQ ID NO: 108065 - DNA, 368 bp, Arabidopsis thaliana columbia
gaaaaggcgtaaagagctcagtgaggctttacataaccatccacagcgatcatgacggtggaaatggtagcgctgacagcggggacctggaaacactacaagagctggaagagcgagaaccatgtcttcgctgacgccattggccaccacatccaaaatgtcgttgttcacgaaggcgaacatgactctcacgggtctatcaggagttgggactacacatatgatggaaagaaggagatgttcaaagagaagagagagatagatgatgagaataaaacattgaccaaaagaggactggatggtcacgtgatggagcatctcaaagtatttgatatcatctacgaatttattcccaaatctgaggatag

SEQ ID NO: 108066 - DNA, 390 bp, Arabidopsis thaliana columbia
gcgaatttccgcggttgagcaccacacccttccgacagttctactacttttgtaggaacagacttattcttcttattattcttcgattggatctggaactgaacttaaattgggaagaattgggacatgctagacgaccgagtagttagatcaaggatgatgcaactcaattgataggtaacaccctaatggtatatctgaacaacattgtggatggttgtgtagatcgtattgcagctaagcttgaaatgatggagccttgctctagtgtcaaggagcgaattgcttatggtatgattaaagatgcagaagacaagggattgattactcctgggaagagcacactgattgaggctacctctggtaacaccggaattggtttagtcttca

SEQ ID NO: 108067 - DNA, 133 bp, Arabidopsis thaliana columbia
gcggaaagaggaggagaaagcggcgcaaagcgtggcggtgtctcgtggtgactttgggcgtggattcggcggtggaacatagagggggcccggcttcctaatcgtgggcaagaggccgttgaagacgtggtgg

SEQ ID NO: 108068 - DNA, 162 bp, Arabidopsis thaliana columbia
aagcagacgaatgcttcacatgatgcttgagcacccacgacatgggtccttagattgccatgaagggagacatgctacccgaccagaggaagggcaagggcgttccttagggatgcccaacccacgcttggaaggttaaaagtttcaagggttcacaaggtt

SEQ ID NO: 108069 - DNA, 450 bp, Arabidopsis thaliana columbia
  unsure (1)..(450): unsure at all n locations
ccggaancccggccgaccacgcgtccgaaagacatgattgctgctgtccacaaagaaaaagctgttaagaaacgatcctaagaaggttcacggctctcatgattcaggggctggagcttaacaacagcacaacactaaaaacgtcccagccaagaaggctgctttaagcagtgatgagtcatctcatgactcttcttcagatgatgcacctccacccaacaaggtctgacctgctactaacggaactgatgcaaagaagactaaagatgactcaccatcatctgaccatgagtctatatacgaggaagccgctgtcaccaagaagccccgagctgctgctacaaaacggctctgtaaaggccaagaaagagagactctctgacgatcactcatctttctaagacgaacctccgaacaaacctgctgttaagactcccacgccagctccta

SEQ ID NO: 108070 - DNA, 214 bp, Arabidopsis thaliana columbia
gggggttccagtttaaagcaaaattatccggaaactgcataattgaaaaccataataaaaagtttaagagatttccaaaagggggggggggggaacgtcacaaaattaaagggaaaaaagaaaagggctcaaaccccatcaaagttttaagaaccaaaaaaactccattagagagtcgatcataaccaaagtctcattatttggaacccttttt

SEQ ID NO: 108071 - DNA, 355 bp, Arabidopsis thaliana columbia
taaagatgaacatgaagctcaggtgcaatttgttcttgagaggggcattcccgccatttctgcagttatgggcacgacacgggtacctttccctggcagagtttttgacatagttcattgtgctcgatgtagagtgccatggcacattgaaggtggtaaacttctcctggagcttaacacgtgcattgagacccgctgcgaagttagtgtcttctgttccttctgtttataacactcagacctcctatgttgagagatgcacggttattactggtctgacacagcacttttattcggcaaatcccgataccttctctagaaaccaaatgcttaaaattttccacaccaaaatggc

SEQ ID NO: 108072 - DNA, 382 bp, Arabidopsis thaliana columbia
aaaaaaaaaaaaacacaaaaagtttcaatggccgtctccacaatggctctctcctcccctgccttcgccggaaaggctgtgaacctttcccccgcggcatctgaagtcctcggaagcggccgtgtgacaatgaggaagactgttgccaagccaaagggtccatcaggcagcccatggtacggatccgaccgagtcaagtacttgggtccattctctggcgagtcaccgagctaccttaccggagagttccccggagactacggatgggacaccgctggactttcagctgatcccgagacattcgcaaggaaccgtgagctagaagttatccacagcaggtgggctatgctcggagccctaagctgcgtcttccctgaacttt

SEQ ID NO: 108073 - DNA, 431 bp, Arabidopsis thaliana columbia
  unsure (1)..(431): unsure at all n locations
gccgtcggcacaagaagaagaagaagaagaatgtctcacaggaagtttgagcacccaagacatggttctcttggtttccttccaaggaagagagctaaccgtcacagaggaaaggtgaaggcgttccctaaggatgaccaaaccaagccttgcaagttcacagctttcatgggttacaaagctggtatgactcacattgtcagagaagtggagaaacctggatccaagcttcacaagaaggagacatgtgaggctgttaccatcattgagacacctgctatggtggttgttggagttgntgcctatgtgaagactcctacaggttttaggccttttaacactatcttgtcacaccatttcactaataaagtcaaagataataatctacctataactactccttaatttgtacaaataaaaatcttttccta

SEQ ID NO: 108074 - DNA, 174 bp, Arabidopsis thaliana columbia
  unsure (1)..(174): unsure at all n locations
gcggaaagaggaggagaaagcggcgcagagcgngtcggtgaccgtggtgacttcggacgtggattcggaggtggacgtggaggtggacgttatcgtgatcaagattcaaaactccgtaaaagacattaaagccttacctcccaaaatacaaaatattttccataaaccaaatta

SEQ ID NO: 108075 - DNA, 332 bp, Arabidopsis thaliana columbia
ggaaggataaagagagacgccatgggaagaagacctgcgaggtgttaccgtcagatcaagggtaagccatacccaaagtctcgctactgtcgtggtgtgccagatccaaaaatcaggatctacgatgttggtatgaagaggaagggtgttgatgcgtttccattctgtgtccatttggcgtcatgggagaaggagaatgtgtcaagtgaagcacttgaagctgcccttattgatttcaacatgtacatgttgaaatctgctcctaaagattctatcgatttgaggattatacctcattctctcacttgcttcataatcaacacgaatctttc

SEQ ID NO: 108076 - DNA, 149 bp, Arabidopsis thaliana columbia
tcagactcttatgatcaccaggatctactttctagacgaatcgcataccatgactactactgcctccagcgatttctggatgaacggatagccgtcatgtgagcctaccagggtcgaggtttcggactttggcacctaaccggttttga

SEQ ID NO: 108077 - DNA, 436 bp, Arabidopsis thaliana columbia
  unsure (1)..(436): unsure at all n locations
cgtnnccggcttattctcaaggctnnttctacttnngtcttatacctccatccatccattcatttggttggcttnctatcagatatcnntcgatgtagggnnngttttaaatcggatgcatcatngctttggtggatttcnccatcgcatgacaccccggatatattatttttccatctctnnctgatgtcannatcatccttcctcatatnnccgccttnntcttccttatgnggcgaaagctnnntcttccnnntcctcccttccggtcggtgcccnntctaatggccgnntctcatcatnnngacttcattgccnnngaattcttgggtactaccccatatcgtatccgccttacttttggtatcccaaatacgttaggcttcgaacaaggggatcatattttgcgggtgtatgggagcaacccgcatttgga

SEQ ID NO: 108078 - DNA, 140 bp, Arabidopsis thaliana columbia
acttttgtggttggttaagggcaaacagggtagggctctttctttttttttctttcccgattatacatctcttttaatcacaaaaccttttaaaaaccaagctacaacaaccaatgctttaaccaaaattagataaacta

SEQ ID NO: 108079 - DNA, 424 bp, Arabidopsis thaliana columbia
aaaaaaagaaaacacaaaaacaaagattataatggcttcctcaaccatggctttgtcctcccctgccttcgccggaaaggctgtgaagcctgccgcatcagatgtcctcggaagcggccgtgtgaccatgaggaagactgtcgccaagccaaagggtccatcaggcagcccatggtacggatctgaccgagtcaagtacttgggtccattctccggcgagcccccgagctaccttaccggtgagttccccggtgactacggatgggacaccgctggtctatccgccgacccagagaccttcgccaggaaccgtgagctagaagttatccacagcagatgggccatgctcggagccctaggctgcgttttccctgagctattggctaggaacggaagtgagttcggagaagcggtttggttcaag

SEQ ID NO: 108080 - DNA, 421 bp, Arabidopsis thaliana columbia
ataacgatgaactcgcttccgaggagatttgggaagaatcatggctatttggatcgagattatcgaaacggaagacgatctggttcagattccgatgaagaattgaagggattgagtcacgaagagtataggaggcagaaacggcttaagatgaggaaatcagccaagttctgcttttgggagaacacaccgagtccacctagagatcagaacgaggattccgatgagaacgccgacgagattcaggacaagaacggcggcgaaagagatgataattcgaatgggaaagaacggaaaggtaaatctgactcggaatctgaatctgatggtttgagatctaggaagaggaagtgtcagagctcgcggtatgatggacctagaaagaagtcctatgaccgccctagcgattgctaagggcgtg

SEQ ID NO: 108081 - DNA, 417 bp, Arabidopsis thaliana columbia
agcatctttctctgtcccctctatgataatggaagattatgggagattagaagcgagggttgcggccaaacccactaggcggagagtatccatctccaagataactaaattcaacgagaccgaacttgaaactcagagacgatgttggaatcgattctcggtccatcggagcttctgaatcattatgatcaggtgcatcaaccggtagctcaactgataaacttcaacagtatttccaaaatctcgattacgataagaagtacggattccttgaagatattgattacttcacaatacctaaaggtttatatgaagagacgattcgtttgatttcgaaattgaaagaggaaccagattggatgcttgagtttaggttcaaagcttatgctaagtttctgaaactagaagaacctaaat

SEQ ID NO: 108082 - DNA, 342 bp, Arabidopsis thaliana columbia
gggtcttctgttttgtctatttttgtttggcgcattatctccaattgtgaacgttaattatggaggaattagtggtgctttttatgggaactatacatctaattatattactgaccagatttacagtcagcatagggatagagatttggatacatctcgcagtggtgctggtactgaggttatttatagtaatggaatgcattgcaggaaagactgtgatactcactgtagcagatagatatgtggctcagatagttctgtcactcttcataatggctaggagtctgtagggggatcactcttagttgcgaggaatgacacgcttgacaggatagatgggac

SEQ ID NO: 108083 - DNA, 324 bp, Arabidopsis thaliana columbia
gctttaccttcgtgcttaaagactggagctttaatggttccggccactggatttaatttttccggcagtcttatgaagtcagacaggggcttcgccgttccgacaaagttacagagtactcgaaaaggtgatcgagagagattgagagttcaagctattttcagctatcattctgtgatccagacatgtacacatctgatctttcaatcgatctcagatccaccgtgttggaaacgatatcaagacatctctgtgttgggtcacaggccattagaagaatcagctttcttctttttcaatgctctttaaaccaaaagccataat

SEQ ID NO: 108084 - DNA, 231 bp, Arabidopsis thaliana columbia
  unsure (1)..(231): unsure at all n locations
tcgcgagactaacacattttatttctatcttaatgcanttgcttattgagagcaatggaaaagtggggactgacaagaattacgctggtgattacatggatgtagactctatccacaaaacaaatgagaacttccgtatttagaatgacaacaagggacgattacgactccactccataaaagatgaggacgctaagttaaagctttcgcaaagtaatatcgatacatttt

SEQ ID NO: 108085 - DNA, 518 bp, Arabidopsis thaliana columbia
gattacgccgctcatttttagggtttcagatataggcatattctcacatttgcaaacatgacgactcagatcagcaagaagagaaagtttgtagcggacggtgtgttctacgctgaattgaatgaggttcttacaagagagctagcagaggatggttactctggtgttgaggttagggttactcctatgaggactgagattatcatcagagctacacgtactcagaatgttctcggtgagaaggggaggagaattagggaattgacttcccttgttcagaagagattcaagtttccagttgacagtgttgagctttatgccgagaaggttaacaacagaggtctctgtgccatcgctcacgctgagtctttacgttacaagcttcttggtggtctcgctgttcgtagggcttgctatggtgtgttgaggtttgttatggagagtggagcttagggatgccaggttattgtgaggggaaagctttatgcttgctcgacccaaatttatgaatttcaaag

SEQ ID NO: 108086 - DNA, 409 bp, Arabidopsis thaliana columbia
  unsure (1)..(409): unsure at all n locations
ttaaccctaatttttgccgaactcgtcttctgctgaattccctagatctacagatctcccgaatctcccagggagataatttgaagatggtgtctgacgctagcaagaagaaggcagctcagaagaaagctgctgccgccgctaaaagaggtggtaaagctgctgctccatccaaatccgccgctacttcttccaacggtgttgatagcttgtcaagcggtgtcgatgctcttcaaatttctgatcggacttgtaccggagttctctgatctcatactcaatctagagatatccgaatagaatttctgaacgggacgttctatctttccgacctcatcgnctattacttgacaggatctgatcggtgttgggtacgtatgacttaggccttttcctctgcctcactttc

SEQ ID NO: 108087 - DNA, 349 bp, Arabidopsis thaliana columbia
agggaatttaacatatcgatcgacgttacgagtctggattcttatataaaagcgcattctttattgacacggtcgggaacaaagaccggcgcgccctatatataaggtccaattatcagaaaacgttcataccttacatggacccaagaggtgaagggccgatcattacttatggtgaatgtggttgacaatggctcggagtcacacgcgccgaactttcttcaaccgcacactgattgtccagcgcgagcagatattatgaatggtttaaagacggcttagaaggaactgctctacaaatcccaaacaacatgagcgctacttacaagcttgctgggaacaaaattac

SEQ ID NO: 108088 - DNA, 452 bp, Arabidopsis thaliana columbia
cttttgtctccgtctctctgtctctcatggttactcttcctctcccgactcaaacttctacggtctctctccctaaaccgtggctctccaattccttctccttcccactccgtaacgcaacactctcaacaacaacaaaccgccggaactttctcaccaccggaaggatcatagctcgggcatataaagaggtggtagagcacgacggaaagacgactgaattggaagtcgtaccagacgagacgattctatctaaggctcttgactctggccttgacgttccctacgactgtaatctcgttgtttgtatgacttgtacagcgaaacctgtgaccgtttcgttggattattgtttttttacgctcttctttgtttttgttgatctgttttatttattattatatttttttatattttttttttaatttctattttcttttttttacattttt

SEQ ID NO: 108089 - DNA, 173 bp, Arabidopsis thaliana columbia
gtgaagctcacaatggcgaggattatggttcacgaattgagggagaactctaacagcgatcgtcaaaaccagctgagggatcgcataacttagctcgctctcttccttgtctcttaagtaaccgtaggttcttcaaacctcctctcaaaaatcaaatcttatccattattctt

SEQ ID NO: 108090 - DNA, 178 bp, Arabidopsis thaliana columbia
tcattactggtctggttcactttctctctctttggatactctctaaatgaaggcgaaaaaccggaatttaggcaggggtctatggggatttttgggattggccctttttaacaaaaccaataacggtggcgggccgaatatttcgggggggggcttggttaaccttggggacttcaac

SEQ ID NO: 108091 - DNA, 164 bp, Arabidopsis thaliana columbia
cattgctttctcaatctaagggtttccatgaacaagggactaaaatgagagctcttctctttggactatcactcaattgcttttggtctcaaacagcacttttatggaagaagggagaggttcgcaactgtgaccaaactccattttgtaaacgcgctcgatct

SEQ ID NO: 108092 - DNA, 415 bp, Arabidopsis thaliana columbia
caaacctcagtagccatggaaggcgaagagattaatgattatagaaacgaggaagatgatttcaatacaccacaacaactacgggtgaggcaaatgaaagggaaaaaaatagcaacggaaacagaggatgaaaacgaagaaaacatgagagttactcttaaagttacgcatgtcgtcgagagacccgatagaaattttatgatcgttggctattttcttacaggatacgatccttgtaatgtagatacaaaaacagtgatgtgagatgatgaatctcccaagttaactgtttacaagcataaggatgattctatgaagaggattaagtatgttatatgtaacaatgtatcattgagctgtgtatattattctatatattatactattcttatatagaatatgttcttaataatat

SEQ ID NO: 108093 - DNA, 328 bp, Arabidopsis thaliana columbia
gcgagcgaacgacctatattatttttttttttttttagaatttcttctacaaaaaacgatgctcaatttatgagttagggggtgacaatatcatctactaaccaggatctttccataatcaagtttttttattttatgaataatctcaataatcgtaataataaataactaacatattctcgtcattaactatatctataagaataaatcttcttcattatataactttaatttttttatgatgtaccaaattataacatgattactacaacaattactaagtgtaccttgacaccactttttacctattattatcgcatatgtacac

SEQ ID NO: 108094 - DNA, 411 bp, Arabidopsis thaliana columbia
atgaaatctgttggtgtaaccccaaatactcatacatggtcatcattaatcagtgcatgtgccaatgcaggtttagtagagcaggcaaatcacctatttgaagaaatgcttgcatctggctgcgagcctaattctcaatgtttcaacatcctactgcatgcttgcgttgaagcttgccagtatgacagagcttttcgtctttttcaatcttggaaaggaagctccgttaatgaatccttatatgcagatgacatagttagtaaaggtcgcacttccagcccaaatatattgaaaaataatggtcctgggtctttggtgaatcgcaattctaattcaccttatatccaagcttcaaagagattttgcttcaagccaacaactgctacatataatatactcttgaaagcctgt

SEQ ID NO: 108095 - DNA, 355 bp, Arabidopsis thaliana columbia
gcatattctcagacagcaagtttctccaagctgagtctctgcagcagcttgttaacctctcttataagagcatccgggaaagatgaagctagttcggtcttttgcctggagcttctgattgcggtaacgctgaacaaccgagacagaatcctactgatttggccaacagtttatgagcatatcttgggtatagttcaattaacattaacaccatgcacgcttgttgaaaaggctgtttttggtgtactgaagatttgccagagattattaccatacaaggaaaacctaacagatgaacttctgaaatcactccaactggttctcaagctgaaagcaaaagtggctgatgcatact

SEQ ID NO: 108096 - DNA, 386 bp, Arabidopsis thaliana columbia
gatcttccagagagagaaatccctgatttcatggctctgtatttcgatgaaccggacatacaaggccatgagtacggccctgatgatcctcgcgtcacggaagccgtctcaaaggtcgataaaatgatcggtaggatcatcatgggattggagaagaggaaggtttttagtgatgttcatgtgatattgcttggtgatcacggaatggttactaactgtgacaagaaagtgatttacattgatgatttagccgatgggatcaagatacccgcggttggtatccaagattatagtccggtgctagcgatgaatccgcgctggggcaaagatgtcaagaatccagtacagaagaatgcagaactcgtaaggaagatgaacgaaagctt

SEQ ID NO: 108097 - DNA, 476 bp, Arabidopsis thaliana columbia
ctgatctgagaaaaaaaatggttatggtttgttaatagagtggatctcgacgggaaaccgatacaaccgttgacagtatggatgatcggcgccggaggtttcatcggttcacatctttgtgaaaagctcttgaccgtgacgccacataaggtgcttgcgctcgatgtttacaacgataagatcaaacacttgctttagcctgataccgttgaatggagtggttctatccagttttatcttattaatattttatcttgatttcgtgacttgaaggttttgttaagtaggtgtgattctattattaatatttttcttagtttctgtactaatgttttatttcaatttaatgctacttatagatacttttcttttgtattgttttttgtttctatttttcatgttttattaatgctttttttttatgtactttttacgtcttaaatatttttttttatattctctatattgtgtgtatt

SEQ ID NO: 108098 - DNA, 188 bp, Arabidopsis thaliana columbia
aggttaaaaccaaactttgatgaaaagatttgtttggttcaaaaattaaaggccaaccacaaagccggatttttaaattggggagaaataaatactccatttgacttaaacttaaaaatgggcaaaaagagagagattttttcctagctgggagaggggggggggaaccaccacttagaaaattttag

SEQ ID NO: 108099 - DNA, 426 bp, Arabidopsis thaliana columbia
atctctcataataaaaccatggatccttacaggtttcgtccagctagttcttacaactctcccgggttgacctccaactatggtgctgctgtgtgtaacatcaactacttcatgaccgttagacccagaggtcctatccttcttaaggattaccatctcgtttagaagctggtcattttcaacagggaacacgattccacagcgtttgactcatgccagatgaaccagtgctaaagactcatttgtggccactcattatatctttcacctaacctgcactgactttatgcaagctgcctgattacacactcctgatattgtccgggactccacccttatccatgttcgtgtatatccactgacctttaaagacccatttggttgtagatgctagttctacaccataaatgggaactttcatcttgt

SEQ ID NO: 108100 - DNA, 213 bp, Arabidopsis thaliana columbia
aacctacaagatcactgtgttccacatacgagtcttttttttatgttaatactattttaccttatcggacttctttaaaaaccacccggggctctcctacaacacaatcccaaaatctataaggatcttttatttattgcactaactttatttcatgattttcctttctacagtgtaattaaagttatcttattacaatcccaaaaatttttt

SEQ ID NO: 108101 - DNA, 331 bp, Arabidopsis thaliana columbia
caaaattaaacctccaaatcgtccaagatatttcttttctaggtctttaatgacctttcttgagggggaacacaattattacggaatgctaaatctccaacttggtatcaggtatactgtaggaaaaattacaccatttccgatgctagaagtgcgtgcttctgacttttgtaagaacgctagaacaaagatgttcttccctatagacttttccaattttacccctctcacacaaatctgtcgacttcttctggaaagactattgttccatggttttcatgaatttaaggcaaatgttcaagttagatgctgcagagtacatgttgtctat

SEQ ID NO: 108102 - DNA, 479 bp, Arabidopsis thaliana columbia
  unsure (1)..(479): unsure at all n locations
tccgggtcgggaaggcgtccgagacacattgttactctaaccgtcactctcgctttcggcgatccacctaaaaatatctcnatgggtcttgataccggaagcgagcggtcatggcttcactgcaagaaatctccaaacttaggatccgtttttaacccggtttcatcctctacgtactcccctgtgccttgctcctcaccaatttgcaggacccgtacccgggatttacccatacccgcttcatgcgatccgaagacccatctctgccacgtggctatctcctacgctgacgctacatcaatcgaaggcaacttggctcatgagacgttcgtaatcgggtctgtgacccgacccggtactttattcgggtgtatggactcaggtntaagctccaattcggaggaagatgctaaatcgaccggtttaatgggaatgaacccgggatctttatcttttgttaaccagctgggtttctcaaa

SEQ ID NO: 108103 - DNA, 402 bp, Arabidopsis thaliana columbia
ttactgagctaacatcatcgggaggggaacaatataataaggggagggaattaatcttaattgttttataaagcaaatagtacaaagctgtaagtctctctttcaccatctaaacattctacaatttacttatttcattcatagggctttagtgagagattgttgatatattaaaagattaatagaatgtcccattttaatcagcccctttaacatttctagtaaagattaatacatatagatttttgctgccttatatactaatgcttccaacattcagcttctttgttattaccctttattaatatctttgttttatacattttttattcatcatattcttttactaacctttattaattttatatagttcaatattccaatttgttttttttttttatt

SEQ ID NO: 108104 - DNA, 404 bp, Arabidopsis thaliana columbia
actggacgtgattagtacgagaatgcaaatggtcggatggaaagatgcttacgctattgtaacaggcgaagggagaagcacagctccacttgaatacactggtatggccgatgcatttagaaaaacagttcgtcatgaaggctttggagcattgtacaagggtttggttcgcaattcactgaatgtcataccatcgattgcgattgcattcatgacatatgagatcgtgacagacgtttttggaatcgagattaagatactcagactgggtcatttgatatctcaatgcgcgacatgaaagcgcacttctatttctggagccagaagagaatgtcaacacagttagtgcggctttatgtatctactttcaacatccggtgggaaggataaatggctataggggc

SEQ ID NO: 108105 - DNA, 168 bp, Arabidopsis thaliana columbia
  unsure (1)..(168): unsure at all n locations
atacataagaatactatttaaacatcgcacacatttcatgttatcttccattgatcaaancnaacaggggccttttttataatatatctcgagcaagcaatcaattcccttcacacttatcttcatatattttttaaaaacttctctatcttataacattcactctaa

SEQ ID NO: 108106 - DNA, 329 bp, Arabidopsis thaliana columbia
accacgcgtacgatttccttgattctgaacgccatcactttttgctcctaatcgtctacatatgggggttgactcactccaactacgaagagtctgatttactatgtcatatcccgtctgcatcaggataccagccaactgtgactcatgatctaggtgcttttgaagagcgacttactaccaccaagagagggtacatcaccttagttcaagccatctatgtaacctgtcgatgattcgactgatcctgctgctgatacaactcctgctcacttcgactccactactgcactctcaagacagatttcttagcaatggatctaccctgc

SEQ ID NO: 108107 - DNA, 351 bp, Arabidopsis thaliana columbia
gacaccaacaaatttgcaggattcggtcctgcttttcttttttccgaaaagcttcaaaaagacatatttgcgcagtccaattctatgcatgtgcaggccaatgtggagtcaaagagtacagcagctttttttggatctcctggcctgcataacgcaattttgcagtcaccgcaaaatacgtcatctcagccatggtcaagtgggaaaagcgtctcacctccagattttgtatctggtccctttccttctatgagagatactcagcataagcaatctgttcagtcttgtactggatatgttaacccctctatgagcatcaaagataaatctgtacaagttattgagactggt

SEQ ID NO: 108108 - DNA, 230 bp, Arabidopsis thaliana columbia
ctgaaagccttggctgaagactgtaaccagccttattatttcaagctagagaaggctctctgcgctgagcacgaattcaggtcgctcacagatccaagtaccaaaacccggggcgactgggctagcacctgaatgatggactctgagggtactgccaggaaaggcgttgaaggctcatgtatggctgtcaaggactttaccagaggggacaacatgcctcaaagacatgc

SEQ ID NO: 108109 - DNA, 381 bp, Arabidopsis thaliana columbia
ggtcaaacaagactccgggtaacaactctttctagaagatgggtaatgggaactgaaagcttacaggagttgagcaatggttttgaccaagaagcagctgctgtagtaatggcacgacttatttcctccaaaatggagactcagcctgagtttaatccccaaaggtgggtcgataaagcgttgataaatctatgcacctggtttggagattaccagaaaggcaatccttcttcctttagcttatcttctcagttatcaattttcccgcagtttgtgtttcacttgcgccgatctcagtttgtccaggtctttaacaacagcccagacgagacagcatattttcgaatgatattgtacagagagaacggttctaattcagtc

SEQ ID NO: 108110 - DNA, 364 bp, Arabidopsis thaliana columbia
cggacgcgtggggagagaacggatcgagtcagggacgttcgagactcagcaaggttatactatcccagaggtacccgccgttcgatcagctccgttgaataacttcaccggtgaaaagaatgaccttggaccgaagaagaagaaacagaagaaaaatgtgtcaggtctcaagcgaagcaatcaatttggtccgtcggatccggagtcggagaaattattggccggtatgttgaatacctgtagtcagatcttggtgaagctaatgaagcataaatgggcgtgggtgttcaacactcctgttgatgtggttggtttagggcttcatgattatcatcaggttgtgaagaaacctatggatctgggt

SEQ ID NO: 108111 - DNA, 220 bp, Arabidopsis thaliana columbia
ttttaagaaaagaaggctttcattttatttatttgtatagccatgataacacacattcgtggaggaatgaaaaaaaggaattcgaaaaaaagaagcgttctatgggtttggcaccaaattaagattttgcaaaatacaaataattacaacatagagaaatctctcccaaaataggttaataacctaacgcttaccggtttgaatattctcttttttcttt

SEQ ID NO: 108112 - DNA, 350 bp, Arabidopsis thaliana columbia
cgaagggagattaagaacggttcttgatgtctgatgctgagttgcgagttttggagcttaccttctcgcgtctgatataatgacaatgtcactagcccctaatgatgttcatcagaaccaaatccagtttgcgttagaaagaggaatccctgcttatcttggtgttttaggtaccaaaaggcttccttacccgagcagatcattcgagtttgctcattgttctcgatgtaggattgattggcttcaaagagacggacttcttttttcttgagctcgatcgggtactaagaccgggaggttattttgcgtattctgtcttctgaagcttacccacaaaatgtaaagtattt

SEQ ID NO: 108113 - DNA, 281 bp, Arabidopsis thaliana columbia
  unsure (1)..(281): unsure at all n locations
aaattccccggcgacccacgcatcctttcattaacttttctaataaannttgaatgttcttactctcttaaacaattcnttactatcgagatcttatttaattgccttaggtcaacaccatttttacttcttatnaattctttctttctacaattccttaatcttcttactcaccttcaaaaatttccctacctcctattcctttattaatttcctcatcttctaccatttcttcaaatccctattattatttatcaccatcttctccaccatttattcta

SEQ ID NO: 108114 - DNA, 458 bp, Arabidopsis thaliana columbia
gaaaacgttttgatcgatctggacaatcaaagtgcaaatggagaacccattgtgaagctttgtgattttgatagagctgttccgcttaggtctcacttgcacgggtgctgtattgcccatgtgggaatacctcctcctaatatctgtgtcggcacaccacgttggatgtcccctgaagtcttcagagcaatgcacgaacaaaacttttatggacttgaagtggatatctggtcatttggttgcttaatcttcgagttgttgacactacaaaatccttattttgatttatctgagcttcagattcatgaatcgctacagaatggcaaaagaccaaagctaccaaagaaactagagacactgatctctgaaacagaggaagaagaatcaacgaacaagctctctgaagtgtttgatctaaccgaatctgacttagacacaatgagatttctgattgacgt

SEQ ID NO: 108115 - DNA, 433 bp, Arabidopsis thaliana columbia
gggattttggaagtcaacagcggaacgccatgttttgtgggagagtggttgtcctgtctgtcctatctctgctgctgtatccatttctgtgggcttggactgtaattggtacacaatggtttacaaagtctaaaacttgtttacctgaagaaggccagaaatggggctttcttatttggttgatgtttagctactgtggcctcctctgcattgctttcatctgtgtcggaaagtggttgacacgaagacaggtacacttattacgtgctcagcaaggaatttcgattaagagttcgggatttaagtgacatgattagggtacctgactggcatttcaaacctgatgccaagaaagagaggcataagtcaagatgctggtacatattattccggactttacttgatccaagccaggtaagttggtcatttattt

SEQ ID NO: 108116 - DNA, 362 bp, Arabidopsis thaliana columbia
attaatgttcctctgcccattttcaagaaattagaattcatttttctctaagttcttgatcgtcgccatgaacgatcttatctcaagctcattcaagagatacacagacttaaaccaccaggtccaactcgatgacatcgagtctcaaaatgtttctcttgattcaggcaacctcgatgagttctttggatatgtcgagagtgttaaagaagacatgaaagctgtcgacgagattcataagcgtctccaagatgctaatgaagagtccaagaccgtacatgattccaaggccgtgaagaagcttcggctcgtatggatgcgagtgtacagaggccttgaaacgtgtcaagatgataaagact

SEQ ID NO: 108117 - DNA, 357 bp, Arabidopsis thaliana columbia
ctcactctggctattacgtatgcatttttgttcttggtcgtcgctcttcttacatcgatgggaaatgccaagacgggcggtcgggatactactcttaccttgtcactcacaatctccttatctctcacgcatacacacttgaagcttaccggaaatgctaaaattgtaaatgttttaagatcggaattgcacatattcctgctaagttcgaatcacatgaccttgcttattcacaagacgttgcgttcatctaccgtgctcttaactttatattgtcatggcatctatacacaactacatttgtagatcatccacagttcatgaaagacattcttgtacatacattgccttaattta

SEQ ID NO: 108118 - DNA, 216 bp, Arabidopsis thaliana columbia
  unsure (1)..(216): unsure at all n locations
caggagaatgcgagaaagcgtttattccatcgtagtggaacgatctgatattggggaaacgatagagaagatcgagaagagaggctcaagggttactttgatcaaagctgttaatgctntctcctaatgagtgtatgtgtgttgggatcatatgcacgtttcatgtgcgaggcagaggatgatgatgatgatgatgaagacgaagaagaagaagaa

SEQ ID NO: 108119 - DNA, 461 bp, Arabidopsis thaliana columbia
ctttcgcggttgagattttatgatctttccgaacgaaatcaagcattccgacgtccgtacactatccggcgctgcttaaaccggctgtcgtcgcctgtctgatctgttatcttctctactctccggtgtcgttgagagcttggtcaaaagacctcttgataagcaaaatatgggagaaatgattgtttcaatggaccaagatatccgactggatacaacacgagcaagattgtcaaaccttctcaagaggcatcgagaattgtcagaccgtcttactagggattctgataagacaatgttagatcgcttaaacaaagaatttgaagctgcacggagatcccaaagtcaggaagtcttcttagatggggaagaggggaatgatggttttgtggccacattaagggaacgggtgcatatggaagctgacagaaaggcagattacggttatgcaggtttttcac

SEQ ID NO: 108120 - DNA, 461 bp, Arabidopsis thaliana columbia
gaaaagaaacgatgaggaagagatgaaacgcggtggaacaagacggaagcggttgttcgggaagacgattctcttatcatctgtggttttcttcatcggttttggtttgttgttgctcacgctccgttccgtagatcctaattcgtctttcatcgacgacgacgatgacgagtccgaatccgaggaggcttcgagatggagcaactcttcttcgattggagaggctatggtcgatggagctaaactctgcgcgacggtagaagaaatgggaagcgaattcgatggtggtttcgtagatcaaagtctcagagttcgagatgttatccatcgccattttcaaatcaatggagcttcagcgatccgtgagctgcctccggagcaattttgtagacatggttatgttctagggaaaacagcagaagctggatttggaaacgaaatgtataagatcttaacatcag

SEQ ID NO: 108121 - DNA, 385 bp, Arabidopsis thaliana columbia
tatgcatcgggcgttgactgattcggctgatgagttgaggagagttgcggggattgttgaagaagaaggaaatgaggggggtagggttttacctgtttatgtgtttgatttggatatcaatacgcctttgttgcttgatcggtatcatcagtctgttgcttttagagatatggtgattgctgttagaactagaggaactcaaacggttagtgattatacttgcaacgggcgtcatgtgtttgttcatacgagagacttagaacgacctctcgttggttccattctgcagagtatgtggggtgtatcttctactcatttgacatggagcccgagacataacacaactctagttgattatacatggagcattgggcaaacaccggtt

SEQ ID NO: 108122 - DNA, 462 bp, Arabidopsis thaliana columbia
caagcttgctgctgttatctttttgttcaaccaagatggatcaagacaaaggcttgctgttcttgtgattttcgctaccataatttacttataccaaactggagctcttgcaccgtttgtgcgatggctctcacaaggtatgcatagagcagcagtaccacctgctcgaccacatagacctgctgttagagctgataatgatcccgcagctgcagttccactaaacgaaaatgctgttctcgagggagaagagaatgaagctgataacggtaaccgagcaagagcaaatgcaaatgaaaatgaaaacgttgacgcaggaaaccaagggaatcaatggtgggggatagtgaaagagattcagatgatagtgttcggcttcataacttcattactccctggttttcacaacatagagtagaagtagactcttttctgcatactttcattttctgcaactcaaaa

SEQ ID NO: 108123 - DNA, 503 bp, Arabidopsis thaliana columbia
  unsure (1)..(503): unsure at all n locations
cgnntccgggaagggggctataagnnagttatgtnnattctgtnntcgtgatcnncaagtcnnntccgtaaggagccccggagttnnggtaatattanttttattannagagatctgtgacagaantnncaatttgatcacccaaagcnnacttcnnacgagacnnattttcangnncctttgtgtccnnncattctanttcttgcannaagtggcnncgttgatccccttctggnntcagtcgaaaagggctatgtggtttgggtgcagtaccgaccacttgattgaagcagctttcagggaggcccatttgataaacctgannatggaatgggcttcttaaccgatatagcaaagtttaattgttgtgacccttttgttcacaaagctgcaagagaagatcccttcgggtggagaaaagttaaagttcaactaattgtttaatgtcannaaaatctcttccgagtcccttgaagtgatgaaagagcttaaacaaaagtttt

SEQ ID NO: 108124 - DNA, 224 bp, Arabidopsis thaliana columbia
  unsure (1)..(224): unsure at all n locations
actaaaagactttttatagggtttattgtccaaatttgattcgggtaagagccttanaancaacacatacatacaaattacaagaaactagctacaacgtgatgatgataatgggactgaacatcacaatgagttttcttggttttcaaattcttaacccgacttgaagagcagcacagctttctggtcggggtagaagctatcgaaatcgccatcttcacgtt

SEQ ID NO: 108125 - DNA, 420 bp, Arabidopsis thaliana columbia
atttcagattcaatagtgcggtattgagagggaagaactgggagctcccactgccaccattggggaagggctggtttgagaatgtgtatatggacggtgagatcagagtggccaaggacatcagaggagactacttaattgttgatcgtgctccttataactggactgaatcatttgtataatttgtgatgctttttgcttcttgtataagttatacaccatttctgtctctctcctttataattgggcctcaaatagatgatgcaggaatatagggaggaggaggaagaggaatttgaaggatcattcaaagtgtcatccttgagtttatttagggtttttgtctgtgtttgttacaaacacaccacccacattttctatgcccttttttaatgttattttcacaatccatgacttaaa

SEQ ID NO: 108126 - DNA, 244 bp, Arabidopsis thaliana columbia
gtgaaccgcttgttagcgaagaagaagaagaagaagctactgaagttttactagtggagaagacgaagttgtgtaagagacgaggagacgaagaaaaaacggaagagagaagagacgatttgttgttactagctttaacgccgatggtacgatcgaaatctcaaggaactactcggcgcgtcacttccacgccaccttctgttgacgtggagaaaccggtaccaaacggagatctctacatggg

SEQ ID NO: 108127 - DNA, 187 bp, Arabidopsis thaliana columbia
  unsure (1)..(187): unsure at all n locations
ccctcccctttanncggngacnnacaaagggcggctttttggagatcnctgagcctctccaccaaggttttcaattatgcagtttccggataattttgcttgaaacttatttaggagttgcgtttcatataaaaaattttaaaaaaaaaacttttaaaaaatgaatatgaaaaaaacattgaagatt

SEQ ID NO: 108128 - DNA, 161 bp, Arabidopsis thaliana columbia
  unsure (1)..(161): unsure at all n locations
aaaagagcaagccccncnnccaanncaaccgcaaccanncgagacgaanancaccagaaancgaagngcccancaaccccacaacaangcaccaaanngcccacnncgcnanccgacgcagngggncacnangncaccncagagaccacaccacaacaaac

SEQ ID NO: 108129 - DNA, 328 bp, Arabidopsis thaliana columbia
  unsure (1)..(328): unsure at all n locations
cgacaaggcaggaacagagnnacatgtcgcgtcatttttccgcnaagcnnnnagccggcgagaggttggcagcncccggaggcccacacccncancgacggngaacccgccacnggangncnngncgannnaggccnnnacnncnnccacaacnacgccaaannnagacagacncaaggnnccggnnncggnccanncnncnancnccccaaaanggaacanncnagggaagcaaagananggaacagngnnnnngagcgcgccgagaaganggcngggaaagagagaggaagcannagagcaaccgngcccancgagacccncccgg

SEQ ID NO: 108130 - DNA, 206 bp, Arabidopsis thaliana columbia
  unsure (1)..(206): unsure at all n locations
aaagcatcagttcccanncnccgcaatcccctcccatttttcaaaaaaagcaganaaaaacaganagnattttagagagagagagagacccacatatagagcttctcgtgaagcaacagtgaagaaaaggaaagtgaatcgccatggatgatcgccttctcttaagccgtataatccgctttcttcttcttgcttgtctccatagt

SEQ ID NO: 108131 - DNA, 350 bp, Arabidopsis thaliana columbia
  unsure (1)..(350): unsure at all n locations
agaagatcaaggggaccaaccccggagtttcctcggtttgagacgaaangacncnagnggggtgggaatttatgaaagacaagcgcgaccctcccttccctggagctggatatcaaatactttgatcttggactgcctaaccgcgatttcactgatgataaggtgactatagagactgctgaagctactttaaagtataatggggctattaagtgtgcgacgattactccggatgaagctcgtcgtagggagctcggcttaaagaaaatgcggaggagtcctaatggaactatgaggaacactacaaacggcacagttttcacggaacctatcatttgcagaaacattcc

SEQ ID NO: 108132 - DNA, 165 bp, Arabidopsis thaliana columbia
  unsure (1)..(165): unsure at all n locations
gcgacccacgcgccganccgcgctcttactaaacccatttcgtctcntttcgccggagancancaacgggcgggaaagcctcggccaccggcgctccaccccccncnncnccaaccccnccnnaggnnccagcnccgggnccanggcaaggagcngccannaagc

SEQ ID NO: 108133 - DNA, 435 bp, Arabidopsis thaliana columbia
  unsure (1)..(435): unsure at all n locations
agagaaacgaatctttcagngnaaagattcctcgttttatganagccgnaccacaaggggcgggccagaagggcgncnntaccagccagagcatgccanggaggccannggaaacgccggnncngcgangggaancnnanccaaagacggngnngngnngancggngagaagaaaggcaccncaaagcttcttcaaacctcaacctctgctgagaaaatgtacaagattgatgaccatgttgcctgtgctgttgctggtataatgtctgatgctaacatacttatcaacacggctcgagttcaagctcaacgttacaccttcatgtaccaagagcccatgccggttgagcagctggttcaatctctttgtgacacaaaacaaggatacacacagtttggtggtcttcgcccgtttggtgtctcctttctttttgc

SEQ ID NO: 108134 - DNA, 229 bp, Arabidopsis thaliana columbia
ctccccatccaacgcggcggcgctcaaaagtgttggtcccgtgcgagccagctctgaatattagccttaggtcgtgcgagcgaatccaagtttcatgctattcgtgaaccaaattagggaaattcgctaactctctcatagtaaatcttattccaatcccagaattgctactcctcaaattccatgtttgtgttcaccgtattgctacacttggaatgtgcctctgtta

SEQ ID NO: 108135 - DNA, 218 bp, Arabidopsis thaliana columbia
  unsure (1)..(218): unsure at all n locations
agccaatgaaggagnnacgggngaagtttccctccctttattacaaagaaanaaaggcggcgcggggnatcaagagnacngcccagggccccgaacacgcaanngcnggnaccgcccngcangnggnnggaccngangangacancgaggcaannaaggagncggcnaaggaagaaanggagncggnnnngagcagaanngacaaaagnggcgaagga

SEQ ID NO: 108136 - DNA, 158 bp, Arabidopsis thaliana columbia
  unsure (1)..(158): unsure at all n locations
gaaaccctaatcggcgacaatgggcatcccctcccgtctctatccacaagaggcngaccaggagangcatgcagaagcaanggaggaccaaccaaaagnangagangggaaggcagccagccaacaccaagctctcaagcaacaagacgggcagaaga

SEQ ID NO: 108137 - DNA, 330 bp, Arabidopsis thaliana columbia
  unsure (1)..(330): unsure at all n locations
ggggcgacccacgcgnccgcgcgagcgcgcgacaaaacgaacgacgctcgcctcgtgcgacgncnagcgaaaaaaagagacggcggnngggggcacggacgacgacacacccccccgcggcggcngcaaccaccaagnccaccacgcaaacaaacgcgccacaaaacagcagcgagacgcacgccgaaaaccagcgacgaccaacaccgacgcgccgcacagcgacagcggccaggagaaaaaagcgcagaggaacaggcaacaagagagagcaagacaaagcaaagagagcgaaacaccggaccacgcagcgaacgaacacacaaaaga

SEQ ID NO: 108138 - DNA, 437 bp, Arabidopsis thaliana columbia
  unsure (1)..(437): unsure at all n locations
ctcataattagctcatcaagcnccnctccctccctcttattcgnacnaganntctcttttgcctttttatttggtagagctctgctggttcatggatattgagccctgcttgaagttttggggggtgtttttttcttctttataattgcatggcaactacaattgatcaaaccagcatcaagtcattgcatttccatcaagtcatccgtttgatcatcacaatcatcttcttagctttcttatttctcattggccctacaagttccatgaatcatcaccttcatgaatcctcatctaagaacactatggctccttccaagaggttccttctacaacctttcactccatcttcatctactatgaaaatgcgtgcaacagctcaccctagacgcagtggcacttctttcttttcggcgaggaaaaaggagagagagttc

SEQ ID NO: 108139 - DNA, 412 bp, Arabidopsis thaliana columbia
  unsure (1)..(412): unsure at all n locations
ggaagagcgatggcgacgaactcggcgagggttgggtccttctgaacnaanncggngccggcagagagggctgttgctcagnacgngagagcgaacactncagngnggngggacatagagaattgccaagtccctaacggtcttgatgctcatggaattgctcagaatatcacttcggcgcttcagaagatgaactattgtggtcctgtttctatctctgcttatggtgataccaatcgcatccctttgaccattcaacatgctcttaattccaccggaattgcgctcaaccacgtccccgccggggtgaaagatgcgagtgataagaagattctagtggacatgttgttttgggcgttagacaatcctgcacctgcgaattttatgtttaatatcaggagacagagacttt

SEQ ID NO: 108140 - DNA, 270 bp, Arabidopsis thaliana columbia
  unsure (1)..(270): unsure at all n locations
ccggaatggaagggccgacgcacgccacgcgtccgcaagatcggagacgcacncaacacaggttgngtcatcaaggaaggngagcacaagaagggggaggaacacaggaaacacggggcacgaccacaacaanggggagcacaaagaaggganaagcagacaagaacaaagacaagaaccacggnggngaagggaaaagccacgacggagaacggaaaagccacgacggggagaagaaaaaaaacgacagacaagaaggagaagaaacac

SEQ ID NO: 108141 - DNA, 163 bp, Arabidopsis thaliana columbia
  unsure (1)..(163): unsure at all n locations
ggcgatcacatngacgagaaactttcgtcgattnggnnncgagnaacnatacggggagagacgnattngggacgaccacggaacgagcanncacgnacggnnnnaaagcaancgnacanagacgaggnngnagaaccggnnggnaggagagaanggaacggag

SEQ ID NO: 108142 - DNA, 330 bp, Arabidopsis thaliana columbia
cataatcaaagagagatgaaccagagccggtgcctcgtaattcgaccgggccacccaaaaacagcgtctgtgcagggcggcaagatgaggactatcagccgagcgcaggcaacggagcccacgctgaggaaacaaacaactcgatatgagcgtcactcggctcatgctgcggaagcggctaaagcacgaaacgagcaatggaacaaccactccaaccgacctacgaatccagacctgatgtaacgctacaagcagactccgcgaatgctgtgtgggagctaacatagacggtggcgagggaagcagcgagctgacgttggagctaatact

SEQ ID NO: 108143 - DNA, 401 bp, Arabidopsis thaliana columbia
  unsure (1)..(401): unsure at all n locations
tcgacccacgctccgtgnctcattcattcgcaaatncgngacccctcctatagattcaagcgangangaanctgagggttttgttcctcgctctgcttctccttgcatctcctctgcttcaagttgctagatgtcaatcggatgccgaggatcattcaagtcttgttgacgatgttgtgggagaaaacactgatgatgcggttgaggaagatgaccatgatatggatatgaactcgtcctcatttccaggagttgagactgtttgtgttttccccaaaaacagtgccaaattggttccagctggagaagagactgagctccttagtgggcttaaaaatgaagggaaaactagagttggtgtgatgggaattagggccagcgatcatcttccctaatgatca

SEQ ID NO: 108144 - DNA, 121 bp, Arabidopsis thaliana columbia
  unsure (1)..(121): unsure at all n locations
gtccaagaccaagagggggcagcaattttctttctctccnnnganananacatanagaggaagaggnggacatagaccngngccgccaagctcaaccagnaganccaggncagagctaagc

SEQ ID NO: 108145 - DNA, 446 bp, Arabidopsis thaliana columbia
  unsure (1)..(446): unsure at all n locations
accggtatttaatgtgccgagctcgacgccacgcgatccgtctcaaagaagacacagaggcagagaaatgtgcgtcttctcacaaaaaaaaanggcatcaacctcactcctcaaggcttctccggtgttggacaaatccgaatgggtcaagggacaaagcgttctcttccgtcagccttcttccgcttctgtcgtcctccgcaaccgtgccacctccctcaccgtccgtgccgcttcctcctacgccgatgagcttgttaagacagcgaaaactattgcgtctcccggacgtggaatcttggcgatggacgagtcaaacgcgacttgcgggaaacgtttggattcgatagggctagagaacactgaggcaaatcgtcaagctttccggactttgctggtctctgcacccggactcggacagtccgtcttcggcgcaattctatttg

SEQ ID NO: 108146 - DNA, 410 bp, Arabidopsis thaliana columbia
  unsure (1)..(410): unsure at all n locations
atcatcttctactacactacacancgtgagctcactgttaagaaaaaaacncgaaacaaagggggaaaacactggcgccggaacccgccaccatctacggcaatcgccaagaaaccttcgtcggtgatatggagtactacacttacttcgacgaatcttgtatccaagacatgaactatttcgtcaaaacaatcaccggcatcaaatccaaaggaatcagaccagaccttatcggttccatcatcgctcattacgcttcaaaatggctccctgatctctccggcaatgtctccgccattattttcctccaccttcttagaatccaagaacaaccacaatgacacacagccagagagcgtcactgcatctgtaatgaagaaacggtttttcgtcgaaacactaatcggaat

SEQ ID NO: 108147 - DNA, 222 bp, Arabidopsis thaliana columbia
  unsure (1)..(222): unsure at all n locations
ggaaaggngagcctaacaaacngangcaagcctccgctgctttttcgananannaganaccaagggagggagnncgagaggagnnanacgcccaaccccccngcccgcactanagcngccaagaagnanannganccaagcacaacnagannggacgnccaaggagcgggacagaagaacggcacaaagacagcncgagagccggagacaaggcngcagaag

SEQ ID NO: 108148 - DNA, 343 bp, Arabidopsis thaliana columbia
  unsure (1)..(343): unsure at all n locations
cgtgagccgattctctctctcgaactcgatttatgcactcgtatcttgccaaaggatnagacggggntaagtgccctaanngnnggagctgcacttggatactgcattggcactcgccgttccaaacctgttgttgctgctgttgataaggatatcaaaactcaatcctccaaaagtccactcgagattgagaaactcgctgatattctcgatgatttcaagatggttttggtggtgagaaatgatcttaaaatgggtaaaggaaagattgcagctcaatgcagtcatgcaactttaggattatacataaagcttgttcgtcgagcgccaaaagcattggact

SEQ ID NO: 108149 - DNA, 200 bp, Arabidopsis thaliana columbia
  unsure (1)..(200): unsure at all n locations
cggacgcgtgggtttttggaaaagaaccacatccgtctttaaagaaagggagaaacngcgggggggatgcagccanactcttatgcagctccacagggagattctcttggtgctttaggacagtctgtgtccttcggaagattcatgtcggagaaacttgactgggagaaatggtcttgttttttcacacagaaccctta

SEQ ID NO: 108150 - DNA, 167 bp, Arabidopsis thaliana columbia
ggcgatgtggggctgcccttaacacacggagcagttattgggagcacctgcttttaccagaacatctctccattcccagactctcgtccatagatcttttgacctttcgattttacccgacgaggaaaagtaccaacgtccaagtaggtaaaggcggaggaaacgtt

SEQ ID NO: 108151 - DNA, 294 bp, Arabidopsis thaliana columbia
ttttaccaacctcggacgccatcaagagattagcatcttatcgagatttaaaccatcaattaatcggctgccatggctgggagactacttgcaaatttgattgtgatgggttctgggatcattggtcgtgctgtctttcaagcctatcgtcaagcacttgctaatgcgtctaaatctggtgttgcgcaggaagcaatgcaaaatggagtacgtcaagcagggaaagccatcactgagcaagaggcttggcagattcttggtgtaaccgagaagacctcttgggaagagatatta

SEQ ID NO: 108152 - DNA, 304 bp, Arabidopsis thaliana columbia
  unsure (1)..(304): unsure at all n locations
cgccaganncaaaatanattttgangagcaacgacaaggacaagaggaatatgggcgagcncgcgaccgcccccaacgaggaggancgngccgggcnggggaaggcncnnaagaacaagnngcagaannnggcnggacaacacncngangnccnngaaaacnngacnccaccagncaggaagcgngncgagnnncnaagagaganncagaaccaanangangaganggaagcaaaanncnnngaggagagagcagcncnngaagcnaagnancaaaagnnanancagccnnnananaccaagcg

SEQ ID NO: 108153 - DNA, 294 bp, Arabidopsis thaliana columbia
  unsure (1)..(294): unsure at all n locations
aagaagaagncggaccacagagcngcnaccacaaaggngaagccaagngggaaagangcnccgaaaganncnaaaaaagagaaanngncagncncggcnangcccgcaggcanggancagaaaganganaaaccgaagaagggcncaacancnagaaccaaggcngcnccgaaanccacaacnaacacngagggcanagancnnccnccnncngangaagaagacgacggngaancngangaggaagagagacagaaggaagcaaggaggaagcngaagagngaacaaaggcac

SEQ ID NO: 108154 - DNA, 308 bp, Arabidopsis thaliana columbia
  unsure (1)..(308): unsure at all n locations
tgaggntggatggatggttacgagaaaactgaaatnccatagaggacaactgctgctctcaattttgttaatgctcttttgaatcttctctgggcgtttgaactcagagctactgcatcatgggttttccaattgggaatcaaaaggggtatcttcagtctcgatgtttttagggaggcggacaaggactgtggtgcggaattcagaaggctgtctggaggtgcagcacttgttgccctgacgctatggcttgaccacatgcaggatgcaatactggaaggctacccagagtctccaaagtcagttgt

SEQ ID NO: 108155 - DNA, 344 bp, Arabidopsis thaliana columbia
  unsure (1)..(344): unsure at all n locations
gccancttttgcgttcgcatccttcattacttgggcaaaacaacaacttataatggccggttccctagaaactggccggttctcgggatgctcccctgtctgctcgtggtgctccacaggatctatgactatatcggtgagattctcgaaatctctgatttgacattttcattcaagggaccgtggttcgccggaatggataccttgctcacggttgatccagctaacattcatcatatgatgaactcaaacttctcaaattacatcaaaggatctgatttcaaagaagtttttgatgtcttcggagacggaattatcaccacggactctgagctatggaagaa

SEQ ID NO: 108156 - DNA, 249 bp, Arabidopsis thaliana columbia
  unsure (1)..(249): unsure at all n locations
agaancangagaaagaggctcannagaaaaaccnnngacanganacaagaaancncngagagggaaaacaaagaggannacaagaaanncngggagaaccccnggagagnccnnaaanngggnngnanngaagacaccgngaaccacaagcgnancacaccgcnacnnaganncnncagnnccaagaangaagaggaanngacaagcnnggangannanancgagaacangggagagaaccaaaaggcg

SEQ ID NO: 108157 - DNA, 247 bp, Arabidopsis thaliana columbia
  unsure (1)..(247): unsure at all n locations
cacnccaagggagggaagatgcggagagagggagcctcaaacacgacagaancaagnacnggnnatcngnnggagcgcaaccaacagacacagnggaaagcangcnnnncagggccggnnngagaccaccaaagccnanggnagnggncggnncgaaaaangggcagaagncaacgagccaacangnnncacccannacaggngaaancnngaacnaagagngnngangcgnngagcaagaaagagc

SEQ ID NO: 108158 - DNA, 262 bp, Arabidopsis thaliana columbia
  unsure (1)..(262): unsure at all n locations
aagaagataaaagagngngangagattttcttttatttttggannaangaanngcangggnggggnngngggccaaagngctagcgcccctacagngacancanacccnnacncancnccncanaccccagcnnacganncncccagcnangaacacaaaggcccaaagnacgcaccacanccgaaaccanaggnnnacagnncnccaccaccaccanacnanacnccancaccaaaggnaaacnanaaancnccaccacca

SEQ ID NO: 108159 - DNA, 337 bp, Arabidopsis thaliana columbia
  unsure (1)..(337): unsure at all n locations
acccacgcgnccggcaaaggggccacaagcgcancagctttgattatttcaaccacanncnccacngcaaggncgcacaatttcccaaactgcatcgcaccccaaggccnncgnccccnccgncnaggnggcnccnccnccgcccaacccaaacnancaaccaccgggagaaaanccnccnccgcngncgngagagcngagcnaagcccnnccancgncanaagncncagcacaggncncncccncnnccncggccgnnncgncnncnncaacnnccagagagagaacgnagcaaaacagggcnnaccggagcagaacggaaaaacccaaaacgaag

SEQ ID NO: 108160 - DNA, 218 bp, Arabidopsis thaliana columbia
  unsure (1)..(218): unsure at all n locations
gagaaaacgaaaacccnagnnncagataaataaatttacaccgaaaanggcngaagggcgcggnnngaagggcaccangcgggcacacactgacanggngacggcaancgccaccccaancgagaacgcagacagcagcgncncagcgncccgcgacaaagccagcaannnggggaaacccaccaaggacgacaaagccnacggnggagcncagaggc

SEQ ID NO: 108161 - DNA, 451 bp, Arabidopsis thaliana columbia
  unsure (1)..(451): unsure at all n locations
gaaaaagggaaagagccataccacnnnnaccatagganttatgtaatactcncaanccattgcatgcataagggtcttctctttctcaaaccatcgntttctgaatctgtcacaccaaaagagttcatggagactttgctgcagaagcttaaagactctctagccatagcacttgtccatttctatccgcttgcaggtcgcatctcgactttgaaaaccaacgactcaagatctcactcggtgtttgtggattgtaataacagtcctgctggatttatccatgctgaatcagatctaagtgtatcagacattcttggttccaaatatgttcctttggttgttcaatctttctttgaccatcacaaagcattgagtcgtgatggtgacaccatgactctcttatcagtcaaggtaacagaattggtagatggagtgttcataggattgtcta

SEQ ID NO: 108162 - DNA, 223 bp, Arabidopsis thaliana columbia
  unsure (1)..(223): unsure at all n locations
cacaccaaccaattacanttctaaaaagcccccnccaancggcggaaaanggcgaaggcaaacgcgccctctcccaccnccgnccncgggacancccgacagagnaagnngggaggaggaaancagcagcaaggacagagagnnagccacaacaagaggacaaccagacgnnnnagcgnnagagccaaagnaaaggaaagagccnnngaccagcacncnagag

SEQ ID NO: 108163 - DNA, 341 bp, Arabidopsis thaliana columbia
  unsure (1)..(341): unsure at all n locations
caaaacaaaaaatgggnnncaaaaggaagagaataaaagtgagncncgnagcacnnnggggcggcgcgtcctcgggcgncacggaagaaccgaaccanaagacccaaacccccncncnagcccccgcgccngcnccnnaccaccacgggcaccaccacccacacccnccgcaaaaccaccacccacacccgcacccgcacccccacccaccggccaaaacgccgcggaaacccccgcggaaggcaccacgaggnccaccagccaaacccccgggaaagcccccggnggacccacccaccaaagcccccgcgaaacccccaacaaaaccccccgagaagcca

SEQ ID NO: 108164 - DNA, 230 bp, Arabidopsis thaliana columbia
  unsure (1)..(230): unsure at all n locations
ggccgacccacgcgnccggncaagaacctnngcactgccancgccaagactaaccatatgcgcgaannaanacgaccagggagcctgngaacgcaacggggccaaccgcagcagagacagnaaagaaggccggnacgaacgaagaaaagaaagaggcgggggccaccacgcnngacgncgncagggccaggactnnctaagcnggaaaggcaaangncccagnngcagaa

SEQ ID NO: 108165 - DNA, 464 bp, Arabidopsis thaliana columbia
  unsure (1)..(464): unsure at all n locations
ccgacccacgcgnccgcaaaagcctattngggggancncaacctaaatanactccacgganccnnacaagnancgggcggcaagcttgtacaacgccccattctacaccacaaacggtggtgctccagtctccaacaacatctcttccctcaccatcggagaaagaggtccggttcttcttgaggattatcatttgatcgagaaggttgctaatttcaccagagagaggatccctgagagagtggttcatgctagaggaatcagtgctaagggtttctttgaagtcacccatgacatttcaaacctcacttgtgctgattttctcagagcccctggtgttcaaactccggttattgtccgtttctccaccgttgtccacgaacgtgccagttctgaaaccatgagggatattcgtggtttcgctagcaagttttacaccagagagggaaactttgatcttgttg

SEQ ID NO: 108166 - DNA, 252 bp, Arabidopsis thaliana columbia
  unsure (1)..(252): unsure at all n locations
gaaggttaagaagcagagngnaaacttattaattttctcaagagccnnacccangggcgggttttttatcctcattgctacggccctcctggccaacgcttacactcctcctcctcctcctccaaccaccgcataccctgccgtgaaaaccgtggaagcggcagtggaaggaatggtgtactgtcaatcctgcgacaaattcggatcatggtcattggccggagcagaagctatagccggagctaaaatcag

SEQ ID NO: 108167 - DNA, 142 bp, Arabidopsis thaliana columbia
  unsure (1)..(142): unsure at all n locations
gnggacccaagaatngcaancaacanggacattgatcactttcaagacgnnngacaacacnggctggaagaatcggcaacaaggcaaaggcctctccaccnccgaccaagnncncnncacgganggncgcncnaggcccacc

SEQ ID NO: 108168 - DNA, 346 bp, Arabidopsis thaliana columbia
  unsure (1)..(346): unsure at all n locations
tcgagcttacgaagaagcaaananggcgtttattaattttaccaagaaggncgngaagaagagggcngcttaggacancagaccccacagcgaccgnagaancaccgncaaggaaagcnggaggaggccaaagggnatcganncaagggngagaagaaagnccaaaggngngacnnngacgcccaanganggnnacggaacngacaagaagacncgncacnancnncccaangganncaagaaacncgnggnncacaacacaagngagcncgagnngnngangangcacaacaggacnaacngagcngaganngcncacaacgncnccacaaagaagagaaaggca

SEQ ID NO: 108169 - DNA, 237 bp, Arabidopsis thaliana columbia
  unsure (1)..(237): unsure at all n locations
caaancnnacccannganggaanaacancancacgacgcgncaaaannctgnatcggaggaccgagagancnccatcnccngnccagaaacganncccaccaancccaannncgngaaanncgnnagggnnnnagnnngaancncaacncaacagaacgagncgacccaggannaggaagaagaaaagcgangaagaaggcgacgaanggccggnnnnncacaancgggctagncgc

SEQ ID NO: 108170 - DNA, 249 bp, Arabidopsis thaliana columbia
  unsure (1)..(249): unsure at all n locations
aaacgagagggagagaagtaaaaaggcgacgncnggaacgnacgggacggaggnaccgaaaaaaggaccggcccacccacacnacaagaggnggaagaacgagaaccangacancccggangccancggccaccacagccaaaaagcnacacggcacgaaggcgaacangacncacacggggcgaacaggagggggaaccacacanggganggaaaggaggaggggnncaaggagagaagagagaaaga

SEQ ID NO: 108171 - DNA, 260 bp, Arabidopsis thaliana columbia
  unsure (1)..(260): unsure at all n locations
gcaaaaagaaaacaagaagancagaancggaancaacaagcccggaagaagaggccgaggggcccaaccagcagagcgtcagagggaagatgatgagctcgacgcagataacgatcctaacagcaccaccgaggacacgacatacacgggtaagtatgacagcgaacacggtcagcggaagcaccaagagcctaaggcgaaggaagacaaatacccactccccggtgagaagccagccacagaacacggcaacaggaacc

SEQ ID NO: 108172 - DNA, 293 bp, Arabidopsis thaliana columbia
  unsure (1)..(293): unsure at all n locations
aagacattntgannacacnccancgacaataaaattttgacggaaaagaaaacgaaggagggtcatgaggggagcaacagcaggcccggccccggggaggaagaggggnaaanacacncnnggnnacaagncngnncncaaancccaccgnggcnccaaagggaaacnganncaaancnccaccaanngcccaccgnngagaagancagaganggagnaccacgcaaggcncgcnaaagnnggngnccaccannacaanggaanaaacgangacnngggaacagcnngcggaa

SEQ ID NO: 108173 - DNA, 441 bp, Arabidopsis thaliana columbia
  unsure (1)..(441): unsure at all n locations
gacccacgcgnccggaccaaccccgngagganaaacngnngccgatactttatcttttataacaccggnnnnngnngggacggaaagagaaaaangggngggacccctgggaancnnggcggganaaacnacggcgnagctctaatggctggctggagtcgtatgatgactcaccgatcgtccaagcgagtcgccaaggcagttgatatgaaactactaggctctcttagcagagacgatttgaagaaaatttgtggtgataatttccctcaatggatatcgtttccagcatttgaacaggtcaaatggctgaataaactactgagcaagatgtggccatatattgcagaggcagcaacaatggtaataagagattctgttgaacctctgcttgaagattacagaccaccaggaattactttcctgaagttcaacaaattg

SEQ ID NO: 108174 - DNA, 263 bp, Arabidopsis thaliana columbia
  unsure (1)..(263): unsure at all n locations
cannaggggagaaacccnaancggcgacaaatagtttattttttgacncnanccacaagaggggggccactggaggcaagcagaagcaccgcacgaagaagcgaaagnangagaagggaaggcagccagccaacaccaagcncncaagcaacaagacggncagaagaanaagagnncgnggnggaaangnnaagnggcgagcgaagaggcacgaaacaggaaacnacccggggggaagagaagcaacnacccgcaagaccaga

SEQ ID NO: 108175 - DNA, 449 bp, Arabidopsis thaliana columbia
  unsure (1)..(449): unsure at all n locations
ctgcttcttcttccttnncnnaccaaaaataaaatttgtnnnagncanacnnaanggcggggaattcgtagaaaaatcctcttctttcacatgagaaacccaaatcgacggaggagaataagagttctaagccggaatcagcttctgggagttcaacttcatcagctatgcctggcttgaatttcaatgcttttgatttctctaatatggctagtattctcaacgatcctagcatcagagaaatggctgagcaaatagctaaagatcctgcgtttaaccaattggctgagcagcttcagagatctattcctaacgctggccaggaaggtggtttccctaactttgatcctcaacagtatgtcaatacaatgcaacaggttatgcataaccctgagtttaagacaatggccgagaaacttggtaccgccttagttcaggatccacaaatg

SEQ ID NO: 108176 - DNA, 275 bp, Arabidopsis thaliana columbia
caacaacaaaccaaacgaggcactgcttcacccgttacattgagttccacaggtgcacaactgcaaaaggtgaggatgcaaatgaatgcgagaggttcgccaagtactaccgcgctctctgccctggggaatgggttgacaagtggaatgagcagagggagactggaacattccctggccctctttgattcacacaagaatctctctttttcattttaagtttgagaccaaaaaaggtcgtgtggatgatcatgaaatctataactcttgtcttt

SEQ ID NO: 108177 - DNA, 267 bp, Arabidopsis thaliana columbia
  unsure (1)..(267): unsure at all n locations
tttcaatgacgttatcctcaacaaacgcgttatcgtttttgtcgaaaggatggagagaggtatgggattcagcagatgcggatttgcagctgatgcgagacagagctaactctgttaagaatctagcatcaacgttcgatagagagatcgagaatttcctcaataactcggcgaggtctgcgtttcccggtggttcaccatcggcgtcgnctttctcaaatgaaattgggatcatgaagaagcttcaagccgagatttccgagtttc

SEQ ID NO: 108178 - DNA, 253 bp, Arabidopsis thaliana columbia
  unsure (1)..(253): unsure at all n locations
gcggacgcattttgagaccaaccnaaanccgtgaattttttcnggnaaccancancnaagaagagantttttagccggatatggtcccactcatgcttttgataggtctgttgttcatcttttaaagaagctaccaaatgtcaacaaatctgatttgattgaaggaaaattggaaatgaaacacccgggcttaaattctggatacaatggacagtacatatgttctcattgagcttccatggtccaaggtagt

SEQ ID NO: 108179 - DNA, 430 bp, Arabidopsis thaliana columbia
  unsure (1)..(430): unsure at all n locations
cttccgaacaagcctcctttaatcttaaccataacctgctattttacaaaaaancctnagataatcagagcttgatattatggatcatatcatcggctttatgggcacaacaaacatgtcacataacacaaaccttatgatcgctgccgcagccactaccactacgacctcttcgtcttcctcttcgtcctccggaggctcggggactaaccagctaagcaggtacgagaatcagaagagaagagattggaacactttcggacagtatctacgcaatcaccgtccaccactttctctctcccgttgcagtggtgctcatgttcttgaattcctcaggtacctcgaccaattcggcaagactaaggtataacatatacanctacatatgtgtctatctatctcttacatcaaaatactctttttgataatt

SEQ ID NO: 108180 - DNA, 361 bp, Arabidopsis thaliana columbia
  unsure (1)..(361): unsure at all n locations
cgtcgataactgcgatctctcaggnnttccctccctttcggataccgaancactcaaacagtggcttcttgtagatgacgagcccgctcctacatggccattgcttcttgtgaaagcaacctacttccgatgtggtggcatggccataggactctgcatctcccataggctcgccgatgcagcctctctctcgattttcttacaggcttgggcagccacagctagaggagagagcgacttggtggccagtcctgacttttgttccacaaaactttaccccgcagcaaatgaagccattaaaattccaggggaagtagttaacagaacaagtgtcacgaagagatttgggttttgagcatct

SEQ ID NO: 108181 - DNA, 329 bp, Arabidopsis thaliana columbia
tcgatgaatctgacaaaatgattgacagtgccaggagcatgctacacgaggtgatcgcccatcctactgtctccatagctaaagctgctatcattgcatgtctaacagccagaacccatgcgttggctagggcaaatgctagtggctcacgttataacccacggctgaccgtaattgagaatatggagcgtacttcaaccttgctatctagatacgagacgatctacttgattctagacatggcagctgagctgactgaccgatggctggcaaagcatatcgtggcccttcactctaagaacactgagagtgctcacgaggaagctata

SEQ ID NO: 108182 - DNA, 273 bp, Arabidopsis thaliana columbia
  unsure (1)..(273): unsure at all n locations
aaaaaaaaaaataaaaaaaaaaaaaaaaaattcctccttttaaaaaaaaaaaaaaaaaaaaaaagggggacgacttaaaaaaaaaaaaggggccgcccccctacaggccccaagcnacacgccccgtgcatgcaccacaatacctcccctataggggcaccaaaaaacaattaagtggccgaaatctaacaacgtccgtgactggaaaaaccttggcggaccccaacttaaccacgttgaacaaaatccccattaggccagctgggataacac

SEQ ID NO: 108183 - DNA, 257 bp, Arabidopsis thaliana columbia
  unsure (1)..(257): unsure at all n locations
gtccgcgactggatctgcattacccgctccactgttcctcatcttaaanggagcagactgcttctatatgcagctattctggttgaagacggatctattcacgactctcaaggcactttctttgatgggagtgcttccagcgttcgcgagacacaaatcactatctcaacttgcataagcatcaaacatgttgaaatctgctagaagacgaagaactcactatgaatgatctttttttgcgtcatgcgtatattcag

SEQ ID NO: 108184 - DNA, 422 bp, Arabidopsis thaliana columbia
cttccgtcaaattttaggcagatcctaacattggcatcctgttctactcagatcagcaagaagagaaagtttgtagcggacggtgtgttctacgctgaattgaatgaggttcttacaagagagctagcagaggatggttactctggtgttgaggttagggttactcctatgaggactgagattatcatcagagctacacgtactcagaatgttctcggtgagaaggggaggagaattagggaattgacttcccttgttcagaagagattcaagtttccagttgacagtgttgagctttatgccgagaaggttaacaacagaggtctctgtgccatcgctcatgctgagtctttacgttacaagcttcttagtggtctcgctgttcgtagggctagctatggtgtgttgagggttgtatggag

SEQ ID NO: 108185 - DNA, 458 bp, Arabidopsis thaliana columbia
cttccacgtggtgttaacccacatcaagtacttcatctaactgccgtgtcaagctctacacatctcccgtcgagacttgcaagaacccaaccaatgtcaacaagggtctcaccggagttcccttctcgatgtactccgacaagaacttgaagctcttcaacgttggtcctttctacttcaccgccggttccaaggctgctcccgccactcccagatactgatcatcacattttgatttatgatgatgatcttgcatggcattatatatgactatatgaggtctctttaatcaatttattaactgatttttttccctagaaaatgttcttgtttgttagttccaaattcatttgattcgttgcattctatctttaaattataataaaattggaagaggtatgtacatcattgtttgacttatgcgagtgattatgcatgagaaattaatattgatatgt

SEQ ID NO: 108186 - DNA, 287 bp, Arabidopsis thaliana columbia
  unsure (1)..(287): unsure at all n locations
gtaattccttacatttcactcaatattatcctcctatatctccgatccacccacaaatttagcaattttctgagatttgatcatttgggtcaccaaaaaatcttgtctttttgatctgggtttaacgccaataacatatgggaaacattagcagcagcggtggtgaaggtagacgccgtcgacggcgaaaccatacggcggctccaccaccaccttctnctnctncttcttcttctctttctccaccacctttacctacagaaatccaagctaatcccatcgttttc

SEQ ID NO: 108187 - DNA, 394 bp, Arabidopsis thaliana columbia
  unsure (1)..(394): unsure at all n locations
ggctagctgactttggctattccactgacactcctgagaaggatacagaaacttggaggcagagagtagatacttattgggatctcttgagtcctaaaattcaatcagacactgtaaggaacataatggacatgaaagcaagcatgggttcctttgctgctgctctgaaagaaaaagatgtttgggttatgaatgttgttcctgaagacggaccaaacacgcttaaactaatatacgacagatgcctgatgggtgctgttcatagctggtgtgaagcgttctcgacttacccgaggacttacgatttactccatgcctgggacatcatatctgatatcaagaagagaggttgcaacgcagaaaatntgctgttggagatggatcgtatacttcg

SEQ ID NO: 108188 - DNA, 438 bp, Arabidopsis thaliana columbia
gaaagaacctaattagattcaagttcacctaataatatatctagatgttggtatgcaaatctgtttgaatatgaaagattcgactattatcttaattacaaataactttctgaaacctttttttttattggtatcaaaattagatatttgatataaaaatagagaatctattctctttttttttagtaagatcttggagattgagtaatgcttactctcaaactttttgtatacactgtagttatattctttgtttctctcttcatatttggattcctatctaatgatccaggacgtaatccgggacgtgaagaataaaaaagaaagtttttttattgctttatttaattcgaggaaatgctcgaattttattaggattttatctattacacaccatcaaaaggagaaggtgaaagagagggattcgaaccctcggta

SEQ ID NO: 108189 - DNA, 266 bp, Arabidopsis thaliana columbia
atcaccatggctccctacatgtgaacgtgttcatagcccggactagagacccaggatacagatcggacggtggtgggaccttgatccccatcaaaaaggacgtgacgatagcagaacatgatgggatcttgtatgatgaccatcagaggcaccagcgagatgactatggaacacaagcgaggaccgccataagagcatgacctgctaaagctacctactcctagcgatcttttgaagcaacccatgactatctatacctcacttgt

SEQ ID NO: 108190 - DNA, 267 bp, Arabidopsis thaliana columbia
tacgtcgccagtccgttctaaaagactaaagaacctctaatgggtcttgactgcctagcttatcgttcaagggaggaaggaaacctttcagaagattgaaagtacgaaaacgtattgaggaagaacccgggcaaacattggactagtagcggggacacaaagacttacaccacttttcagcattaagcgaggtatgatgatccctgcagttttcatggtatggttaagtggaggcgctgttttaaaaaaagacagtcttgcttttct

SEQ ID NO: 108191 - DNA, 289 bp, Arabidopsis thaliana columbia
cttgcttgttcaaaagatcgaagcgcctgctcttcttgcttggagggacctgaaccggtccagggacttccaaggaaagcggctccaccttatctggatcgacgttacaatgccgtctcaaccagacgtgcaatttcacgttgagccacggacaggaagataaactttagggctccgtggcaatgctcgatccgagctcaacagccggatttgaaggacagcttagcttgtgctccttcatcagtagaggacaaaggaaatgatcttagaatcaaggaatgggaggtag

SEQ ID NO: 108192 - DNA, 143 bp, Arabidopsis thaliana columbia
  unsure (1)..(143): unsure at all n locations
gggcgacccacgcgccgaccgancaccaaaaccacccccngacaataatatccaaacnnccggancagaacaggcgagggcgggacaaannngggagcccccaaaaaccncacccaccaancgccaagancaccaccaaagcc

SEQ ID NO: 108193 - DNA, 175 bp, Arabidopsis thaliana columbia
  unsure (1)..(175): unsure at all n locations
gcgacccacgcngccgagcaacaagcaaaccaacaacggangccacaataaaaactcgagccccgcgcccacacaaggcagcncgnacgacacgcaaccgagggcgccacacacccggccgcccccgaaccagagccggcggagcccagaaaccagaccgcgacccaggaaaaag

SEQ ID NO: 108194 - DNA, 407 bp, Arabidopsis thaliana columbia
  unsure (1)..(407): unsure at all n locations
cggagcaaccacggcggnnccggaaggaagtaaaaagagcaanggcnccagccgnccgaggggggcaggaagagcggcgggggcgcccacgacaagactaggcgncagagctcagcagagagaggagacaacgcgccggaccgagaatgggcatgatgctgctggaagagcagggggcgcgcatgttcaggcagtccgcgccgatgcaaagacgatcaaagtgggccctccgccagcgccccccggtggccctccggggaccagaaactcagaccaagcaagagactctgcatcggcatagaaagacaggttggacttacagccaatgccaccaacagaagctgcagcgagagccaaagaagccgcaaaggagaccacaaatgtgaagccattgaccgacaggaaag

SEQ ID NO: 108195 - DNA, 147 bp, Arabidopsis thaliana columbia
  unsure (1)..(147): unsure at all n locations
tttgtgtggtttnttcttgtagagttttgtggaagctgctatgttattttggaggcgttaccaatgaaaccacacttcgcttgtttgatctttgcgtaatgtgaaagcgattgataattgtaaagtacacttggatattgttggtgg

SEQ ID NO: 108196 - DNA, 276 bp, Arabidopsis thaliana columbia
  unsure (1)..(276): unsure at all n locations
gacccacgcgnccgcggaaagacgtcngcgacaacaacaccataataaaccctcncaaacnncagaccaagaaggcgacgccagagaaaggccagcgggccccccacaacncnnggtctgtttcaagaagaaagaacccgaccccaggggacgccggctgcaccaagaaaaaacccaactacggagagacactgcaacaccggaagaaaattcccaagagatcgcgtcgtctgaggcaacaacagcttctggagcagcagagactagcggcggaca

SEQ ID NO: 108197 - DNA, 312 bp, Arabidopsis thaliana columbia
  unsure (1)..(312): unsure at all n locations
ncgcgagannggagagancnncncnaattgctacgttttgagaancancanccncagagagcgacaacgcgaaagcgccggagaggcacacaaccnncgccagngcanccgccggagnancagaagaacgcaacgacgacggnggaaaangcggcnnccaggaacgangangcgnngcgncaggcgcccgnnaaccagaagacgancacggagacggngganncnaccanngacgccnccaaagcncgangggcncagaaacgagaaacnncngnagcncacacgagccaaaccaccganncncnncgagac

SEQ ID NO: 108198 - DNA, 320 bp, Arabidopsis thaliana columbia
gtgccagccactcacatttatccagatgactggataccttcttgaaacaggagctaaacttggatgacgaataactaccaaaccgagagcgatgattacaagaaggctgttgagaagtgcaagaggaagcgcagaggtgtgatcgctccgaagaactgttcacccatcatgggccgactcgcatggcactgctgatggaactttcaacacgaaatcaaggactgtaggcccattcggaacaatgaggtgcgactctgagcaaactcatagagccaacaagtgtatccacatcgcgtccaggtcgttggagcctatcaggg

SEQ ID NO: 108199 - DNA, 243 bp, Arabidopsis thaliana columbia
  unsure (1)..(243): unsure at all n locations
gagcgagacacgaacacnccaccagangacacaatacatgcagggaacgngaccccaaccgaggcggcggaaaaccaacaaacagagggcgcagaaacaagaaggccgcngcgaagagcccgaggaagcggaaaggcaagcgcagaagccaagaacngggcacccacaaacgagagacaaacgngacacgccgaggagagcgaagacagcaacgcagggacgggacacacangaggaacaaaa

SEQ ID NO: 108200 - DNA, 208 bp, Arabidopsis thaliana columbia
  unsure (1)..(208): unsure at all n locations
gcctgggaattggaaagngagacgagtttactaatttttcaacaacagnnagcanangaagcgcgagttcgagaaanagaggaaggcccgcccgacagcannggancngnngaacaaaancaagccaagcngcnaaagaggcaggaagcagcagcnaagcgcgagagagcgacggcacangccnngacacaccagaggcaggcaggaa

SEQ ID NO: 108201 - DNA, 236 bp, Arabidopsis thaliana columbia
  unsure (1)..(236): unsure at all n locations
gagagagagacaaagagactgcccgnggatacatactttttcgaggaaccaaagcaacaaggggcgagctctcaagacgacgagaagctaaaagataaggcagaacaaaattagggtttttcacttccttatgtatacagctcgctaaccaaaggctatccacccaccgagttcttcagtaactccacaagcgggacccgaaaatagcacttggcgcatatcaggagcgtgattat

SEQ ID NO: 108202 - DNA, 392 bp, Arabidopsis thaliana columbia
  unsure (1)..(392): unsure at all n locations
cctaactatacaaaacacanaacaagaaggtaaatttacaaaaggcncnccnaccgggcggaaagtcggcgagncaggaggcgccgccgacgagnccancancaacgaccancnccaacnnccaacggacggcaagaggagaaccgangaagaagagagggccaccnacacacaagggnccgcagaacacgggaaaacnaacaacaacaacaacggnagcaacaacgaccaagacaaaagaagcgaaagnngcaaagacaacgnaagangcagcgaccaacacaacgaaaacaacaagaacgcnacnnacaagcanggncncaccaaanngaccgancncacnaacgangagnaccggaagggggaccacggggcaagaaccgagcccgccc

SEQ ID NO: 108203 - DNA, 322 bp, Arabidopsis thaliana columbia
  unsure (1)..(322): unsure at all n locations
gagccagccacccgcaanncnccagaagacattaatcntcctcgaaacaagagccaaaccaagacgaggaagaacaacccaaccgagagccaacaaacaagaaggccgnngagaagngcaggaggaagcgcacaggcgngaccgccgagaagaaccgngcacccancangggccgacacgcanggcacacggcaggaaccnncgacagccaancaaggaccggaggcccacgcggaacaaagaggngngacgcagagcaagcncaaggagccaacaacggnaaccacaacgccgccagagagagggaccccancagggagca

SEQ ID NO: 108204 - DNA, 194 bp, Arabidopsis thaliana columbia
  unsure (1)..(194): unsure at all n locations
cagcgagccagcgagaacgaaccagancggagaataagcacaagcagcaggacccagaccagggcggcgaaggcacaccgaagagggggcacccaaacaagaaggccgaggccaaagcacagcgacgaacaagcacggaggacggccaaggacagccgagccagaaagcncgcacaagcagggcacggggaaca

SEQ ID NO: 108205 - DNA, 195 bp, Arabidopsis thaliana columbia
  unsure (1)..(195): unsure at all n locations
gaccgacccaaccagancncaccagctaaataaacacatccacggaacaagacccaaaggggggcgacgaggagacaaccagcggacccacccaaagcccgacaggagaccgcgaccgaccagaccccaaaggcagacgagaacaggaaccagcaccgcacccccaacgacggacagaaacacacccaacaagcc

SEQ ID NO: 108206 - DNA, 316 bp, Arabidopsis thaliana columbia
  unsure (1)..(316): unsure at all n locations
gaacgagacaccaatactncaccagatgactttactctttctangaacgggacacaaaccggggcgacggcttaacaaacaacagagggcgctgaagacaagacgcaccactagacaaactcagatgcaaagacagtcgaacccaggcgccaggactatcccccagccaactgtagacaaaggtgatgatgggaggagagctgaaacagcaactaagggaagggacacacataaggtacaaaaagctggagctgagaaaacactcaaagcggcaaccactgtagaaggaacggctaccaattgagggagcctcaca

SEQ ID NO: 108207 - DNA, 261 bp, Arabidopsis thaliana columbia
gagcgagacaccaacacttcaccagattactcaatatcttcctaggaacaggacccaaactggggcgactataaaccaaccatcggcaagcgcagatgacaagaaggaccactgcgacaaactcagatgaagatgaaagtcgtgatcatgagccatgaactattcacccatcatgtatagacaaacgtgatactcaaaagagagcgttaacagcaaatcatggaatggaaacacatgaggtacaaaaagctggggctgtga

SEQ ID NO: 108208 - DNA, 261 bp, Arabidopsis thaliana columbia
gacccagacaccgaggcacgaccgcataagtcaattcttcctaggagcaggaccctaacgggggcgactagaaaccacccagcggcaagacgcaagatcagcacacaccactgcgctaaactcaacaaaatcgaaagtcgtgttcaggagccaacactttccacccagcatgtctagaaaaacgtgatacacaactgagagcttgaacagcaactcatggaagggatgcacatgaggtacaacaacgatggggcggtgaac

SEQ ID NO: 108209 - DNA, 258 bp, Arabidopsis thaliana columbia
  unsure (1)..(258): unsure at all n locations
ctcgcggcggctggncanancaagcatttagtgcagttttatcnccanncacccccgggggaggagtactagagcagngagatgctcaccgcaccaacagngaaggangaggnaangaaaancangccgggncagaaacaaaccagggccggncaaaggacaagcaccaaggccnnaggaggcgaaggagaagggaacggacaagaagggccgggagagaaacgcccnaaggaagacgcgacggccacaagaggagcg

SEQ ID NO: 108210 - DNA, 284 bp, Arabidopsis thaliana columbia
  unsure (1)..(284): unsure at all n locations
cacgcgtccgaagagacatcatattggcctatatgcagaacttatattatcnaacaccagaccacggnnnngcggggcggatcaacaaccccgggagcaacggtggcccggagggcaaanggaagaaacgaancaaagncacaactaaagaanccgacaacggctaccatgncaaggacaacagagngnaaccagctttggagacgccgaactcgccgacgaagaaggttgggggataagccagagcacataatcaacgagcgaaacataaactccgggattac

SEQ ID NO: 108211 - DNA, 201 bp, Arabidopsis thaliana columbia
cacccagacaccgaggcacgaacgcgagggattaatgttccgaggagaaggaccccaaccggggggcggagaaacgaaccagcggggaggaccaaaaacaggagaaaccaggggccaaaccaaacaaaagcgaaacgggggcgcaggagccaacacaagtgagccagcaggactggaacaacgcggtagacaacggagagg

SEQ ID NO: 108212 - DNA, 196 bp, Arabidopsis thaliana columbia
gacccagacaccgacgcacgaacgcataagtaaatacatccgaggaacaggaccccaacgggggcgaccagagaccacccagcgccaacacgcaaaggcagcaaaaaccatgcgccaaaccaaacaaaaccgaaactcggagtcaggagccaacacaaggcacccaccaagaatagaacaacgccatacacaacag

SEQ ID NO: 108213 - DNA, 249 bp, Arabidopsis thaliana columbia
  unsure (1)..(249): unsure at all n locations
aaggaagggaagcactcacgcccgnnggctgatgaaacttttcttggcaagaactggagaagatttatggagaattcttgaggatcagtgaagnggaagaatatgaagtttataagtgaggttcaagagagagatggtaggctctggtttggtctgtgtttttgccttcagtttgggttcttgaccgtcaatgatttatacgttttacattatataagtttttcatgtgtgtggatttgatgataatta

SEQ ID NO: 108214 - DNA, 340 bp, Arabidopsis thaliana columbia
  unsure (1)..(340): unsure at all n locations
gacccacgcgnccgaagaaacaaaaaaccagngaaacgancccatttactangtttttaagagcagcnnnnggangaggggggggacttaagagccaaggcggcctcccgaacancananccnnacncanccccncaaacaccacaagacaaggngcccagccagcaacacaaaacaccnaaggagacaccacacgcaaaaccacacagccacaacgcnccaccaccaccgnaanacacgcccgccccaaaggggaacgacaaaaccacaccaccaccagacagaaacagcgcaccaccaccacacggccacacncgcacaccaaaggaggaccacaaaa

SEQ ID NO: 108215 - DNA, 246 bp, Arabidopsis thaliana columbia
  unsure (1)..(246): unsure at all n locations
ggccaagaagcagacgcaaacacgcagcggaatcatgaaactgaacacacgaccgcgacaagggcgggaagagaggcccgacggccgaggcgcccgaagagagagaaacgngcaccaccacaagcccagcagnaccgccgagacaaggaaaaacaaaaggggcccaacgggaaaaggacaacgcgggaccgaacagcccggggcacaggcgcagcacggagcccacgaccagaaagaacaagaacc

SEQ ID NO: 108216 - DNA, 202 bp, Arabidopsis thaliana columbia
gaccgagacaccgcggcacaaacgcagttgataaatgaaccggggcaaaggaccgcaacggaggcgacaagagacgacccaggggcaacaccaaagaacggcaagaagcatgcgccaaaccaaacaaaacagaaactcggagacaggggccaacacaaggcacccaacgtgaaaaggacaacgcgggacagaacagacaggg

SEQ ID NO: 108217 - DNA, 248 bp, Arabidopsis thaliana columbia
gacccagaaaccgccgcacaaacgccttagataatttttccggagaacaggaccccaacgggggcgactatagacgacctagggccaacactcataatcgtcaaaaaacagtcgccaaactaaacccagcagtaccttttatacaagggccaacacttggtactcaacgtgaatagatcaacgctgtacacaacagacagcggcacatggcgcttgatggaagcgatgcctctaaagtacaacaacca

SEQ ID NO: 108218 - DNA, 231 bp, Arabidopsis thaliana columbia
gagccagacaccgccacacaaacgcatttgataaatcatcctggaaacacgaccccaacgggggcgacgatagacgacccagcggcgacccgcaaaacgtgaagaaacatgcgcaaaaccaaacgaagccgaaacgcgggaacaaggaccaaaacagggcacccaacatgaacagaacaacgcgggacacaacagacaggggcaacagcgcagcaaggaagcgaagcccaa

SEQ ID NO: 108219 - DNA, 406 bp, Arabidopsis thaliana columbia
acgcaccaccgttgtcgtccaccttagtggtcgtagaaaccaaatcagtataaaattctgatgaccgggaatgcaaactcaacgggttgttccctcgagatcggcggcgaaatctttttgaagatctcctaaagatttacatttctcattatctcttttctccccattttcaagttccgattcatgcaacaatgaaccaaatcaaagatccaaaccctaatctaccggaacggctcttcgccgtcgattgctatgccgataaagcccgtcttaatatatattcaagacctgaatatctcgggacaagtgctaaccttctcaaaggctctgaagaatgggaacgaatcacaagttcacaatttggtgaagctggtcgaattcccctgtcggtcgatgcttacattca

SEQ ID NO: 108220 - DNA, 203 bp, Arabidopsis thaliana columbia
cctacccgtggtctaatccctagctcaaagttttatccatgcaatcctacatatctaggcagcgcgccaactgggctgcgtacgacaacaaaaatcaaacatatgtggtcttatctgaaccgctatactgatttcccgccgccttttctcgcatatatactcaatacactactactatttgatagtactccaaaattcataaa

SEQ ID NO: 108221 - DNA, 342 bp, Arabidopsis thaliana columbia
ccaggcgtacgcgattatctataaggaacttctacaaacgatctttgttcttcacaatgaactcgaatcaacgtgctcgtggatctttggggagggctgatcaatcttccattctttgacacctacaccttaaactctttcttgtcgtgtcaaggaagaattgtgtccctcttctttaccaaggcctaaaagccagctaacaagaggtgatgtttgattaagggtttgaagagcactgaacattcatatgttctgtggtcgtaaaccgactctgttgctcgctaccataaaagctttggataatcttggattggattttcaacaagctgagctcatcttatt

SEQ ID NO: 108222 - DNA, 223 bp, Arabidopsis thaliana columbia
  unsure (1)..(223): unsure at all n locations
ggntgaagctaagaaagctgcaactcaagaacaacctttcgttactcctgctgaggttttggtgtcagagctttggaaacagaggcttgtgctactcctcctcctatggtgttaaagtatggtgaagaaggacgtgaaagaaacagctttcagattgatgatcatgatgtgactgatgaattggaaaatgtgatgtttggtggtgattatgttaaggaggagg

SEQ ID NO: 108223 - DNA, 365 bp, Arabidopsis thaliana columbia
gcaaataaaccttttataaaaacgcttttctaaactgttgagaaccgcactcaaggtggatacattgagaaggagcggggcttttcccttatcaatttatctgtgaatgacattgctcaaggaaataattaaactttttttgcatttttgagtgcactaatgatatatacaatgctccaacttctgaggaacttgtagatcacactttttaggtcaaaaaaatttcttatgcacaaactcttttacttgaccgaatataatattttttagagtgtgtcttactatttcaaacttttttctttctttacaataatctttctcaaaacaattcttttttttgaactctctattgctttataaacaat

SEQ ID NO: 108224 - DNA, 454 bp, Arabidopsis thaliana columbia
gttcagcgactcttgtggctcgtgttctctggtctgcgaaaccgatgggaattcgagtttgtagacaagatgtgtgtggtgctttcttgtcggattaggtttatgtcggagaattctgtatattccttctccgacagctctcgccggaggtttgtgtctatgtcctcgagtcttcgtctcatactcctctgcaaagaaaacaaatatatatcacaaaattcaccaaatccttttacaattcacgaaattcttacctcctttgagagcatttttaacatcttcaacattggtcgtcaccatttccacgaaaccccaaaaaggttgcgacttcttgctcggatcaagaagacttttcttacccatcacaatgaatcgtagcagaagctgtttcttgatgttcactttctacaaaaaaaaagacccatattattaatccttgaataagagctcaatc

SEQ ID NO: 108225 - DNA, 336 bp, Arabidopsis thaliana columbia
aggcgtacgtttcccttcttcaatgcatacgagctccaattatagaagccaggaagctgaggatgcttcttgcgcagttcatgaagcccgaggctgtgaggaggtatgttggtgttatggatgagattgctcaaagacattttgagacggaatgggccaatcaagatcaagtcattgtcttccctcttaccaaaaagttcacgttttcaatagcatgccgttcgttcctgagcatggaagatcccgcaagagtaaggcatctagaagagcaatacaatacggtagcggtagggatcttctcaatcccaatagactttgccaggaacactcgttaac

SEQ ID NO: 108226 - DNA, 434 bp, Arabidopsis thaliana columbia
cggacgcgtgggaaaaaaaaaaaaaatttatataataaaaaaaaaaaaaaaaaaaaaaaaaaagaaaaaaaaaagggggggggggggggggcttcctagtttacctacccttacttccccctgcatgcgccctcatatctttcccttaaatttaatttaattgcacttcactttctcaccgttttacaccggaaaacctttgtattcacctagactttcccttctttaatccccttccccttatccccttttcgtcatttgtaaaatgtccaattggccccccctctttctccttttccaaaactttattttccattgtgtccatcctttccccccctttttaatcccttttatttctgtgtttccggccgtttttctcctttttttttcttcattttttatgccccttactttcctttttttccttttttttt

SEQ ID NO: 108227 - DNA, 169 bp, Arabidopsis thaliana columbia
cgggccggcccacgcttccaatcatctatcaactctttccagctcaacttcttctcttttacataccaactccaaactcttgccttctctttcagttggatgtttcctcaaaacatttttatccttccaattttttctcaacaaacattattttttactcaccttaatt

SEQ ID NO: 108228 - DNA, 153 bp, Arabidopsis thaliana columbia
  unsure (1)..(153): unsure at all n locations
gaatataaaaagngtttttaactaacctctttactctttgagaaacatccttttcatcttgagtgtactctgatacatgtcgccgcttccatttaacttaataattcaaatgacctctatctaatttcctgcaatttggttaaagactaccct

SEQ ID NO: 108229 - DNA, 239 bp, Arabidopsis thaliana columbia
accgctttctctgttgatgaaccctctgaagcaagttctttgaatcatccgagcttagacgcgagggtccatagatttaaccgaggttgcaccaaccatatcttatactgcgatacgaatttctctgtctcagatgcagagattgctgaatggatcaaattcagctcgtgaaatccactgatagctacaaatggatgcactaaataatgacgtctaaagaataacgcgccacaatgatg

SEQ ID NO: 108230 - DNA, 115 bp, Arabidopsis thaliana columbia
ggcggagaaaaaggatgaaccaaatgtattatttttttccaaacacgaaagccatatcttctgggggaccttcatcacatcgggcggggaccatactatctgaatctcacctgct

SEQ ID NO: 108231 - DNA, 410 bp, Arabidopsis thaliana columbia
gtgagctcattgacgagtcactcattatctttgtagacaacaagatagagatgcctatgggttttcaagacatgggccgaggtattgttcatgaagaagatgaggatccatgtgaacgtaacatattgtgggactcgaaggacatcgttgatgctttgacaaacaattcaggaacagaagcaattgagggcatcttcctggatgcgtctgacttgacctgcgagcttagtcctactgcgtttggtaagatgtataatcttagattgctgaagctctaattgtcaacctctgggaaccagtgcaagcttactctaccttacggcctaaacactttgcctgatgagctaagtctactttactgggagaaataccctctgggttacttgtctcagaaatttaatcctgtgaac

SEQ ID NO: 108232 - DNA, 449 bp, Arabidopsis thaliana columbia
tctagcacttgtgctacatatggagagcctgaaaaaatgccgattactgaagacactccacagggaccgattaatccatacggaaaagctaaaaagatggcagaggatatgatcttggatttctcaaagaactctgacatggcggttatgatcttaagatacttcaatgtgattggttcagatccaggaggtagattaggagaagcgccaagacccgaacttcgtgagcaaggaaggatttctggtgcttgtttcgatgcagctcgtggtttcattcccggactacaagtgaaaggaacggattacaaaacatcggacggtacttgcattagagactatatagatgttactgacctcgtggatgctcacgtgaaggctctcgagaaagctcagcctcgaaaaagtggtatctacaatgttggaaccggaaaagggagaacggttaaaga

SEQ ID NO: 108233 - DNA, 538 bp, Arabidopsis thaliana columbia
  unsure (1)..(538): unsure at all n locations
gggaattcaccgggtccgagcccgagcgcgtccgcnntccgttcttcaaacccannaatatggcgtccagtcatttttnncagcgggagatatangnnagtcaacagagtgtaagaagggtgcccttttgcgatcacgcccgtgtanngttcctcttccaagcttaatgagaattacccccaatctatatccaggagcctactacaaanggtgtatataaaaaaccgttgcgtcaacctgcgaccaaagttatctgaagaaacctgtattatgtgcttctcgtgtggaagtgttgtgttctcccatatggagcccttgttgcagagaaagtggttgtcctaatcatgcaattacctgtggtgctggtactggtgtatttcttctgatacggcggaccacaattttgctacaaaggtttgcaagacaatcaccttggccatctccttacctggatacgtttggagaagaggatatcgatatgatcagaggaaaacgactattacctgatgaagaacgttatgctgctttaacttacttg

SEQ ID NO: 108234 - DNA, 306 bp, Arabidopsis thaliana columbia
caaagcggaaaccagccccccgccaagggctgggaagaggaaagcgccgagcacggcagcgaaccaaccggaaggtacaccggagacacagatctgcaacatgagcgcagcaacggcgacaacaatgaagcgagtagcggaagagacagaccacgcgcagagcacacggagaaggagcctgggactaaggatagacacagaacaggaccgtacggtcagacctaacgaacagagaacaacgccaaaggccaaaccggagcaggaaacaacagggccaagggacacgacacggaaggagcagaacaa

SEQ ID NO: 108235 - DNA, 161 bp, Arabidopsis thaliana columbia
  unsure (1)..(161): unsure at all n locations
ccggaaaggcctgngagaaagcnncggcatactttttccagacaagaannggctgggacgagccctggcaacnacgggcaagaagaagaagaaaacnaaaangccannagaggnaaaaccaacggaacaaccngangcaccaaangacacngganactacc

SEQ ID NO: 108236 - DNA, 317 bp, Arabidopsis thaliana columbia
  unsure (1)..(317): unsure at all n locations
cacaacctagctagctagnaaacagttttaaatatattctaaaaanggcnncaagnaccagagcgcgnttcgaggcacncaagcggccctccaacacaacaaacnccgccgggggnagcngaaccccgagcggcggaggaagccccacncccaagccaaagccaacaccaaaaccaaccccaagcccnagcncaggcncgagcaagagcccaaaagacacccncaagcncggagacagcgccaangngcncaacggccaccaggacaggacccanggcaagccaccggncgagccaagccgcagccacaaccaagga

SEQ ID NO: 108237 - DNA, 188 bp, Arabidopsis thaliana columbia
  unsure (1)..(188): unsure at all n locations
aaggancgacccacgcgnccgcggacgcgcgggcncaacncnncnncncgcattgactagttcgccaaccccgnggagaaccggggacatggncatgagancggaagagagccaccccaaaaaancgaaangggaaancganaagccaggagccaaggagaaanggcggggaaacacaggancccgag

SEQ ID NO: 108238 - DNA, 342 bp, Arabidopsis thaliana columbia
  unsure (1)..(342): unsure at all n locations
cggacgcgnggtcggacgcgngggcagaagctagatggttttcaagacgcgnngcaaaaacagggggncncnaaacaagaagccgaaacccccaacaggccgcaangncanggacangaacgcanacgncggaggcnnngcagcaacccaagcatcagaacccgagaggcgcaagaaggacacaccagcncggaagccaacaacncaagacgangagaaagacagaggncncaacggngacaaccaagagnggngcgaaccannnncaacananccccgcacgcacgaaaacaaccaaggaacaggaancgaancacagagaaaacgacaagacncaagcaa

SEQ ID NO: 108239 - DNA, 336 bp, Arabidopsis thaliana columbia
  unsure (1)..(336): unsure at all n locations
ggggcgacagganncagaggcaaaagattgataggtttgnaaaggggaggnancagggggagcggngacggcaaacnanggacgccccacacagaaaagagaancngaggaggnnacaaacaccaagagcgccgcgagaccccaagcacgacgcacagagaganngaggacnacacnnaacagggcagggcaaanaccaacggaaanacnaagacacnngcagganaggcacgaaagggaaccaagcacaggagaaagacgcgccagaccaacacaaaaccgggnaacgaccncgaggggaganagagcagaggagaaccagccaagcgaagcacc

SEQ ID NO: 108240 - DNA, 297 bp, Arabidopsis thaliana columbia
  unsure (1)..(297): unsure at all n locations
ggagctcgagccanngannagaagaattcattaattttagcgaagaccggnnagcaggggggggggaacaagggacanggggccaccacaccagaagnagcnccncgnccacgnacacgcaaaggaaaaacgagcaagaggacaancccgagcagaaaccggacaaaggaagcagccggacaagcaccccaagagaagagaaacaccgagcgcccgaaggagggaaaagacaaacgngcccncaaggacgccaagaggaaggcgggaacccacaagagagccaagcgaaagagagag

SEQ ID NO: 108241 - DNA, 201 bp, Arabidopsis thaliana columbia
  unsure (1)..(201): unsure at all n locations
ctgagctctaatccngancggagaggtgactagctatacngaanncaanncngaacggggggggcgctcacaagcancccgagacgccccacaccnacaangaaagagangnagcaancnatgcanngggaancggcgcttggggccaagangcngnggannccgaagagcncaagaangngnancacagaaangggcagg

SEQ ID NO: 108242 - DNA, 298 bp, Arabidopsis thaliana columbia
  unsure (1)..(298): unsure at all n locations
gngncttcgatcaaaccagagagccgttaagtatatttaaacaaagaccggagaagaggaagggganacttgcgaccgaaacgacgcgccacccccgacaggggnaccancaaggancacgcaaaagngancgaagacgaaggaccacgcgggaagcgaggacgcgaaaacaagcaacncaaccncgagcaccagcggaacaaggaaccagagaccggaaagaagaagcncaagaccgacnccgagggaggaacacgcaaaaccagcgccaccaacagaaccgaccagagccacgacg

SEQ ID NO: 108243 - DNA, 235 bp, Arabidopsis thaliana columbia
  unsure (1)..(235): unsure at all n locations
gaaaaccgggcgacccaccgccgcgatgacaccaaanggggggtttacatactttaaggccaaagagaggcggctgagaancaggcggcngagaaccctcacaggacagncnacgacganaagagaangaacgggcgaaaannngaggacaaggaggnncaaaaggacaggaaacaagnaccncaccaganngngaacaaggaagggaagccaaacanncaagccaagaacaagg

SEQ ID NO: 108244 - DNA, 370 bp, Arabidopsis thaliana columbia
  unsure (1)..(370): unsure at all n locations
gaaacccggncgacccacgcgnccgggggagggaaaccacnacncgcgaaatagatanaatgccagagcnaacacnnacaagggggggcgacagagggaaggggcgcaccccacagacaaaaggncgacgcggacacagcccggcgcacagacgaaacacgagaacgcgacggaacgcagggacccggagccggcgacgcacgaaacaaaaaacggcccgaccaacacacgacggaaggacaggggccaaccacggagggaacgggagacggagaaagaaggcacgagaacggagagggagccagagaaacggccaccacaaacaaggaaggcagcaggcgcgcaaaaaacccaagcccgacacggggag

SEQ ID NO: 108245 - DNA, 451 bp, Arabidopsis thaliana columbia
  unsure (1)..(451): unsure at all n locations
gagacagagaggtagagagaggaacganggctgnatagattaagnagacgangnnggaagaacaatagaggtagagactgtgtgtgaaaaaagagaaagaggagaggaagctgaaacattgactccatgggagcaacactccagcatcataagcatccctcgattcgactacaaagctccctcttctctgcttcatcattctcattccggattcctcgtcacctgcaacatcaaaagggagaaaagtgctactaaagaggtcatgtccatccttggaaagtatattgggtccatgcatgaggagaaacctgaagttctaaactctactgcatccaaaaaacaaaaagtttgtgcacaagagacagaggaaggcggagagaagactgtacctcttgagaatgatgccttgcaggaaacaggtgaaaatccaaatgttgaggatcttaaatta

SEQ ID NO: 108246 - DNA, 384 bp, Arabidopsis thaliana columbia
  unsure (1)..(384): unsure at all n locations
gccaaactcatctaaaacgacaaatttttgtaataaattgnatttgaaaagggttttcaagaaaacgatatccatcaaaaatattatgattttttctgtcaattaatattctttcattcttttatagagttgatcaacttcatgggcattttttagttccctcaagttttgatcctcttattttatttctttttttgttgataaatttattttagttttgatctatggaggttgcttatttcaaacctcgttgatcacttttatttctgtataaaccaaaaaaccagtctttggaatttttctaaaaagacaggttttatttcttcaaccattttttaattataattttatataatccttgtttttgtagtacatttttttttt

SEQ ID NO: 108247 - DNA, 457 bp, Arabidopsis thaliana columbia
  unsure (1)..(457): unsure at all n locations
gcaggttataagctgngtagtattttttgagttttatagacactatgagaagaggtagagggaaagggaagaagcagaatgcatctgctcgggaagatcgtggaagcggtgatgaagaaaagattccagcttacaggagaagaggaagaccacagaagccgatgaaagatgatttcgaagaggaagaagaagaagatgatgaagagatggtagagaaaatggaagtagaagatgaagatgaagagattgatgatggttcagtaacaagtaaagatttgaaggagagaaagaggaagatgtctaatggaagcaatactgatctgactgaagaagagaatggtttaggatcgaaaccaaacaccgatgattccacgagatcgacatctattgggtttagacaaaatggaagccggaggaaaagcaagccgtgacgagctgctgaagctgtcgtggaatg

SEQ ID NO: 108248 - DNA, 211 bp, Arabidopsis thaliana columbia
  unsure (1)..(211): unsure at all n locations
accaagtccattaagcagaacaagccnaagcncncggggaacaagncnagccncaagaaggaaccccccaggagggcaaaggcgggggcnaaccaggnggnggacaacnacnacaggccggacnggaagaaagcngcacnggcnagacncagcgccancagcaaagggcncagggnggccaagnccggngccaagcaaagaaacagacaag

SEQ ID NO: 108249 - DNA, 329 bp, Arabidopsis thaliana columbia
gccgccgtaaatacatcggagacagtgaataaagtttctctggctctgcagctaacgtcgctttacttcagccatcaccggcacctctcggctctaccataactttccatggaaagtttgatctcctctccgtctcccgcaacgattgtccctcctccgcctcgtactgccttgtctcctgccgtttctaacttctccaccgtcatactaaccaatccttctttcacaaatctctatatttctttgttcgattctgtttgccctgtgctaggaggaatcaagaaaccaggggttttcttttaggcttgtgatcatgaagaagcgcttgc

SEQ ID NO: 108250 - DNA, 442 bp, Arabidopsis thaliana columbia
  unsure (1)..(442): unsure at all n locations
ctctttcgataccatatgagagnatgctntcatcagtatgacatagcnnnactatcccgcctggtgagtttttgattgaggttcgaaaagaggctgaaacgaagcctagctccgagactttatcgacagaacatgaccttgatctcatatcttcagcaaacgcggaagaagtagctcgtgttcttgatagtttggatgaatcttcaacgcatggagttagcgaagatggattgaagtggtggaagcaaacgggtgtggagaaaagacctgatggtgtggtttgcaggtggacaatgatacgtggggttactgctgatggtgttgttgagtggcaagaaaagtattgggaggcttctgatgattttgggttcaaggaacttggttctgagaaatcaagacgtgatgccactggaaacgtgtggcgtgagttctggagagagtc

SEQ ID NO: 108251 - DNA, 326 bp, Arabidopsis thaliana columbia
  unsure (1)..(326): unsure at all n locations
cgggcgaccacgcgccgagagagacacanccgcaaccacttttaatatcttactctcaagccgaaccagaagggaggggtccaggaccaaccacacaaaacaccacaacgtgcgatcgcaacaacatacgccgtccaaagcaaacgcaacgactaaccacccatgcgcaatcatgggacacgaaacaaagacgccggcaacaacaacgcacgaggacacgcacggaaccctaaagagaggagagacaaatcaggaccagaagcaagaccagacccgagccggcgacgcaacactcaaaggagacgaccaaacaccagaacaaaacc

SEQ ID NO: 108252 - DNA, 302 bp, Arabidopsis thaliana columbia
accaacccttccgaaaccctatttggggaatcatcaattttttttcatcaccatggatccttacaagtagggggctttaaacacgtgcaggagccccattctacaccacatacggtggtgctccattcttcaacaacattttttccctcaccatcggagaaagaggtcccggtcttcttttagattatcatctgatcgagaaagttgctaatttcaccagatagaggatccctgagagagtggttcatgctatatgcataaatgctaaagcttttttttaagtcacccctttcatttcaaac

SEQ ID NO: 108253 - DNA, 379 bp, Arabidopsis thaliana columbia
  unsure (1)..(379): unsure at all n locations
gaccggacacggaagtgccgaccgacgcatgcgtactagctgacatcgtcttgatgtggcattccttattaaactcccagtgatccgtaagtcgtgtgttcggccaagttactgcctggtgaaagaaaggaaaagagaaaagagattattcaaaccggtttgcgtttggttatttacctattttgggagagatttctctttgttgtgattctttgtattttgcaaaatcttactttggtgccaaacccatcgaacgcttctttttttcgaattcctttttttcattcctcctcgaatgtgtgttatcatggctatacaaataaataaaatgaaagacttcttttaaaaaaatacgaattnntaaaaaaaaaataatttc

SEQ ID NO: 108254 - DNA, 178 bp, Arabidopsis thaliana columbia
  unsure (1)..(178): unsure at all n locations
ctccgctcttgcaattggttcgttgctactactttttgggtgtctaattgtccanacagaaattttataaataaaaagaaaagaccaataactcactttttctaagtaatggggaaaaggaccgaaacatgccactgaaagactctactgagacaaagatggtctttttttaacgtat

SEQ ID NO: 108255 - DNA, 455 bp, Arabidopsis thaliana columbia
attgggaaccgggattgtcgacttattgtttatccccgagggcagtcccagccaccatgcgatgtttcagtatttcttgaagtgacagattcacgaagctcaagtgattggagctgttttgttagccaccgactatcagttgtgaaccagagattggaggagaagtcggtgacaaaagaatctcagaatcgctactcgaaagctgcaaaggattggggttggcgtgagtttgtgacacttactagtttgtttgatcaagactctggctttcttgttcaagacactgttgttttctccgctgaggttcttattttgaaagagacatctgctacaaaagagtatgtggaggcagactcaactaattcagtttctccgactgataacagcgtcaaaaaaagttcatttacttggaaagtggaaaatttcttagccttcaaagagataatggaaacacg

SEQ ID NO: 108256 - DNA, 151 bp, Arabidopsis thaliana columbia
acggagagagtgcatttcgatccacattggtcattctggtatccaggtcggaaatgcttgctaggagctttactaggttaaagattgcattcatcctgatggccatatgccgagtgacaagactgttggtggaggtgacgattctttcaac

SEQ ID NO: 108257 - DNA, 331 bp, Arabidopsis thaliana columbia
  unsure (1)..(331): unsure at all n locations
ccaaaaccttaaaaaacaagtgtaacctttaaatctttatgaaaagagcaaaaatggctacgtcagaaactttcttaacggaaatgccgctaaaagaatccgccgaaaaatactacaagaggtggaagaacgagaaccatgtcttccctgatgctatcggccaccacatccaaaatgttaccgttcacgaatgcgaacatgactctcacgggtctatcaggagttggaactacacatgggatggaaaggaggaggtgtttcatgntagaagatagattatcttttttaccataacttttatctttaaatgacttttgatattacctttatt

SEQ ID NO: 108258 - DNA, 215 bp, Arabidopsis thaliana columbia
  unsure (1)..(215): unsure at all n locations
cttccaaaaaaaaatctcaaaattaaaaatgaaaaatcttttcataccaatcctctcacatcttctgaagctccaaaactcataagagcctacancccctctcttctcttccncatccacatcttcacagtcttaaaccacaccttcctccctcctttccacttcctccaccaatcctttactcttcttaactctcacatctttcctttccttcc

SEQ ID NO: 108259 - DNA, 509 bp, Arabidopsis thaliana columbia
  unsure (1)..(509): unsure at all n locations
taattcccttgtcagccgactcttacttcatctaatagattatataancttcattcttattantacgcantgttnacttatatgagagatctttttatatagataaagaaaacttaatccatttttttttaancanttaaatttattaattaaattttttttacactttatcatctttaggattcactatattttttttttttanccatnacaataataaataatcttatatttttttttattttttttattttttatctattattttcctttttttttttatttttttcttatttatattttttttttattttcttttatctatattatttatcttttttcttttctttttatctttttttattatttatttctttattcttttatttttctattattatactttcctcttttttattttatattatatttctattacattattatcatttatatatatcttctccttaatctttttcattatttttcttaatataaatatttcactt

SEQ ID NO: 108260 - DNA, 238 bp, Arabidopsis thaliana columbia
  unsure (1)..(238): unsure at all n locations
aatctatttcaatgacatgtcgttgtaattctctcggatctgaatcttcnaantatgcaacgacttttttcaagaaaaagtatctccaattccctttnnttcttatcnctcgtttcttgaagaaaggcaaatactccttactttttttttccgtatctccttttttttttttctactctctctaatacctattcacttatttattttaattttttttccaacccctctttattttttc

SEQ ID NO: 108261 - DNA, 404 bp, Arabidopsis thaliana columbia
aagaaactcttttaaatgccatgaatgaatatcttcccaagatacaagaacaagtttattacgggcagatagaatcccatagtagggttttggacaagttgctttcggaaagtggtcttagccgttataatccacagattattagtggaggaaagaacaaaccaaggtttgtgtcgctagcttcatctaccaggaaaggggaatctatgttgaatgatgttaactacttgcattctcctgaaacttcagaggatgtgaagtatgtgactcatctccttgctgctgatgttgcaacgaagaaaggaatgaaattgttacatgaaggagtccgttacctgattggaagttccaaaagtgctcgtcttggagtcttatttagtagcagccagaatgctgacccacat

SEQ ID NO: 108262 - DNA, 224 bp, Arabidopsis thaliana columbia
  unsure (1)..(224): unsure at all n locations
agccgactcttacaactttatctcccaaaacacaaaacaattttttttttcttccacttctctctcaatcgccatggtctttactaaattcagacgtccttccccatctccaatcantctcctttcccttccatcatccaacacacaatccctcttctntctcaaatcatgcaccactcttttttttcgtttcacatccattactacatacaatttcaatttca

SEQ ID NO: 108263 - DNA, 390 bp, Arabidopsis thaliana columbia
  unsure (1)..(390): unsure at all n locations
tccttatccatattctcacaaaatcttcatttttctctgagaaaacacaaaaatgaagtcatcaatatcactatgtagtacttccctctnctcttctttcatctctcaacatccaaaactctccatcactgcttctcctccattgttccatacccaaacaaccaatcccatctctgtaaaacgaaaaatcataactctagcagctccataaacactcaccgcttaaacagtcaccgtaattgatacttccgacaacactccacaacaaacaataaaggttgtgaatccaaaataaaaatcaagagtggtactcatatttttttatattgataaaaacttattattagaatttgaccaacatttaccctttacataccacattcccactta

SEQ ID NO: 108264 - DNA, 397 bp, Arabidopsis thaliana columbia
  unsure (1)..(397): unsure at all n locations
cccccgagaaaatgttccacaatattcatatcgaacaataagggttctcataaatggaatgctattcaagcacgggagttccacatagagagatacanaatgctccttttgagtatttgagcaagtttcagaactcgaagactgtgtttgaaagagagattcatgcgtagtaataatggatggttcgtcggaaaatttgccagaagtggaagagaaaggtagagaaagcagttgctgcagctcggaaacaaccagacaagatgaggaagaacaaaaccctagctgtacggaagatttcacggcttctccggtttcatctcgttggtctgtgaaaaacatcgatggagaagaaaaaaaaattccttcggattcaaaaatttcaaaagttgagatgatg

SEQ ID NO: 108265 - DNA, 270 bp, Arabidopsis thaliana columbia
  unsure (1)..(270): unsure at all n locations
cggaaaacccgggtcagcccgactcgtacagagtttacaatctcaacttccaaaccgtnatgctttttgtccggccaagatgttntcatagccctttttctaacatactgatcgacnntnaacccnccacttgatgtcttgtctattttggcctttacttcttccacatctactccaaatttagacagactcaatttttttttttctttccattcttaaatctccccaatatgtaacatttttattaaacaaatattttgtacatttttt

SEQ ID NO: 108266 - DNA, 117 bp, Arabidopsis thaliana columbia
acagtattaacgcttctactgacttacaaaattctcatatcatataatcctcactatatacttagaaacttttacgatgaaagaaaatacttcaaccacttccatggattctttgat

SEQ ID NO: 108267 - DNA, 445 bp, Arabidopsis thaliana columbia
  unsure (1)..(445): unsure at all n locations
gactcatcctcatgaatcttacggatcaccccaatgtactctcatatcaagcagagtagaagaaaccagagagcaatatatataaaagcacaggataanantatagagaatcaccctgtctctttaaaacaagaagataaattaatacacacataagtgtatgtaaattatatatctttattgtttttagcattggaagccaggaagaagttgtttgctgcaaacattaatgagtagacttaaagatattgggaggttcaaagttattccaatatatttttccttaatatactttcttaatactatcttcttactgattggatggtattcttttatattttatctcattttttaacctattattttttaatcaatataatattaatttcttttttttcaattttttaatatataattctataattcattattatactcatttaat

SEQ ID NO: 108268 - DNA, 340 bp, Arabidopsis thaliana columbia
  unsure (1)..(340): unsure at all n locations
tttcttgtctcggccagtcttatgactttctcttaagctgtcgtgcattccatcaagggcgtgttcctaaaagatagcaagaggaatcananactgancnagtgtttaacccatgcaatgtatgataactgcctgtcaaattagcaaggccgagtgttatcattttttctttgtgtgacagatcttttctggtactgggacttgcctagaaccatataatgattctaccgtttccaaagctcgttcgcatcatccgttgtccatatctttgccttttcacaaatcgcatacattatctggatggaaacagcaagccctttttctaatgaattcacccaat

SEQ ID NO: 108269 - DNA, 269 bp, Arabidopsis thaliana columbia
  unsure (1)..(269): unsure at all n locations
ctcctacaccatttgaacccttttttattctcacagtgtttctagttctaggaacgtcttatagacgaaggaanattggaaaattgatcggattttttcgggtgcttaaaccatttatcaacttcatcttcttcagactcttgaagagctctgttctctttttgttggaatgagtctaaaccatctatgaaactccaaatgtcaagatctaaatcaaaatgcatctccagcatctctgcataagacattgaaacatttggagataactc

SEQ ID NO: 108270 - DNA, 418 bp, Arabidopsis thaliana columbia
  unsure (1)..(418): unsure at all n locations
accaatcttcttcttcttcctcacacacatactttctctcaccttatcctccnanatcnnaaaagatgganttatccacataggagagagacnnaatttaccnatcacttcntccaacactcnttcttcccaaatatccaaacacatcnttaatctctttcctcttccatttcttctcatcttacccatcaaaactcactatctccaattccaataccttctattccttaaccttctctcaactcaaatcctccatcactatactctctcacatattccaccttttatatattcncaaaaacaacntcttgtttattttcactcctaactcttaccatttccctctctttttcctcatcttaaccccaatcctcttctattttaccacctctaatcctttttacccttttaatatatt

SEQ ID NO: 108271 - DNA, 462 bp, Arabidopsis thaliana columbia
tttctattgtaaaattccccggtggaggcgttttctcaatggacaaccaattttgggctttgcaacgctggaaacacgacgataggcagagtcgttcacttcgttcgtcttctagctgaaaagtgcgttcgctttgcagacagatggtattagctgtcccgttgtcttgggagggagtcgctcagagaattgtgcaccgcaccgaaccatattataagaggcacatgaaccgtgatacataagtagttaacgacagttgttgccttgagagctcctccatatgactagcaagtatggacgaagatccagactcatcacagaagattatttgatcgccttaacgtgacgataatatacacttccggtagtttactaaccgatagcttttgcaacaaccttctactagctgggtttgagcaagaacctgaggatcatgattcggtcatcaacgatggtggtgcg

SEQ ID NO: 108272 - DNA, 393 bp, Arabidopsis thaliana columbia
gcaggatgggtcgtgcaatggtctacagcattatgcagctttaggaagagatagtgtagcgtctcttgtgaacatttatgatgggcttttttctcttagtaattttcaatctcatatagttctcttcttgtaaactggcttctctcagtttgaagctgcggcagttaatctagttgcaggagaaaaaccagctgatgtctactctgaaatttcacggagagttcatgaaataatgaagaaggacagcagctaggatcctgagtcaaacccaaccgccgcactggcaaagatccttatcactcaagtgagtatcaacggttttttattgaacattattccacagcaaaagttcttcccagtgatgcaattttttcttctaatttcaagtccaca

SEQ ID NO: 108273 - DNA, 266 bp, Arabidopsis thaliana columbia
tctagtgtagattacacatttgatgttctattttttccccagattcttcgccaaatgtctgatgatatttaggaaagggaggggggccctcctatacctccttgggataatcttcattattggagagtagacaatgctgttccataccaggatttacctatcattgatctttattctctctttcaacttaataaatttttaaaatattttccaaaattttctctaactaccatttctttataattattcaaatcatacaaagattt

SEQ ID NO: 108274 - DNA, 438 bp, Arabidopsis thaliana columbia
  unsure (1)..(438): unsure at all n locations
ctcatcttcacaggaaacaatggtgtttgttaagtcctccaaatcgaatgcttacttgaaggcgtaccaagtgaaggtgacgcaaggatanatgggaagactgattacagggcaaggatccgtcttatcaatcaagacaagaacaagtacaacacccctaagtaccgttttgttgttcgatttaccaacaaagacattgtggcacagattgtatctgcaagcatagctggtgacattgttaaagcttcggcttacgcacattagctttctcattatggactcactgttggtcttaccaactatgctgcagcttactgtactttcctttttttggctcgttcatttttttaatattctataaatgtatgattagttcctatgattcttattagtccactttttagtccttttttattttatctcactgttttttttaaa

SEQ ID NO: 108275 - DNA, 353 bp, Arabidopsis thaliana columbia
  unsure (1)..(353): unsure at all n locations
cattaccatcactctctttgtttcgttactttcaatgaaggataatcttgaaagagcggagcttatggtttcttgtaccgcctttcatnacttcttctgtgtctctttgcagtgacaacatctgtttcagttcagcctacgtgtacttttccggcgatttacaacttcggagattctaattccgacactggaggtatctccgccgcttttgagcctattagggatccttacggtcaaggtttcttccacagacccaccggaagagactccgatggccgtctcaccattgatttcattgctgagcgtgtggggttaccgtatttgagcccatacttaaactcgttaggatcaaa

SEQ ID NO: 108276 - DNA, 393 bp, Arabidopsis thaliana columbia
gaagattttgacaacagaatggttaatcactttgtccaagagttcaagaggaagagcgagagggatatcaccggggacgcggagctcttaggaggttgagaacttcctgtgagagagcgaagaggactctttcttccactgctcagaccaccatcgagattgactctctatacgagggtatcgacttctactccaccatcacccgtgctagatttgaggagctcaacatggatctcttcaggaagtgtatggagccagttgagaagtgtcttcgtgatgctaagatggacaagagcactgttcatgatgttgtccttgttggtggttctacccgtatccctaaggttcagcaattgctccaggacttcttcaacggcaaaaaactttgcaagt

SEQ ID NO: 108277 - DNA, 306 bp, Arabidopsis thaliana columbia
gcaggagccggagtgattggattatcgttagctacatcgaggaaatgcagttctgtcaaaggcggtgaggttaacaaagaaggacgctgtcttttgagaaaacaatccagcggttgccgaactcattgaattgcagcatcagttggcaccatgcagatgcttcagttaaccctctttcgtggataataggatcagatgtagtcgttgtggatcctcctaggagaggtctggatgcttctctccgtcagatgctggagtctgttcccttcattgagaaaagaatgaggtcgttatcacagagttcaa

SEQ ID NO: 108278 - DNA, 259 bp, Arabidopsis thaliana columbia
ctttcttcagaggtaaaccaccgtaaattcacctcagaggaacatgatccacatatactcacccactctccctttggtaacacctggccaactatctcactgcttcttaatgatagcactgataactcaattaataatcactttaactcaactctacaatcactaatgtaactgctaacgctgtcaataagacaacaaacatatttgctatctccgtaatactagaggttattatggctatttaacttatgaacttccc

SEQ ID NO: 108279 - DNA, 355 bp, Arabidopsis thaliana columbia
  unsure (1)..(355): unsure at all n locations
tggctaataaaattaccgtcaaattttacgttgaaacctcgccaacgaancntatttgtcgcgctcatttctacgcgccgcccgcttactaccattttaactcttttatttaanctttanttcttatatctttatcattttcctttctctccagcttttaccctcctttttttttctttctttttaacaacattattcttttatctctcttttatactcctttcccttatttatctcttaattttacctttaccttttcttataatttctttttaatctcctactttatatctttattccatctttctctacccatattttataccttttctattattttacattttttttattc

SEQ ID NO: 108280 - DNA, 314 bp, Arabidopsis thaliana columbia
  unsure (1)..(314): unsure at all n locations
ttaattcaaaatttttttttccatgccgatacatttatacaaagccggtatctttattacaggcagccggatccttatacattcaatttaaattcaatccactaaataatttgatcttgttncatcttcattnttgttatactcttaatgtctttttttttttttccntaaggtatatattttttattttttctcttcttttcctctttctctttttctcttcttttctttttccttttttttttttcttttctttttttttttttctctttttctttttctttccgtttgtcctcctctttttttttttcttt

SEQ ID NO: 108281 - DNA, 352 bp, Arabidopsis thaliana columbia
  unsure (1)..(352): unsure at all n locations
cacatctttctcctttgccctcgntttttttcggttctcggctttcgttcttcacttttaggcgggcaaatatgagaggccgaggggacaggangacttggtggtggaggattcagaggtggaagagatggtggtggatgaggtttttttgggttttttnttttttttttttttntgtttgtgtattttttttttttttttttttttttttttttttttttttttttatttttttgtattattttttatttttgtttttttttaaattttttttttatttttgggggggggttgtttaatattttttatattttttttttatatagttttttttttttttattttttttttt

SEQ ID NO: 108282 - DNA, 459 bp, Arabidopsis thaliana columbia
  unsure (1)..(459): unsure at all n locations
cgggncggccgacgcgtacgctctcttcttcnctctcgccattgncgtagttctctttctctaaccctaaaatacctagagagagcatatacctgaaggcggccagtcaatcatggantacgctgctcggagaaatcagaaaggcgctttcgaaggcttttacaaacttatcatgcgccgtaattccgtttacgtcactttcatcatcgccggcgcatttttcggtgaacgggctgtggattacggtgttcataagctctgggaacgcaacaattttgtgaaactatattaagacatctctgtgttgcatcaaatgcctgtggggggtcggggtgttattttttttaatcttttttttacctaaatctttttctcataaattttactattttttttttctatctataaacttcttccctttcttcttttacttattttctaaatttttctccaattttt

SEQ ID NO: 108283 - DNA, 317 bp, Arabidopsis thaliana columbia
  unsure (1)..(317): unsure at all n locations
tcgtctccgtcgtcttctccaaattttcttctatttctcgctgctacttcttccggatcgttcttatgaatacgcgcgaaaccnaataangtctnttccaccatcatgaacttaatccgaccacttacatactcattcaatcaccaccctccattctccaccaccaccactaccacaatttcaaagtctatcccgccttttctctcccagaattcatactcttccgctattctactatcggagattctcccatactctactaacacaagcaagacctatcccttacccaaaacccccaaagtgcttatttctcaaat

SEQ ID NO: 108284 - DNA, 273 bp, Arabidopsis thaliana columbia
  unsure (1)..(273): unsure at all n locations
tttcacaacattttacttatcttcttcctctctctctcaatacctctctcgatcgctttatccaccatgcccgcccgccaatcttcatctctccntccttctcctccaaacccacttcncttaccatcaaatcctcaatcacatcagctaattaccaattctttaccttttccaagacaacaaccttccttcatctcctcatcatcatccactgtctcctctccttaacgctaaacaaatcccaacaatccagtttttattacttctatctct

SEQ ID NO: 108285 - DNA, 357 bp, Arabidopsis thaliana columbia
  unsure (1)..(357): unsure at all n locations
acgaatttacgttaatctganaagagattttgtttattgaatctcgatttccntnntcgcggcgttctattttactgctagaccaccttcttattnttgttcccttttaactccagattatccttttcttttatactttcttctcttccacgatatctgccaccaactcttttctcactttaatgaaatgtttgtccatttttgtttaatactactaataactatgtttcttttctcctctatattcgttttcttttccgagaacacacgtactgtctaatgacgcttcctttaacttgctgaataagaaagcttaaaattatagcatcttaaatttatgatttttttcacctttaa

SEQ ID NO: 108286 - DNA, 474 bp, Arabidopsis thaliana columbia
caaaggactttataggggagcaacatcgttttttatgggaatggcttttgaaagttcattgatgtgtggcatatactcggaggctgagctgttcttgcgggtaacattgcagaccaaatgatctttcactgtattttcctccagatttcaaatttcgcttctttcttgttttattgtaaagggaactttgccagatgatgggccacgaccagagataattgttccgtctgctatgtttggtggagctatcattagttttgtgttatgtccaacagagctagtaaaggtgaaatctccagaacaccatttctttccccgcaattatcacctttgatggtttccatggagttttgggacattcactgttttgttcagtgtagaatgcagatccaaagaacggattctctggtttctaacttccgtagatacaacagtcctcttgattgggccggtcaaaccgttaaaaatgatggg

SEQ ID NO: 108287 - DNA, 466 bp, Arabidopsis thaliana columbia
  unsure (1)..(466): unsure at all n locations
aacccgggccgccgacgcgtccgctgtgaaaacctcanatcgcaaatatgcactctaccggtactcgttctgagcgattcgttcgggcgtgaatctggaaccacgccccatcatggtaatatccaagcttccaaggctgttgctgatatcattcgtacaacattgggtcctcgttctatgttgaagatgcttcttgatgctggtggagggatagttgttactaatgatgggattgctacattttgccagctaggttcctctcttcctgcaactaacttatttattgttttatgcctctctctattattattattttccttttttggggcggggggggttgtattttttattttattacttacttttctccatttttatttctttttatttctttttctttcctttttctttttttctttatcttatttatttatttttttcttttttttctattttcttttttttc

SEQ ID NO: 108288 - DNA, 350 bp, Arabidopsis thaliana columbia
  unsure (1)..(350): unsure at all n locations
gataaagttctttnctcttacctcattctccgcctttctgtctagtaaaaatatcaaacatcgttagggggttcgcggctatagatatcggctcgcttggtgacctannnnaagctttcactttatcaccggagncccctatttcaatggcgaactcatggcttaggtgcgtttcttgcagggcggatatctgaaggatgtaggctgcgtggctcctcctgcttagaagttgttctagaatcgtataggtactggctgtacctaaagtatatatctaaacactnnngcaaggagttttcactcgactcctttgtcatctggaccaagcttcttggaccttgatagttggt

SEQ ID NO: 108289 - DNA, 443 bp, Arabidopsis thaliana columbia
  unsure (1)..(443): unsure at all n locations
caaaagttctctctttacttctcttatatgttttcgcgtcattagcctccggtgatgagcgcatcattaacgacgatggccggcttccattnnactgcaagtggagaacctatgaanaagtgaggtccatctacttacaatggtccgcagaacacgggaaaactaacatcaacaacaactgtatcatcaacgaccaagacaaattattcaatatttncaaagacaacttaagattcatcgatctacacaacgaaaacaacatgaacgctacttacaagcttggtctcaccaaatttaccgatctcactaacgatgagttctctaagttgttcctttgtgcaagaatctgttccttcctcctcatctttatcgccaaataattttaaccactatttctctatcctcttttaaacctccatgtttttttcattaaacttttttat

SEQ ID NO: 108290 - DNA, 479 bp, Arabidopsis thaliana columbia
ggagaaggtaaagtcttcttgaagtcgcgtatgaaatggattggtcttcttggtcttgttctctgtgctttctctcttcttggccggtttcttctcgctggattcacagatgactcaatctccgattactctatccctgtcactatcttctcttggagacctatcttcgacaatcccagatttgcccgtcatacaccattgtatagaagactttggggaccaacaagacatgtagagacattacttcctgatgctaatcctagaggttttcattcagatcctcctgcaaggacaaatggttttgtttttgttagaatacaaggtggtttccatgagattagaaactcgattcctgatgttgtagctgtgtctcggcttcttaacgccactttggtgattcctgagatacaatcaacaactagtagcaaagggattagttcacagtttcagagctttgcgtatttgtacaatggagaaca

SEQ ID NO: 108291 - DNA, 311 bp, Arabidopsis thaliana columbia
  unsure (1)..(311): unsure at all n locations
gacccacacatactcacaacatcaacatcaaactctaatttacctaatttcgnctatactataatggtcagcgcgtgttctttataatggccggacgaccaaaaaacttaaaaaacttattnaccctccagcctttttgctatttccacctcttacccttagaaccaatttctttaaacctatatattctcactactacttttccatcaccaacaattaacacattacccacctcaaagagaaattcaaacgcattttctacaaatctacaattcctaaacctcacatacattttacccaagaatttcttc

SEQ ID NO: 108292 - DNA, 202 bp, Arabidopsis thaliana columbia
  unsure (1)..(202): unsure at all n locations
tgggtctagatcgcgactgttgtccttttttttttnaaannnnncccgcacgcgtttaaataaccgcccgccccgctttatccttcatnttatctaaacttttatataaccaaccattcttcaaaatattacttacctaaaaacaccacaatatttttttttttaataaagcccaacataaaaactcttaacatatcaaaat

SEQ ID NO: 108293 - DNA, 294 bp, Arabidopsis thaliana columbia
ggcaaaggccattaaaaatgatgctgttctaaagggaatgaagaattctcacttgagagaggctgctgccctagctcagttgtgggcttgactggaagaagaagtgcataagaatgcgaatctaacagaggtcgatgtggctgacaggcttcttgaattccgttcaatgcaagatggttttatggatacaagctttgatacaataagtggttccggtgcaaatggtgctattatacattataagcccgagcctgagagctgcaatcgggtagaccctcaaaaacttttttgctt

SEQ ID NO: 108294 - DNA, 347 bp, Arabidopsis thaliana columbia
tatggtttttacctttccttccatagttttcaccactcaagtataaatcccgcccattttataatactcccgcccccgaaaattttctctttacaattttttattcaatctcaacaatcttcctttcaatcatcttaaaacaccatacgttccctttttttttttttattatccatctaaacaacccatcaacttcaccttccacgtcattatcatcaaccacccttatcctatttttaacctttactccccatttcttcattcccacacctctcacatttcattcaacttctctcacatcttccccaagatttatatccctttttcttatctatatttttctaatc

SEQ ID NO: 108295 - DNA, 360 bp, Arabidopsis thaliana columbia
gtcacactaattagtgagctctctttttttttcccaactaagttgatacaacttataaacgggctaaacataactgaggcggcgatcattttctttaatgcccaactaattcttatacatccaaaaccttttcgaacaacaaagccagaacctagaatctacccaatatatggttactgtcgcctaatctcaagactatgacgaacttaactgccaccaacgctagaaatggtgccacttgatactaacttgacgctcgcatggtttgtttggctgcgaacaaagccattgattgtacaaattgtgaaacatctggcttacaaaaacgaaaagtttctgttgctggactccaaaagcaca

SEQ ID NO: 108296 - DNA, 357 bp, Arabidopsis thaliana columbia
  unsure (1)..(357): unsure at all n locations
accgctgtaacaatatgtcccgcaagctgattgttttctggctcatgggtgccaaanagaagtggcgcgctggagatgttccggcaggccgtgctattctacaagaggcttatgctgcaattcccaactctgaagaaatctggcttgctgctttcaagcttgagtttgaaaacaaggagccggagagggcaagaatgctgcttgcaaaaacaagggaaagaagagggactgaaaaggtctggatgaaatcaaccattggtgagagagaacttggcaacctaaaagaggagaggagattgcttaatgaaagtttgaagcaatttccaacattcttcaagctttgggtaatgcttgggc

SEQ ID NO: 108297 - DNA, 426 bp, Arabidopsis thaliana columbia
atattacaatcctgctactgtacagatgctctccaactcatgggttccaaacataactgggctattaaagatggtagggaaggggcggctttctatcatacagtgggaggcacttgctctgttgctgatagggaatagtgtaaaccaattaccgtcttcttcctgaagtgcctacagccatggaaattcctctggctacgggtgcatacgtctgcaccgttatctttgtcactgtcccgtcaatggcatctgtcttcaacgagtatgctctaaagagtcagtatgacacaagcatatatcttcagaatttattcctctatggttatggtgcaatattcaactttcttggaatactaggaactgttatatataaaggtcctggcagctttgacatcctacaaggacattctagggctaccatgtttt

SEQ ID NO: 108298 - DNA, 292 bp, Arabidopsis thaliana columbia
gacggaaaacccgggtcggcccaagccttccgaatgaaaggatgaagtaatggtttggccatttttaatccaaaccccactttcaaaccagggaaggcttccaacttccggcaattgggtgggttgagagatatatgtttatagtggaagagacttgagcctcttcttaaaaatacccaactctgggagaccccaactcttttctctgatactagaccccaaaaaaagaaagtgggtgtgggagcacatagcgatgatattgggaagcccgttgtcttttaaagtgtcatag

SEQ ID NO: 108299 - DNA, 462 bp, Arabidopsis thaliana columbia
gctaattttcaatcgattttgcagaagtttgttgctcctggaatagaaatcgaagatggagaagtacggattgcaggtgagagctccttcccagaaaaaacaatcatcatctcgacctccacttcgacccgcttcaatatttgatgaagaagaagatcacgacgtcgagaaggagatttctcgtcaagcaacaaagaccaaagctcataaagaaattgaggagcagcataagaaagccttagaggaggatccttctgctttttcatatgatgaagtttatgatgatatgaaacagaaagctgttcttcctcgaatgcaagatcgtgaagaacgcaagccaaggtatatacagaatttgatgaaacaggcagaacgtagagagaaagaacatgagatagtttatgagagaaagcttgcgaaagaaagggagaaagacgaacatcttttttcggataaaagaaa

SEQ ID NO: 108300 - DNA, 213 bp, Arabidopsis thaliana columbia
acatatatagaagcgggcgccatgaacctaatacaaatgattccaatagcagatgcgaacactttaactccaccactaaaccctgtaaagtcgcaggaaactacaaccttcatctaatcattatcaactaccctaacaaaatatcaaacgcctacccaagaaacaactaatgatacactcgtgacatagacagcaaaacctatcaaataaaca

SEQ ID NO: 108301 - DNA, 294 bp, Arabidopsis thaliana columbia
  unsure (1)..(294): unsure at all n locations
gcgcggacacgtgggcgtgaaatcaccgattaggtttctgtgcaaaagagtttctccgccatgagagctaggtggaagaagaagcgagtgaggaggctnaaaaggaagagactaaagatgagacagcgatctaagtagactcatcttcaaaaccttccctgtttctgtcttttcgcttaaatcctaagtacttttgtctgaacttgtttcaattaaattattccttgttgttggattgttatggattctcaattaatgttaaagcttaatctatctactcaatttattacgaat

SEQ ID NO: 108302 - DNA, 431 bp, Arabidopsis thaliana columbia
acggaactcggagttatgggacagtaatttggaattggaaaacgttgttgaatcgattaaagggtggtcaacaaaagggaagagaggaaggagaggtgatttgaagtttgatgaagcagatttgaaggatccacctttagaagatgtgaaggatattgatgatgctaatggtctattgttcttagctactactgcagaagcagctgctaatcttaatgttgctgagacttctgcttcgcgttccgttgaagagaaatatctggaaatggtcaagaagaggaagaagaagcagaagagattgtctgagatggagaaagagtcatcaacatctactcatcatgatcatcagcttgatcaggttgttgttgttgcagctgaagaaagtggtggtgccggtgcacgtgagaagcacgtgtgtgtgacttgcaaca

SEQ ID NO: 108303 - DNA, 201 bp, Arabidopsis thaliana columbia
cccctaattcatgacgtttaaatttttaccgattttcttttccaatttcccttcgcaaaaccgccgttgttacttggaaagtcttggtgtgcaaatcgaagtaaaaattccattctacaaattccgctatggataccacctattttcatcatttaaattatttaaaaaatcccttttttccaaaaccatttttcacaattt

SEQ ID NO: 108304 - DNA, 275 bp, Arabidopsis thaliana columbia
ccgaaccgcaaggccgcccggcctacccatacttcaaattcacaaaatattcaaatcccttctaagatgactataatgccagattatcgggtggtaaacaaacaggggctggtgctccattcaccaaccactacccacataaactaaaaatgtgcttcagagccagatcatatttctaaacttgctgatgagctcttctattacaaaacacacctcactaagaccacaccttgtactgctgaagacgctacttaatctaacactatgcgagtttt

SEQ ID NO: 108305 - DNA, 214 bp, Arabidopsis thaliana columbia
gacccaactaatatggcttaaactaattttacctactttttcccttcttttaactcataaacaaacggagggttacatccatggggggtgttgaaagatcaacaatctctttctcccgacagagatcttcctgtataatgtttgacgatcgtcttatcgcccaactcaacaaatctttatacaactagccaaaagacaatagtcaacccgacta

SEQ ID NO: 108306 - DNA, 239 bp, Arabidopsis thaliana columbia
aggaacggggtggcgttattaaaaaagagcacaagaagaacaaagaaaaaacaacatcgcaagagacaacgcgtaaaacacttattaaagatcaccatttaccataggcatgaatagacctcatatgaaaaatttaaaaaatagatttgataacttattagatgcatggaattaaggattaagagctccatcatcaattggattaaggacgaacattcaccccaattttgtggatcatg

SEQ ID NO: 108307 - DNA, 193 bp, Arabidopsis thaliana columbia
  unsure (1)..(193): unsure at all n locations
aatcgccccgctcgccntccaatcgcnntgctatcccgatcccctcctctctgctgtctgaccccaggaggaagtgacccttcttggagttccgatctaatactcaactcaagttggtgcgtaacccgcatgaaagagttgttaagaacatctcaaaagatcacaaaaggcaattgaagatggtttgctgctt

SEQ ID NO: 108308 - DNA, 300 bp, Arabidopsis thaliana columbia
caaggcttttatatccttaacacgattattgataatctggactacagtgtgattgcgccttggatgaaaggtgtgtggggtgggctattcacacgcgttcaaaacaaaaagacagtcaagttccagaagtcgctagtaatattcatgtcgcttttcttggtgaagcatgtacaggcttatctagtggagactatgaatactgttcagccaaacatcatcactgctatcgtggagcatttctggattccgaacctgaaactgatcatggggagtatggaggtcaagttaacggcagttgct

SEQ ID NO: 108309 - DNA, 182 bp, Arabidopsis thaliana columbia
  unsure (1)..(182): unsure at all n locations
ttttacaaanttnttcttccaatggaaatgagtggaattctgagccaaaggcatgtcactctcttaggattaattgcatcagatttaattcttcttttgatggagccttttaaacctttatgtatatgcaatgcggtatcttgtcactcacagcacnnctgccttattagaatgtgtttgat

SEQ ID NO: 108310 - DNA, 408 bp, Arabidopsis thaliana columbia
cgcgtacgtatgtgtatggagtgcttgtatttgaagccatggccacatttatcggtcaagtctccgttgtctcggttattactctcgtttgaggcgccacaactgccttgataacaacggctaggaaaggggttacattgttgctgtcgtatttgatattcacaaagccgttaacggaacatcacggatcaggcttgctgttgatagcaatggggattgtattgaagatggttccaatggatagtaaagctccggccaagattccggcgagaccagcggttaggatcgcaagaggcgatggtgatagaaaaaaggacgaagaaagggagtcattggtttgagaatttgccatgtatttatatatatttaatctcacaatatcaaaaggttttatataataatgtttga

SEQ ID NO: 108311 - DNA, 283 bp, Arabidopsis thaliana columbia
  unsure (1)..(283): unsure at all n locations
acacgatttagttttttgaaaccctaagctcgatttcgatcctccggcatactcnatttggcctgcgaatctatactggtctgccgtgttactattcaatcnncnagaatgtcgatgtctaagagttcaaagatgcttcagttcatcaactacaggatgcgagtgactattcttttctgaagacatctcgataggaagttcatgtcctttgaccgtcacatgaactcttttctcacctattgctattattttttatagcttccaccaactaaatggaataata

SEQ ID NO: 108312 - DNA, 442 bp, Arabidopsis thaliana columbia
gcggaagaacaagatgccaagacatttgcctcatgggtatgtatatttgtatgtgttatgtctgaactggtgtcctgaaccttgaaggtgtgcgttttcgttatcatgtattcgacaggggattgattacctcaagtatgataactgcgaaaatacagggacaagtccaagagaaagataccctaagatgagtaaagcgctgttaaattcaggaagatccatattcttctctctgtgcgaatggtaaaaaagactaattaagaagaagattcacttattcagacaactatggtctgatgatactaaacaagaaattgactggtaagtgcaagggacaagaggatccagcaacttgggcaggagatattggcaacagttggagaacaacaagagatatccaagataattggaaaaggtttcttttctttgatggttttttccc

SEQ ID NO: 108313 - DNA, 344 bp, Arabidopsis thaliana columbia
  unsure (1)..(344): unsure at all n locations
aactaatcttaaagatgtaacctaaaataactaaacaatttaagtcgngtacccngttgttcatctaaaaaatcagcgtgagctgttccaacaaggcaacatatggtgtcacttgctagtgatactggtggaagtgtgagacatccagcttcgttttgtggtgttttttgtcttaagccgacttatggacgtgtttttaggtttgggcttatggcttatgcgtattcattggatgtgattgggtgttttgggttctaccgttgcttatacttttatgcatctttattctatttaaattattggtgggtggggggggggggtggacattcaaaatttactttttt

SEQ ID NO: 108314 - DNA, 472 bp, Arabidopsis thaliana columbia
gttgaatcttccggtgttttaaccgttagcgttggacctgattcacaagctgatatgactaatgcgactatgaatgggggagaggttttgaagattagtaacgaagctaagagcttaagtggtgtttcttcggttaagtcgttacttccgggaggatcaggttctaagagcaagaagaaggcagtgatcattggttctttggttggtgcggttacattgattctgctgattgctgtttgttgctattgctgtttggttgcttcaaggaagcagaggtcgacgagtcctcaagaaggcggtaatggacatccgtggttgccattacctttatatggactctctcagactcttactaaatcaaccgcttctcacaagagtgccacagctagttgcatttcattagcttctactcatcttggacgttgctttatgtttcaagaaatcatggacgctactaataagttcgatgaga

SEQ ID NO: 108315 - DNA, 381 bp, Arabidopsis thaliana columbia
  unsure (1)..(381): unsure at all n locations
acggtaaattcctcgaccgagaaagataacatggtatatcatcaagacatcggtgaatctgaatgggtcgacactacagaggggggggtanatgacnacaaagtggttgtcaaagaagagagaggagacagtgaaaaagaagaagaaggtgaaaccggagatctcataagcgagaagacagattcagttgatattcataagaaagaagatgagactaaaccgattaataaatcatccgggatcaagaacgtgtctggtaacaaaactagtcgaaagaaggtggattggacaccagagctgcacaagaagtttgtgcaagcagttgaccaactcggcgttgatcaagcgataccttcgcggattcttgagttgatgaaagta

SEQ ID NO: 108316 - DNA, 454 bp, Arabidopsis thaliana columbia
acggaaaatctgaaactctgcgttcgaattttcttagaacattagagatctggtattatctgggtgcgatctgttcacgcatggggtgtaagaagacagaatcaaccaacaagaatgttaagaaggccaatctattggaccaccactcgatcaagcacatccttgacgaatccgtctccgatgtaagaattttctaagattttccttgttcgttgctccatatttctctgatatgtgaatctatgattcgtagatcgttacgagccgtggctataaggaggatgtgagattgagcaacctcaaactgattttgggaacgattatcatcgttgttgctcttgttgctcaattctacaacaagaaattccctgagaacaaggattttttgattggatgcatcgcattatatccttttttctcgaattcaattgatactttctgctttctgcttgac

SEQ ID NO: 108317 - DNA, 372 bp, Arabidopsis thaliana columbia
  unsure (1)..(372): unsure at all n locations
agatgatttaccgaaagtggagtttgctgtccggcccaccggttatcctcngcggagcggtggttgctgccggcgccggcggattcgtcttgcaaaacgtaacgaaaggggagcagaagaagaatgtctcaacaaacaagtgagaagacaaatggagagatgctacaaaatgtggtgatcatgtgatttgatacaatttagttcttgcagtgtataagctcaataatgcttttgtaagcttttgaatacacagatctttgtggtgtttttagattcttgttactaataatgatatttcattttccgaaagagttgtttatttttataaaataataatttgattttataaatttttttatattgtttgtttat

SEQ ID NO: 108318 - DNA, 195 bp, Arabidopsis thaliana columbia
  unsure (1)..(195): unsure at all n locations
acgcaagccatggctcatatggttggagcagacgatattgagtcattgagagtaaaactggcagggatcggaagaagcgtgggatcatcattccggagacatacttcgagtttcagaagcagctcttcaatatatgaagttgaaaatgatggtgatgttaatgatcatgatgcanagtatgctctgcaatgggct

SEQ ID NO: 108319 - DNA, 314 bp, Arabidopsis thaliana columbia
ggccggccacgcgtccaataactctttcctctgttcatcatgatggtacattgcataccatttcaggcagcaccacaatgcttcaagtgactaaaaaggagggagagtttttgttttctgatataccaaaaagacctgttccatccctatttaggggattcagtgccccagttcgtgttgaaactgatctctctaatgatgacttattcttcctcctagcacatgattcagatgaattcaataggtgggaggccggtcaagtttctggcaagaaagctgatgctgaacttaatttctgattttcagcaaaaata

SEQ ID NO: 108320 - DNA, 460 bp, Arabidopsis thaliana columbia
gaaactttggtttaagcttgttgaggcaacattctcaagaatcctgataagctttctgttttggcccattgcaacactggcggccgggctaccaccttatatggtactgccctccgtgtcatccgtgcactccatactcaaggaatcttagaaagagcatactgcacagaaactcgtccatttaatcaaggatcgaggcttacagcgtttgagttggtgcatgagaaaatccctgcaactctcattgcagactcagctgcagctgcactgatgaaagatggtcgtgttgatggtgtcatccttggagctgatcgtgtggcttcaaatggcgatacttctaacaagaatgggacttacaatctcgccttgtgcgcaaaacatcacgggatcccattttatgttgctgcaccttttacctccaatgatctgtcactttcatccgggatagaaatccttttat

SEQ ID NO: 108321 - DNA, 230 bp, Arabidopsis thaliana columbia
ctgattcaccaacatcctaaaacccttttgttcaaatctatggctaccatttccagaatcttaccaacggattacatattagagtggatggggactcaacaccttatgtgtctcttctacaaccagaactcaaactcacttatattctcccaagacaggttctgcatgtaactctggtataagtttgaggattcacaatacttaacctattatccctgtctttgctcttt

SEQ ID NO: 108322 - DNA, 217 bp, Arabidopsis thaliana columbia
aaaaaaagatgcagatcttcttgaaaaccctatctgggaagacgatcactctcgaggtcgagggctcttacaccatcgacgaggtgaaggccaagatccaagacacggaatgaatcccacctgaccatcaaccattgattttccacggaaagcagctcgaatacggacgtaccttaaacgattacaacatccagaaggaatcaacgctttaccttgt

SEQ ID NO: 108323 - DNA, 230 bp, Arabidopsis thaliana columbia
gggaggcgaccagaacaacaacagcactgaacaaagaaaaaaatttcattctgagagaaacaactgcatcaacatggacgagctcaagaaaaggccggaccccaacaacataccttgaccaaactaacgcctcaagctacaacccactacgccattttcacttttttggcatctcctagctcactaataactaaaaatctttcttctgaatccctacatattgaagatct

SEQ ID NO: 108324 - DNA, 322 bp, Arabidopsis thaliana columbia
  unsure (1)..(322): unsure at all n locations
caaataaaaaccacccatttccttttctnncctctacaaattgacccctgggtggtgctaactgggagagtgtgcaggtcatctttggaacattaaactccccaggactcatcattccactgtaagctactggttactctaattaactggagatcgatcgaacttttatagattcgggatagaaaagttcaatatttttttatttttttcttcaaaaaaaaaaggaggccagcaacgctgaatcaacctggaaacgcgngaaaccgaaaaccctccccttaaatctcaaagagccttcttaattatcgtctcagtcatttta

SEQ ID NO: 108325 - DNA, 301 bp, Arabidopsis thaliana columbia
cctttaactctctttctcttttcttacaaatccttctttacatctgggaggcggcttaactaagtggggcctctccatctaactctctcccaatcctcttccaccacctcctcatcaaaccgccggtttaccccctcttccaccgcccttccaatattcatggcccaatcttctaccttcgactttgttccctccttcccgctgtcatatttttctcctctctcgcaagagaatgcttcacaggccaaaactatgtcattttatcaaaccaccctccttttttaacctccaaatacttcgc

SEQ ID NO: 108326 - DNA, 358 bp, Arabidopsis thaliana columbia
ctcaccaggaagaactctgtaacgggaatagtgtacagaaacgatcctacgattttcgcttgggagttgataaacgagcctcgatgcacgactgatgtctctggcaaaactctccaagattggatagacgaaatgacgggattcattaagtcaatcgatgacaagcatctcctcacagtaggtctggaaggcttctatggtcctaatagcccgaaagggctcacagttaatccagaacagtgggcatcccagctcggaacagactttgttcaaaactctaactcctcaaacatagattttgcatccgttcatatctaccctgatcactggtaagtgagctggatcagagaatcaagat

SEQ ID NO: 108327 - DNA, 257 bp, Arabidopsis thaliana columbia
accacgcgtccgaaaataccaagtcctgaaggtctagttcggaggaagtttttttcgaggtcaatttactccaagcctaagtcaaggtttggggagcaacagtcttttcgatacgatagcactagagaggaaaatggtggaaggtcccttagggaacagtttggtgctggttcatttgcaaggggttctttttgacagggcttctcctaataacaaatccaataggagcgttgcgtcagcagcactgagttaagttg

SEQ ID NO: 108328 - DNA, 258 bp, Arabidopsis thaliana columbia
aacttttgcttcgctttacctcagatgtatctctttcacaggattattcccacagcacattcgcggtcttccgtaaaagctggcggtgcctttcagaattacatcactaaatgatatgtctcccaaacagattcaagcaaaagacttgctcaactggtgagtgatccaagcttgactaaatcagtgttttattggagctggaacaatgctttagctttttttgagaaccagttatcagaagaagcaagtgactttttt

SEQ ID NO: 108329 - DNA, 181 bp, Arabidopsis thaliana columbia
acgaataaatttcttaagaaagcaaatctgaagatctcactttaaacacgaaggtggaaacatcggggaaggaccaccggaggaggcgctagagcacctaacgttcgtgagaattgcaacgatccatattctggcttccgactcaaatctctacaaatacgctaaacaaaacttcggtcct

SEQ ID NO: 108330 - DNA, 291 bp, Arabidopsis thaliana columbia
gaagaaaagaagaagatgttagagtcggatctaacatttttccggagaggcaacctatcggaacttgggctcatagagacaaggggctggaatacccaccacctgctcctttgttcgagcccggcgatctagctatattgtccttcttgagagctgggattgctgagtttatatctacttttttgttcctgcacatcactgttttcactgttatggttgttaagaggtcacctaacatttgttctttcgacttaatccaagatttcactttgtctttctgaattaattatt

SEQ ID NO: 108331 - DNA, 402 bp, Arabidopsis thaliana columbia
  unsure (1)..(402): unsure at all n locations
gcgtgcgaaacacatagccatagtccctcaagagccgtgcttgttctgaactaccatttacgaaaacattgcatatggacatgaatgtgcgagcgaagcananatcatacaagccgcgactctagccagtgcgcacaaattcatatccgcgctaccagaaggttacaaaacgtatgttggcgagagaggcgttcagctctcgggaggacagaaacagaggatcgcgatcgcacgtgccctcgtgaggaaagcagagatcatgctgcttgacgaggctacaagcgctcttgatgcagagtccgagagatcagtccaagaagcattagaccaggcttgctctggtagaacatcaatagtcgtggctcataagctatctacaatcaggaacgcacacgtgatcgc

SEQ ID NO: 108332 - DNA, 317 bp, Arabidopsis thaliana columbia
aatcaagacctcattttatcgaccaaacctttccttttatgatcctccatatactataacagtgctaggacacatacaacgggcgtgtcggccaagatatcatccagagaagctcttaactctgtgccctcatatcaatataagttctaccagacatgtacagaacgcattttagcgacagagagagtcaagactcggtagtacataaacagacgatcgtgatcgcacgtcccctactgaggaaagcagagatcatgcttcttgacgaggctacaagcgctcttgatgcaaagtccgagaaatcaatccaagaagca

SEQ ID NO: 108333 - DNA, 446 bp, Arabidopsis thaliana columbia
  unsure (1)..(446): unsure at all n locations
gtgagaccagttgctaaatattactctgcatttaaagatgctatggtgtgtggcaaaggaaggtatacacttgtaaaagaggtagagcnatttttaaaatggagtgtatgacaagcctcttccatgctttggttgtggaatccgatggttctcctttctcttgggttttgtgttccctttcttatggtactatgcaacacttttatatttcgggaactactaccgcaaggatcctagagaaagagcctgccttgctgcttccgcaatcactgacatgggattcttcctttttctactaatgattggttttttcttgtggctctaaatggttcttttaacttattccccataaatcttgaaaatttatattatgggaaagtttcttattctttttaaaaataaaaataggatgggacctttttattttttttttttaaacccctttt

SEQ ID NO: 108334 - DNA, 249 bp, Arabidopsis thaliana columbia
caaacagagaaaatgtgtggcggttctattatttccgattatgcccctctcatcaggaatgccaaaaaccataggcgcacggctgaagaactcttgtcaaagctcgatgcttcccccgccgacaacttctgaagtttctattccacctgcaaactccatcccaccaaccaaattaacgtgaaaaacgatgcattgaaaaatgaacaggcaacataaccttttaaacgcatgaagaaaaagaatgtttat

SEQ ID NO: 108335 - DNA, 257 bp, Arabidopsis thaliana columbia
gcttgcggttagggcaaagatgaggaaacgcgatttggctattttgatgctctctggatttgctatatgcttcactcttcagcacgagggtgattttgcgttcaaagaagcatggtttcatttgtatgatgaatacccagtcaaatacgaagctgatcgtctcccaccacctattgtagctgatcttaatggtgatggaaagaaggaggttctcgttgctactaatgatgccaaaattcaggttctggagccttatt

SEQ ID NO: 108336 - DNA, 364 bp, Arabidopsis thaliana columbia
attgacgccgcaggggaggctaaagtctctgactttgggctggccagactgttggcttcggcgctggacaggtgcgtgttgagtggcaaggtacagagcgcgttggggtacacagccccggagtttgcatgccggacagtcaagataaccgacaggtgcgatgtttacgggtttgggatcctggtgctggaggtggtgacagggaagagacccgtggagtacgctgaggacgacgtcgtggtcttgtgtgagacggtgagagaagggttagaagaagggagggtggaggagtttcaaaaccctctgtttggagggtatttttgagctatattttgcaatctttttaattaactaaggttttttt

SEQ ID NO: 108337 - DNA, 332 bp, Arabidopsis thaliana columbia
cgaaggaagagattgatcgggttatcagagacaccattgatgaagttcttgttttacgatttggtcgttcctccgacgccggttgtgttcagcatgattaaatccttgcgaaatcggtgagagatgtttcgaaatttgcttaagtagctttgggtgatgttgatttagaggatgttcaagtgtatgtgaagtattttgatattacggtgttttcttcgacgatcttctttttcaaagcgcctttatatgaaattgggtttcggactttgggatcttccaaaagggttggggcccattaaattaaaacacagaattttttgttttttttttag

SEQ ID NO: 108338 - DNA, 277 bp, Arabidopsis thaliana columbia
cgcgtccgccatcttccaacattttactcagcagcttcagatggtgattccaccagcagtgagaccaccacgtctcttcgactacctaaaaccgtacgtgctgaaaatgcatttcacaaacaagtttgtccacgcacaagtcatccactcaccaacagccacagtggcttgctcagcgagctcgcaagagaaagccatgggagaaacaatggacatcacacgcgacgtcgctgctgcttcaaaagatggtaaaattcctggagaaagactcttgatg

SEQ ID NO: 108339 - DNA, 452 bp, Arabidopsis thaliana columbia
ccggtccggggttcgcgcgcacgcgtcacgcgtcctatcaacgagtttctgcaaagcctgattcgtgctgcaccttgcctctctttctctctcttccttcgtttctctctcgatgtgaagagagaaaattcgttcgatttcgttttctcttcttcttttggattttcccggaaaattttggaatcggtgagtctctatcgattactggtcaaccatgaatatctttagatttgctggcgatatgagtcacttgatcagtgtcttaatccttcttctcaaaatctacgcgacgaaatcttgcgctggaatctctctcaagactcaagagctctatgcgcttgtgttcttgactcggtacttggatctgtttacggattatgtatctctgtacaacagcatcatgaagattgtcttcattgccagctctttggctatcgtttggtgtatgcgta

SEQ ID NO: 108340 - DNA, 446 bp, Arabidopsis thaliana columbia
gtatactacaagtccccaccaccaccgtacttctacagttccccaccaccactgtactacgctccttcaccaaaggtggactacaagtccccaccaccaccatacgtctacagttccccacccccaccgtactactctccatctccaaaggtatactacaagtccccaccaccaccgtacgtctacagttctccaccaccaccgtactactctccttctccaaaggtttactacaagtccccacctccaccatacgtttacagttccccacccccaccgtactactctccatctccaaaggtttactacaagtccccaccaccaccgatcgtttacagttccccaccaccaccgaactactcttcttttccaaaagtatactaaaagtctccacctcccccatacgttttacagtccccacccaccatcgtactacttttcttttt

SEQ ID NO: 108341 - DNA, 347 bp, Arabidopsis thaliana columbia
ccaaaattggctgaaattattcatgggtttaaggtatcatcaggatgttttggctaatgtaagggggctgggtatcatttttttccaaattctcaccctcccataaagaaaatttgtacctccaaactggttttggttttttgtacccattcaaagggtcttaagaaaattcatatcttgcagttcttgctttcaccacatgtctctaccttatctttcttttttgcctcaaaaaaagcttcatataatggcctccccgtgacctgaaaacggtttttaacccatactatttacccaaaatttggttacctccctttggggcaaatttgggggtggggtaacccctc

SEQ ID NO: 108342 - DNA, 507 bp, Arabidopsis thaliana columbia
gttcgttttctccgtcgattaatcgagtattatgaatcaggaagcagctgaaacagcgagagagtcactggagctggtgttgtgggatgtcgaacatcttggagacaggtcttgatcgacatactttgtctgttcttatagctctttgcgatattggtcttaaccctgaggctctcgctactctcgtcaaggagcttcgtagggattctgctacaacaacaactacggttgattaagaagatgcctaatcaaatagtatcattcatgcttgttttctaagtttcaatttcattatgctattgatgtgtaaattaaggttggtaaggtaattgaatagagagttttagagacaaattggttataagttttttgagtcattcccactcaatccttttgagaggctttcttttaagtaaatcacatagtttccctctttaataattattatttttgatgttatttatttttgtattttttttttatttatttattatactttattttaat

SEQ ID NO: 108343 - DNA, 406 bp, Arabidopsis thaliana columbia
  unsure (1)..(406): unsure at all n locations
gccgcaataatcttggggagagaccgaagatgagcgactctcgtctttccataaatcctaaccgagatcgagacactgaagagatacctggtgcgtggagctagcgaacaaagtatctctgcccctctccttctttactcgaaacatattctggtcaaagacatcttctctagccgtcagctgacctcttnncctcctctatgctctcgccagctcttaggaaagcgcaatcgatagttcttcttgctccaacctcatagagatacaatacgagaggtctaaagtggtcacatattgttagttggttcttgccctggaagcgattatcctttggtcttcgggtcattggcagatcgtcagggagagaggaaaaagttcaaatacacttggagtatcaaacagcaac

SEQ ID NO: 108344 - DNA, 203 bp, Arabidopsis thaliana columbia
caagaaccatcctaaacattctttcttgaatttattttttattacaaacaaaaatattttaggaaaagctttctataaagggggggcgggtactcctaaccatcaacacctcttctacaaatgcaaatggacctgtttgcccgtcctctaacaaactatgcctgacaagtttccctaaaggttttttattattcacatctact

SEQ ID NO: 108345 - DNA, 342 bp, Arabidopsis thaliana columbia
ctataataaccaaagcgatgaaagaaaaagtttcattgacaacaaacagcctgtgactgggactggagcagctataaggtgcaggtagacgcaataacattgaaaaaccaggcataacatgaggtgtaccgcaaggctttccaacaacatcatttgatgaatatcttacgctcattgagaccgacgctgacttagacagaaaacctcaaacagggtaagacccattacctaccgaatatgaaactctccacatcctaaaagctctagacagagcgcaatcaaattcaacacaagcatccttacacaaacaaaatttacgctgactacgaccacttcttatac

SEQ ID NO: 108346 - DNA, 275 bp, Arabidopsis thaliana columbia
tttggcttttatcatcgccgccggttcacttcacaaagaggggcttagatttgtgcgttggagaaatactaagatctgtgtgtccattttcacttcttatcttagatttctcttagggttttgatatttgttgagagatcgaattaaaaacttgtgaagaaatctctagtgatcgtaatcgttgttggtgttttgtattacactgattcctgttttaacctttttcgtatctatcaatctatggcatcataggatgtcaatagaactcaatcatc

SEQ ID NO: 108347 - DNA, 439 bp, Arabidopsis thaliana columbia
  unsure (1)..(439): unsure at all n locations
gaaaaccattacttccttgggttttcttttacttgggcagcccatgcnattagtccggttgacatcaaagacagcacggaatccctattnatttttctcttaatatattttttaatatttaaaaatgatataatttcaagttctatgtttttattccatattttccatatattctcccagaaaatatatcatttcaaactatattatactagtctattatgtccatgtatataattttcaacgatatgatttattctcttaatatccattttctttattaatatcctagaaactatttttcattcttctttcttataaccgttaattcataaaaattgattttattatccttcttaaaaccatactccttcacttatttctttatttcactattaacactccttttcattatttaataccacacctaataatttaactt

SEQ ID NO: 108348 - DNA, 324 bp, Arabidopsis thaliana columbia
  unsure (1)..(324): unsure at all n locations
cgcgtccgattacaaacaaaaatggtttngcaaaagcttcctctcattgggctgcttttgctggtgacgatcntctcctatgcaagaaaggcatatctacctgtttgcccgccgtctaacaaactaagccgggcaagtttccctgaaagttttttatttggcacgtctactgctttataccatgtcgtaggtgctattaatgatacttgtcttggaccatccttattggacatctactgtagtatatatccagagaggtgctttaactataacagctattgtgccgttgtttttcttccattcatttaaggattatatccatct

SEQ ID NO: 108349 - DNA, 330 bp, Arabidopsis thaliana columbia
caaataccacctcaacagacaactctggatctgtattatcaccaacccaacttcctcaatgggttcgtaaacatcagtggccgtcagagccctcccacatcgaccgaggtgaatcattcccaactacatagaaaccaaacgggtcacttcaggttcaacatcccctacggctattcttgtagtactggaagtcagggcatatgacatatagaatctgcgctccagccaaaccaaaagatgctgagactctttcatcatcaagggatatgtcacttaacccgcgagttcacgccttaaaacctctccagactatggaaataacccatcttg

SEQ ID NO: 108350 - DNA, 466 bp, Arabidopsis thaliana columbia
  unsure (1)..(466): unsure at all n locations
gaccaattgcgcttcctctatgcttctctttccgctactattggttagccttctccggcttcagagccacgtataggtnncgctctctttacagacggagctgtgaagtctnctccgctgccccttcccatgccatcccgcaaaggctatacaaccgaccattaccttccattcacaatagcatacggcggaaagagttaacctgcattgcaggtagtggccctccgattaggaataggaagaagtttgagacctctctcttaaccttcctgaccttatccgattccgatattggctaagagaagttgactacccttaatccgcaaccaagtggattctcttgtgttgaaattcgagtttggagccacggattttgtgtacccgtgagcaccggtaactcacnccggatactattgatggacggttactggacaattgtggatagctttcccttgttcggttgcac

SEQ ID NO: 108351 - DNA, 179 bp, Arabidopsis thaliana columbia
  unsure (1)..(179): unsure at all n locations
gacccacgctttcttttctttctctctctctcatccttcaanttattcgttctcacgttcccctttttttattcagcttggcttcttcttaacataggggagtgtccctattcttcagtttatttcccacattatacatatctattatctttattattttaattccaagattattttct

SEQ ID NO: 108352 - DNA, 473 bp, Arabidopsis thaliana columbia
ctcggtagtttaagatccttttgtaaagagcaagattaacaatcaaattaactaaataaaggcgagatcaaagccaatgagatgatgagatcccacacaacaaataccacaattcaacggttacaccaagaagatggctcagattccttgaataactactttactgttttatacacagaaacacatttaagtgatctggtggctatcccatgcatctgtttacaaggcaatgatatctttataagcactaatatttacagaatggttatcctcttaactttgataaaggttgttgattacaattcaattgaattgttcttattattatgtattttttactattttttagattatatttttaaatttttcttttattatttgtaattattttgtacttattatactttttttttaattcttttaatattgttttctattttttctatttacatttattttatttatattttttt

SEQ ID NO: 108353 - DNA, 421 bp, Arabidopsis thaliana columbia
  unsure (1)..(421): unsure at all n locations
gccaaccccacatcacctgtcgtttctttatttttttttccctaactggnctctctctctggtgtgggacactgatggctggggtcaggctccccgctcaactagttacacgtggcaatctcatccaccacaactcttcatcctcctcctccgggcgtctgtcttggcgacgttctctcacaccggaaaatacaatcccgctcttcccatcttcctcatcctcatcccttaaccgggaacgatcaatagtagttccggttacatgcagtgctgcagcggttaatcttgctccggggacaccagtccgacccacgagcatcttggtggttggagccactggaactttgggaagacaaatcgtccggagagctttagatgaaaggtatgatgttaggtgtttggtccgaccaagaccagcttc

SEQ ID NO: 108354 - DNA, 231 bp, Arabidopsis thaliana columbia
  unsure (1)..(231): unsure at all n locations
catttactgntctgtttcactttctctttctctttttactctctaaataatttctaaaggctgtggtttattcagagatggatgggtcatttcattatcttccctctttaacaaacccatcaccttcaccattcataatataccaactatgggcttgttcaccttttttgactccaactttgactcctgaaacatacatactctcaccaaatccttacttcctcaaacttt

SEQ ID NO: 108355 - DNA, 323 bp, Arabidopsis thaliana columbia
cttgacattgatgatgcaccaggaactaatttcccacttccgttgatccaacacatttctatgtcagacgtccattcgacgcaaggtggagggggatcccttctttacattggttggactcatctaaaggcctcagagcgagtctcaagcacatgtggaccttcctcttatacattatctgacgccgcctatagacattgctgatgccgacacaactactgattcatccgcccgagcacagaaaacataggttgcctttgagctcttcatggacactgagggtaccgttcttccgttcatcaagctcgggatatcattatgtg

SEQ ID NO: 108356 - DNA, 469 bp, Arabidopsis thaliana columbia
aatctgatgaagctctaaaagcatttaagagagggagggaacttgagagagaggccgacgcattagagatatctttaagaaggaaccggaaaagggaactgtctatgcgaaatgttgctgagacgcagaacaaggctgctaccaaagaatctagcaaatcacaaaagcctctacgtcaagggggtaaaggaaatgatgatttggcagctgacctgagggagcttgggtggtctgacgatgaagataagaaaccagcaactataagtttggagggcgaattttcgtctcttctccgtgaaattccgcgaagtgctaatcctcagaagactgggggtattgacaagagtcaggtaattgcccttaagagaaaagcccttacgctgaaacgtgaagggaagcttgcggaagctaaagatgaactgaaaaaggctaaaattttgaaagggactggaagagcagaacttttggt

SEQ ID NO: 108357 - DNA, 415 bp, Arabidopsis thaliana columbia
tgttattgaaggctttgtggcatgtttccttatcaataaagatgggtcaaagtcaggtcatggtcggaggggatgcctggaggaaggagcgtgggatgccatacatgttatacaggttggttcagaggaggaggaaatggcacaatattgcttaacaagtaccatcatgctttctctgacaactgatgatgagtcttcgggcaaattcggcttatctggatcaattagaagacaaatgaaaatggagctagcagtagctgacggacacctgtgcaatatggggagaatgattgaagaattggaaggcaaactgaggaactcacttgatcagcgcaagtttactttgggaagacaagagaaatggtttgcacattgcgtccaccagctgagattgtacaaatgagattgcctgaca

SEQ ID NO: 108358 - DNA, 306 bp, Arabidopsis thaliana columbia
gttacacaattttcagaaagggtatgaaatcaatgaaaaggagcccaaaggttgaatttcaaaacttatacaaagcttttaaaattaaacttgattttgggtctagcttaactttgagttcatgatccgatcatcatttgtttgaccggtaccaaaacaagacacatttttttttccaaacggtatatcttacatacaaatgtattcttcaatcttaaaatttttttttatcaggggtcaagaacatttgctatgagaataatactcttccccggatgagtcaatttctgaaacttggcttatacc

SEQ ID NO: 108359 - DNA, 474 bp, Arabidopsis thaliana columbia
cgattcgcttaaaaagcctcgtctagatcagtgaccacagattgccttcctcttcattgcccggaatcgactccctctcgaggttgtctgggatgctttctttaagggtgaggatggaaagttctcaatatatgttcattctagacctggatttgttctcaacgaggctacaacgcgatccaagtactttttggatcggcaacttaatgacagtatacaggtagattggggtgaatcaaccatgattgaagcagaacgtgtattgcttagacatgcacttagagattcatttaatcaccgctttgtttttctttctgatagctgcatacctctgtacagtttcagctacacgtataactacatcatgtcaacaccaactagtttcgttgataagcttgcagatacaaaagatagccgttataatcctagaatgaatcccattattcctgttcgtaactggagaaaaggatcaca

SEQ ID NO: 108360 - DNA, 432 bp, Arabidopsis thaliana columbia
aatactgccaagaaacctgccaacaaagggatttctgtgatgccaaggactgaaaccaagcacccattggatcctctttctgctgcagaaatatcagttgctgtggcgactgttcgcgcagctggtgccaatcctgaggttagggatggcatgcgtttcattgaggtggcatcagtggaaccagataaacaagttgtggcgctcgctgatgcttactttttcccaccgttccagccatcactacttccaagaactaaatctggacctgtgattccgatgaagctccctccaaggcgagctagacttgttgtttacaaccaaaagtctaatgagacaagtgtatggattgtggcattgtctgaagttcatgctgtcactcggggtggacatcacaggggaagagttgtttcctcacaagttatacctgatgtt

SEQ ID NO: 108361 - DNA, 363 bp, Arabidopsis thaliana columbia
cccacgccccacgcgtaaattcgacccttcatctccgaaaaattcgactattaaaaacacaaacaaccaaagctcctttactaacgacaggaagaccaggtcttctcctttaccaaagacaacattccccttcataaaaattgccataaaccataacaacagcttcagtcagtaatcgctgcatcacaacaaagggataagcttaaagaaccactctggacaccaaagcctacatctcttatccaaaaaggaccccatcagcctaattaatccgaattcatcaactcttaaataaaaataggcataagccttttcaaccttttctaaaaatatttaaaacaccctaaaaaaaaaaataaaaat

SEQ ID NO: 108362 - DNA, 434 bp, Arabidopsis thaliana columbia
ctccgacaaaagcacgttcacttgtgccacctacaaaattggaaatcttacatttgtgtgttttctctaatcaaaagtgggtggtggaacgtagacaagatccgttccaagattcgtctttttttttcaatttgattcctgggttatctgaaagatcttctctttgcttcgatttctatctccgctgcttgtgaaatcaacctttatggtatgtaatctcgaactcagctaaaacacacttcactctcggaaacatggagtcggatacgaatcatgttttacggaaaccggatctaaaatcatacagtcacaaacaatttcactcctcaaatgcgttagagatcttaagagaaacagttcgaattctccggtacaatcttggtgctttaatgttaactactgctggtttgatctgccctgtcttttttttgttt

SEQ ID NO: 108363 - DNA, 472 bp, Arabidopsis thaliana columbia
gctccattggctaatgctactgctattagttcctgttcaagaaagggaatattgctgaaaggtgcagaggttctagaagctgtagcggtgttgccatactattgcttttgacaaaactggtaccttaacaaccggcggccttacttgtaaagcaattgaacccatttatgggcaccaaggaggaactaattcaagtgtaataacttgctgcattccaaattgtgaaaaagaagctcttgcagttgcggctgccatggagaagggcaccacgcatcctattggaagagctgttgtagatcacagtgtgggtaaggatcttccttctatttttgttgaaagcttcgaatattttcctggtagaggccttactgctactgtcaacggtgttaagacaagagctgaagagagtagatttcgaaaagcatcacttggttctatagaggtcattaccctactttcaaatctgaagatg

SEQ ID NO: 108364 - DNA, 450 bp, Arabidopsis thaliana columbia
gattggtcaacccgttatgagatatgcctgtgagtagccagaggtctagtctatctccatgaggaggcaaggcttcgcataggacacagggatgtgaaggccagcaacattttgcttgactctaaattagtaccaaaagtttctgattttgggcttgcaaaactgtacgatgacaagaaaacccacataagtacccgggttgcagggacaattgggtatcttgcgccagagtatgccatgcgtggacatctaacagagaaaacggatgtatatgcctttggtgttgtggctcttgagctagtgagtggaaggccaaactctgatgagaacttggaggatgaaaaaagatatcttcttgaatgggcatggaatctacacgagaaaggccgtgaagttgaacttattgatcatcagctgactgaattcaacatggaagaagggaacgcatga

SEQ ID NO: 108365 - DNA, 357 bp, Arabidopsis thaliana columbia
gagacccaacctcactgtctgcgtctggcttttctgtccagacttactgtctaaatacaagaggattccgaacgaggtgccggccacccttctaccgtacgactaagtatcacgttgtgctagtttcaacatcacttaccctactatactcggaactccggtcaaatctttgactactaatcaacaagaccagaacagtcactcaatctcaatccagcaatttcgtatgaacaaccgtgaatgacgaaatggttatgacatacatggttagcctcgattgcttgaattcaaccacgagctagcctcacgcacgatgcatatactcaacatgctttcgtacttccgggtccaactagt

SEQ ID NO: 108366 - DNA, 457 bp, Arabidopsis thaliana columbia
gcctcatgttaggtatgggcagtgcagtcgtaacactatgtggacaagcctatggagcccatcgttacgagatgcttgggagctatctccaaagagcaacaatagtcctcgctctagttggcttgcccatgacattactatacaccttctcgtaccctattctaatcctactaggggaacccaaaacggtgtcgtacatgggatccaaatacatcgccgggctcatccctcaaatcttcgcttacgccgtcaacttcacggcccaaaagttcctccaggcccaaagcgtggttgccccgagcgccttcatctcagccgtcgccctcatcctccagatattggtgacgtggatcaccgtttatgtaatggacatgggctttatgggcatagcttattgtcttacaatttctaggtgggtcattgttggatcccagtgtttttacattgcggttaggcc

SEQ ID NO: 108367 - DNA, 459 bp, Arabidopsis thaliana columbia
gtcaagagattaatggttaggagatcaactcttatgaggctatctcgaggcagggatttaagagctgatcttgtttcatgtgccaaagctatgtcggaaaatgatcttatgatggctcattcaatgatggagaagttgcggcagatggtttcggtttctggtgagcctattcaacggttgggagcttacttattggaaggtctagtggcgcagctagcttcgtcgggcagttctatatacaaagcacttaataggtgtcctgaaccggctagcacagagcttctctcttacatgcacattctctatgaggtttgtccttacttcaagtttggatacatgtcagcaaatggtgctattgctgaggcaatgaaggaagaaaacagagttcacattattgatttccaaatcggtcaagggagtcaatgggtcactcttatccaggcttttgcagctaggcct

SEQ ID NO: 108368 - DNA, 214 bp, Arabidopsis thaliana columbia
  unsure (1)..(214): unsure at all n locations
gacaaatcttcattatctgctatttattcatttgtggctcatttgtttntaatcgtataagttctcatcaaacttagaccagggatttcttctctaacctttgcatcctattacttatcgtctacaggaagtacacacgttcatatagacttcgagttcctagtaaattctactggtcagtcttacactatccacaccaacttttattctcaat

SEQ ID NO: 108369 - DNA, 442 bp, Arabidopsis thaliana columbia
  unsure (1)..(442): unsure at all n locations
ctattcttctctattgttacagaaccaaggtattctccaagaggatgaagaccatctttcttctctaanactaaataataatttatccaattcaaaacattaattaccttttaaaactcattacttccctctaaatctttaccacttcattttcacaccattcatcttcatattcttccaccatatttaccttatcaacaaccttttctttctaaattattttcccatctttttttacactctttaatnattcatacatctactcttttttctttcaacacctaatttcattcctttttttattttctcaaattccctctctctttctttcctcattttatcaccttttttttttcttttatctatcctcctttttattaatatatctcattatattacctttatacttttcatttcccttattctcttatcatatcttatt

SEQ ID NO: 108370 - DNA, 406 bp, Arabidopsis thaliana columbia
gacgaagaaggattttagcaccgcgattctggagaaaaagaaggcagcgaatcgtttggttgtggatgaagccattaacgatgataactccgtcgtttctcttcaccctgataccatggagaagctacagctttttcgtggtgatactatcttaatcaagggaaagaagaggaaggatactgtgtgtattgctttagctgatgagacatgtgatgaaccaaaaattagaatgaacaaggttgttaggtctaatctcagagttaggcttggggatgttatttctgttcatcaatgtcctgatgtcaagtatgggaaccgtgttcacatcttacctttagatgataccattgaaggagtaagtggcaatatatttgatgcataccttaaaccttatttcttagaggca

SEQ ID NO: 108371 - DNA, 412 bp, Arabidopsis thaliana columbia
  unsure (1)..(412): unsure at all n locations
cnntttttccttccttcctcttccagatttcttcctctcgttcatgtataaaggaaatatcaataataggctttcacgacattagtgtggataccccacgtgagtgggcggctatanatgagatgctcatagtttagcattttaggatatctttctagggataggtaaagagcatctagctagagagatcttcaagaagagtgtctagctagtatctcatgagtcatccatctaggaaacaagatgtctagccgcttgggactatagttcaatccctagcaacatcctttgctcactacgaccaggttcttgacaccaccgccatgctcggtgctgttccacctaggtatggatacactggtggtgagatcggccttgatgtttacttctncatggctagaggaaatgcctc

SEQ ID NO: 108372 - DNA, 466 bp, Arabidopsis thaliana columbia
gtcgaagttccaaaggaagcaccaaaagaattacctctagatcctatagcggagaaacttcgccagcagaggcttgttgaggaagccgactaccgggcaactgctgagctctttggagtgaaggatgatgacaaaaaccttgatatgtttatccccaagtctgaaagcgattttttggaatatgctgaaatgatttctcataggattaaaccatatgagaaaagttatcactatatagcgctgctcaaaacaatcatgagactttcattgaccaacatgaaagcagctgatgttaaagatgttgcttcgtccattacaacgatagcaaatgaaaaactaaaggcagagaaagaagctgctgcgggaaaaaagaaaggtggaaagaagaaacaacttattgtagataaggccaatgacgatctagtggctggtccttatgatgccatggatgacttcgacttcatgt

SEQ ID NO: 108373 - DNA, 241 bp, Arabidopsis thaliana columbia
aatatatcatcaccatccttctattcatatctttacttccataccaaaagtcttcctcagagggctcttttacactattgtgggcgtataaataaaccactttttttcaccctactacaaaccttaattatataacctacataaacaccaaacttaatctatctacttatttaacattttactctatattcacaaatctctataaatcaccatttaccttaactcttttacttcatactat

SEQ ID NO: 108374 - DNA, 174 bp, Arabidopsis thaliana columbia
aacaaattaatcattatctatctacttttattatacaaaattacaacagacaacaccaaaggcattcacctaaggcacatgcggcaaacacctatctataaattaactaaacaatctattatatttgccatcccaccctatatatcaatacgacaaccatctcaaacttaaaca

SEQ ID NO: 108375 - DNA, 306 bp, Arabidopsis thaliana columbia
  unsure (1)..(306): unsure at all n locations
ggcgaccgacgcgtccgtaaaacctaaacctcaggagtctactgcttttttttagacttacaacaggatactcacaacgcggtccctttttaaacataccgaggtaactnatctatttaataacaaaaccaactataacatatgccgcctatccctatatatcaataggccaacctacacaaacttcaacaacatgatattacagatcatttcaatcttcacaacaatcctcacagataatggtcccataaaccctaatatcacttacttccataccaaactttcactatatcctcgtatacattt

SEQ ID NO: 108376 - DNA, 188 bp, Arabidopsis thaliana columbia
aacaaactaatcattcatcatctacttttatcttacaaaattacaacaacctacatcagaggctttcacctcttgcacatgcgtgcaaacacttatctataaattaactaaaatttcttttatatattccacatcatcttatttatcaataagacaaccttctcaaactttaacaacacttatattaa

SEQ ID NO: 108377 - DNA, 226 bp, Arabidopsis thaliana columbia
aacaaactaatcatcatgtttctactactttcttacagaattacaacagaatactccaaaggcattcacttctagcacatgcggacgaacactgatctataaaataactaaactatctatgatatatgccacataaccctttatatcaagagaccaactatacacaaacttaaacacatgatattaaagagcattatattcttaacaacatcccttaaagaataat

SEQ ID NO: 108378 - DNA, 419 bp, Arabidopsis thaliana columbia
aacaattggtgtctcgattccaatgaaagctttcttctttataacatacataatggtggatggatgggctggtgttgctggtgagatattcaggttgaatccactcataatctatcatctaaagaactccttcctcgtgagaaccgaaaaagatagggaagaagcaacttatcctggaaccataggattcaacactggtgagcctcaaatacaactctactttcttcttggtcttgtttacgcagcagttagccccatccttctcccttttatcctcgtcttcttccgcctggcttttgtagtgtaccgtcatcaggttataaatgtgtataaccaaaacgatgagagcgcatggaagtttttgccctacgttcacaggcgtgttgcgaccgcattggttggttcacaactgctcttga

SEQ ID NO: 108379 - DNA, 398 bp, Arabidopsis thaliana columbia
  unsure (1)..(398): unsure at all n locations
ccctaaccctaagaaggttttggtcattgtattatgagatggaggtgtcctgccnnaaggggcgcgccatgcttctattgagcgggttgacatgtgtgaaattgataaaatggtggtcgacgtgtctaagcaatttttccctgatgtagcaattggatatgaggatcctcgcgtgaaccttgtcattggcgatggtgttgctttcttgaagaatgctgctgaaggatcataccatgcagttattgttgactcttcagatccaatcggtcctgcaaaggagctgtttgagaaacccttctttgaatgggggggtagggcttttttttctttttgagttttgttcacttcatctgaatagtttgtggttttacatttacattaatctaatacattgtttt

SEQ ID NO: 108380 - DNA, 354 bp, Arabidopsis thaliana columbia
aaagatttgtctatatttctgctgcggattttttattagccaactacttgttgagaggatggtattatggaaagcgagctggtgataccgagctgctcacaagatttgcatatggaggtataatcttgcgacctggttttatatatggaactcgcagtgttgggagcatgaagatcccgttaggagtatttggttcacccatggagatggttcttcaacaagcaaaaccttttaaccagcttccagcaatttgtcccttgtttacacctaaagcggattttttaattctttacaaaagatggattgtgggcagacacaaatccaatgtttctcttccgaaaatttttgattttt

SEQ ID NO: 108381 - DNA, 316 bp, Arabidopsis thaliana columbia
gcgtccgattttgatctttgtgataacaatcttccaccattttaacaaaggtcttagctctcctttaagccggctcttctagttctctgagggttctatcaagtttcttgccaggatgaaagaactggaagtttgagtactttagatctaattgagcatgaatatcaaactagtgttaattctctccaaggcaatgaagctgcttagcaaacttggaccagcacgcagaagaacagaaccgggactgataacaacactatttctttggctctatttgaaaaacctgcattttgaaactcttaaaaaatttgttggt

SEQ ID NO: 108382 - DNA, 416 bp, Arabidopsis thaliana columbia
gaccgacgcgtccgaagaccatgaacgtattgggtgatctccctgtactcttgaatctgaggatatgcttgttgaccaggaaaatgtgttgaaggccaagggatcttttcggaaagtaaacataagtcctgtggatgttagaagggaggaagacgcctctttaaaggctgaaactcctggaagtggtgcgggtatttcatcagagcattatgctatcttagagaagtttgattcactaacaggtgatgctcatcgtgacaagtgtttggggaagcttctggaggcagttcagcacatatgttatattcctgagaacaaacaggctggcgacgaatcataggtgggttcagatgcattttattttgtacaggatgtgaaagacacaaagccggaaaatggtaaggatgagaaatttt

SEQ ID NO: 108383 - DNA, 420 bp, Arabidopsis thaliana columbia
cgaagcccgagtttcagacacgagatttgtgattagagtccattgtgagaagaacaaagggggtatgattaagatcttaaggtccttggagaagtttcgtcttgaagtagtcaatagcttcactttaccatttggaaattcaactctcgttataaccattctcactaagatggacaacaaattttctcgaccagttgaagaagtggtgaagaacataagagttgcgttagctgaataatattttaaaaaacgtttatgtgaatttctcagtggttaaacgtgttagatatggtcttcaattttgaccggatcactcggtttagttgaataatgagcagttggattatttaaccatgatttatgcaccataatatgggtattttgactttttgttgagttctataactttgtttggtgttt

SEQ ID NO: 108384 - DNA, 438 bp, Arabidopsis thaliana columbia
cttcatagtaacatgtcaatacgcttggcctactgttttcttcataattccgcttggatggcttaacatttggtaccggggatattacctcgcatcatctcgggaactaactcgtcttgactcaatcaccaaggctccagtaatccaccatttctccgagagcatagccggagtgatgacaatcagagctttcaagaaacagccaatgtttaggcaagagaatgtgaagcgagtgaacgccaatctcaggatggacttccacaacaatggttcaaacgaatggctcgggtttcggttagagctgattgggagctgggtactctgcatctcggctctgttcatggtcatgttaccaagcaacattatcaaaccagagaatgttgggctatcactttcttacggactatcgctgaacggtgttctgttttgggcaatata

SEQ ID NO: 108385 - DNA, 506 bp, Arabidopsis thaliana columbia
  unsure (1)..(506): unsure at all n locations
cgtnttcacaagtcacaacacttataatcaaaagtgtatcatcagaggctncagagttgagaggtttgacacgcgtcatctaatggcgagaacgcggaggggtgattctactctatggtcttgcaccannagatctctcagntcaccagnncctcatgtaccctccttttgcttcagagaccttgacatcttgaagtttgtcgaccgagcgcgcttgtattgcatcatntnttcttaaagctacccaggttttgatatggcgcatacccagagacccgaagttctcttctcaagattgtgagtgcaatggagagggaaagttgtgaaagaatgtcatatatgnngatcaggatctaagaagtacccggtattgtaagcattatctcgaagcagcggctttttcggtttgccaagtgaactgatgagtagaggaaagcatttcatattaatacgaaatcctcttaacatattgccttcctttgagaaggtacacccttcatcatttt

SEQ ID NO: 108386 - DNA, 125 bp, Arabidopsis thaliana columbia
aacttcgtcgttcatcattcctacgtatattctaacatccaacccaacttactctatcgtggcttcttataaaaatcttgagtggtcccaaaaacttccatttctcaactcaaaatcacaaattt

SEQ ID NO: 108387 - DNA, 167 bp, Arabidopsis thaliana columbia
  unsure (1)..(167): unsure at all n locations
gcgtccgctaattcataaactctctctacataaaacnatttaatatctttcgacaaatgacccaaacagggcgccattatagaatacttgttgccggcccatcaaacatcaatcttactaatacttcaagtatatcttaccttcgttcaacctttctccccaaattt

SEQ ID NO: 108388 - DNA, 461 bp, Arabidopsis thaliana columbia
  unsure (1)..(461): unsure at all n locations
ccgggagtaggaaggatgttatgttcccaagaacgttttttanttttacaagtgctcaagcttctgnccttgggagaagcatgcttgcaccaaacgtgcgagggttctggttgttgcaaacccctgcaaacaccaatgcattgatcctgaaggaatttgcaccatcgatcccagagaagaacattacttgcttgaccaggcttgaccacaacagggcattgggacaagtgtctgagaggttaagcgtaccagtgtctgatgtgaagaacgtgattatctggggaaaccactcatcaacccaatacccagatgtcaaccacgctaccgttaagacttccgttggagagaagccagtgcgtgagctagtcaagaatgacgagtggttgaatggagagttcatctctaccgttcaacaacgtggtgctgccattatcaaggccaggaagctgtctagtgcactt

SEQ ID NO: 108389 - DNA, 357 bp, Arabidopsis thaliana columbia
  unsure (1)..(357): unsure at all n locations
gactgggtgcttcttgtgattggagtatttagcgctttactcttgacgagcaattgagtggagctgtggtcgaagctgtggtgaancttcatgacaaggggttgatatatcaaggatcttacatggtcaactggtccccaaatttacagactgctgtttcagacttggaagtagaatattcggaggaacctgggtttctataccatattaaataccgtgtagctggaagtcctgattttcttactatagcaacgactcgtccagagacattgtttggtgacgtggcccttgccgtgcattctgaggatgatcgttactcaaaatatgttggtcagacagcaattgtccctatgacat

SEQ ID NO: 108390 - DNA, 342 bp, Arabidopsis thaliana columbia
gaatataacctacaaattttaatatttaattacacgttctaaagaataagatcgccggttgaaaacaattacctggtggtgggtttatattaaactcattaggcattcattatataattgcaccaaacaagaaggggatcaagaaaatcacgaatcaccggagcaaaaaaatggcgggaggaggaacgaccttagagtacacaccaacttgggtggttgctctcgtctgctccgtcattgtctctatctcttttgccgtcgagcgtcttattcaccgtgccggaaagcactttaagaacaacgatcagaagcagcttttttgggcattacaaaagatcaaag

SEQ ID NO: 108391 - DNA, 234 bp, Arabidopsis thaliana columbia
  unsure (1)..(234): unsure at all n locations
gaanacccgggggggccgcacgcgtccggtaactcttgtccggtttgccgtcattatttttcttctgaggatctcacctacataagcgggggcttttttgactggtgtgagcgctactccatattaagaggaagactcacctgccgggttaacgatttggaggttaccaggtggaggattctttttatggagaatccctgtttgttggagaggtggagatagaatgattccgtt

SEQ ID NO: 108392 - DNA, 302 bp, Arabidopsis thaliana columbia
ggaaaaaagagtcggcgccacgacgtacgcttactattgaacgtgctcaatctactaattttttctatgtgcacacacacacacaccaacgggactggatgataaatgccgggtgacggaataacccttgaagcaaatctagagacgtccaaatgcgaccatcacgaatattttgaatggaactgtatcaatcgcatcaatttctttgaccttgattccatacttgactcaaatctggacaatagtctgcttatgatccaaacaatgctaagtatccttacgcaagcttcctactctcactc

SEQ ID NO: 108393 - DNA, 405 bp, Arabidopsis thaliana columbia
attacacatggtctattcttcacttttttttctctacacacacacacacacacacggacgggatgaattcttcgagggttggaaaaaacctaaacccacaaacaaaatccgcacaagaacaaaacccacttgccattttccattcttctctaccaaacagatctttttctgtgaccttgttcccatgcttgactcaatttgtgaaattgttagctcataatccaaacaaggctaagatccatacgcaccgcttcttctatgactcatatattggatcattataacttactattaccttttatggaaaagttggtaaaaccgaaaccgaattctatacatttactagcgaatgtgttcgatgtatgtcggtgtaccgctgttctctgttcttccgggctttttctg

SEQ ID NO: 108394 - DNA, 256 bp, Arabidopsis thaliana columbia
acgatctactctctttaaaagaaattctttatttctatcaagaaacagaagatgcccgggaaggtgtaaatacaaggaggggaaggaaccaacctatttgaccattgttcgacacatgacgcccagaccaagattcgattcgcaacacgcatatacggtattcaatatgttcattatgattatgttaagatccgacaaccaaaacatgctcctcttcgacggaccaaaggacgtgtaatctcacctgaatcggttc

SEQ ID NO: 108395 - DNA, 266 bp, Arabidopsis thaliana columbia
ctgacacgtggacgcacctcgacataaaaatcgtcttttctatctcctttaaagagcgcgcgcaatattatcatgtgtcgaggatatcaccgagaaccataatctacaccctgatggcaaaaagttcgataaagatactcctacctctaacatggatccacaacttgctaatgaccatccatttacatgtcaacactcaaatctatacattgcccaccaaatataaattcactctatctatcccactcacgatttatgtttaccac

SEQ ID NO: 108396 - DNA, 255 bp, Arabidopsis thaliana columbia
gaaaacccgggccgaccgcacgcgtccgctaacaccttcacccacctctacttttacttttagatacctatttatttcactgcgcatggctacacttttaatctggcgggcttgaacttgaacaacaatattcctcaccgtttctaccctgacccttaaccaccttactactgttacatcgaacctcacatagccaataaccatgacattgaagattctcactacaaaacctgaatttactcccggattggcatt

SEQ ID NO: 108397 - DNA, 186 bp, Arabidopsis thaliana columbia
  unsure (1)..(186): unsure at all n locations
cgganaaccgaacgaccacgcgtacggtttatcttagggtttgtagataaaggaagtatatctttgtggcaaataaaaaaataaatcgtctgcgaccacaacgctgcgcgacaatnannagctcccactactcaaggaggttaatatttaccaagctccttagcgaccttactttcttgatttctt

SEQ ID NO: 108398 - DNA, 434 bp, Arabidopsis thaliana columbia
  unsure (1)..(434): unsure at all n locations
gaaaaaccggaacgaccgacgcgtccgggcagtctgagcaaccttgagtacattgatttgtcgtgaaacaatctctcggnaagtcttggcaaaggaatatataaacttgcgcatctcttgacctttaacatctcccacaacaacatcacaggggagctgccagctggaggtttcttcaacaccatccctctctctgctgtcaccggaaacccatccctttgtggctccgtcgttaaccgctcatgtctctctgtccaccccaaaccaatcgtcctcaaccccaactcctccaatccaacaaatggtcctgctctcacagggcagatcaggaagagcgttctgagcatatctgcgctcattgccattggcgcagctgccgtcattgccatcggggtggtggctgtaactctgcttaacgtgcacgcccgatctag

SEQ ID NO: 108399 - DNA, 409 bp, Arabidopsis thaliana columbia
  unsure (1)..(409): unsure at all n locations
cggaannacccgggtgcgagccgcgacgcgtccgcttaagaaatcttcagcccaccctcgactgtttgccaatgtgaggagcncnnttggtattgggaattggagcaatggagatacaanctttgattgcgagaagggggtgtgaacctggaccaatatggtatggccctcgttggtgtgctactccttggcccttcagggacccttatcttacttgtggtangtgggagcctgacccaaagccactttggtgcgtgacaattgtaggattgctcacttacaaagagcctgtactttaccgccggtatttggtattttcttggtattcaatggaagaagtcatgccaggccaagtgggagttccaaagtcggcccttgtgagggtattagttctggtgatcaagtctgg

SEQ ID NO: 108400 - DNA, 298 bp, Arabidopsis thaliana columbia
  unsure (1)..(298): unsure at all n locations
aaaaactcactctttactatccataaaattctctaaacaaaacaaaaacaaacggaacccgtctattttaaaacgcgcttgaaccancaaaaaacaaaccattatactacataacttatacttcttctcctaccccaaccttaaaatatccatccttccttcctccataagaataaatcatcctcttgctctcctcattaaacttaatcctctaaacctcttccctctccctctacaatatctctaacactcctttaatttcttctaatttaattcacaataacaccatatctgaatt

SEQ ID NO: 108401 - DNA, 442 bp, Arabidopsis thaliana columbia
cacgcggcgcacattaaaaagctaaacaaaaaccattgttttctctatctttcttctccaaaaatggcggaggcaacaacagtaacatgggtcattgaagcgtcaaagagatgagcaagaacaagaaatcatcaaaacacaagaagaaacgaaaagaccaaaagccttcttcatcttcttcctcgtacaaccaagttctaactctcttaaaagatgaagccgagaatgacataacttccctaatcaccacgcttcagcaagaaatttctaatgaagagcaaaacgctgccgttttcgaagaaaatccttctctctcttcttcttgctcctcttcctcttcttcatgcacttcgaaagaagatgagtacgacggagataaagagaaagtgatgaagcatcttcttgagcaactgacgacgaactaggaatccctaacactgaa

SEQ ID NO: 108402 - DNA, 242 bp, Arabidopsis thaliana columbia
  unsure (1)..(242): unsure at all n locations
aaaaaaactcanaaanacaccgctctgtttatatataaacgcgcgccgcccacacncacaatccttttcttctccaatctcaacaccccttctccattatctttatctttcacctccacacatcccttttctttctctttcccttcacatcacccacttactacaccccacctcttcctcctttcacctcctttctttctacttatttctataaaactttctcatttcttaatttcaatttc

SEQ ID NO: 108403 - DNA, 166 bp, Arabidopsis thaliana columbia
tactgacactaggatcataaaaccccaacacccctatactggaatgtggatgacgcattaccagccagtgagagaacgaaccttatcaactcattccgataacgataagattcctcaacttaccatttctaatgcatcaagaaagcacataccttcatcatctccc

SEQ ID NO: 108404 - DNA, 309 bp, Arabidopsis thaliana columbia
  unsure (1)..(309): unsure at all n locations
aacggaattcgagcgacgcgccaggcctgagcangangaagaagacgaagaagtattggtttatctactaccatggttctcaagtgccgaggtttaaaattacaggggcgccgaccactacccannaagaggaattaggtttatactatctgattatcatgattcatactatacttaaatcaaaatgtaagaggtactatcataacatgtagaagccatccaagcttgtatggactgctatgaacagaaagcaacacaagcaagtattcaataaaattaatctaattattaaaatctaaacatttcttt

SEQ ID NO: 108405 - DNA, 242 bp, Arabidopsis thaliana columbia
  unsure (1)..(242): unsure at all n locations
gacccacgcgtccggccgtcaactcgagcttcaatcgtttttcttcttatatggcgacagcanatcatcgtgttgttccaataaaagctgggtcggaacagccactcnancaaattcacaagatcaggattactctcttctccaataatgttaataaccttgagaaattgtgcactcttttttttctttctactatatactatacactttaattttattttctcattatatatattttctct

SEQ ID NO: 108406 - DNA, 191 bp, Arabidopsis thaliana columbia
acttttatttttattacaaccccttttccggttggtcttgtcccaattaccggggggagcgggcccaacaaataacgatgttcaacctatcatttacaggatgaagctctgggctactaatgatttaaccgtcccgtccaaatcttttttattttttacgaatcttaagaatgtcaatttttatttattta

SEQ ID NO: 108407 - DNA, 355 bp, Arabidopsis thaliana columbia
attgagaatcgccgacctgaatcgatcggataactttctctgattaccggcggtcaacacgtctgaacacatatgtggggtgggacgacctcttctctccgcgatctttacctcaacaacgagatctgtttccacgattgatagaggttcgagaccttaaaaggtgatgaatatttggtgggttttgtttattagaaagaaaggaggatgtcgacgccagcaaggaagaggttaatgagggatttcaagaggttgcagcaagacccacctgcgggtattagtggtgctccacaggacaacaacattatgctctggaatgctgtcatattggggcctgatgacacaccatgggatg

SEQ ID NO: 108408 - DNA, 449 bp, Arabidopsis thaliana columbia
ttaacatttggtttaagtaaacaaacaaaaatggttttagaaccaaacttcgttctctggtgggtcttcttatgcatgggtgcaacaatctccagcacacttttcttcttccgcaagaaacatcaccgattcataacaaagaagattcagaagaaaaagaagcttcttcctggagaaatggggcttccatggattggtgaaacaatggatttctacaaagctcagaaaagcaacagagtttttgaggattttgtaaatccaaggatcatcaaacatgggaacatcttcaagacaagaatcatgggatcaccaacaatagtagtcaatggagctgaagccaataggctcatattatccaacgagtttagcttggtggtgagctcgtggccttcatcttctgttcaactaatgggcatgaactgcatcatggctaaacaaggcgaggagca

SEQ ID NO: 108409 - DNA, 396 bp, Arabidopsis thaliana columbia
accggaacggaccggccggaccgacccatccgcccagagcgagtcaccttatcgactctctatctcctccttcctatatccccttgctctctggggttttgctcagagtgctacgtgagagatagagagatggaaggtctgattcaaaccagaggaattctctctttacccgcgaagcccatcggagtgagaaggcttctccaaccctcacatggcttaaagcaaagacttttcaccacaaacttacctgccttgtccttatcctctaatggtcacaagaaatttcaagcctttcagcaaatcccacttgggatttcggtttcccacaaggagagaagcagaggattcatctgcaaggcggaagctgcggcggccggaagcggaaatgtgttcgac

SEQ ID NO: 108410 - DNA, 310 bp, Arabidopsis thaliana columbia
cgcgtccggatttttccctctttttgaatttcaaaagtttccgagaatatccaaacgcaaagtttatgggtctcttcaaccatcgatcgagcggatctctcctagtttaaccgccgaagacctcctccgctgtttctcgtcgccgacttcccagttctaccatctccggcagccaccacttcgcctattttacgcattttcgtgagccacgataaaaaaagccaatcgtgttcagatatgggtgtcgaggattatcatgtgatagagcttgtcggtgaaggatctttttggggagggtttaacaaaagga

SEQ ID NO: 108411 - DNA, 427 bp, Arabidopsis thaliana columbia
aacgcgcatcatttcttctatgcgggcatcttcaacaccaaactcttcgcaagcttgttgaagctcgtccggggtgataaaggcactctcgtccttgtcaaagtaagagaaggcggcgaacaaatggtcctctctctctattttgtttagatgcaatgtggcggctatgaactctttgtagtctatcgttccgctattgtccacatcagcagcttgcattagatcaagaatctctgactctttgagattggcaccaactcgttttagtcctgctttcagttcttcaaaagtgatctgaccactattgtctgcgtctatcatcttgaacatttgttttaaaccggctatttcttcttcagataagctctcagctatgactctaagagcccatttcttgaacttgttcattgcagaaaattgcttcata

SEQ ID NO: 108412 - DNA, 199 bp, Arabidopsis thaliana columbia
ccggactaatggccggaccgaccacgcgtttttggaagaaacaatatagaaccagtggccaagctctggagttcaaacagataaacatggattcatgtgaagcatttgacaggggacatgacatgcatatgcaagcggctccatcccaagctgaattgctctataagaactttaaagttgcaaaggaaaaactgaaaac

SEQ ID NO: 108413 - DNA, 319 bp, Arabidopsis thaliana columbia
  unsure (1)..(319): unsure at all n locations
gtccggcaaaagacaaagttgatgccatgagaccttttttccacaaataattctgctgcattatgtgagcgatcacattaggcgcgcggcggtccacacnacacaaattctatacactngactccaggcgctgcatctactangtaacttttacgatggggctcaaatcgggcaccgcctttaaatgaaatgtcagctgcgggaacttgctcacgttaaatccgcgagtgaaactaaaacagtactctattggtactccttctggtttgactcttttcaactcaacaaggtagcgtgcgagccctgtaaccacctgttt

SEQ ID NO: 108414 - DNA, 435 bp, Arabidopsis thaliana columbia
cacagaataccttgaaccctaataacaatggcgacgctgttgaaactcgacatagccacgactgtccttgctttcatcggtccccgagctaatacctccttgaaccatcggttcgcttctgctaggctcagtacagccacagtttccctcagaacgaagtcgtcatcgttctattccgcggcgctttactctgacagccgtcggagattccactccgccgttgcctctgattcctcgctcgccgttgtagatgatgaagatatcttcgatgttgccagtgagattttgcccgacaatcgaattccggccactataatcaccgggttcctgggctctggtaagacaacattgctaaaccatatattgacgggagatcatgggaagcgcatagccgtgattgagaacgaagttggtgaagtcgacattgatggatca

SEQ ID NO: 108415 - DNA, 320 bp, Arabidopsis thaliana columbia
  unsure (1)..(320): unsure at all n locations
acccgggtgcgagccgcacgcgtaacgtcaatggcataangacttatgcacaaccaattctctaatttgtgtcccgaataagaaacttatggtgcggtgtttgggatgacagtttcatcggcgacagannaaagccccaataggatcaaatcgttaatcangatccctgaccttggttccttccaagtattattgcgaccctattgaatcttaagcaccggcccattgcttattgnngattcttcttaaaatcnntagtttaagttgatttcttgtcaaactataatgtcaaggtcacttccttctgtacttttgcaatt

SEQ ID NO: 108416 - DNA, 377 bp, Arabidopsis thaliana columbia
  unsure (1)..(377): unsure at all n locations
accgacatcancctattttgcaattncctcattttttaaagagtaaaggaaaaatcatcncgggtggatcttatatcagcaaatgtgcgtttgccattgncaagcatctatgcagcaagcaaagcagccttattaagattctttgagacattaagaatagagctaagtcctgatatcaaaataacaattgttctcccaggagttgtatcaacagatatgaccactcctcactgtatagagaagtatggttcggattttattctatcggaatcagtgagtaaatgcgcaaaagcaatcttcagaagtattggcagaagagagacatacatagaagaaccatcttggatgaaatgggctgttataatgaaaaatgtatg

SEQ ID NO: 108417 - DNA, 475 bp, Arabidopsis thaliana columbia
cggggccgaccgacccgtccgaacgaatctgcagcctaaaccatttgttttttctttgtcttcaaatcattcacagcaactgcgagaatcattccctggtgctttggctccatcccctcaacaacagatgcaattacattcagacaatagcattcaaggccagagctcacctgcgaccccatgtaatattttattcacctctagcccgtcaattgcaccaacggttgcaccttctaaccatcagcatttgttgatacaccaaaagcagcgcaatcaagtgcaatcaacagctcaacgagttgttcaacataatcatctaaggaactctgagttatcaaagaagtcccaagctgaacgcatgccacgtgttccacagtctgtaaccaatactacccaaacttgtagtatgggtacgaccaagggtatgcctcaagcgagtaatgatttgaaaaacataaaagcagttggttctact

SEQ ID NO: 108418 - DNA, 417 bp, Arabidopsis thaliana columbia
gctctaatggattccagagacatccttccgtcacataaccagcttcaaccaccaccgggaatgttaatgtctcattgcgttggccctaacgccgccgcttcaccattaatggttcccacttccacatctcaaccgattcaacaccctcgtcttccttttggcaatcaacaacaatctcaaacgtttcatcagcagcaacaacaacaaatggatcagaagactcttgaatctcttggatttggtgatggatcaccttcttctcaaccgatgcgattcgggatcgatgatcagaatcagcaactgcaagtgaagaagaagcgaggaaggccgagaaagtatactcctgatggtagcattgctttaagtttaacttctacgtctacctttctttctgcagcttctaattcttaccgtgag

SEQ ID NO: 108419 - DNA, 389 bp, Arabidopsis thaliana columbia
cggtttgcacaaaattggggttttgttcctagagtggtcataaatattgaaggcaacaagtaccgctgcactgaactgcactgctgttaaagtacatctcaaggcttcttttaggtttcactgtattgtggtagtagtttatgaattcatgttaagacaatcagcagaacttttttttccttgctcacaattacaagcatttccatttcgttttaaaacaaaaaacaaaaagaagaaacaacaaaaacatcacaaacaaatacaatcaacaaactaaaaaagatgatcaacataaacatataaagggtgttttgccttaaaaacaacaaagcctaccataaacactgggccggcctttttaagggtcccaacttttactccccgtcctt

SEQ ID NO: 108420 - DNA, 323 bp, Arabidopsis thaliana columbia
  unsure (1)..(323): unsure at all n locations
aaaaaaagggncgggccgacgcgtccgccccgagaacggtgcctcgtttgttgcgcttttcacaccattgaagctcgcccattacttgaggattccccaagttatgatgctgggaagcatcccaacgagacccttttgtgaaaaccgagggtatctttaaagctctattatcgccgctaactttacagaattcatctacgttgtttaccaaaactgagaaaattcagaacactcttggcacacctgcaattactctatctttgtctacacaatggacggaggacaatgaactctcgggatgccaacaaacctcaacctgcttg

SEQ ID NO: 108421 - DNA, 320 bp, Arabidopsis thaliana columbia
  unsure (1)..(320): unsure at all n locations
aaaacctttcttctctcaaatttctgtggggacatctctgaccgcgcgcgcgccttanatccatcgaatactcatcttccaaaccctattctaaatcattcaatcacatctgtaaaggcggacactttcccatcaataaccgaccctgcaaacataatactgtttcgacttacaccactaacattcacggccaccctacataacactatgctgctcttgatatcctcactgataagaagcttgcttaccttcaaacatctttctacatttgacataccccacatacctaccttgtttattaccagggactttatattact

SEQ ID NO: 108422 - DNA, 408 bp, Arabidopsis thaliana columbia
  unsure (1)..(408): unsure at all n locations
cgtacgaaaaaaaaacctaacaacctctcttctctcttccttgttcaacaacaatgganttctgggtgtgggcggtgacaccaaaaaacgcntctaangtgactcctgaagaagacagccttgtccacatttctcaggcttcacttgactgcacagtgaaatctggagaatctgtgtttttgagtgtgactgttggtggggctaaacttgttattggaacactttcacaagacaagttccctcagattagctttgatttggtttttgataaagagtttgagctttcacacatcggtaccaaagcaaatgtgcatttgattggcttcaaatcccctcacatccatcattgataccttcactagtttcggtttttgaggattttttactaaatcttgtttctactttctg

SEQ ID NO: 108423 - DNA, 150 bp, Arabidopsis thaliana columbia
gaaggatttgatctggacacttgttgtaacgcttattttaagcgtgcccttctgttttagcgtcctgcttttgctcaaacactacactaagcagattgtttatgcttgtttacctctctttgtcctttttcccatctttttcaatgtcta

SEQ ID NO: 108424 - DNA, 441 bp, Arabidopsis thaliana columbia
gcgaactcctaaaatggctcgtaccaagcaaacagctcgtaaatccaccggaggaaaggcaccaaggaagcaactcgcgaccaaagctgcgaggaaatcagctccagccaccggaggagtgaagaagccacacagattccgtccaggaacggtggcgttgagagaaatcaggaagtatcagaagagtactgagcttttgatccgtaagcttccgttccagagattggttcgtgagattgctcaagatttcaagacggatctgaggttccagagcagtgccgtcgcagctcttcaagaagcagctgaggcttatcttgttgggctctttgaagatactaatctctgtgcgattcatgctaagagggttacgattatgcctaaggatatccagcttgcgaggagaatcaaaggagagagggcttaagtgaacgaagatgatga

SEQ ID NO: 108425 - DNA, 376 bp, Arabidopsis thaliana columbia
tgcgaagaaaatttctagaatgttgacgagagcgcttcggattttgaaacccaggttatttctgggaagtttgctacagcgtcgagcggtttgtttctcagctccgtcgccggcgttttctaccggagctatttcccgtacgacggctgagattgacgccgatgaagttactgcgtgcttggatccagctgaatcggtgactaagattccggtgataatgcctggtaaccttcagccacgtgtcgtcgtgtacgacggagtctgtcatctttgccatggaggtgtgaagtggataatcaaagctgataagtacagaaaggataaagttctgttgtctttcagtctaaaagcagcttggagccttaatctaagaaag

SEQ ID NO: 108426 - DNA, 446 bp, Arabidopsis thaliana columbia
gcaatcgaatggagagtgtggtggcaacatggtgcagagaagaagagaaagcattcgagaacgcaattgcgttgcattgtgtagaggaagagataacagaggatcaatggaacaaaatgtcgtcaatggtaccaagcaaagccttagaagaagtaaagaaacattaccaaatccttttagaagatgtcaaagcaatcgagaatggtcaagttcctttacctcgttatcatcaccgcaaaggtctcatcgtagatgaagcagcagcagcagctacttctcctgccaacagagactctcattcctctggatcatctgagaagaaaccaaatcctggcacctccgggataagtagctccaatggaggaagaagtggtggctcgagagctgagcaagagagaagaaaagggattccatggactgaagaagaacattggttgtttcttttg

SEQ ID NO: 108427 - DNA, 366 bp, Arabidopsis thaliana columbia
ggcataacttctaggcagatgcaagatactctgcttatcgataaatacatcatggataaggatatacagcaaggcagtgcatgtgccagtttcctatccaagaaatcatcaagaattgaagatcagttgaggttctgcacagatcagtttcagaaactagcggaagataaatatcaaaagtctgtttctcttgaaaatctgcaaaagaaacgtgcagacatcgggaatggcttggaacaagctaggtcaaggctggaggagtcccattctaaagttgagcaaagtcggctggattatggggcattagaactggaactggagattgaaaggttcaataggagaaggatagaggaggaaatggaaata

SEQ ID NO: 108428 - DNA, 369 bp, Arabidopsis thaliana columbia
cttaaataaaaacctttacttatcttctttcttctcacttctcagacctcaatttccaagcagagatgacggtgaagataaggctcgcgcgtcttggttgtaaacaccgacccttctatcgtgtagttgtcgccgatgaaaaatcgcgcagggacggtaaacaaatcgaggtgttaggcttttatgatccactccaaggcaaagaagatgcggatagagtgagcctcaaattcgacagaatcaagtactggttatctgttggagctcaaccaacagacacagtggaaagcatgcttttcagggcccgtttgataccaccaaagcctatggtagtggtcggttcgaaaaatgggcagaagctacgagcaa

SEQ ID NO: 108429 - DNA, 423 bp, Arabidopsis thaliana columbia
cgttgaccagagagcaagaaacattgttgccgttggtgcagagggatttctgagacaacgcctatctggacaaggtcttggggtcatcctcgcaggtggctctgttgtacaaaaagttctggaggtaggagaagttttctccattgacgtttcctgtattgctgctctcacaccctctatcgatgtccgaatcaaaaacaatgctccttttagacgagcactattcgggggtgataacgtagtaatggcgactctaacggggcctggcattgtcttcattcaaagcttaccgtttcatcggctctcgcagcgtattgcaaggtcggtaacgtcgccaaacatgagagagaatccaaaattgctgatacagatagctatatttgcgttcctagcatacgctgtgattttgtcatcgttgatctt

SEQ ID NO: 108430 - DNA, 375 bp, Arabidopsis thaliana columbia
ttttgactcggaaaaacattggtggaaagaaatcaatccatggggatagtattaattatgaatcatatacacacaacacatagtagtccaaatattagaaacaaataacaaaaagctcatgccataagacataaacgaaagtaaaaggcaaaacaatttagaacctaactcaatgaaatgtggagattggtttagaagagaaaccctgatgccaaagcagcaacagatgcaaacaatgccgggacaaacatagcaacatcggaagtaggacttggagccggagcctatgtctgcgcagccacgtttcctactgcggagaaagccacaatagccaccatcaacaccactatgagcttcatcttcattgactccatt

SEQ ID NO: 108431 - DNA, 423 bp, Arabidopsis thaliana columbia
ggagaagtaaaaactgggtggtgattgtcttttggcttggctgggacgactttggctggggtcgaacgctctgactgagacgagcgtatcaggatctgcatacagagagtgatgatacctagaccaagcgccgatatcgtgatacctttccatgaagaaaagagttgtgcccagtgtaggaactttattgctccaagagttagtacgcatgcccatgatagaaccaccgcaagggactttatgggacggccaatgttctgttcttgttgaccggggaaagtgtctgcagctatgtgtttgtctaacagagcatccttagccacaaactgatctctgcaccactgtgcaattgcgtcatctgattcaggtaagtctttcatcgagtgacacttgatgtgaacatgcacccttctatgaattgct

SEQ ID NO: 108432 - DNA, 198 bp, Arabidopsis thaliana columbia
  unsure (1)..(198): unsure at all n locations
accggaacggaataccgggccgcgcacccgtcttaaagggagcaatttgtctcttaagtgcaggaagcagtgattttgttcaaaactactatgtgaatcctctgctttacagagtgtacactgttgatgcatacggatctttccttatcgataacttctctacatttatcaagcaagtgtatgcggntggagcaagga

SEQ ID NO: 108433 - DNA, 451 bp, Arabidopsis thaliana columbia
caaagagtccagcgacaatgagacacagttgtccttatcacatgctcctccaagcgtgcctaaacattccaacagcaacgcaggttctagctcccaaggtatattccgatctctctcaagtacaataatcaattgaatcagttgctataagcttttattactgttttgcacaaggcaatttctcttcctttcccatgaactatattatgtagagtaggaaacacaatcatgatttctgatatgacttgactgatgatgatacttgtgaaaactatctatatatctcttcagtaatcagtcgccttgaggtaattggaatttggaacttgaacattacttggattttaacttttcaatagcataagctttcctgtttcatcatatatgtttcactatacttggtatgcttttattactgctgatatttactattcctgctatttttttggga

SEQ ID NO: 108434 - DNA, 383 bp, Arabidopsis thaliana columbia
gaaactttactctctactttccgttttcttggtcatcctcttggcaacaagcgacagtgatgcctttaccagaaacagggtggcaaaggatttcctctttggagccgccacttctgcttatcagtgggaaggagctgttgctgaagatggaagaactcctagcgtctgggatactttctcacacacttacaatagaggtaatttaggtaatggagatataacatccgatgggtatcacaaatacaaggaagatgttaagctgatggcagaaatgggcttagaatcattcagattctctatctcctggtcaagacttatacctaatggaaggggactcattaacccaaaaggtctactgttttacaagaacctcatcaaagaac

SEQ ID NO: 108435 - DNA, 395 bp, Arabidopsis thaliana columbia
gaagctccttgcatacagaaactctttggaatccttagaatttactacacatttctcgaaactgtgaaaagggtgtgtggggggattattgctggtgctttccttgacaatgaaactgcgaaaactccgatagtggtcttgttgagcatcacttcctttcagctgtttttccttcttctgaagaagccattcatcaagaaaaaggtacagcttgtagagatcatctctatagcatgtcaagtcggcgtattcgcctcatgtctaatgctcttggcgaaagacttttccgaggcaagcggaaagaaacttgggatattcatgggcggattggtcttgaatggattcattatgctgatgtgcaacgaatggtactcattggacaaacaaacaaagcg

SEQ ID NO: 108436 - DNA, 423 bp, Arabidopsis thaliana columbia
acggcggcggagcatttaaagatcaccattggtttacaagccggcgaggtgtttacccgcgagcgcccgcaattggtgttgatggacgcccttatgccggtgatggacggttttgaagcggcgcggcggatcaaacagttggcgggtgaggcgctggtgccgatcatcttactcacctcgctgcgcgaaagcgaagccctggcccaatgcctggatgccggtggcgatgatttcctgcccaaaccctacaacccgctgatcctggccgccaagatcaatgccatggaccgtctgcggcgcctgcaggccacggtgctgcgccagcgcgaccagatcgcccggcaccacgattacctgttgcatgagcaacgcgcggccaaagcggtgttcgacaaggtagcgcattcgggttgcatcaatgcg

SEQ ID NO: 108437 - DNA, 340 bp, Arabidopsis thaliana columbia
gataaacacaaaaaaaagtctcagctataagttatatttcgaagctagcgaaaggaaaaacctgttgcaccacataccatagggccgcgcgtggtcccaaatccaggatctgaaataatggagatgcgcccatatatcaatgcaatgtctctctatcgctacaactagcttctaacgcttgaatgtctgttgtagccagccatgatcctaaactagctactacttgcgtcatctgcaacctctacctagaatacaaccacttgcacgggtatcacgactgtgtaatcgaagaccatgaatgcgaacgctctatgttcctcttctgactactctgcacatt

SEQ ID NO: 108438 - DNA, 329 bp, Arabidopsis thaliana columbia
gattcaaaccaataaatatcttttacagcatttcatctcacccacactatcgctagtcaactgggcggcacaactaagcatccggcgcgcccaacaccaaaaatcaattttctaatggaatcgttctctacacaattctctttagcttctcaactaccatctaacacctcattatcctttttagccagccatgatcaaaaaacacctacatctttctcccctgctactctctccccagaatacacccacttccacatctatcacaactctctatttaatatccataaaactgaacgctctatcttcttcttctcactactctccacatt

SEQ ID NO: 108439 - DNA, 417 bp, Arabidopsis thaliana columbia
  unsure (1)..(417): unsure at all n locations
ccagcaatgcgaccctggttagcttttttctctctctagccttaagtatgctctcaagctgtttcagttattcgctgattttgaatatgcaaagttgagatggtaacataggcttgtccaaatcgacactcacactgaaaagtataagatcttgctctgctgcttacatgtgttttggtactggtgactgattatgttgaacatttgagcaacttttattttagttcggtggtttggtctccccatgaactatatactctttcgcatttggtgctgntatctttctctatatctcgcttttgacttcatgctttgtgccttgatcgacataaccataaccatttaaaggttgcatgtctctatgaaatntcttgtggctctaaaacttgttttagttaagaggaatatattaatttt

SEQ ID NO: 108440 - DNA, 421 bp, Arabidopsis thaliana columbia
  unsure (1)..(421): unsure at all n locations
aacaaaggcgacagatgtctagtttttggaaatagtagtctcaggactggcgggactttaggttctaggtgggggacacaagcccaagattcttataagaagacgagtatgcaatccgtatccagaggcggatctcggtgatccgcaatnctattgccaggaatgggagcttcatatgatagtctcacgtccgaggacatcgatgacttgccgtggatcatcaaatgaagacgaagttttgagctgcacctcccaaactagcagctacgtacctagaaaagctctattcacaactggaaggacgaacaactgacaagttcttgacctaatgctcgttcaagatgcagccactgcgtttcgaagaagcaaatcttgcggcgaaagacgtgcttgcacaccatcgctcgatttcgacatgcta

SEQ ID NO: 108441 - DNA, 442 bp, Arabidopsis thaliana columbia
gtataccagtttcttagtagtggtggcgtccttagccgtcggagttatattctcgccggggacattcggatcgttgacgagtggagagaattcggcgaagatttcgatattcctgaagctagctcatctactcagtttcgctacagcttggggagctgctctctgggctaccttcatcggaggaatcatcatgttcaagaatttaccgaggcatcagtttggtaatcttcagagcaagttgtttccagcttacttcactttggttggttcttgctgcgcaatttcactctctgcttttggttatttgcatccatggaagtcatcttctacggtcgagaaatatcagatagggtttctcctatccgcttttgctttcaatctcaccaatttgtttgtcttcactcccatgaccatcgatatgatgaaacaaaggcacaaagta

SEQ ID NO: 108442 - DNA, 429 bp, Arabidopsis thaliana columbia
aaactttatcaaaaaaaaaaaaaaagctcccatacccgactcccgaggaaacctaagcttcgtcttgctatggccttcgtgggcgccggcaaggaccctcccttgccagaaccccctgacccgcctgatcctccctccatcttcgcccaaaccttcatacccgatccaccttctacttcttctctctttccaccttcatcgagtctagatctagatctatgttctaccgtttcttcctatggtgttactcctttcgtttttttgcgattctttactgctgtgtgcagtcccttctatcagatccgtacccgttccgtgtctttgcgggtctttactgctctatgcagtccatggaaactagcctattcccagatcttgggatatcctctcgtttcaagtggatattgtttacaagccataacctttgat

SEQ ID NO: 108443 - DNA, 305 bp, Arabidopsis thaliana columbia
aacaaaaaaaactaatataactctaaaacttttttttataattacaaaatctacttaacatggggctggaactaaaaacaaatgggggcggcctctactacacataacaccgtctcgttgagttctttcaagagacgacaagatcgccttcgatcaattgaagctatttctcatgtgatggaattgcaaaatgaattctatttacaaaatcttctctcatccgataatcggatctcgatcactggattctgttctcttctcttccaaaaaaacacaaggagtacatttccagatttggaaaattt

SEQ ID NO: 108444 - DNA, 451 bp, Arabidopsis thaliana columbia
attcttgcaaaaaggatggttgttcgtatgtagcacattcaaaatgtgccacacagagcagtgtgtgggatggtaaagggcttgagggtgagccagaagaagacatcaatgaaattgagccgtttgtgacgctaagagatggaagcatacgacatttcagtcatgaacatcatcgtttgaaacttgatgagaacacgagtagagattacaacgagaataagttgtgccaagcatgcatcactccgatatattttggtaacgtctactcatgtatgcaatgtgatttcagtcttcacgaagaatgtgcaaaactgtctcgcaaaacacatcacccagtacatccacatctacttactctagtgggaaaatctgacattatggatgctacgaaatcatgttcagtttgtccttggaagtgcacaactggtttcttctatgagtgcagggaaag

SEQ ID NO: 108445 - DNA, 438 bp, Arabidopsis thaliana columbia
ctttctacatacctgaagaaaaaaataatctacgaattcgagccaaaaagatcgaaactttgtaatctatgggtgcttcagggaaatgggtcaagtccattatcggtctcaagaagctagagaaggatgaaatcgaaaagggtaatgggaaaaacaagaaatggaagctatggaggactacttcagtagattcatggaagggttttcgaggaaaacatcggtctgattcagacggtgttgattcttctactgtttactctgctgctgttgctactgttcttagagctcctcctaaagatttcaaagctgttagagaagaatgggctgctattagaatccaaaccgcttttcgtggattcttggcgagaagagcgttgagggcattgaaagggatagtgaggttacaagctttagtgagaggaagacaagttaggaaac

SEQ ID NO: 108446 - DNA, 428 bp, Arabidopsis thaliana columbia
aaaaacggcagagcgtgagcatctgacacttaacggaaccctcttttgtgctcctacgacggcatcaacaccaacaaggtgggatggtatccgaactaccaccgacggtattgttatgctcagttcctacttctcctactgcacatacactatcactctctacagtaactactatctcttctgcggcagatctctaaagtgttctccacaaatgtcttgatcactatgcctgtctcagaagaaatgtggaattgcgcttcaagaatgggagggtgaactgcaccaccgacgctactaaaagttgatcttgagatcctgatcaggcgaagaacgctggagaagatatcaacgagcttatcagcaccgaattatgccctcccattgtggatagattacgttgggatcatgctggtacgcataacatgaac

SEQ ID NO: 108447 - DNA, 215 bp, Arabidopsis thaliana columbia
cacaatcgtttaatctcacccaagtaagacattttcttcatagagagaaagagagagaaatggcgacggcatcaacagaagcagcgaaggcatcatcgaccaatggagaagatcagaagcagttctcagaatcttcgacatctagaagtggtttacatgagtctcttactgtgttttgttctatacaacttattactgactgcaagtggtttttt

SEQ ID NO: 108448 - DNA, 360 bp, Arabidopsis thaliana columbia
tgataacccaactccttaagaaagctcacttctttttcccctgattccctttgtgggatcatctttcatcatcgtcgggttgtaagaatcaacaacaatgcagagcagcttcaaaaccgttcctttcactcctgatttctactctcagtcttcttacttcttcagaggagatagttgtcttgaggagtttcatcaaccagtcaatggttttcaccatgaagaagctatcgatttaagtccaaatgtcactattgcttcagctaacttacactacacgacgtttgatacggttatggattgtggtggtggttggtggtggtggcttggggagcgacttgaatgaggagaagaggagtgttt

SEQ ID NO: 108449 - DNA, 445 bp, Arabidopsis thaliana columbia
ctggaaatcacgaagctgaagcttctactggggaatcgatgaagctcttgcatctgatattcttattagctttgactactggaatctctgctgttctaatctacattatcggcgtctctaatctctgtaagtaatctccatcattgtcccatgcttgtagtgttgtatttcgtgattttttctgaagtatgaagatgattaatgataaagaagatgattccgtggatttagacgagtctaatcgttttaccaatgaagatttagaggcgttgcagtctttgcagaacggattccagaagtgcgtaagtgcaaatggtttgggactacaagctgctatgggtagagattattgcaaagtttctataaacttccctaaggatactgtccccaaatggaaagatcccaagtctggagagcttgaaggattgtcatatgagtttgacct

SEQ ID NO: 108450 - DNA, 466 bp, Arabidopsis thaliana columbia
  unsure (1)..(466): unsure at all n locations
ccgcggacgccgtggggaaatttgccctccaagtaaatctgcaattnagaaatttcatttcgnccggcatcgtcttctatcttctgattggtgattaatatccagatgtctctccctgagtcttaccggaagattaggtcanttttcgccctcgacctcgaaccctctgtcatcgcagcttctcgtgaggagagtcatgtgacaccgctncaccgacttctcgtagtcgcatttctttttggtcagacgngnnagattaactcgggacaagaccttgacaagaaggaagggttctacccattaatggaagcctggccctcattcacctggttgttacccagtaagctctgtatccctgtatcccgttggnggaaaaccaaaggcttcaaagtttgcttctataagagaattggctgagagaaagtgcccttttcttgtagttaaaaggaattttaaaagaatgatg

SEQ ID NO: 108451 - DNA, 455 bp, Arabidopsis thaliana columbia
gagagttctgaaatctgaaacccagtatcatcttcatcatcatcatgctcaccatgagaactgaagcacaagattcagtacctaaatgaaaccctaatccggaactaatcaaagaaaccccaaaggtctctctttacgaacaatgcagggaagagaggatcaaagagaatcttcagaggatgaacaatctgggtctcttaaatctctctcgcaaactcaaacccaagacccgacccgttaaaagatcttacggtaaccgtaattctgttcagaatccgactcctcctcttcagccttctcgccgatcttctcgattggagaacacaactccagttatctacactgatgggatcaatgagaagggcaagaaagcatctaaacgagagagtgttgtgattggtgaagggataagagctgagatttacacagaggaacatgagaagcttcttgggaat

SEQ ID NO: 108452 - DNA, 548 bp, Arabidopsis thaliana columbia
  unsure (1)..(548): unsure at all n locations
cgtccgatagagagctctatcagagtggatccctctgagtatctgtaagtataaaagatnntgatgctgcgagcctgatcctgagttgtgtactcagcgttttctgatgaggagctganntatattcnctcaaaagtttggtgaaatgaattcgctcggcacaaattggggaaattagcttgtcaccaattggttcactcggagatgtatgcncnttattaataacctacccagaggctctatattgcgtagtgactngnngtttctgcatagaactaagaaaataccagttngaggggtgatgcgcttgcccttgagaagcctaaatcaaggcatanactgatagaaagctttgtgaaagggcctanttggtattcaaccttgtgaaccagagaatgtgtaataaaggatggttggctacatgcgagtcaaagtcttcttcattctctacacnnattgaacatggaagnnaaatctgcttcttgcannatattgatgaaatcttgggtatgacttgatgacgtcccaaaatttcttcgttctttacc

SEQ ID NO: 108453 - DNA, 430 bp, Arabidopsis thaliana columbia
aagaaagtgaaaatcagaacccgaacttagccacacctccaagctaccaagcaaaatcatggagagcagcaattaaatcaactggtgtcaagaagatgaataaagaagttccaagactaaagagcacacaatcagctagaaatctgttttcagggagagacatatttggtcatatctcagatttctgctatgaattgaagagattagccacaagggttactgagagagaagatactgggaaatctgaagtgaaggagagtcatcaagtgggtgaaatagtaaatcagccttactctgttcatgacttggaattgaaaaaggaaagaaagccactgcttgaagtaagcaaagataagctccctgagtccacggatgttaaaggaagcacatttaaagagaaccgtagaagaaagaagagagtggatgatgc

SEQ ID NO: 108454 - DNA, 154 bp, Arabidopsis thaliana columbia
cgagattttattatccttcctcgaaacaagagcttagctaagatgacgaagaactacccaaccgggagcgaagatacaagaggctgttgagaatgcagaggaagctagaggtgatcgtgagagactggcaccataggccgactgaggacttgtg

SEQ ID NO: 108455 - DNA, 468 bp, Arabidopsis thaliana columbia
  unsure (1)..(468): unsure at all n locations
aacagaagctagctttggctaagaagctgaacttgacggcaagacaagtggaagtgtggttggaaaacagaagagctagaacgagagttaaagcaaacggaggtagattgcgaatacttgaaacggtgcgtagagaagctaaccggaagagaaccggagacttcagaaagaggctatggagcttcgaactctcaagctgtctccacaattctacggtcagatgactccaccaactacactcatcatgtgtccttcgtgcgagcgtgtgggtggcccatcatcatcgaaccatcaccacaatcacaggcccgtttctatcaatccgtgggttgcttgtgctggtcaggtggctcatgggctgaattttgaagccttgggttcacgatcgtgattntttattttagtggtgggaaaaaggtggttttggtatttttcggtatcgttatatatgtcatatttggggggggt

SEQ ID NO: 108456 - DNA, 401 bp, Arabidopsis thaliana columbia
  unsure (1)..(401): unsure at all n locations
gcgacgccaaacgcgtccgcttacgcttctcttcaaaagantcgaatattcccatatattctgatctccgttttccggnncgataatactggcgagtctttagatccgatgtgcggaagggagacgcagttcgtgttgcttcgttaccttggagctgcaaggacacaatactggatatgcttcttgtaccctatgaattgcaagggggtatcaatgctttggtgctgaccacacctgttattcctccacatgtttggataattcctccaagctgcttgaagcttttgaaccggtgttatagatggagtntgatcgaatgcttgctttcccttcttcttaaaagggtgttgttgctacaacttgatgccttttgaggggatggtactggagtcaatgtttgc

SEQ ID NO: 108457 - DNA, 224 bp, Arabidopsis thaliana columbia
atttcctaaatccacacatcacgaagccgaagcagccatgagtaatcttcactgatctctctacacattcaccgtcggcttttcaaatgcaggatattctcggacggttcgcgaccttggtttccgccgcttggcgggacatgactagcgggagctagggatcgcggagatacttgatcgagcttcgatgggctttttaagcgctcagccttctgtctaaagag

SEQ ID NO: 108458 - DNA, 226 bp, Arabidopsis thaliana columbia
gacagggtgagcgtattaactaagctgatcaattgtagaaccggctgctgtttatagggcacgctccttgttatggagcgcagggttattcgatgaatggtacatgtaacataggtcggaactgttctccaaacgatgtcttttacagattctcgaaatatggaatgtgcatcttcagaacctttatcaacgggttcttgactaactgtagacttactgatgctca

SEQ ID NO: 108459 - DNA, 453 bp, Arabidopsis thaliana columbia
cttctcaccatcttaagtagatttgccgaatcatgtctctaaacaaaaacagtcttcgatttcttcacctctctctctctcttagacaagccatgaaaggacagaacaaaagctcaacatcttcttgtaacatccatccagtagatgttattgaaggtgtgtgtcctctctgtcttaacgagaggcttttggtcgtggcttctctacagagattacgccctccatgtcctccttcttcctaccaaaccatcccgaaaaccatccttcaaaattcttctagaaagaaacccatcagactcttctccttctttagcttcttcgaactccgacatcacaagtgcgatcaccagaacacctccattatcagtccagaagattcattcatttcgatcaacttcgaagacaaccgagcaacttcatgggagaaaggaaaagaaacgcaatatcaacatg

SEQ ID NO: 108460 - DNA, 463 bp, Arabidopsis thaliana columbia
taactcgattagagagaagaaaaaacttgttcgaggcttcgaagaatgtcgatgttaatggctgtcaaaacaacttcactctgttgtagcagcttaaaccttacagcttcaccaacattccgacggaacccacgcgcggcgagattggtgaatccgacagcgagaatccaaacacgttttcatcgcctgattgaagaacaaggcattgtgcttatgcctggatgctacgatgccttatccgcggctattgtgcagcaaaccggattctccgctggttttatatccggttacgccttatccgcttctctcctgggaaaacccgatttcggtttgctaacaccaccggagatggctgcgacggcaaggtcggtgtgtgcgtcagctcctaatatacccatcattgcagatgctgataccggtggaggaaatgcgctaaacattcaaagaaccgtaaaggatttga

SEQ ID NO: 108461 - DNA, 437 bp, Arabidopsis thaliana columbia
  unsure (1)..(437): unsure at all n locations
gagaaactataggtacttctttatgtttgtttcttcggcaactattctctgcatctacattttttcgatgtcggcattatacatcaaggttctgatggataaccatcaaggtactgtgtggagggcaatgcgagaatcaccctgggcggttatgctgatgatatattgctttatttccctgtggtttgttggagggcttactgggtttcacttgtacctcattagcacaaaccagacgacctatgagaatttccggtacagatcagacaatagaatcaacgtttataaccgtgggtgttcaaacaatttttttgagacattttgctcaaaagttaaaccctcaaggaatgacttcagagcgttcatcanagaagaacctccaaggaatattacatttggtaccacatgggaacgaccagaagaagcagatgaagaaa

SEQ ID NO: 108462 - DNA, 423 bp, Arabidopsis thaliana columbia
ctctctcaacattatctctcagcgacaagtttagttcagattcctctagaacccattttcagatgtctcgtcagatttccgggcaaccctctcgccgtctcatcgtctccaatgctgcttcttctccttctctctctggtggcttcccagatgctggagcacatagtaaagaggagatggaagctgaaacagaacaggatccaatgaacctagctgatccagacagttgtttctgtgagtttcaaggtgttcatatacaccacaaagtgttagatccacatacactctctgatgatgtttcaaacacaagccctcatgctcaagaaacaccaaaaaccaagtttccgatgattctattgcacgggttcggcgcttctgtgttctcctggaacagaagtatgaagccattagctcgtctcggta

SEQ ID NO: 108463 - DNA, 245 bp, Arabidopsis thaliana columbia
catacattaacactagctctaccatgccttttcttgatcttaatacctatacttaccacggctacactaacaaagatgtgggggagttctattttcatcttttccatctcaaactccactaagatgcaatacttagcatcatcacttaacagaccacataatctccttttgagcactacataaaccctataatcaccgactcatacaccatgtttatccgaaccaccttcactcataaaatctta

SEQ ID NO: 108464 - DNA, 265 bp, Arabidopsis thaliana columbia
cgacccacacatccgatcaaattaacaatctctctcacatttttattatcgccctcttctcttcttctccgcggatctaaaaccaaaagcatgcgcgctcaataatccaattcttattctaactctaaccatctacaacctatccaccacaataatatcccttctgatcctcctccctatattttattaatattctctccaccaaattataatacctccatttccaccttataatctcccttttttcccccactcttccttttta

SEQ ID NO: 108465 - DNA, 437 bp, Arabidopsis thaliana columbia
gagaacagtatctccaatcaaaagatgctgaacctatttcttcagaaaatgaccgaaggcttacagtctcagaaatttagtggagctagcaagaaaaatgatttattagcccaatatgatgggcatttaatggatgaggaattgctcagttcgatgcgtgatgagcctgtttggcaggggtttgtagctcagtcaaatgaacttctcatgttaggtgataagaaaggcataaatgtccatcgaaaatctcatcgtgatgatgtttacgtcgaagatgatcagcatgattcggtcaggtcaattggcgtgggtattaatagtgatgcagctgattttggcagtgaagtacgtgacagtttggctggaggtagcagtgagggagattttgagtacttcccggatcatgatcctgtagcattcaggtttaaacaacctta

SEQ ID NO: 108466 - DNA, 427 bp, Arabidopsis thaliana columbia
ctttttccatcttctacgagaggcttcattaccggataacaacaggtctaaagaattgtgatggtatctcaattaggacgggtgaagaaatcgaaggtaaattctgcgactatatagagcgtcaataccagaggaaggttcttttgacaggtccaatgcttccagagccagataacagtagaccactcgaagatcgatggaatcactggctgaatcagttcaaacccggctcggtaatatattgtgcattgggaagtcaaatcactctagagaaggatcaattccaagaactctgtttaggaatggagctcactggtttaccgtttctcgtagcggtaaaaccaccaaaaggcgcaaagacgatccaagaagcgttgccagaaaggtttgaggagagggggaagaatcatggagtaagttgggggag

SEQ ID NO: 108467 - DNA, 479 bp, Arabidopsis thaliana columbia
  unsure (1)..(479): unsure at all n locations
cgtccccgctaatanngaagcaccgaaccggcngnntcgggttatgtctcgacccggaggaaccccatgtnncctcgtcttcgttgctgtctcttccggtggtctagctgtgagtcgttctnntcgtttattcgcttcccatttctaagcncnnttctctttcgtaccgnagaattcccanngtaangaccaaatcacnntgttacccgnatttctgtaatgggtttcgaggaaagcccttcaaaacccccgtcaagtgccacccgtnntgattcttcaatatgnngaggcaatgttctccacccgttccctcggacccgagagtttgggaccccgtaccaaaccgtctaggagtttagtccatatgcctttcgaggaaagaaatctgggccctctcgtaactttcttttacagcagtacgctggacatgaaagaagcgaagagtctatagaaggagcctttgagaagcttctcatgtc

SEQ ID NO: 108468 - DNA, 539 bp, Arabidopsis thaliana columbia
  unsure (1)..(539): unsure at all n locations
ccgtccgctaacgaccctctcaaagtanatgagttttggttatgctaagaacaaacnatcaagtggaaggggtcttcatgcgatagaacaactatgaggagtgtacggtgcgaagctngnngttcctcacnnaagctcnntagagaacccagaagtaccaaannggatatgannaccatgannaactctcggcctaccacttctttaaaccgacctggtctctcagaaccgacgtnnggatggtcngnntgatatgcactcgatggatcaaaccaaaaactctctctgaatagaacccaaaacaaggagtacctaatcatgaagnaacaacanaaaccctcatgatcaattaccctatagaaaagctagggtttccgttagagctagatctgatgccactacggtaaatgacggatgtcaatggagaaaatacggtcagaaaatggcgaaagggaatccatgtcctcgcgcttattatcgttgcaccattggccgtggatgtcctgtccgtaaacaggtccaacgatgcgcggaggata

SEQ ID NO: 108469 - DNA, 449 bp, Arabidopsis thaliana columbia
ggaatcagctattcagcaaggtggggcatcatctagtgtcttggaagctaatccgccaccacgtgagtccattgtcccagtagttaatccatcgcgtggtaacctaagtcctatgcgaaaggatacgacaggctcagccgttgttcagcctgatgcagccacttcgattcaagttgcaaaatcaaacgatacaagcgaaattgtaaacaatggagctattgttggagacgggcaaaagtttctggctcctatggtggaggagcaaacacagcaaaagattgacaatgatgattctagtacagcagacgggaatcacacgtcagacaaaggacgtctctccccaattcaaccatctcatggcatgaggatactaaacacagtgactaacggaccccgcggattgaaagtagaaacttcaattcatgaagaagtgccccttttttgtttga

SEQ ID NO: 108470 - DNA, 278 bp, Arabidopsis thaliana columbia
  unsure (1)..(278): unsure at all n locations
ttttannatcttaaaannattaactcttcgcgttgagcacaaagatctgcggtgcgagtgagtcnngatatannaccattnnacgtattaccagnnnacttcttngnnacgaaaggaaattgaacncnnttttagnnccatatnttncttaacagttnctagacatcangnncctcactacannnaatctaaaatncttttgctcnnattttcagnnggagctttatnnncaatcannctcatgtcngnntcaaatcctnnntcaaaatcnnattcac

SEQ ID NO: 108471 - DNA, 399 bp, Arabidopsis thaliana columbia
  unsure (1)..(399): unsure at all n locations
atttttgttttgtcggacaaaaaataaaatgaagagcaacacaaacactaatctgattctcttccaccaccactctccagtgagctgcaaaatcaccctccgccgtcgccgccgcgaatcaccaccgtttcttattcatcttcttcctctctttcttcactctcctcttctctttctctctcttctcctcctcaatccactccaccacatcctctcactctctctcctcatctccctcctgctcctctcttccaccaccagtcctcgccgcacttctccactacactttctcatcaccaccaaacacatctatgtcctttcttgaactcttcaccatctncaacatcattcactctcatggcccagcttgtaacctcttaatctttggactaactcacg

SEQ ID NO: 108472 - DNA, 139 bp, Arabidopsis thaliana columbia
atcgcttgtagtgagggaggcgggaaagagatttgtcgtgtcatagatactgacctacggtgcgcgtgtactacaccagggggcttgggttttatcaacatggctgatgatcatgtttctactgattcgatcagtcaca

SEQ ID NO: 108473 - DNA, 447 bp, Arabidopsis thaliana columbia
attccaatacggaatgaaaagaaaaggacaacatgcaggatggggtagaagaagcggggatacttggttcaagccctgacacgaaagaatataacactcctaagaattaagaatccatgtttcgtataggatttcttgtggacacaacactacaataacaaaattgtagttgtgtttaatcttcttttttttattgaagagttttttttctatctaaatttaagtatgtatctatcaaaaaaaatagtatatacaacagataacctcggctcaatcttttttagtaaaaaaaagattgagccgagtgcaattaaactaataaaacaaacgtgaattactaaatctaattcatctactcttgggcaatctaattatcgatggttgggaagctaaatgtgaactctttccatactttacaagcagcagctagttaagacttcatttgca

SEQ ID NO: 108474 - DNA, 376 bp, Arabidopsis thaliana columbia
ctggaagtgatccaaaacactggcttattccactcctcttctctagggtttctctctaattctgaacttgctttctctgaatctcattatttcggtggagtaaatttggggttagctcacattttatggtctgagttgctttatgtctctgtaaaagattcgaacttgtttttggaatttagattgtgtggggttttgttcctaaagttttcacctttatggattttttcatgctctgtatataattagcaggggtttcacttagattccaacttgaatcacttcagagatcacacagcttcaatttttaacaaaatttggttgcttctttgtgtgataaacacgctgaatttgtagttgatagatggcgacactt

SEQ ID NO: 108475 - DNA, 500 bp, Arabidopsis thaliana columbia
  unsure (1)..(500): unsure at all n locations
ccgcttagctcaatagnnnacttttgaggctacctctgagtgcatttttcccatggnncggcgaccgataggggctgtgttttactncggtgnnngtctgagagaggtgagagggccttggagnnnttctcngcccgntntcannnaatcttcaaatcgcttttnncctctcnncgccgcnganannttcccttttcgttacccttgtnncgtcttccctcngnnaggaggacccagtagcgnnngcaatcttcctttcgtctctttttcgagtctttccgccccgtatattaacccccatcagcangnncgtaatnncgaagctttcttggccccctcgagttgcttacctnnttctgtacccggcggcttnnccagatgccggcaccgaccggtttcanngcggatgaatcggagaagaaagagcgatatctcagaaaggaaagaaggagaatggtgaagggagaccggctgaatctgttagaatataaaaagtaggg

SEQ ID NO: 108476 - DNA, 233 bp, Arabidopsis thaliana columbia
atcggttgtaatttgcgtgtctgaaaaattattccttgcatgtcaaacccaaaaccattggagaatgcaccaatcgtaggtgggtcgtgtattcactactagctcgtgagacggtaactactacgtcggttagccgtattatctctagagataatgcatgcaactgaccacgcatgatcctgggcgctcatttagtacacaataggttgcctcgacctctgccaaatgctctg

SEQ ID NO: 108477 - DNA, 379 bp, Arabidopsis thaliana columbia
ctaaacacaatccaaaagtatttttaagctttcacatacgagagaaaacttagaaaatgagggcaatcgcagcttggtttttcattttctgttaccttgttccctctgtttttgcgcagctccggcatgggttttacgagggtacatgccctcccgctgaatctatcgtgggtagagttgttttcaaccattgggaccgtaaccgaacgggtactgcagcattgcttcgtatgcagtttcatgattgtgttgtcaaaggttgtgatgcttccctcttgatcgacccaacaacccaaagaccatcagagaaaagcgtccggcgaaatgcaagggtgagagggttctagatcatatatttagctcataaagaactcgcgct

SEQ ID NO: 108478 - DNA, 466 bp, Arabidopsis thaliana columbia
ctagaactgttcaagccaggtaactccggtgctgtgaaatggacggtgactacgaaacctgccaagaaacagcctctgacttggtataaggttgtgatagagccaccttctgggagtgagccggttgggcttgatatgatcagtatggggaaaggaatggcatggttaaatggtgaagagataggaagatattggcccaggattgctagaaagaacagcccgaacgacgagtgcgtaaaagaatgcgattacagaggcaaattcatgccggataaatgcctaactggatgtggagagccatctcagagatggtatcatgttccaagatcatggtttaagtcttccgggaatgagctggtgatcttcgaggagaaaggcggcaatcccatgaagataaagttgtccaaaaggaaagtatcggtggtgtaagcaagtagaacaagttaaagatgatgatgcaaaacgt

SEQ ID NO: 108479 - DNA, 148 bp, Arabidopsis thaliana columbia
  unsure (1)..(148): unsure at all n locations
ataatncatttcccgcattgctttgggaatcctgtagcggctgtcggtttcgcgtaaccttccctgttcctctccctctattcgtgttcaccgcactctcaacgtgatgccttccgacttggttaacccggctggggacggtggtgat

SEQ ID NO: 108480 - DNA, 283 bp, Arabidopsis thaliana columbia
cgcgtcaagatgacatcagatctctttattgacccatcaatgctggttcccaaacgtcgagtgctccctaaaccttgcgatataattcaaagtcggcgacgaacttctttcgcgtgagcttttcgagatgctatgaatgcgaaatggctccagaggggtagacagggtatggatggtagctgaggaaacaaggggggacattctctcgagcccgggtggctgcttgtggaagatctgctggcgactagttactccatggctcagaatgtgcaaggcgcatagc

SEQ ID NO: 108481 - DNA, 258 bp, Arabidopsis thaliana columbia
gcgaccggcgatcggcgcacgctcgttttttttttcttttctcaagagcctagcgtcgtctttttctactatgacccacggcgttcttaatatctaaaattcgattgtatgggtctttgaaggggtgtgagactgagcagagtctgtgtgtgcggggtggtcagcgcgcgcttacacattaagactgcagatcgcgttttcgtgacagacctacttagacgacagtctcgccgacaagtttacagcagacggtacacg

SEQ ID NO: 108482 - DNA, 435 bp, Arabidopsis thaliana columbia
  unsure (1)..(435): unsure at all n locations
attcgattttctacagtgatcttcatatccttgacttgcaaacaatggagtggtcacagcctcatgttcagggagatgttgtaactcctcgggcaggacacgctggaatcaccattgacgaaaactggtatatagttgggggcggtgataacagtactggttgtttagagacccttgttctaaatatgtcaaagctggtttggtctacatcaacccatgtagaagcaagacatccacttgctagtgagggtctcagtgtatgttcagcatcagtatttggagagaacatcttagtagcttttggcggctataacgggaagtataacaatgatatatttgtcatgaggctaaaaccaggagaatcctcacatcccaaaatctntaagtcaccagcagccgctgcagctgcagcctctgtcactgctgcttatgcca

SEQ ID NO: 108483 - DNA, 209 bp, Arabidopsis thaliana columbia
aaaagagtcaatttgtataacatttttcactctctctctcactatcattcactatggcggggacttgacaactagtggcgaggctatccataccacacctatcatatttgttatagcgttcattctttactgaagccttctcatcttgcctagctggttcacagatttctactttttgacatctagcacatctaccatttctatgactc

SEQ ID NO: 108484 - DNA, 450 bp, Arabidopsis thaliana columbia
cttcttcttcaatgtagtttcatgtccctagaaattttcgttttcttctctttgaatcatctatcgaattgttgttgcggaacttttagattctaagaaattgagttcactcttcggcgatggagcgaaactcgtcggacgacgaagaagaccaccagcatttgattccccaaaacgacactcgaatccgtcaccgggaggattcagtttcctccaacgccaccacaatcggcgggaatcagagatcggcgtttcagatcgacgacattttacatcgagtccaacaccgtgggaagatctcgctcaacaagcgttacgtcattgtcttcgtttctctaattatctcaatcggtcttctcttcttactcactgatcctcgtgaactatttgcggcgaatttctcgagttttaagctggatccattgtcgaatcgtgtcaaagaatctgagc

SEQ ID NO: 108485 - DNA, 332 bp, Arabidopsis thaliana columbia
gcgcgccggaacccggcgaccactcgtaattagctttttttcacccccaatcttttaactttggtgcccacccctggatccgcatcatcatggagccaaccatcttttcacgcgcgctcaagaatctactctttcaaagcggccttattgtccaccctatttttctgggtctgaagctaaacctggggacttttatcttcacgactttcaggctcgggccgccggctgcgtatgcaccgttcgaccctcatttttcacgcgcggggactgggccgggatcgctttcgcccgctgtgacactcgactttcaagagtcacgaggggcttgggca

SEQ ID NO: 108486 - DNA, 428 bp, Arabidopsis thaliana columbia
cggacgcgtgggttcctagtcagaggaggatatgaggagtgtggagttcaaagttatagaggcagatcctgctgagtactgggtggttgctccagacacagagattttctgtgagggtgagcctgtgaagagagaggatgaagaaaggctagatgatgtaggttatgatgatgttggtggtgtcaggaaacagattgctcagattagggaactttttgaacttcccttgaggcattcacagctatttaagtcgataggagttataccaccttaaggaattcttctttatgtactaccttggtctgggatgacttatatttcttttactgtatttaataaaactgttgtcttatttcttcttttattaatctgtatcttatatcttatgttaaatttggtttttaattattacttttctatcctttatt

SEQ ID NO: 108487 - DNA, 305 bp, Arabidopsis thaliana columbia
  unsure (1)..(305): unsure at all n locations
atcgtcnttcaacccaaaagcatgctgaagaatcttgtaatctaaaagggggaaaggtcacggtcattggctctgccggtagggagaggtcagacacctaagggtaacggacagaaaaacctgggcggctataacttgacacaaccgcgttcgcaccgcgtgtggttgcagaagaggccactatcaaagtgatgaaaagttacccttcagattatggagtttgaattggcatagtggccactatcgattcaaggttaacctgttattcaatagggtgtggtaattcttgcaatgatttgttctct

SEQ ID NO: 108488 - DNA, 142 bp, Arabidopsis thaliana columbia
gaattcccgtcgaccacgcgtcggacctgcgacctggcctttttaccacaaaagagaggacgcggtgctagttactgacacgtctcactccggacattataaggggagttactacttattattcagaatgggatcagcagaa

SEQ ID NO: 108489 - DNA, 206 bp, Arabidopsis thaliana columbia
aaaaaacgaaggagaagaagaacaatttctttgattcaagagacagagagcttcttggccgtaaagtttgatccttgggaaattacttaataaccatataaggtgtcttcttcagtattacatcaaccttctgttgataagaaacctgaagatgtatttatcaaatcttatgatctaacttttatttttttatttttagtttattt

SEQ ID NO: 108490 - DNA, 290 bp, Arabidopsis thaliana columbia
atactgtcaagctaaacccataactgccataattcatatcctctttaaaacatattggccgcaaataaaatgccttctggttcactaactgaaatttcaaaatgtatcgtctatcccgagaaaaagtccaccgtcttcgatctccccatctccttctccgaccttcctatgctctcatgtcattacattcaaaaaggcactctactcaccagccctcctactttcttctacttctactacctagtctcctctctttgtctttctctattcttcactcatttcctctttcc

SEQ ID NO: 108491 - DNA, 412 bp, Arabidopsis thaliana columbia
acaaaatcgagcccacactttcccaattgtatctgtatctactgaaatcgattcacgagagctcagatttgttgttagcatgacgtgactaagcaagattattgagttgtaattagtatttgagatcaagatgaaggaggacgatgcattgccgactactacgacaactggtacggcgacaggaacagctatggcgaattcgaagaaggaaagctctgactcggtcttgtttggaagaggtcgatataagttctgggcgtttgctgcgattttgcttttggctttttggtcgatgtttactggcaccgtcactctccggttatctaccgggaatctgaaccggttatcggaagatctagggattcctaactacgataatctcgacgttctggaaatggaggaaagagagaaa

SEQ ID NO: 108492 - DNA, 242 bp, Arabidopsis thaliana columbia
  unsure (1)..(242): unsure at all n locations
acacaccattttcacatcatcnatttatgtcttcccctctctctcaatacctcgctcgattttttaaacacaccgtgcgggctctacaatattcatctttccattcttttcctacaaacccacttcacttaccatcaaattatttatcacaatacctaattacctactccatacctatcctaatacaacaacttttctttttttcctcataactatatcactttctttaattactttatcta

SEQ ID NO: 108493 - DNA, 144 bp, Arabidopsis thaliana columbia
ctcgttgactattcttgatacaagcttttctttcacgtgtcgctgtccccttctcaacgtgggattggaacacatctcgggtggagggctcaaaagacaacgcctaacaagcgctcgagtttttcaaatgacgaactcccttga

SEQ ID NO: 108494 - DNA, 170 bp, Arabidopsis thaliana columbia
ccacgcgtctcaattacaccttgtttttctatgctttacattatttttggagacctataccgaacctttcatgacatttattctaccaaactgagaagcgtgctgtcttacacggacattaacagcgtcttggctacactgaatagacgatatgtgggatgctacgacag

SEQ ID NO: 108495 - DNA, 466 bp, Arabidopsis thaliana columbia
aaatattttcccggaaaaattctctcattttctcgggaaaaatgttgtctctgcgtttacaaaagtttcctctaaaaaagtagtgagagattccataagaccataaccagtagacaacaaattcttcatcattttgtgtctcttgtttgagatcccggtgaaatttagcggcgacgagaaaattttcaggtagagtgtgttaaaaaatgtctagagtgagttttgaagtgtcaggaggctatcactctgatgcagaagccggaaacagcggaccaatgagcggtggtcaattaccaccgatctataaaaaaccggggaactccagattcactgctgagaacagtcagagaacacgtacggcaccatacgtggacctcacggtagatgtacaagacgatacagtctctgtacatagcttgaaaatggaaggtggatctagcgttgaagagagttcggagcttacttt

SEQ ID NO: 108496 - DNA, 383 bp, Arabidopsis thaliana columbia
aacctatccaaaagcgaagaagccaagcaaacatattataaaaatgaagaaggcgtcagagttggtgaagcagataataaacatgttgacttgtctagcaaaggacaagacgaaggagcttaagaggaagacaagagccttcaagacacgtctcgtaatattttcgctgctccacaacagacacatggtggtgggttctttgtctcacaagctcaagagcaatcaaacatcaaaaaagatagatcatgataacaaggatgttcaagattatcatgataaaaacatggtggttgtgtatagccaaaacgttaacgccatgtctagcactcctgtctctcgcatgtacaatatcaaatacagaggaggaagatgattaaaagggg

SEQ ID NO: 108497 - DNA, 107 bp, Arabidopsis thaliana columbia
atcgcgagcgtccaaccttatttactcttgtattttacgtcatagctctactataaccgggccggtatttaatacaatgggcgcggtttaacaacatttttacttaa

SEQ ID NO: 108498 - DNA, 152 bp, Arabidopsis thaliana columbia
cagtccgctttattagtcaccgcctgtgttctcgcgaactcggccgtcctctttgcatccttaccttgttcgcgtcttagctttcgccttgatccgcgtcttctcagtgttcaagtgatcgggcgtggaggagcaggtggttttggcgaaaa

SEQ ID NO: 108499 - DNA, 408 bp, Arabidopsis thaliana columbia
tttaaacctagaaacctcaaaaaaaaccggggaatggccccgaaggcagggaagaaccccgctgagaagaaaccagcttccgagaagccggtggaggagaaatcaaaagccgagaaagctccggcggagaagaaaccaaaggccggaaagaagctcccgaaggaagctggtgccggaggcgacaagaagaaaaagatgaagaagaagagtgtcgagacttacaagatctacatcttcaaggtgcttaagcaagttcatcccgatatcggaatctccagcaaagcgatggggatcatgaacagtttcattaacgatatcttcgagaagcttgctcaagaggcgtcgaagcttgcgaggtacaataagaaacctacgatcacttctcgggagattcagactgctgtgaga

SEQ ID NO: 108500 - DNA, 275 bp, Arabidopsis thaliana columbia
  unsure (1)..(275): unsure at all n locations
ggaaaacccgaggcgacccactctttctaaaaaaaaatatctcccatttacttcttcttttttttctacactttactattatggcgaattttaaaaaaatggtagggatccttcatatccactcctttcaatttttaaaccaaatcatatctaatatttttaaattacatctttttctaacactatattnattacactattcaatatatcttctaattctacttttcttttccaacttatttatctccattttatctttattttatcattttaat

SEQ ID NO: 108501 - DNA, 436 bp, Arabidopsis thaliana columbia
  unsure (1)..(436): unsure at all n locations
ntccgtaagaaagataaccttgacagaaggtagactttaactacatcaaccatactaatctagttatagcgggaactgaaatcagacggagcgggctcccacaagatcaatctcatactctttctcatcaccaatgatcccaccaccggacaaagctcgtgatcagactgccatagacctgaacctgtgatctacaagactctagaggaatttccagaggaggtgaagctcattcgtgcttacgccagagacagaccgacgtggcggactacggcgcatccttggagagatgattctcggtttaaactaaccggagtaccaactcttgtgcggtcggatggagactcttttaaacgacctcttgaagatcatcaagcccaccttccttacttgatacttcctcttcttgcaccatccacttgatttgatcgatatc

SEQ ID NO: 108502 - DNA, 232 bp, Arabidopsis thaliana columbia
ggccaacccgggggcccctcatggacctcaatccttatcttttaactcaatgaaatattaaagggcacatgggatggagtctttggaatttttacacatactgtatttgactttctaatatacagtctattactacaggagaccaatattaattaaagactgactgactatctgtttacattgattgaacttcttttgggtaccatttattaatgtttgttataatcttatt

SEQ ID NO: 108503 - DNA, 330 bp, Arabidopsis thaliana columbia
  unsure (1)..(330): unsure at all n locations
cgtttaccgatcttctcgattctccaatttcaaaccctaacattttgattantccttcgtggttttcacaggcttgagagattcncaaccaattattattcctgcttttataaagagagctgccagtaatggctcttctccttctttattcacaaaaccacttctgtcttctcgtgttgctgcatcttcccctaactatctattagtttcacaaacatgttcatatctaacatctttaaaataatcctcaatgctatcaaacacctcctctatctgcaccttatttctttcatcgttataagggttatttctttcataccctattttttt

SEQ ID NO: 108504 - DNA, 300 bp, Arabidopsis thaliana columbia
ttcgcttcttaatctatctctcttactctctagattattcttcacttagatcctgatggtgattaaaagtggatcttatggatccaataacttcaatttctgggtttaattttccactcaatcttcatctccttgatccacactcatgcctcattattgtgtaagtcccgggaacaaccgttgtagattctgcatgatctagatacagtacattcccacacgtattaactaccatcaccttgacctgcgctaccgagaatgtcttgataagaagctcactaatatccctgcgaggagtgc

SEQ ID NO: 108505 - DNA, 469 bp, Arabidopsis thaliana columbia
  unsure (1)..(469): unsure at all n locations
cttaatcttattcttctttatctctctctttttctcaagaacatattgagcttctttctttgttccttattctgttagggtgggctcttacaaaaatgtcnttcgcangaacaacccataaatgcatggcatgtgacaaaacattttatcgtgtccacaagttaactttttataaccgtgtctaccacaaatcttgttttctatttcaccattttaaattaactcttaatcttacctttttctactttcatttaattagttctcttctgtatttcttcatcatctttacaaacttttattttaactttgtgttttatttatatttttttttttatatactttttattttttcttaaaacattatttttttaaattcaattttttttatacttattattattctttttttttaaaattttattatttttataccttaatataattttttttcacacccaatatattattt

SEQ ID NO: 108506 - DNA, 442 bp, Arabidopsis thaliana columbia
  unsure (1)..(442): unsure at all n locations
gcgtacggtttacttataacacaatcattanaggaatttgtaaagaagggatggtggaccgcccgtgtgagatggttcggaatggggggttgaaaggttgtgagcctgatgtgatctcttataacatcttgcttcgtgctcttttgaatcaagggaaatgggaagaaggtgagaagctaatgactaagatgttttcagagaagtgtgatcctaatgttgtgacttatagcattttgattactactctatgtcgcgatggaaagatcgaagatgcgatgaatcttcttaagcttatgaaggaaaaagggttaactcctgatgcttatagctatgatcctttgatagctgcgttttgtagagaaggtaggttagatgttgctattgagttcttggaaactatgatctctgactgatgtttaccggacataagtaacttcaacac

SEQ ID NO: 108507 - DNA, 313 bp, Arabidopsis thaliana columbia
  unsure (1)..(313): unsure at all n locations
caacctanctagctagtaaacagtattttttatataccaaaaatcgctccaanttccatggctcttttcttagctctgaggttcacttttacacaacaatctcctcctcttgtagctatactccttgcggcctaagtttcccctctcccaagccaaagccaacttctaaaccaaccccaagccctaactcttgctctagcaatttccctaaatacacccttttactctatttcttctctaattttctcaactccctcctttactttaccctttacaagccacccgaccaaccattcttcagcctcatccaatt

SEQ ID NO: 108508 - DNA, 439 bp, Arabidopsis thaliana columbia
gtggactttaaaaatctgtaaaaaagcaaatccgaagaaagagagagagagaaggtgattgtgaaatttcagatgacgcaggagttttttattctcgccggagttttctcctcccaccgtctctgattctcgtcgccgccgtacacagttgttgttctctgccggatggtgttgggctatgcttaccctgcgtatgaatgttacaagactgttgaaaagaataggcctgaaatcgagcaacttcgcttttggtgtcagtactggatattggttgcttgcttgacagtttttgagagagttggtgatgcgtttgtttcatgggttccgatgtacagtgaagctaagttggcattcttcatatacctgtggtatcctaaaaccaggggtactacatatgtctacgagtccttctttaagccatatctctcacagcatgaga

SEQ ID NO: 108509 - DNA, 451 bp, Arabidopsis thaliana columbia
  unsure (1)..(451): unsure at all n locations
acgcttaagngggccttgttttctctctgccagttattctgtcagatcaatgcctgtgatgatgtgggcgttatgccacgacaatgcgggggattctagtcatgagccagaaccatccccagctgactcatttgggaaactaggcacaagtgatcattctagagctttgattcctgttgcctcagcagcaatgctggctcctcggcctcctaaccgtaagtttaaaaggactgagcagcagctagctgcacaacgcagaattcgtcgacctttctcagttactgaagtagaagcactggtccaagccgttgagaaactcggaaccggaaggtacaaaacaaagaaatagcactttctcttcttcatgttgctgacaaaatgtgtttgaaaactacaagtggagagatgtgaaggttcgtgctttcgaggacgcagaccatcgtacctatgt

SEQ ID NO: 108510 - DNA, 281 bp, Arabidopsis thaliana columbia
  unsure (1)..(281): unsure at all n locations
gtctccatttacaacaagtatattaccgatatacttgacttgcctgaaggttgttgttttccaagggcggagtgtcgaanaaaggactaggaaccaacgcctttttctggtcctgtaccaagactaggctctgtcaagaacgcgtcatcgatgagaggaggatcagtcagagtccctatgattgatattaagcctctcgatctgttgaatgagctctttgtggaatgtagaatatatggagaagttttagcgacataaggactgattttctctaaagatat

SEQ ID NO: 108511 - DNA, 271 bp, Arabidopsis thaliana columbia
  unsure (1)..(271): unsure at all n locations
aacactaaaatataacaaaaattactttttttaacttttctcattctcctcctcctcgttcttattaaactgagcaatggacaaccactttttaantatcttataccaaccataacttaatcatatcaatctttcctcacacaatttcttaacacantaaatttatcattcaatcataccactaaacctacttctaataccttctcaaaactctttacaactatctctctaactatttccacaaatctttctttttttatactctttaacc

SEQ ID NO: 108512 - DNA, 343 bp, Arabidopsis thaliana columbia
gaaagtttatctcacggatgagaaagagttgattatggaaccatgcttgaaatggggcgcaaattccaatatctggggggccatcaaggcatttgggttgaaggcaacagttcatgtggtcgatctgcaagtttttgctcatcctcgtatcactctcaagccattagttccaagtttcccttgttttgccaatatctatgtgtctcttatggagaagccacatgttgattttggactgaagcttggtggagcagatcttatgtcaatccctggcctttacagatttgatcaggtgcagatcaaggatcaagttgcgaacatgtatctcttgcctatgaccctt

SEQ ID NO: 108513 - DNA, 427 bp, Arabidopsis thaliana columbia
gacacaaagggacctgagttcggccctttttacgactacaaagactacatctagacttggtgcggtgccattcgtagagagaatatatcttacttaaaatcaagctttgcctgttctactacaatgcgctcaacaattccctcataagattcctttgcatgggactctgattggttagctgaacttgccaaatgcatattcatgccataacctaatacaacgagtccacactaatttccagtgtcgatttagattctatcaaccgcaacacattccgtatattgcttcacttaatcacttctctgttgagcagtaaggtaattcaacctgatcttttgattgctgtgtatcgacatagctatatccggtccactactgtcgatgtacacaaaggatgtccattatagccaacacacgctggctttta

SEQ ID NO: 108514 - DNA, 435 bp, Arabidopsis thaliana columbia
  unsure (1)..(435): unsure at all n locations
ggaaaanccgccggggccgacgcgtccgctgaattcgtctctgagctcatgaagttttttttacctgcgttaatatctttctcttgacatattgttcggacttagggggctctctattttactttcttgtgttgtctttcttaaataatgcaaatcatctgttatgttgtttgagtgtatagaatgtatttctttgatgtagcatattcctgtgctttctttatttaatggcttgtcctattttttatgcattgtaactatcagtttaattaatgatcgctaatctaaaaaaaaaattaatattgtctccccttctataagatccaagcttacttactcattcatgctacttcatatctcttctattgtgccacctaaatttaaatcacttggccgtttttttacaacctttttacttgaaaaacccttattttt

SEQ ID NO: 108515 - DNA, 161 bp, Arabidopsis thaliana columbia
aacccgggggacccacacaccatcttaattggactcattacactaacattctttcagcattattcctataacttaattgaggaagtatttacaaactttatggggtattaaaaacctcaaacctatatactaatcactaatacacaaattctccaccttaa

SEQ ID NO: 108516 - DNA, 436 bp, Arabidopsis thaliana columbia
gacattataagcccactttctcctcataagtcgcctgctgctaagacaaatggtatgagcggtgctaccaagttggcaggaacaccagtgagcacagcaatgacaactgccaagtggctcaggactgtcatatccccgcttctgccaaaaccttctcctgggttggaacatttccttaaatcatgtgatagggatataacaaatgacgtcacacgaagagcacacataatattggaagctattttcccaaatagttcccttggtgcccaatgtggaggtggaagtttgcaagctgttgacctgatggatgacatatgggcagagcagcgcagattagaagcttgtaagttatactacagagttcttgaggcaatgtgtaaagcagaagctcagattttgcatgcaaataatctgaactctttattgacaaatgaga

SEQ ID NO: 108517 - DNA, 155 bp, Arabidopsis thaliana columbia
cctttccaatggatctgctcaaggaagatattctgaagaaacttaagagtctatcttagtaatcttttggtaagaaggtgttcaaaccatcttatatctatcataataaaatccataagcttctataggaataactactctttcactatcttaac

SEQ ID NO: 108518 - DNA, 294 bp, Arabidopsis thaliana columbia
gcaaaaacaaaaccaacaaggaacttgtctttctctctggctctctttctcttaacgttgtcatatcttgaggcgggaatgtgatatatataggtttcttgttggatcttgatccctctggaaaaggaggggagaatatcacttcatgatgggattttgtatcttctctcttttagttacctcccacattactacttagtccaagctttttttttcataatatcattatctcttaattttttctacttcttcccatttttttaatcatctttctactatatctgctttctcttt

SEQ ID NO: 108519 - DNA, 327 bp, Arabidopsis thaliana columbia
  unsure (1)..(327): unsure at all n locations
gacccacgcatacttttactttctccactttccctcttattattcctctcatagaaacaacattntacagagattttaaaaaatgtcacggtcctcaaccttcaactcattcactacctactcaccaaaacccaaaaccatcttcaaaaattccatattcacttcacattacaactttaaatctttttctttaacttcaacattccacaccaaaataattctttactactcttatttttaacacacctatactcaaaccaattttatctcttcactctttaatttcacaaatatctacttcaccttcattctttaacaaaatcccta

SEQ ID NO: 108520 - DNA, 258 bp, Arabidopsis thaliana columbia
cccacgcaccaatcatcaccaccacaaccttcttctaattttactttcctaaatcaatcccactacaaagccaattttacatgaagctcgcgaaacacaaaatcaccacccactctcaaaactacaacatcatcttctcaccatcttcaatcaacttcgtactcatcataatctcctctttaatccccctttactaccaaaaatcatatcctctcaattctcaaatactcttccacttatcaacttaatacatttctt

SEQ ID NO: 108521 - DNA, 254 bp, Arabidopsis thaliana columbia
gtccaagttcaagtttttgaaccaaaagattacaattacttcatgcgagcgttaattaagtttgacgggagattacatttgaagctgcaaaagctttgcaagagttaaatggggaggtgctacctggatgtcttccatggcagaagataaagtgcgaacaattgtttcagagctccataatctgctccgcttctatctacaacactgtcaaaagacaattgaacggtttattatcaagggttgagagacaaaaa

SEQ ID NO: 108522 - DNA, 295 bp, Arabidopsis thaliana columbia
  unsure (1)..(295): unsure at all n locations
caacattacttctttaacaaacatggagcacacctagccacaagaggcacattcattactctattatctaacctgagaaacgaagtcaaaaactatctaataggaacaacacaattcaagtctgatcacttcacgttttggtcctgaggagcctacacaaagatacgttattaacgcgagcttctctaacgcatgaccnaacatgactttacattgtgacatgcttaacaagattctttcattattaacgtatagtcttacttatgatgttaagcacaatatcactattagtact

SEQ ID NO: 108523 - DNA, 451 bp, Arabidopsis thaliana columbia
gtttcattctcaaacgacttcaacaaccaacttcttgttgctacttccaacgtttcaagggaatccgaaacaccgagagatagactgatcggagggcttttaaccgcggatttcgatgaaggttcttgcttgagtaggtatcagcaatctttgttgtaccggaaggcttcaccgtacaagccttcggaatatcttgtctctaagcttagaagttacgagaagcttcacaagcgttgcggtccaggcacggatgcttacaagaaagcaacagagattcttggtcatgatgatgagaattatgcaagcaaatctgttggtgaatgcagatacattgtgtgggttgcggtttacgggcttggaaacagaatacttactcttgcctctgtcttcctctacgctctcttgacagagagagttgttcttgttgatcaaagcaaagatataagtgatc

SEQ ID NO: 108524 - DNA, 411 bp, Arabidopsis thaliana columbia
cggacgcgtgggtgcctatctcttacacacaccaccatcacagttcaacttttgtttggcgacaacaatgtcttccaggggtgtgaaacctcagaaatcaaccaagaggaaggacaccgatagctctgccaaattcgattctctaaaatcaaagaagccaaagctagtgtctggagaacaacaacaacatgtgaaacctaaatttggtaaacccaaatctgcaggtgataaggagcagagtactaatctatcgaagaaggagcgtcgtgtacaggctaaggagctaacagaagctaggaagaagaagagaaagcctcattacaatcttgagcaagagcttgtatctctatgggagaagatgagacgccgtaatatcggcaaggaggatcgatcaaagctgatttctgaagc

SEQ ID NO: 108525 - DNA, 345 bp, Arabidopsis thaliana columbia
gacattttctacccaaaaaaaacgattttgttataaccatctcactgattagcaagatggggtcttctcgatctgcgagacggagctaaagctggctcgatcctttggggagaggcagattgttgcatcgcgttcggtggtatctactcgaggaccggcgattcttttcttcagttactataaatgtcgtgtgctcagttaatatgaactcgcgatttatagcatgtatattcataatatctacacgtagagactggagaacaatattacacttccactttattttctatatgatgagatttgatgcgccaacattattcctgatacatacatttcttgatttta

SEQ ID NO: 108526 - DNA, 489 bp, Arabidopsis thaliana columbia
  unsure (1)..(489): unsure at all n locations
acccttccgccaattccaatgtttcttgttcctctaccttttcctctgacgatgaaaaagacaaaaaagatgaggcttatgatgaaggtnagtatgttnactcnatctttaatctaatacaagtcaacggaggtttccgcgttagaggatctgattattacgatgatgatgattatcatttttacaatggtaatttcacatggatgggtatgctatatatcgatattttttttatactaatattattttttccttctctttatttttttttccacaatcttttttttttctacttttaatttttttctacttatcaatttttttttgcttcatatttttttttttctctacacaattttttttttttttcctatttttttttctttctatttacattttttttcttctaactctcctatttttttttttctctaaatttttttttatttcctaaacttcttttttcttctcttcccatcttattttttt

SEQ ID NO: 108527 - DNA, 242 bp, Arabidopsis thaliana columbia
  unsure (1)..(242): unsure at all n locations
tgaatgaggagttcaaattctcgctctttgtatctcatacttcacctctatanttcagtgttttttacataaaaacagttgtgggaactactaacatatatttttattcaatattattttctctaaatataaatttttcctcacacaacatatatcattcacctaataactttctattactcttttcacttcaaaaaattttctttcttcatacatttattttttataattatatatttttc

SEQ ID NO: 108528 - DNA, 429 bp, Arabidopsis thaliana columbia
  unsure (1)..(429): unsure at all n locations
gtcagtgcgcatccttatgagaaatgctttataatctgccaccatgnntcntatgcagagtctaaaaaaaggtatgtgagcctctacattnccttacaaganatcttctcctatcttactcaataccacctctcattatttttatgaatcaatctgcaaatttttcaaaaagttatttaccccttcccaaattggttttattctccgttactctcacggtatccctcatgtcaagatttttactttaatcaagatctttagtatactcaaatctcatgtcctttctccttatatcccttatgatctttaccatctaattaagatttctttttcataccttaacatttctatagtatcatctatttcaataattttaatttctatcctcatccttctttatatcattataaatcttttttttccctattt

SEQ ID NO: 108529 - DNA, 411 bp, Arabidopsis thaliana columbia
  unsure (1)..(411): unsure at all n locations
gaattcccggtcggccacgcgtacgcgaagtggacttcattttcttgtacttgaattaaaatattgcagattgacgacatatacggacatnaatcatgggattgtaagtttaccannatagatagtatgggagttgatggaaaattgaaaagtgttagaggacgcttgaagaaggtttacgggaagattattacactctaaaactggaggaagaccgtcttgttagctttcgtttttgttttggctattgatcctttgtttctgtttattcctttgattgattttcattgatttcgcttaactttttacaatacacttttttcagtaggtttgtgttattctctctttttatttgtcattttctattattattcacatttttttattaattttatatacctatactcaatt

SEQ ID NO: 108530 - DNA, 329 bp, Arabidopsis thaliana columbia
  unsure (1)..(329): unsure at all n locations
ctcttgatcaaaatatagtgttttattttttataaaatctttatattccactcctcaagaggatttctcaaaattcttggagggttctctcatattnatnnnttcanntnaaaacacctttataaccaccccctaaatctcctatgcctttgatgattctcttatttttttcattcaatcataagactttcatattacattattctttctacaactattatcttacgctttctatttctcacgaattctttatatacttcttcaaattcataagctacacaaattatacatttaattatctatttcattcttattactatttaatcaac

SEQ ID NO: 108531 - DNA, 174 bp, Arabidopsis thaliana columbia
  unsure (1)..(174): unsure at all n locations
acgaagaagaataaaactcaggtcttaagagacttctatatttttgcgtgatctantttacttgggtatcaaaaacaaataaagtcttttcaaactctaattgttaagtaagcttttctttttacaaactatttctatcaatataccctttatgttttttattggtcatttttt

SEQ ID NO: 108532 - DNA, 380 bp, Arabidopsis thaliana columbia
  unsure (1)..(380): unsure at all n locations
ccttaacctttcttttccatagctcactcancaaatntngggggctaataacatagatgtgtggtggtgacccaanacactntctctacctcactgcttcanccatgttccntgtaaagatgatcaccaaggaggtcgatgaacatattcttaacttacataacaagaactcctcctactttgtggaatgtatccctaacaactttaaatcaaccgtcttttacattccccctactgttcttaaaatatcttcaactttcatttctaactcaacttctatccaaaaaattttcatccctctcacttttctattcacttctatatttcatataaatgctttttttcattataacacaaatttatttttcattttatttttt

SEQ ID NO: 108533 - DNA, 274 bp, Arabidopsis thaliana columbia
  unsure (1)..(274): unsure at all n locations
acatacgaaaaaaattcagttattaatagattcctttttattattagccgagacaacctctttcgtgagagtctcaaaaaatccgtcagttggttcaatacccanaattttttcttcttcatcactccttactacctttactactatctcttcattcaccatttttccatcatattttttttttctccaattctttatttcctcataaactttttttactcatatcattttttttttcccacaaccatcctttttttatatctttttttttttt

SEQ ID NO: 108534 - DNA, 464 bp, Arabidopsis thaliana columbia
gccgccggacgcgtccggcaggaatcaaaaccagtccatctgcatagctcatgctcctattttccagcatccgttctacaggtctctggacatcctctagaggagccgtgcttgaaggctttaagcagacctccacagatacgaggaatgggtgaaaaataatgatgttctcttgttctggcaagtgaagccagttgtgcacacctttcagctcattgaagaaggaccatgtgaggacttgtgtgcagatggacaacctgctagctttaacgaatggattctacccgcaaaggagtttgatggcttatgggaaagcctaatatatgaatctggacttaagcaaaggttactacgttatgctgcgagtgcattgctgttcacccagaagggtgttaacccaaatctccgttcatggaacaggattatttctttgcacggaccaccagggactggctaaaacatcc

SEQ ID NO: 108535 - DNA, 318 bp, Arabidopsis thaliana columbia
ctcacattttcgtagccgcaagactccttttttattcttacttgcagctatcggtaaagagaagtttcacattaacatttgtttcattgatcattttgattttttaaaatccaccacaactggtcacttgatctattatctcgttggtttttacaagctctatcatttttttgctcatgaattattttttctatattttctttttctccttaaattactccttaaaatcttttttctctatttttttctttctcaaatttatttttctcctattattttatctttttctctttcttatattttttttatttatctttt

SEQ ID NO: 108536 - DNA, 371 bp, Arabidopsis thaliana columbia
aaaagtgtatggagccagttgaaaagtgttttctttatcctaaaatgaacaaaaccactgtgcatgattttgaccttggtggtgggtctacccctatccctaatgttcaacaattgctccaggacttcttcaacggcaaagagctttgcaagtctattaaccctgatgattctgttgcctacggtgcttcttttccagtgatgctattctcagcgtttaatgaaactagaaggttcaagatcttctattgctcgatttcactcctctctctcttgttttgtaaacttctctttttagtcattacccctttttatctccttttttcacatccatcccaaccttatatataacaaattttttttcttctactc

SEQ ID NO: 108537 - DNA, 441 bp, Arabidopsis thaliana columbia
gcgtccggatggtgttcctgcaacatcttttccacttattttcactccgccgcagccatcgctcgtgactgcgcctctgttttgggcttgaaaggtgatactcttcaggagtactgtttgtgtacccagcgtgctctagattggagtccatgttgtggtcctgatctttattttgatgatgtcggtcactctactaattttgatataataagaatatctaagcttattacatatctttttttaattgctccatttatttcttttttattactatatttttcttattctctctgtacaattatttacattatatacatttctttattctttattttagtatcacaatatatttttttattcaatctaattttctttttatcttttcaaaactattttttttcactactttcatcttattcatccctcttatttccttttttt

SEQ ID NO: 108538 - DNA, 489 bp, Arabidopsis thaliana columbia
  unsure (1)..(489): unsure at all n locations
aaacccgggccgacccacacataacttagctacattgttttctacaataattttctttcttgtcacgattccactcnctaaggtccgataatactatcagatatgagtgccaaactactaattattaattaattatttataacctcactattccttattaacattatttttttttttttcttcactcatttcttttttttattatttttatcttcctcccacattatttttttttcatcattcattttttttcttttctttttatatctcacttccactatctattattctcttttttttcattttctaatcttttttaataaaattttttctttttccatttctttacttcataacttttccttttttcttctctccttttttttttttatatccttttatttcatacccttatcctttttttatattttttttttttccccatcatttctttttttttttttttttttcttctctcttttttttttt

SEQ ID NO: 108539 - DNA, 390 bp, Arabidopsis thaliana columbia
gctatgatgaatcttaacgttttgtttctttctctccttctacttgcatatactctgctggaagttcctagatggggagcggatgccaaggatcattcaagttttgttgacgatgatgagggagaaaacacttatgatagctatgaggaagatcaccatgatttttatattaacttgtcctcatttccaggagttgagactgtttgttttttccccaaaaacattgccaaattggttccaccttgagaagagacttatcttctttgtggcctttaaaattattttatttcttatatatttgtgttgggacttttaatcttttttcatttttctttttttcatatacacatttttttttaatatatataatttttttatctatataattct

SEQ ID NO: 108540 - DNA, 302 bp, Arabidopsis thaliana columbia
  unsure (1)..(302): unsure at all n locations
gtcgtccctaacctcatctctgcaagctctcaagctttcgtctccgttcgcccatggctccactcctctctcatctctgtcgaagcccaattccttcccgaaccacagaatgcccgctttagttccggtcatcagagccatgaaaacgatgcaggggcgcgtggtgtgcgcaaccagtgacaagactgtggcggtggaggtggtttttttatttttttatttgtngttatntattnttttatgtaatttattataattatttattttaatatatatttgtattataattatttttttttttt

SEQ ID NO: 108541 - DNA, 457 bp, Arabidopsis thaliana columbia
  unsure (1)..(457): unsure at all n locations
caaaactcctagagagatctaataaaaatgatattcttttacgttcttgattctctttctcgttgcagcacaatctatggggggctatgcangcagcttccacaaagacgttaagatacattggggtgatggtcgtggaaagattcacgataatcaagggaaacttctatctctctcgcttgacaaatcctctggttcaggtttccaatctaatcaagagtttctctatggtaaagccgaagttcaaatgaaacttgtccctggtaactctgctggaaccgtcacaacattctatcttaaatctccgggaactacatgggatgagattgatttcgagtttttggggaacataagtggtcatccatatactctccatactaatgtttacacaaaaggctcaggagacaaagaacaacaatttcatctatggnttgacccaaccgctaactttcacact

SEQ ID NO: 108542 - DNA, 441 bp, Arabidopsis thaliana columbia
aaaaacccgggccggccgacgcttccgacacaatgtgtcaagtaccttccggcggatttatacttcaaggagatcggaaaccacatggtggagataataaggagagtagttgctaaccatcctcaccacctgctcttttatggatgaagcaacttaatcacaaatgaccttaaacttcgtctagattgcccacttttacttcttctactaaatgttaacttctatttcttaaattttatctaatcatttactttttacttatttatttatatttcctactttattatttattatttattcttcactaatattattttttttacacttttttctattactcttaatcttttttttatcacctattattttttttttaacttttattttttacttaactaaattttttttctatcttatttatttttttttttataataatat

SEQ ID NO: 108543 - DNA, 258 bp, Arabidopsis thaliana columbia
gatggctttggagaaagaggaagaagcgttacaaaacggtgcgttttgtgtccttgatgggctctattgcgaggaagagagaccgggtttgtggaggacgatcttgatgacgatggagatttagattttctcgagaaatctgatgagagtgttgtaaagttttattttttaccatctttggatatattaatattttttttactattagatttatattatttaaatattattttgttttctctaataaatttcttttta

SEQ ID NO: 108544 - DNA, 206 bp, Arabidopsis thaliana columbia
tttaaaaggttttccaaatcaaattcggagaaaaaaaaaaagttgtttgtgactaaaactgattatgacaaaggattgaacactttttctccagaaggaagcctatttcaagtggaatatgccattgaacctatcaatcttggttctactgcaattggattaaagacaaaagaaggagttgtgcttgctgtctagaagcgtatcac

SEQ ID NO: 108545 - DNA, 390 bp, Arabidopsis thaliana columbia
  unsure (1)..(390): unsure at all n locations
atctctcaccattgtttttctctccaaattttattaaacaaaaaaagaaaaatcntagagacgaanaaaaaagaaatggggagtgtataaacattataaaacaangctttattatcctcttcaagaaatccttctgntgttctctctccttactcctacactttaattttttcattagcagattatatatatataaaatttatatgctgtgtaatatgccatactgatattcaccaaattaaaaattatctttaaatgtctaattatcctattattccttttcactaaattactatttttatgtttacgattttttatcaaatataattcttttttttcctattatatttttttcttattttatttttttttttctctacattttttttt

SEQ ID NO: 108546 - DNA, 405 bp, Arabidopsis thaliana columbia
  unsure (1)..(405): unsure at all n locations
cccgggccgacccacgcatactcaaaactcctacacaaatctaataaaaatgtattcctatacagaaaacaacattcttctgtgtcntttccaaccaaaggtgggtgaanaaactaaanataaccanaggctgcancaaccatctcctcgtcttaacgagagaattctctcatccttgtcaagaagatccttatctgctcatccatgacatgatcttgagattgtacctagagctccacagattttcaatgtggttgttgagatcactaaatgaagcaaggtcaaatactatcttgacaaaaagacaggactcatcaatgttgatcgtattctctactcatcagttgtgtaccctcacaactatggtttttttcctcgcacattgtgttaatacaatgaccccat

SEQ ID NO: 108547 - DNA, 506 bp, Arabidopsis thaliana columbia
  unsure (1)..(506): unsure at all n locations
ccggggcggcccactcatacactcttgtaccgagcaccatatatactcctatgatctcatcattactctacacctnntgatgctttttctataagatgcttgtttcctcaaaaaaccattcttaatcccttatttcctttatactcccacatttatcttctcttcattattttttataatccaaattactcctttctccacacataaaaaaacctcctcttttttccttaacaatattttttttctctctatattctttttttctccccaattcttttttttctttcttacctttttttttttcttccaactctttcttcctttcctactttcttttttcttttcccctcttcttttttttttttcaaatantttatttattttttctccctccctttttttttttttttcccacaattttcttctttcctcttccttttttttctcctctcccttttcttttttttttcctcccactttttttttctactccttttttttttttc

SEQ ID NO: 108548 - DNA, 412 bp, Arabidopsis thaliana columbia
  unsure (1)..(412): unsure at all n locations
acatacanaatcaaatatcgatttggtgatcaatttttttattaagatgactcantctattataaggtggattccttaaatgtggggtgtgaatgatataccnttnttttattattttccaccacctttttcattcgctcctttcctatattctcgcctgatctccaacacgtttttttttctccatttctattttacataccacttccttttctcttcctatatacattttccaagattttcttttttaacttattttatttttcttctaacttttttattttactctacactttttatcaactctaccttttcttcattctaaatattattttaattattactttttttttttttaacttttttttttctctacaccttttttttttttcttctatactatccttatttc

SEQ ID NO: 108549 - DNA, 289 bp, Arabidopsis thaliana columbia
  unsure (1)..(289): unsure at all n locations
aacactacaacacaagcaacactcttcaaatgttatcattatgcaacacaaaaaatctaacaattgagcgtgtcttcactagaatcagagcgggtgtcancttacacttttatcactctacacacacttatggatcttaaacacataagaaaccacctctcacacatatccaagtatcgaaacaatttttgttcactatttactttgacaaaagacatgcacttcctagtcttagaatatccctacataaatgcataagctcaagcttcaatacatatttgatgaaatc

SEQ ID NO: 108550 - DNA, 264 bp, Arabidopsis thaliana columbia
  unsure (1)..(264): unsure at all n locations
taaattcataacctaattaataattaggatcattaaaaaaagggtcggggtatatactnatacaccaacttatttctaaataactttatctacaaatacataccggttccaatatagtaacatgcatactaatcttctcacctaccaaaaatcattattgttcttcgaccgacgtcacaacacctagaaaacctatgaagaagttgctaatcttttttattccgcatacaaacatgtcgtctctccgatgaatataaaggatct

SEQ ID NO: 108551 - DNA, 359 bp, Arabidopsis thaliana columbia
  unsure (1)..(359): unsure at all n locations
acagcaagtatcattcacaggatagggaatttttatctcatcatacgaaatgaggtcaatcacagctttntttttactttggtatgtccttgctccttctgctttggcgcaactcctaactgggttctacagccgctcatgcccccgtgccgaatctatcgtggctagtgttttttccaaccgtttcagaagtgacaagtccattactgcaacatttcttcgtatgcagtttcatgattgctttttcaatggttgttattctttcctcttgatcgacccaagacctttaatgccatcatataaaagcactgttccaaattcaatccttaataagctaccatatcatttattatgcttaa

SEQ ID NO: 108552 - DNA, 384 bp, Arabidopsis thaliana columbia
  unsure (1)..(384): unsure at all n locations
cggaannncggggtgggacccacgcgtaccgctcaactttgtattnnatttgagtgtgttttatataaactcatatttatccagtcttcctcaatcacgcggcnccgaagaagtaagagacacgcaggagagagaacgaaaggggttatataatgattgggctagtggtcgagcctgaaatctgaagggagacctgagactgtgtctctggtctttcccggtgggagatacacgtggcttccggtaacccggaaacagagagaagggttctcagagacggttgatctcgaagctaatatctgaataattgagctctgcaaacaaggaagtgatctacgacttcattgacgtcgtgacttttgattccaaggagaagagtgcttg

SEQ ID NO: 108553 - DNA, 414 bp, Arabidopsis thaliana columbia
cgaaactaaccggagcatgaagagacgatatatcggcgaagaaatctccggcgatggggactgttaccgattgggaaggcttatattactccgaatagactagaatcgtaaggagattgatgaagttcgaagacttgcctgagtatttgaaggacaacgagtttatacacaaccattatcgatgttaatggtctttcaaagatacttttctcagtgctttctcttagcacatttagactcttaacatttttactcatttaattttaattttttatatttttttttcttactgatgtgaattgattagtttacttcttttttctaaattattacttttataataattcttatttacataatgcaattattttatagtttttaactaataaatttttttctatttatttattattt

SEQ ID NO: 108554 - DNA, 407 bp, Arabidopsis thaliana columbia
ccggaacggaagggccgacccgcgcgacccgttttctaccagattcatcaatccctcctgctacctcgagagagtaacaactcaccggacgttggaaatccatcctccgggacgatattcgtttcgttagatctagatctgagcgtcggtgagagattttctggatctgtgatacgttccaggaaacatggcgacgatgaaaagtttgataggtctgataaacaaaatccagagggcgtgtactgtcctcggagatcatggcggtgaaggaatgtcgctttgggaagctctcccaaccgtcgctgtcgttggtggccagagttccggaaaatcttcagttctagaaagtgttgtgggaagagattttctgcctcgtggatctggtatcgttacaaggaggccatttg

SEQ ID NO: 108555 - DNA, 460 bp, Arabidopsis thaliana columbia
  unsure (1)..(460): unsure at all n locations
acccgtccgttttttttttataaacatcaaatccattttttttcttaacagattcacatcaaaatgggggatgtaccattactaaccggggtcaaattcaaattttttagaattcctcaacagcacttttaaattaccatcataatctatcaaaagatattccccatcaaagnacattttctttctaatcctatatatctatttaaaaaaaacaaaaatctcttcctatctagagaaaccaagcttacctacgctttcatgctactttatacctcttttatagtgtcaccttaatttaatttactttcctgtttttttcaacttttttaacttctaaaaccctttcaatttccctacttttatttttctttatattattatttcctttttctcccattttattttaatattctaaaattactcttaatcttttcctctctttttatccctttttttattt

SEQ ID NO: 108556 - DNA, 259 bp, Arabidopsis thaliana columbia
gcgtccgatctatatcctcctcgacaatgaacctatctattacatctgcagacgttccctaagcatggagagacccacctacacgaacgctcaaccatctcgtctctcatgttatctcatccttgactgcttatctgaggttcgatcgcgcctcgaatgttgatgtgactgatttccaaaccaacttggtcctatactcaataatccacttcatgctttccttctatgtcccagtcatcttcccagagaaggccttcca

SEQ ID NO: 108557 - DNA, 104 bp, Arabidopsis thaliana columbia
  unsure (1)..(104): unsure at all n locations
ccgaaacgcagcttcgaagcgaggtatgtttccgatctccggtcatttccntngtttgggatctatatataaatggtgcgggatcattaatcctttcctaaata

SEQ ID NO: 108558 - DNA, 193 bp, Arabidopsis thaliana columbia
  unsure (1)..(193): unsure at all n locations
cggcccgacccacacatacggttcttattggcggtgcacccactgtttatattgaaagtggctgttctacnatagcctcttcttatacatatgtgcttgccgatccaaaaactataatcaccattataaaccattctattttaacatcttaatttattattcaacagtgcaatacttatttttttttatactt

SEQ ID NO: 108559 - DNA, 419 bp, Arabidopsis thaliana columbia
  unsure (1)..(419): unsure at all n locations
acgcaaatggctcgcccgccgcttgctcgtctttcttctgtctaccatccaaactctttgnnatggtgacgatgtccactcgatcaatggctggcaggcgtcgtacttatcctcgactgtcatgacgngctgctcagttctgacctagacattcgttaactttctgttcactgcccaaatgcttcaacaaccagccttctatccatactgccgtatctgaagaaggctcggtcacctagacctccgccgagtcctggggaaccggacgtgccgtgtctcgtatccctcgtgttcccggtggtggtactcaccgtgctggtcaagctgcgttcggtggcatgtgtcgttgtttttctttttactctccaatcattttttggctctcttgtctcctttttttttaatttattcttaattct

SEQ ID NO: 108560 - DNA, 429 bp, Arabidopsis thaliana columbia
gactatcacaattgcatcactaatctctttttctatctcctaataccctgccatttccgaagggtgtttaacaacgcgggcgaggttctaactttaataccccttctccacctactgtgtcatcatctttgcaggggtcaagcttgccagaagcaccctcttcattgtttccttttagtaccaagttctcaaatgttagctcctagttcattgcctttccctggtctaccacctgtgacgctctcgtctagcctgcagtctacactgcaatcagcaccatctccttcactagcttcagagatggcaccttcgttgctgtcaaacaaagctcctattactgctcctcctaccctacctcaagatactaatttgctttcgttttctctatctactacgagagccacagaagcaagtacttgccttccactg

SEQ ID NO: 108561 - DNA, 243 bp, Arabidopsis thaliana columbia
  unsure (1)..(243): unsure at all n locations
caacaacagtcttgcgattctctaattgggaacagtgcttatgagattancctggttatatgtggtaggggatgcctaaagcctgcnnnaannnattctcatttggagccagattgttnaggttgatttnctgagtnctaagaagctctgtgtttgtatgttnnggtggtggttgtttgaattactatctgatgaattgggtaggatttgaagagcttactggggatctcctgttgcgagtac

SEQ ID NO: 108562 - DNA, 240 bp, Arabidopsis thaliana columbia
  unsure (1)..(240): unsure at all n locations
ccgggttaagaagctgtacattcgactatccctatttctaatctcanctnttaatctggtcgtcttcaaaaacccggtcccgctctcaccaaaataacattttatgtttactctactcctattcttatatcttttactttctttccctatttctcctctctcactttttttttattttatccactttaattatctttactttctcttttttctttccttctcaccctttcttctctatta

SEQ ID NO: 108563 - DNA, 427 bp, Arabidopsis thaliana columbia
cgcagacgaagaaggtgacaatggcttactttagtatgggtgaagctcaccggagaagcactgaatacctaaaccggtggtgcgacaccatttcgtaccaagactcttctacactttgccgtctcctctctttctcttccaattctccacctcttctctcactcgccgacgcactcaacgtcttccaggattctagcagtttgattagacagtctgatagattctctgaatatggcgagattctggctcatgtgtttcgttctctacaaagttaccgagttgggaatctagtcgaagcataccttgctttcgataagtttgccaatgcatttgttcaggagtttcgtaattgggaatctgcttgggcattggaagctctgtatgtagtttgttatgaaattcgagttcttgcggaaaaggctgataa

SEQ ID NO: 108564 - DNA, 357 bp, Arabidopsis thaliana columbia
  unsure (1)..(357): unsure at all n locations
tatctccacgcgtccgaaagcacaaaaaacggggacaaaataatggcgcgaagatgcctaattttcccgntgattttgctcgccgttcttctcttctctccgccgatttactccgccggtcacgattaccgcgactctcttcttaaaagcattctcttcttcgaaggtcaacgttccgttaaactccctccagatcaactcttaaaattgctcctttactcatcattactctacttttccttcgtctgcgtttacttatcctttggttcctggtgcgttttattctacatcatatttcttattttctatttctttttcatcattctatttttattatttattatatttttttttatt

SEQ ID NO: 108565 - DNA, 323 bp, Arabidopsis thaliana columbia
gcgaaaacctcgccaatccgattactttatataatcaaagaatctttgtttgattttggagttttatgtatagggatagcgcgtcaaaacaaatcttgaaggaattgaaggatctccagaaggatccacctacatcatgtatcgcaggtcctgttgctgaatatatttttcactgtcatgcaacaataatgggtccttcatagagtccttattctgtaggtgttttccttgtaaccatccattttcctccatattacccattcaagccttctaaggtttcctttattaccaaggtgttgcatgccatcattaacattaacttt

SEQ ID NO: 108566 - DNA, 350 bp, Arabidopsis thaliana columbia
  unsure (1)..(350): unsure at all n locations
tcactcaatgncaatacatattcctctttttacactatacncccaaaaatcctcccggggcttacctacaacggctggaagcctacaaaaatcatctttcttnccttattactctattacgctactcggaaacaataaatctctttccaaatcctctgcttctatattctacattcgtcactactctaatcaagcctatatatgcctttatatctcttatatttacaattatacaactccatttcacaagttaccttataactatttctttccagttttttcttcttctaaacggcggtttctattcttacattccttattttaacattaatttctactacttatatttt

SEQ ID NO: 108567 - DNA, 410 bp, Arabidopsis thaliana columbia
  unsure (1)..(410): unsure at all n locations
aaaacgcgtgggttttttttttttttttttttttttagnnaagaacttataacccanagctggaaaacaccaacatcaggggggttctcaaaacttttnanaaaactctaccattttacatattttcagaagtaaaaccaatgtctttccacattaaagaaagtatttttaaaagaatattaaaatatctgagatcataacatattctctacgtctcatttcatcttttatgcttcattgatgtgaaactcaaatactacattttttccattgatcttcttttaaacctcatagaaagccttaaccttgtactctgttttgttcctttcctttttttccaataataccttcattatttttttaccatttattcttataccttttaccctttccaacaatcttttttattt

SEQ ID NO: 108568 - DNA, 278 bp, Arabidopsis thaliana columbia
  unsure (1)..(278): unsure at all n locations
aaattccaaaaaagtagaatcagttgtttattatcaatctcaacaagatnancatcaagacgtttaattagagacctaagcagacataatccatcnacagcaagaacaggtctatactcatgtgttatgatcatataatgctaaaagagactatgtgccacttttttcttaccataaccaaataaatcttctatgttctctaagatttattttctctatcatcaattttctattattcatttttattttatttatcttttttttttatattttatttt

SEQ ID NO: 108569 - DNA, 233 bp, Arabidopsis thaliana columbia
  unsure (1)..(233): unsure at all n locations
acttcttccgcataatttccctgggaatttttatagcggaaagggaattaaataaatacgcttctaatcaacggcggctcgttctctcaatataattnatttnctttatcttcnaaatccttcatttttaccctaaaaactaaaaacaaagtacatttctaatttttttacaactcttatctaatatccatattactctttctcacaatccttatcattccctaaatttccct

SEQ ID NO: 108570 - DNA, 239 bp, Arabidopsis thaliana columbia
  unsure (1)..(239): unsure at all n locations
gcgtccgaaaaaacaagtggaagctttaaaacgagattgattattagcaaaaatggcaacntctnnnaagttacgttactagaagttgtccggaaaataatcaacacnataaatactacaatatgtgtaagaacgagaaccatgtcttccctgatgctatcggccaccacatccaaattgttactcttcactaatgctaacattactttcacgtttctatcaagagtattaactacaca

SEQ ID NO: 108571 - DNA, 235 bp, Arabidopsis thaliana columbia
  unsure (1)..(235): unsure at all n locations
acatacacnaactcatnataaatcnattatactatttactcatcaatttcacttcttacctcgtgcgtatcttatactggtcgtgaaatataaaataatcanccaaactttaaaatacaatcatatccttaactctctaacttatttcatacagcttatatattctcattattttatctcttacacttataaattctctttattccaattcttatttttaaaaatcatctttact

SEQ ID NO: 108572 - DNA, 211 bp, Arabidopsis thaliana columbia
  unsure (1)..(211): unsure at all n locations
ccaaaaaatcaaaaaatcttttgaactttgggttcatcctttcatctacaccctcaattntcgaaggtttattaataccaccggccgccataatcccaaaaattatactcaacatccttcctcatccattttttccttcaatccaacttctcattgcatcaatcctttatttttacttaatcactccaacaaactttatatttctttccct

SEQ ID NO: 108573 - DNA, 237 bp, Arabidopsis thaliana columbia
acccttcctgcttgcatagttcttaagcttgatcacaattccaggcgctattttgagcggggggtattggctaaacccccatatcctgcaccctcacaaatagatccaattaccgatcatcacacaccatttatcctccatgactcagacattggtatacccaaacataagaaataatcataaaccaaatctcaacattgtttcaattctatgatatacctgcaaaacatagatcaa

SEQ ID NO: 108574 - DNA, 393 bp, Arabidopsis thaliana columbia
  unsure (1)..(393): unsure at all n locations
gagaaacaacaataantntaatgttttttctatgctctcctccgccnctttngtgacgttcttttttcaggccagcatggtcactccattcaccntcttnaattcatcctcttcattccctttcaccctcaanaccaacaaggacatcacttccatctcattctatctnttgaagatttaactacatcaatttgtttccaccaattgtaaagaataagtttcttactctatcttacctccctgaccttaatgacttttaattggctaatgaattttactacctttttctcaacaagtggattccttttttttaattctatttatatcacttatttttttactcttagcacattaactatcccctcttcctactattttactttcttttctttt

SEQ ID NO: 108575 - DNA, 280 bp, Arabidopsis thaliana columbia
aatttttgtgtcggtgttaatggcagattattttagtttcgacattttaaactttttgtgggtatgcttaagcgttagtggtgattttcgtacttgtaataaaaagttaagtcatgaaagttagtgaataagtatgttttgggataattttaacaataattatgtagtctttcggtgattttgaaaaaaaaaaaaattatataataatttaatatttattaactttattattatattttttattttatttttatttcttacttataatattatttattta

SEQ ID NO: 108576 - DNA, 467 bp, Arabidopsis thaliana columbia
  unsure (1)..(467): unsure at all n locations
atccggcttttaaaacccctaaatnccccaaatctgttaacctgannaattccgattcgnaagatgtgcgtcggtgcttctctcgagagggaggggcggggnngtgatttgacctgnnagagaagagggaatcctctgctcgccaaaattcaatcctaagatnngtggagaccttaaatctctctcaagtctggtcttcgatctcttaactctnngctctcgcctttcaaccaagaaaggctttctagctaatataaagttgttgagaatgtaagcttcttgctcaacaaagggatcttcaggctaaaatcccagatattgaaaagtgtttagaggttgttgctactttggaagcaaagaatggtactggtgaggcgctcttagctgattttgaggtgtctgaaggaatatattcacgggcctgcattgaagacacagactcagtgtgtttgtggttgggagctaat

SEQ ID NO: 108577 - DNA, 258 bp, Arabidopsis thaliana columbia
cgcgtaccagacgcgtggcctcactcactgttacttttctatataaccctaatttcgccattcccttcgctgagacatttagaagggcgtttgtgcaacaaacttagcggtatcttgagacaaggggtttctcagagctcaaatggtccagttacatctatgcttggctctcttctttacatgtcctctaagctttttgttggtggtctctcttggggaactgattacagctccttaaagcaagctttcactagcttt

SEQ ID NO: 108578 - DNA, 299 bp, Arabidopsis thaliana columbia
  unsure (1)..(299): unsure at all n locations
gcgtccgattgatttagggttcctgataaacttcttttattcctattttgaattgtttcnnaattatgttnttataagggtctagatggcgttgtcaattagttttttttttgtgtttcttcaatggcgatcattggagatgcgttgcgtcaagcgtttatgccaaagcatgttttctagagccttatggaagaatatagagcctggattaagctttagaggccgactttagtctcgatcgtggctttccttttttttgtcatcttcacttgcactatcgtctattttaatattgtatt

SEQ ID NO: 108579 - DNA, 320 bp, Arabidopsis thaliana columbia
  unsure (1)..(320): unsure at all n locations
acgtaaacccatttctctaccattagagaatctcacatcaaaattgaaacttgntaaattttgggattttttcttgtgggatggcaactaaaaacaatctttaattgtcatctccttaccagaacaccttttattcattgtcatctttgatcacaaaacgtctccttttatctattaacaaccaatctcaccgattccgtttcctctttcattatctcaaggctcttcagcttgaatattcattttcacaaattaaaatcattcattatcccctaactaaaagaaatgcatcaacatgtacatttgcggagtctattctt

SEQ ID NO: 108580 - DNA, 209 bp, Arabidopsis thaliana columbia
gaccgccaacccggggccggctcaaaaaggaatggcactaaatttctcttacagcaatctctaactgttgtttcctcagacgagtttccacttctccattccaatctttctatgttgaaggacttaatatcaaacacatatggtaaacataagctattctcaatgttactgaccatccagccattagaaatggttggactcctaacaac

SEQ ID NO: 108581 - DNA, 198 bp, Arabidopsis thaliana columbia
  unsure (1)..(198): unsure at all n locations
acggaaaacccggcccgacccacacataacacagactcttactctnactcttntacttcatatctaactagagagtaaaaaaaacaatccgcttaatttaaaagatcgctcgcaccaaaaaacaccatttaaaanactacttttaatctccaccatctcctctcaatcacactctttctcctctaatcctaatttttt

SEQ ID NO: 108582 - DNA, 165 bp, Arabidopsis thaliana columbia
tcgaccacgcgtcggacattgatcactttcaatgagccatgttctcgacgctctatgacagcaaaggcctggtcgtgctctttagaatgctaaatgccgacgcacgatcaggcttacctgcatacattctatttaccaaacgtgagtaccgaacaaaggtaaggg

SEQ ID NO: 108583 - DNA, 362 bp, Arabidopsis thaliana columbia
  unsure (1)..(362): unsure at all n locations
acataacaatatgtctccttcaacaaaaattctctttttacttctcttatatgtcntcntagcatgagccttctttgatgagtccatcatcaactaccatcttcaacttccatcgtacttcaagttgagaacctatgaagaagttaggtccatctacttacaattgtccttataacactttaaaactaacaacaacatcatctttttcatcaactaccaatacataaaattcaatattttcaaagacaacttaagattcatttatctacacaactaaaacaacaataactctacttacaatctttatctcaccaaatttacctatctcacttactattatttcctctagttttacctttttt

SEQ ID NO: 108584 - DNA, 193 bp, Arabidopsis thaliana columbia
  unsure (1)..(193): unsure at all n locations
ctgttgcttcttcttctacatccacttttctctaagaaaaggaatacccnanttctgcaagtaaacttcgagtttatagcaagagattcncccagatcatattcatcattgcttttatgacccttattcttctgttcaactttctgattctggtcacaaagttactcatatccttattatttaaaattctctt

SEQ ID NO: 108585 - DNA, 285 bp, Arabidopsis thaliana columbia
  unsure (1)..(285): unsure at all n locations
tttcctgttcgacccactcgtccttaaacaacagataatcttngaaaaatggcgtttttttcaaccaaacagcctctnttnttggcgatgctccttaccattggctgttgtgtcntnnctncatcttccctaaacttctattagagctttgatatcacttgtgttatatttctttccaacatattctaaaatttacaacttctcacttgtactctttacaaaatctccgtctcaagttttcaatccaataaatattacttgttttttaagatctacattaatctt

SEQ ID NO: 108586 - DNA, 405 bp, Arabidopsis thaliana columbia
  unsure (1)..(405): unsure at all n locations
cctccccccctttttttttttttttttttttataacaaatatctgccattntactatagaagttctcttataaaattacgaggatcaaccaaaccaaaaacacatacataacatcattttacattaataacaaacatttatccatacctaaattttcataattctaacatcaaaaacatattttttaattatcataattaccacactcatcattctcattattatcatttcaatactcttccaaagtatcttatccaccatctttctttttttccctagcataactcacctccacactatctacttcaccttattccaaaccttttcacactccctttttaccttatcattaactcatttctccttaacttattatatactcttttccacctttttccatatttc

SEQ ID NO: 108587 - DNA, 413 bp, Arabidopsis thaliana columbia
  unsure (1)..(413): unsure at all n locations
gaatccaaaaacacaaagccgatcactaaaacttattactgtgagagtttcttcaactttttcgatccacctcaagttcctggcggggatnaggatcttgatgatgacatggctgatgaactccaaggacaaatggagcatgattatgatatcggttcaacaatcaaagagaaaatcatctcgcatgctgtgtcatggttcactggtgaagctgttgaggcagatgaccttgatattgaggacgacgatgatgagattgatgaagatgatgatgaagaggacgaggaagatgatgaggatgacgaggaggaggatgatgaggatgatgaccaggaggaagaagcagatcaaggaaagaagagcataatgaagtcatcagctgggcacaagaaggctggaagaagtcaacttgc

SEQ ID NO: 108588 - DNA, 302 bp, Arabidopsis thaliana columbia
  unsure (1)..(302): unsure at all n locations
tcttactctaaacaagatcttanctaanatgtctattaactacccaacccttatccaanattgcaggagttctttttagaagtgcaggagcaacctcatattttttatctcttacaanaacttttcacccatcatttttctactctcatttcactcttcttaaactttctattttcaatcaatgactttatctacattcttaaacaattatttttacgcttatcaaactcatttaaccaacatttttatccacatttctcttaattattttaccccatcatataacaatttcttccattttt

SEQ ID NO: 108589 - DNA, 423 bp, Arabidopsis thaliana columbia
  unsure (1)..(423): unsure at all n locations
taacaggtaatcttttttttccagtaaaaatttttntccagcagttttacttaattaccgagacttgttnncacaccaaaatcatataccatttcttttgtgctaaatgaaaaggctagaaaatatttgaacgaaattagtaataaaattcttttccccttttctcaaaagtttcctaactcatatcctttatcatttcttcttctgcaaatactattatctttttatccaaattatattccttcctcttcatttctcattcatattccttattttactttctttacttattatatattttctcttcttttttatcttttttccttaattcatctttattatcctattcattcctttttcaactttttcctattactctttatttattatctttattttttacatccatattttttattattt

SEQ ID NO: 108590 - DNA, 243 bp, Arabidopsis thaliana columbia
  unsure (1)..(243): unsure at all n locations
gacccacgcatcctctttttttnttttatcaattctcacacttattcttaaaacctaccaactctcactntgcaagtcttcttataaatctcaggcgccacaacaaaccttcattcttccttatttctcagaacattctatcatccattaatacaccaattcactattaaaacccattcttttttctttttaaccatcctacaataaaaaaaacacattatttatctttttctaacctttatt

SEQ ID NO: 108591 - DNA, 376 bp, Arabidopsis thaliana columbia
  unsure (1)..(376): unsure at all n locations
atccataccaatcctcctccttatcttttttttcttgactctaacaccacttcctntcaccgaaatcttcccaaaagatgtagggcctctacaaccatttcttcgatcacatatgaacacgaccattgacaatttctccaatgaaacttagcaacttccgttcaacccttctcttgatgctcctagaatctactactcatacaacaatctactccagtgtattaatctttacttatagtgacactcatatacattaactatctacctaattattttcatatttcacttaattgctctcaatttttctcaccataacaatcaccttaaaaattttatgaacttcataacacattaaattaagaatatcaatttatct

SEQ ID NO: 108592 - DNA, 391 bp, Arabidopsis thaliana columbia
  unsure (1)..(391): unsure at all n locations
tcttcctgtaaaacactaactaatagatcaatatttctttattgatgaagttggcattcatnggggtagctttcattattatggcgcgggcaatcacatctaactctcttattatttttttcaccttcaacttcaacctttcatttttcatttcctactttaccctattttcttcacttacccaaggttgcttcaacttctttactaaccttaaaaacatttccagtacaaccccataccttcatcaatcttgccttttccttcaatcttccattaaagccatttttccctttctcaacactgccctttcagttttacttcctaactcatacaaattcaattattccttacaaaatcatctccatcaccaacttcaacacccttattttat

SEQ ID NO: 108593 - DNA, 454 bp, Arabidopsis thaliana columbia
ctctctttaaaagaaattcgtaagtttttttttgaagcagaagatggcccaaaagggggaggcgctattatagaaaggagccgagcctatcataccatctatctacacattactcctttaccaatattcatctcgcagcacgcatagacggaattcaatatgttcatttttattatgtcaagaacggacaaccctaacaagctccttttcgtggtaccaaaggccttgttctcccagctgatccttttgtgattaaccattcatactaacatttagtttctgtagaatgtatgtatatcccttattgtattattcaattaattatatttatctccaacaataatacttcttttattcattggatccttattggttactcactttaatctacatgttttaaacacttatattttttccttttattttttttccaattcaattttaattcttattt

SEQ ID NO: 108594 - DNA, 349 bp, Arabidopsis thaliana columbia
agcggatcgatattttttcctgcgactttttttatggtgaagtgagtttttttctttggtagtattattacatttttggaggagagtaaaaataattaccgtaaaaaaaatgaaaaaaaaaacagatctcattctgtataatataacgccttcttgttttttgccttttatcaattaagctttacacaaatatacaagtcctgttgaaatttttattataagaacgttctttaaaaaaaaaaaaaaagtgcatcctttctatattattcaagcttacttacgcattcattctatcttatatcttttttatagttttacctaaattcaatttacattaccgttattttac

SEQ ID NO: 108595 - DNA, 310 bp, Arabidopsis thaliana columbia
  unsure (1)..(310): unsure at all n locations
tctgactcttttttctacacctaatttctatctaatgtggagctaaggtntattacaaagcaggtttattttctagtacagatgtgcntttctctntttatgctttactttctaatcaaaaaattgtacaatgtattgtcatatctatatgataatcccttcatattgcttcttaatcttctatacacaatttaacttatttatatattcttgcaaattgttacccatttcccatccacaaatattctacccctttcaccaattaaaatattattatcttaaactcacttactcttattattcaatcatt

SEQ ID NO: 108596 - DNA, 362 bp, Arabidopsis thaliana columbia
actcaccctcttcaacaccacaatacacttccccttatccacctaaaaactattctccttatctctcagaatcacccccacccccaccaccacaatatataatacaatatcctaagtacacaccacacccaaatccaaatgtctactattcccctacacctctaccatattactttccttttcctaaactagacatcaaatctccaccatcaccatatttctacatctctccaccaacttccccatactactccccttcttctaaatttaactacaaatcttcaccaccaccgtacgtttacatctcttcaccaccttccccatactccccttcttctaaagtttaattcaaatctccacca

SEQ ID NO: 108597 - DNA, 490 bp, Arabidopsis thaliana columbia
  unsure (1)..(490): unsure at all n locations
aattcccggggcggccgactcttcctaaatacacaacttttaacttcaaatatttttctttcaaagaatatagatacaaanaaatgtnttttttaacattaagtgggcagttttatacttttccaatctcaatttttaatatatagaccaatccatttctctaatcatttaatcttgttagaattttgtctttttttatatatttaaccatttattaccacattacttaatttactatttctataatatttcttattaccatttcatttctttcctatttcaaatttttattgtcattcttcaatttcaatttttttttttttttttttacattattttctttttttttcattttctttaatacttttctacttttttttaacttttatttattttttactttatttacattatttatatattattcatttttttataactatttcttttctatattttttctcttttatatttttttataatatttttt

SEQ ID NO: 108598 - DNA, 379 bp, Arabidopsis thaliana columbia
  unsure (1)..(379): unsure at all n locations
taattcccttgtcggcccactcttccaaaacataataataataatcaatatttctcttttaatctatgtaaaatcttctntttggacgacttatcatctcatcgagtgtgccctcatccaactttctcttctcacactctattataatattcttacctacaaaatccatctaattaacctctcttacaaaccctattttttcttttacattaatcctcaacttaaatttccattncttaatatctactacaatttttttacttattcctacatcatttttattatactctatataatttcctaatctcactactcaatactccttctatattttctcttcttatattcaacattttttattcttattattctaattttt

SEQ ID NO: 108599 - DNA, 394 bp, Arabidopsis thaliana columbia
  unsure (1)..(394): unsure at all n locations
aattaaacaacaccaaccaaaaaatttctctttaaaaaaaagttaaaacaaaaaaaaggtcgttcacaggaactctcgagagatgcaatttttttnataagacagtctatgtggtggacatgttgtccattgaaggaatgccttaccacaagtcttgcttcaggtgtacccattgcaaaggaacccttcatatgagcaactattcctccatggacggagttttgtactgcaagactcattttgagcaactcttcaaggaatctggcaatttcatcaaaaactttcaaccattaaaaactgataatccagtactgactatgactcccatcaagatatcttccatcttctgtggaacacaatacaagtttgccgcttgctaaaaaactgtttaccc

SEQ ID NO: 108600 - DNA, 260 bp, Arabidopsis thaliana columbia
  unsure (1)..(260): unsure at all n locations
ttccccgtcgagccactctccgaaattcattatttacccaatctttttcaccttctctcttcttatttncgacgtctttatcttttcagagagaaccataaatttcatttcttattaatccaaactaaatctatcntctatttctttctttttccaaataaaatttttcatcatatcaattcaatccatcttctcaaaaatttctcctcaaaactttattccttcattcttaacttaatttctttccctatttaattttc

SEQ ID NO: 108601 - DNA, 214 bp, Arabidopsis thaliana columbia
  unsure (1)..(214): unsure at all n locations
aattaccgagccagcccactcttcctcaataataataataataataatgtctctcttttattttgagcacccaanacatcnttcgctgaattttcttacaaggaagatagactcccttcacatattaaatttnatctctttccctattaattaccaatccaatcctttcaaattcacaattttcatccttttctttttctctcattactcacat

SEQ ID NO: 108602 - DNA, 174 bp, Arabidopsis thaliana columbia
  unsure (1)..(174): unsure at all n locations
acctttctgattcccggtcacccacctccctctcttttaaaacatatctatttcttcaacaacanaaattcccaaaagagattcctattaataagaaggcccctattcacttttactactatttcccttaccaatttcatttttatttttcttttctatttaattttttttttt

SEQ ID NO: 108603 - DNA, 342 bp, Arabidopsis thaliana columbia
ctgtgtatctctcactccacctctattttttttcttcctcctctaaccttcttttcgtacgtttataaaaaggtcgttgaaaaaaaaatcataaaccgtcaaaaagccaccgttgatatttcttccttgttgcttcttcaatggcgtcgttcgacgaatcaccttccttaaaccccaaatcctttgaaaagatcttcataaccaagttcgctcattttcacaccgtctagatagtttcctttcacaaacaattacctaattttatatgattgttagtaatacaatcattatcaacttcaatatttttttaactcttctttttacaaaatcatttctttttat

SEQ ID NO: 108604 - DNA, 395 bp, Arabidopsis thaliana columbia
ggctgggtttcgtgtgatttcatttttttattgtttgttcggattcttgttaccatgattggactatattgagtgtcggctgtgattatctcaagcatctttctttactgatttttagatagctctgagatctgtctctgctattcgtcggatttgaattctttttttttttagatagctcttgaattacttcttctaggttttccaatatgatatagaaaatgctgttttccttttagatactcctttttctttttttcctttctttactttttataattctttcttattttcatattcttatttaaacctttaaattaatattatttttatttttatttctttatttaaatcttctattttctccttaatttcttattttattatatccattt

SEQ ID NO: 108605 - DNA, 433 bp, Arabidopsis thaliana columbia
aaaaatacaaagaatgctcaaaccaagatatctgtagccgccgcaactgctcttctactagaggtgaccattgacccgggcgcgggaactgttacttacactattgaataaaccacttgttttgactactcatgttgtactaccagaaagactatcatggttaatgacattctaaagttcaagtatcgttcttcccacacgtatcatgtggttgtcatacccacatattatttctgtcactccttctactctactaataaccattcctatgtaaacaccaaaatcgatcttaatactccttgaataaactatttcatctttcctacacactgtcactagtataaccaattacggattttatctttccgttcatatcctaactctttcttgtctaccttcatacacattcattctacttttttaaattcttgaa

SEQ ID NO: 108606 - DNA, 324 bp, Arabidopsis thaliana columbia
attctgtatccaccaaaacttttcttctacttttctatctatatatctattgttgagctacgaagtgtaagtacttttgactggctatattgatcaccaagttatagcatttaaaaaaaatgttgtcaagcaaagttgttggcgactctcatggacaagactcatcctactttcttggatggcaagaatactatgaagaatcctttccacgagtcgtttaacactagtgggattgttcaaatgggtcttgctgaaaaccagctttcttttgacctaatagagaaatggcttgaagagcatccagaagtcttgtgtttgaagaaa

SEQ ID NO: 108607 - DNA, 355 bp, Arabidopsis thaliana columbia
ataataaaaacattcaatagggggggcataaaaagaaacgcgtgggcctttttggggctatacaacgctaaagagctcaacaactgaaggtgggctatgttccactatgatcggattctaagatcaatccatcgctaccagaaaggggccttcgtagaacctctacgaccatttggacgacccattcaacatcaacgcttggaccttcgacaccaacttagttcccgagaagcagaagcggctgcttattatgtgaatgagagcatacatacgagagtgtgttccgggtctattctatgaaaacatgggaaccttcctatgaggtatctttgtatagaaaaagaacctattttta

SEQ ID NO: 108608 - DNA, 396 bp, Arabidopsis thaliana columbia
  unsure (1)..(396): unsure at all n locations
cgacccagtcgtccgagaaaatcaaagcagcagttatggccgacgtatcttcaaagcaccccatggaagatgaggtggaggagactatgcgtctagggtggggcntaagctagagacagacttggagatcaaggcttcggctgataagtttcaccacatgttcgctgtgaaaccacaccatgtctccaaagcaagtccaggcaacattcatggatgtgatctgcacgaatgcgactggtgcacagtcggctctatcgtcttctggaattacgtacatgatggggagtgcaaaggtggctaatgatatgttcgaggcggtgcgtccagataagaacttgattacttttattgtttattgaatgttattcctatgtatttatacaatttctttttgct

SEQ ID NO: 108609 - DNA, 386 bp, Arabidopsis thaliana columbia
atttcattttcttccgatcaatacatttatttcattttctgagagagaagaacatggctatgtggttttaaaacgttcgggcggctctttactcaggatcttcctatacaactgtgaaatctccgtataagaaacctgctgctaaaggtgttaaatctaataagactactactgctaaagcaactaagaagcctgtgaaagctgctgctccaacgaataagaaaacaacttcctctcaccctacctattaagagatgattaaagattctattgtatcgtttaaggatagaactttttcttagtcatatactctattcattaatttatattggtgaaacataaatcacttacctctacttttaattagcttttccttttgaatttta

SEQ ID NO: 108610 - DNA, 105 bp, Arabidopsis thaliana columbia
gctacttaaaacatctaatgggagtggcctctaaacaagcacgctggcccttcatctgacttttcaccactaaaaagctcaccaactcaaaatactccatttacc

SEQ ID NO: 108611 - DNA, 386 bp, Arabidopsis thaliana columbia
gagaaaatctatggacatggcaattcacatcttttcagaaactcaacttcacaggcgagcatgtactcaagtgttgggtggaaggtaatgttatagggaaaggttgctccgggatagtgtacaaagctgaaatgcctaacagagaagtcatcgcggtgaaaaagctctggccagtgacagtacctaatctgaatgagaaaactaagtcatcaggagttcgagactcattctcagctgaagtaaaaacacttggatcgatcagacacaagaacattgtacgcttcttgggatgttgttggaacaagaacactagacttcttatgtatgattatatgtcaaatgggagtttgggaagtttgcttacgaaaggagccgtgtatgtagct

SEQ ID NO: 108612 - DNA, 381 bp, Arabidopsis thaliana columbia
  unsure (1)..(381): unsure at all n locations
acgactactacaacattcttccattcactacttcctgctaacacttacaaatccngggctgtagcttcttcctttgtctcagatcctcattcgtcgtctctccaatttcgctcacttttgtcagattctacctctatttttggtccaaggtttttttaccttttttatcacaatatttattgttatctttttctttttcttactatccttttcctttatttttcttattatctgtttcttctgttatttctttttcttattttttttttatatttttatttttcctttttctacattcatttttgttgtgtctgttatactatttatttacctttttttctttcctactcttactcctcattctttacattatttttttct

SEQ ID NO: 108613 - DNA, 351 bp, Arabidopsis thaliana columbia
aatctcatggcatctaatcaaaaattctgtcttttttatccataaagcgaactctttcgcgctggtaccttctgcatttggtgcatcaaacgtacgatcatacactttttgtttttgcttttgtgaaaccctatacacatcgatctaaaaccctaaaatgatcacgaaaccttccgatttcaaagcagttcacacacttattcaatcgcgttacaagcgaatcaacctgttcacaatcacagcatggtctaaactctaatatctgtctttttactctctttcttcaaatggggttattcatcttcagactaaaattcaatatcacaccttttcactgagacctacttttaa

SEQ ID NO: 108614 - DNA, 479 bp, Arabidopsis thaliana columbia
tcggggtattacccctgtgaggaaggtagaccgggtcttatctctggctccgaatcccagaagttctcttgaaccgaccactatctactcggcagtaagagagcgtcaatataaaaccccgaaagaacgttaataccgaatcagacagacgagctcttccaactgggcggcaagtcaaacagccatgacgccaaggagcttcacatgttcgtctggagctcaaacgggtcacccgtttcagaccgggcgggtcttaacgttttcggcggagcacctgacaacgatcaaggcggaagatctgaccaaggtgctaaagagatccgtatgttagtcccagatcaatctcacaacggcgagaccaaagctgtagctcatccagcaagtggagatttcggaggagaacaacaatttattttcgtcggtaaagaagaagaagcattgagaccaaaatacgccgagaatggtctaaacaaacttgc

SEQ ID NO: 108615 - DNA, 462 bp, Arabidopsis thaliana columbia
  unsure (1)..(462): unsure at all n locations
gaanacccggcgcgacccacgcatccaatttcctctctcactctgcacactatggctttatatagagagaaagaaaaaatcgggagtctcataatccatgcgatggcactataaaacttcccctaatctttaaaccttttcctcttttcttatctattttccttatcctacttgaatcaaataatactactactcactaccaaaaacatatactctaattcttttccaacttattcaaccctctatctatattatcatatctctcaccttattcatttcaatcctttcttctaacaacatttcatatcattattttagaaagctaattagatcttaatttattaaaacaacattcatccttttaatatccctttaacaatctactcatatattcatttacagttccattatttttcaaatcttttccattttgtaggaaaatttctcttttaccatactatt

SEQ ID NO: 108616 - DNA, 329 bp, Arabidopsis thaliana columbia
  unsure (1)..(329): unsure at all n locations
ttatacaaaatccgttaatttatttcttccttgtggcccctataacaccgtatggttttatatatagcttggaggattattactaaacaaaantgtatcaagcttataaacatccctcttcttataagcgcgacaagctcgattccgcccgcaacatcctttaactacacaacatgcattcttgcttgattcttatccgcatttgttgtgtctacttacactccaaatctatttcataactataattatcttttattcatctagcatttcattctccatttataatttatatacgttttgacttttatatcttctatacttctaaaatt

SEQ ID NO: 108617 - DNA, 385 bp, Arabidopsis thaliana columbia
  unsure (1)..(385): unsure at all n locations
aaccaaaaaaaataaaacacaaaaacaattattttattggcttcctcaaccatggctttggcctgcccttccttcgccggggaggctgttaaaccttccncatcanatgtcctcggaagcggccgtgtgaccattaggaagactgtcgccaagccaaagggtccatcatgcatcccatggtacggatctgaccgagtcaagtacttggttccattctccggctagcccccgagctaccttaccggtgagttccccggtgactaccgattgtacacctcttgtctatcctcctacccatagaccttttccaggaacctttatctataaattattcacatcagatagtccatgctttgatccctaagctttttttcccttaactatt

SEQ ID NO: 108618 - DNA, 427 bp, Arabidopsis thaliana columbia
  unsure (1)..(427): unsure at all n locations
gagaaaacaagtcaaagccggtcatatccttttcatcctccgccataccntaatggattgcctaatcaaccaacggcggggctctccatcncctacatccctatacanttaccnacttctntacttctcctccccacaatattttctctctcctctcccattcttacttttccaaaaaacaaaaaactcccnctctttattacctcctttctcccnccnncatntactctctcaaatcaattaccaaactctataactctctctctcttccctataaccttttatcttactctcttataaaatctcaatctctctttcaatctctcaataacttcattttctccnttaatcttcatattccatttaaatatcatcacatctctcttttttacttttctacattataacctttttcttacttttctct

SEQ ID NO: 108619 - DNA, 443 bp, Arabidopsis thaliana columbia
cggacgcgtgggttctgaagcaaagatttttgcttatcttatctgaatcttcgtggctagtctgatataaatttgaggggatgatcaaagccaccatggatcttggttgcctggatttgggatgtctttctgacaagaaaagcggcgtcggagtttccaatctaatggattttgttttcccgtctgatgtcttccagtgacattgaattgagtttcttcctgttcactagaaaaattagggttggtaatttaggctctcgtataggggaattgaaaatggcagttccggaatagtgaagctgttgtttggtgttgtttaggaggttgtgagataggaagatgattaagctttgattgatttagttgtttacatgatctgcttttgtcgcaatgccatcgtattagttggaaaatctagctaaccacctggctaaattagttca

SEQ ID NO: 108620 - DNA, 451 bp, Arabidopsis thaliana columbia
  unsure (1)..(451): unsure at all n locations
cttcatggaactgtattgggtctagaagctgtcacagcaaatggcaacgtgcttgacatgcttggaactttacgggggggcaatactgngtacgacttaaaacatttgtttattggtagtgaaggatcacttggtattgtaactaaagtttctattctcacacaaccaaaattgtcttctgtaaatttagccttcattgcttgcaaagattatctcagctgccagaaacttcttgttgaagcaaagagaaatcttggagagatactctcggctttcgagtttcttgataacaattccatggatttggtactgaaccacctagacggtgtacgtaatccagtttcctcttcggagaacttttatattctgatcgagacaacagggagtgatgaaactaatgacagggagaagcttgaagctttcctgttgaagtcactggaaaaagggttag

SEQ ID NO: 108621 - DNA, 392 bp, Arabidopsis thaliana columbia
  unsure (1)..(392): unsure at all n locations
gggcgaccggcgcgaacgaacacnaccacacaaacaaaaaaaatattttttttttagagagagaaaggtacancagtggcaggctctttaataaagaagtgtcgaaatattacattaaccactttntttttcaaaaaaatattctttcttaaactcttctcctccataatctccttcatcntaatatttttaatcaccatctttctaatttttatcatactcattcccactaaaccaatattctttctccaaaactccaccttctactcctttaacctctctcaaccaaaccttcttacttcaaacttcctattcacaatctcatctcttaaccctatactccaatatcntaatctactactactcttttcacctttactctacatacatta

SEQ ID NO: 108622 - DNA, 443 bp, Arabidopsis thaliana columbia
gccgccgaagttttgtgcaatggcgacgaaaccgacgtttcagctgttttcttcttctgaaggttctggtctagggttagggttccttgattcatcagagccagctcttcctccacctcctcctcctgttgaagtattatccttcgaggtgtcttcctccactgatttcgaagtggataaattgactatcggcgagatcactcttttgaagggtcgtgtgagcactaaagaggtttttggattgcctaattcagatttggttcctggagtctatgaaggcgggcttaagctttgggaaggatcgattgatcttgttaaagctcttgagaaagaatcacaaaccggaaacttatcattttccggaaagcgggttctcgagcttggatgtggtcatgcactttcaggaatctatgcgtgtctcaagggttcagatgctgttcatt

SEQ ID NO: 108623 - DNA, 406 bp, Arabidopsis thaliana columbia
  unsure (1)..(406): unsure at all n locations
attctgcatcgtcttgctcgccattgtcaaagctcatgtgaggtacccnatagggagcggccttaagagcattctgtacgtacaggtcaattgctgtatcggtgtctgggatttcttatgtggttggtaactttctggaacagttgcttgagaagcattgattttcttattgatctgaaacacctgtggtacagatgatgcttttatcacttatgggaagaaaagccttctttgtatactcattatctaactgtaactgaatctttcctggttaattatctaaacttaaactttcttgttttctttattactcttctttattaatctcatattccaaatttttgttattctcaaaatttttttttttacttttatttttttaaataattttttttttcctttatta

SEQ ID NO: 108624 - DNA, 321 bp, Arabidopsis thaliana columbia
ttctgagttacaaacgatcttgttatccctctctgatactatgtaaaatcaaatgttccaagctctagtgttcgatgctcttttgtctagcaataaatacaacatatctttttcctatgtttatgttggcaggcaattttctaaatggacaaagtctttttcactttaatcaattgcctcttgaacttaataattttcagtcttttcattttctcagtatcatctaacttttataatctattagctatattcaacagattttcatattctaaaaggactcttttcttaaattcaaattttaactaaattcttaattttttc

SEQ ID NO: 108625 - DNA, 312 bp, Arabidopsis thaliana columbia
  unsure (1)..(312): unsure at all n locations
aattccatccaactcaaatatgtggggccttatatctcatcagcgagggatctaaaaataaaaattttatccttacaaacatctaattttaacattttattaaactaatttctcctacatccaacaatctttcatcaatanaatttttctacatatccataactatttaaattaccaaacttctctttttattacctcataattatcatattctatcttcatctaaatcatctttctccataacttttaaaaaaaaacctttcttatatcttttacacttcttccatctattctattatttttttttaccaa

SEQ ID NO: 108626 - DNA, 434 bp, Arabidopsis thaliana columbia
  unsure (1)..(434): unsure at all n locations
gcgtccgaatttatgtaggttgctgcaagagtcacatttgtttatgccgagaaggataaatgnttgggggtgaaagttattcacttggacggagaaacaaaaaaagttgaagtacttgatgaagaaccaggagatgatgaagaaggaggtggccagaggacgtataaactatcaatgtcatgtattttaccgtttccaaaacggaatgatccttcaagcacacaagagtttataccagggaaacacgtcttagctgtatatccaggaaccacagccctctacaaggcaactgttataagtaccccacgaaagaggaaatctgacgagtacttgctagaatttgatgatgatgaagaagacggagcattacctcaaagaacagtgccattccacaaagtggtagctttaccagaaggccatcgccagtaatttta

SEQ ID NO: 108627 - DNA, 235 bp, Arabidopsis thaliana columbia
gactgataggagaagcaagacgacttgaatcatttttttcgctgaagatccaaaatcgggtcggcgtatccttaatgaagggcgggaaaacaaaattttttctctaccccaatgaatcgctcgatatctctatggccaattccaggcagaacattaagaagcttttgatggattgtttcattatcaggaagcctactaatatccactcacgttctcttgctattgcttttaacta

SEQ ID NO: 108628 - DNA, 418 bp, Arabidopsis thaliana columbia
  unsure (1)..(418): unsure at all n locations
accgggcagtgccacattnngtttacttgagtgttcatgtctaataacgtctaagctcgtcgaccgtggtggtaatggtcttcaagttcagactgggcattcccattaaccaaccgcgctcaccgcagggntggtcaggtttaacccggagnaaaatcctgaggttaactccgtgtgggcttaagtcaaacggctgtttcaacctcgggaaaaccgaagtggtgatcgatgacctcggaggggacaacaaaaagtggaagaacccgttccacgtttgantttcggtaatgttactcggacactgaagtctactgatactcggtatgtgaccgaatctcttctaaccggttgtagtggtttggttaataaccaagaaagacaagaatcctgtgtactattttttgtggctgtgtgctta

SEQ ID NO: 108629 - DNA, 248 bp, Arabidopsis thaliana columbia
  unsure (1)..(248): unsure at all n locations
gttgatttgaaggggaataacaactttgtttttgctgtgattggtgatatttcggtgactttataacaggcttgtgaagccataaacaacccctnatatataaactcttatttgaatttaattcttaatgccaacaagcaagtcttattacctacactttctttttttttaccaattcaactttttggtacattgagacatttttcttatttttttacaatactaactctcttctattaataatattt

SEQ ID NO: 108630 - DNA, 299 bp, Arabidopsis thaliana columbia
gagacactaagaatcttccatggttttttttttcaacattaacctcccatactgggggggcatcaatgaatttcggggagggatcctttcttttctgaagctcatactcctgtttattacacacactaacgtgtccttgcatctcattctcttcttctgcactaattgtctactgcataaccatcccactgtttttttttcccgattgcttaggcttgtacgattcatcttcgccgtgttttctcctcgtttttttgtttcattaatgggagccacttcttgacttacaattactgtgc

SEQ ID NO: 108631 - DNA, 338 bp, Arabidopsis thaliana columbia
  unsure (1)..(338): unsure at all n locations
gcgacaagaagaaaaagatgaagaagaagagtgtcgagacttacaagatctacatcttcaaggtgcttaagcaagttcatgccgatatcggaatctccagcaaagcgatggggatcatgaacagtttcattaacgatatcttcgagaagcttgctcaagaggcgtcgaagcttgcgaggtacaataagaaacctacgatcacttctcgggagattcagactgctgtgagattggtgcttcctggagagttggcgaagcatgccgtntctgaggggactaaagccgtcacgaaattcaccagctcttgaattattgaagttgggttcttatcatatgga

SEQ ID NO: 108632 - DNA, 297 bp, Arabidopsis thaliana columbia
gttttctcgaattttgaagattttggtgcaacctgttagtgactttggagcgtataagtgttgggtcttcttcgggcgagttgggatacgttttggtttattcgttgtattcgattcattggtactgtgtcaagtatgatgagtctcaaggtaagccggttttgagaaacctcggatgttagcagtttaagaggtttgtgattgtgagcgcttcttggagccctcatgttactggagagtgtctactcttgttagataacggtgaggtctttgtgtttgatttgagtcaaagacatt

SEQ ID NO: 108633 - DNA, 379 bp, Arabidopsis thaliana columbia
caaaggttgtagagcttctgaaatcaaactgcattgtcaaagtgaagctcttccatgccgacgcgaaaagttctccgagctctcggtggttctaatattggtgtcactatcggaatccaaaattcgatgctcaagagcttgaatgcatccgtaaaggtagcagagagctgggtacatgacaatgtcactcgttacttcaacggtggaaacagagttcgaatcgagtatgtagcagttggagaagagccatttctccagagctatggcaatcagtataagccttttttgattggggcagctatgaatatccaaaatgctttagctaaggcgaacttggcatatgaagtgaaggttgttgtcccctcatgctttgatacct

SEQ ID NO: 108634 - DNA, 191 bp, Arabidopsis thaliana columbia
agagtctcgaatacgtaatatttttactgatggtcctgcattagctgtagcagtttagggctctccacctgatgattctcgaaataactagtccttctccatgaaactcacttttcataggtttatgcttgtctaatgaatcgacgttatgataaacttcctttagaacccgcacctgatccttcaacgct

SEQ ID NO: 108635 - DNA, 313 bp, Arabidopsis thaliana columbia
gagaaacacacaaacgtgcaaatcttggttattctaccacggagatactctctgagtggggccttaaatacacaggctgggcgttcctacatcccttattcgcggtctattgatcagatatctcgaaaccgtaattccttgttaccgtctacgccatttctaaatagatccaggaatcgttcatctgcgataccgattcgtctaatactacttctagtttatagttaactgttggcgtttatgattccgtaattgaatatgttacatggttcatttgtacttcaacattgtttaataccatatttcagacttt

SEQ ID NO: 108636 - DNA, 372 bp, Arabidopsis thaliana columbia
tctcaataatatctctaagagaagaacttctctataaaaaagaaagctctccccctctcctcaatttttaacctcccaactcgctctttttcttattactaatccttataatccacttccacgagaattatctatatttttatcaagtcgacaacttttcctacgatccaaatttttcaaaacaatatcaaccccagaccccatcttataaatacctttaacttatgaaaattttgaaaacgttcttatataaatccgaccctaccttatttcttactattgtaatgttgcattacatgaaatcgataaaaatattttgcaagttaaacttcaaataacattcagatcatgtccaaattctactattacaat

SEQ ID NO: 108637 - DNA, 438 bp, Arabidopsis thaliana columbia
  unsure (1)..(438): unsure at all n locations
ggaagggctataagagttatgtattctgttcgtgatccaagtctccntaagaagagaggtggtaatatatgtatgaagagatcttnacaaatcaattgatcacaaatcacttcacgagacattttcagcctttggtcccattctatcttgcaaagtggccttttatccctctggtcagtctaaaggctatgggtttgtgcattacgacactgattaatcatctcaagtagccattgataaactgaatgtaatgcttcttaacgatatgcaagtttatgttgtaccctttgttcacatgcttcattgagatcctttttttttataatattaaattcacttatgatttatatcaaaaattctcttcttgttcttataattattaaatacttatcataatcttttctttatttcttaattacttctttttttatttttttt

SEQ ID NO: 108638 - DNA, 458 bp, Arabidopsis thaliana columbia
  unsure (1)..(458): unsure at all n locations
ggaannccgggggggacgccacgcgtccgctagattattttttctaatctgttttttttaatagccaacggtcctaatcaagaggaagatttctttaaaccaagacaagccttgacattcttcttcatctgctccttatttttcatcatttcacatcttttttaaaagctctttacctatactccacatatttttcttgctctccttttttacaactatttgatcaaacacttgcttaatccttatacctttatatattattatcatatccattttcatcgtatcaattttaatcattattcgaaactttaatttcttggtaatattgcatatctaattattaatcttgcttctatcttttctccatctttttacaattcacttcctttttattctatctactattatttctttgtttctctttcatttatttattacttctcttttaacaactatct

SEQ ID NO: 108639 - DNA, 449 bp, Arabidopsis thaliana columbia
  unsure (1)..(449): unsure at all n locations
ggaattccagggagacggacgcgtccgctcttattttctcagttcttttaactcttttctttacatatattcaaatggccaccaagaagggtgaacaagtgactcgagtagcanctttnaacatcgaggtgccaccaccaaaggctgtggagtcggaggaagtcaccaccgtctccgagtctcttccagctccggtaacagaatctcaagcgcctgtcgaagtaacaactaaagatttggtcgtggaagagacagagaaaccaatcgaagaaacagaggaagctcaagttgaaactccggaagttgtggagatcaataaagaggaagaagcgtcggttgttactcccttcgttattgcactttccctccttacacaatatttttttttgtgcttttaatattttttattatttttataatttattcattttatttttttcatttttatt

SEQ ID NO: 108640 - DNA, 460 bp, Arabidopsis thaliana columbia
  unsure (1)..(460): unsure at all n locations
gcgtccggtctaaaaaccctaatctcactccgcctttttcttgatccatcaacacttccncaaaaagaaagattgttgctgcgttggagcgtgccntcttgagcgggaaagcttccccaaccactggcgatatcaaggatattcttggatcagttggtgctgagacagaggattctcagattgagcttttgttgaaggaagtgaaagggaaagacttggctgagctaattgctgctggaagggagaagttagcttcagtaccatcaggaggtggtggtggtgttgcggttgtttctgtttcatgtgggagtggtggatttttttatcctatttctcttttacttctttaattaatattaaatttttttttatatttatttttagctatttttttaattctattttttgatcaattgtttatttttattttttcaacacattttcttttttatattttcta

SEQ ID NO: 108641 - DNA, 442 bp, Arabidopsis thaliana columbia
  unsure (1)..(442): unsure at all n locations
gggggacccacgcgtccgaaaaaaagaaaacacaaaaacatacatttttattttcttcctcaaccatagctttntccagcaagaccttctccgaaaagagctgagaagcctcccncatcanatgtcctccaaagcggccatgtgaccatgaagaagactgtcgccaagccaaaaagtccatcatgcatcccatggtacggatctgaccgagtcaagtacttgggtccattctccggctagcccccgatctaccttaccggttaattccccggtgactactgatggtacaccgcttgtctatcctccgacccagagaccttcgccaggaaccgttagctttaatttatccacaacatatggtccatactctgaacccttaactatgttttccctaagctatttgcttattacggaatgtaattcctataaactttttttttca

SEQ ID NO: 108642 - DNA, 374 bp, Arabidopsis thaliana columbia
accgacgcgtccgtcaacatctctcatttcctccattttcactcatttcaaaacccatagattcttcaataagcagaagccttttaccaaaaacgctagaccaccatcacctcctctttaatcccctcttcaaaccatcaatctccaccaaaacaacaactctatcaaccattccgtcctccaccatcaccaatccctccaaagttccaatcactctacaccgccggaaaaatcgaagtcctctctaatcatctcagtctcttgttcaaatactctccactcatttcctccttatacactgaatgattcactcctccatcaatcgaataactcaccctaatctcccatttccaacataacaatctcatcatcta

SEQ ID NO: 108643 - DNA, 445 bp, Arabidopsis thaliana columbia
atttgtggtactctcagtgttagacaagtccgatcaagtttaagcagtcatgagagagttgcttcctctggttggtctgtctttcatgtttacctattcaaacgcggcggtttgtgtgtgcaaggacgctaacgagctggatcttcagaaggtgatagacttcgcatgtggaggaggtgctgactgtgcacagattcagacgaccggagcttgttatcaaccaaacaccctcaagaaccactgtgacgttgccgttaacagctactatcaaaagaaagcttccaccggtgccacatgtgacttcaacggcgccgccgtcatctccacttcccctccttcgactacgtcaagctgtttatctagttctagttccaacggaacccccactgccggatatccattcaccggaaattcaaccacatcaagtccaagcaccacaaattca

SEQ ID NO: 108644 - DNA, 445 bp, Arabidopsis thaliana columbia
  unsure (1)..(445): unsure at all n locations
aatgtacccactcttcctttacaacctctctctaccacattcttctttttatcctcaccaatatncccccaagatagaattcttctatccaaagagagaccntttccactntcatttcactcttctactaccctacatccactataaccctaatccctactactccaacacttcctccttctccatcttcatcaccatcccctaaaaatttttaatctcacctatctttttattttatctctttcttccacacatttctctacttccttttctccactcttctcttttaatctttccaattccaatctaacaacactgaggattgcttcccaaccttttatcttaaatattattcctctcaattctcatattaatccttctttatctattttctcataatatcatcttaattcaactctttctctttcatactcttcctcatttc

SEQ ID NO: 108645 - DNA, 303 bp, Arabidopsis thaliana columbia
  unsure (1)..(303): unsure at all n locations
caggctgaaaaggattctgcaggttacttttctggaggcgaactagttantgcgaatgaagcttatgacctgaagatagaggttatcagataacgtgaacgcgagaagaatcttcctaggaaaaaacgtagaaagctagaatctgccatagagatgctataagataacgaaggataagaagaggaagaacacgaataacgagactaatagagagtaagatcaatatgtaaatactataaaaaactggatacatattatatgagattgtcactaaacgatcttggttacatgagatctaaagcg

SEQ ID NO: 108646 - DNA, 261 bp, Arabidopsis thaliana columbia
  unsure (1)..(261): unsure at all n locations
ctgattcatcatctctttgaactactcttcttctattgccgaacgtggtgnanaacaagataagttagcttggtggagtagctaggggatttcncaccangattcttatgccgttttatgtcattttttatcaatctttgtctctctacttttgattttcctctatttttttttttttttattctttctatttacttatactcttatttttttatttctttctatttttcatttatttatttttttatcttttattctttt

SEQ ID NO: 108647 - DNA, 443 bp, Arabidopsis thaliana columbia
aatctactctctttaaaagaaattcgtaagtactatcaagaagcagaagatgccccaagagagtgtagctcaaggaggggaaggagccaacctatggtacgattgatcgacacatgacgccgtgaccaagattcatctcgcagcaagcatagacggaattcaatatgttcagtttgattatgtcaagaacggacaacccgaacaagctcctcttcgtggtaccaaagaccgtgttctcccagctgatccgtttgtgattaaccattcagacgaacatctagtttctgtagaaagttggtatagccctgaaggtatcattcaaggaattaagttcatctccaacaagaaaacttctgatgtcaatgtatccgattaaggtactcacttcactctacaagttaaatacaataatattattgtcttttatattttgtctatgacaa

SEQ ID NO: 108648 - DNA, 370 bp, Arabidopsis thaliana columbia
  unsure (1)..(370): unsure at all n locations
gacctgattccggttatctttactttatttggaaaccaaacgaatgcnatatagcgagattcgactcgaaccgggttggtgatcttatgagagataagcatctatcttttatcggtgattccatggctagaaatcagcttgagtctcttttatgcttgctctctaccgtctctagccctgatctcgtctatatgaaacggataagacattaaattcagatgatggcgtttcgagtcacacaacgtcactttctcggtttactgttccccgttttagttttcctatatagagaaatcggggtacttttaccacatttattgctcattgaccgccttatttaatttttttcttttatttaatacttctttat

SEQ ID NO: 108649 - DNA, 404 bp, Arabidopsis thaliana columbia
  unsure (1)..(404): unsure at all n locations
gtgagagactcgtagaagaaggttaaaatcttaaggaaagtcttgttactctgaaagagtacctcgtgaagctgtggagaggagctccaacatgtatcacagtctataccgaatatgactcaccctgatgttcctgttggaggagaggattcatcggcaattatacaggaggttggtagtccacgtgagtttagttttccaataaaggatcatcttcagcttgggaaggatcttgatctcattgattttgactctgctgcttaggtaagtggttcaatgtttttctatttgaagaaggaggcagatctattatagattactctnttttattttacattatcacaattcttgtatattagttttgtctctcttaatttactttcttaattctttttgtacttttt

SEQ ID NO: 108650 - DNA, 415 bp, Arabidopsis thaliana columbia
gataataaattcttaagacagatctttttctaggattgaagatcttcaaacccatcttaaattttaaaacaaaaactgattgttttagtctgaaaataaataattaaaaagctactatatgcattttacaaaaaaagcttgattagtgatttactcttcatcatcctcatcattattatcaccaccttctccgttttatgcctttactctctttatcaacttatacttcctttctttttatatcatcttcttcaatttttacggtgttgttttctcttttatcattatttctttatttttttttattagtttttttttattctattttgttttattaatatcttttttttttatttcttaaattctctatttattttatataccttttttttatattaattattttatttatttt

SEQ ID NO: 108651 - DNA, 392 bp, Arabidopsis thaliana columbia
  unsure (1)..(392): unsure at all n locations
gtttgtgtctcttaacttatccctttatccaaaaaggggaaaaccacctaagggggaagagtatatcgcctacgagaccgacctatttcancttatcnattaatacacccatatcttgttcgttgcggccgataacttctgatcaactcaacttcaaaacatcataaagggtcttcgtggaaactccttcgtgcttatggggaagaacactatgattaagcgttccgttagaattcacttttataacaccggaaacactgcaatccttaattctgcttcctctccttcaaggaaacattggtttgatctttcccaaatgttacctcaaagtaatttatccaaataattttctttttaccatagtttttttccctttcttcttttttattttg

SEQ ID NO: 108652 - DNA, 336 bp, Arabidopsis thaliana columbia
  unsure (1)..(336): unsure at all n locations
actcaacctttttctccttagacaaaaccacctccagagagaggctttttactactaagacaaccctcaccnccnacctcttctccacttctaactatcccgatacttccaataccaccaaatccaatcactctcacaacatccacctaaatcatcttaatgacaacatcctacccctataatctcaaaccaattaaaaaacccccgatattcaacacaaatactacattgtatcaaataatgatatacttctcaaataaatgcaatacaaaatagcttccttactcacttaattcccatcactacaaaaaaaaatatcatcataatcttcaaaac

SEQ ID NO: 108653 - DNA, 330 bp, Arabidopsis thaliana columbia
  unsure (1)..(330): unsure at all n locations
aaacttctctctaaatctcagtgatttctcataaaatgagaaagatgctnagagagaagaatttatctctatttaggtagagtcactctcacatcnnctcttttcttctattacttccataaaatttaaaagatgccaaaacatactacttatctcctccctctttctcacataaaacttctccatcacacacacctactttttctaactgaagaaatccaccttacaacccttctccttcaacatcttcttacccttcaccttcatcacattacttaacttcttccacttcattacaaacttcatcttcacacactttcataacacact

SEQ ID NO: 108654 - DNA, 449 bp, Arabidopsis thaliana columbia
  unsure (1)..(449): unsure at all n locations
cgtcctaaagtgctctctccccaatagctaatcacttccgtcttttacncggcnncnnatctccagccatggtctttttcaaaatgacactcacagctttcncttccactatcncactcttcctcttcactctctccttcttcttcgcttcagattctaacaattctccttatctccttcttcccggtgttgaatactctaatagagtcagatctaaaaaatccatatttgatatcaaatcggatccgcttaaaccacaatttattcatatccgtaaacaaacttatgatcatctgtcattagcattaacttattcttcttacgcgagaaaacttatactctataattctaaactcgtcatgatcttctcttatctttctagaaattacaccgatcttattaactaacctacttatctaaccttttttcattcttatttatcctcattt

SEQ ID NO: 108655 - DNA, 157 bp, Arabidopsis thaliana columbia
  unsure (1)..(157): unsure at all n locations
gcaccatttgtacatgcctcccattaaattgtaaacctgctcctgtncnnagtatcgaatcctaatttattggagagacggctcccccctcgccngcctcatttttctgaaaggcatatctaacaactcaaattcttctcttcctcacttttcttcc

SEQ ID NO: 108656 - DNA, 280 bp, Arabidopsis thaliana columbia
  unsure (1)..(280): unsure at all n locations
gcgtccggtagaaacaacctacgtcgaatctttatttgttggcagattatncnacctagagataagttggttcttagtgcaggtcagattctttacccctgtatgcaatgttcggatattttcttacttgaggctgatatttgccagctcgggatggatcatcgaaaattaaacattctagcaagataatactgttcttacattaataggaaaattaaacccatcatcttgtcccaccatttactttctgttctcctacaattacaagaaaatatgtcca

SEQ ID NO: 108657 - DNA, 411 bp, Arabidopsis thaliana columbia
acccgtctttctagggtttggtttatgaacgctccgccgtaagaattgtcctccgccgccgcgttttcccgtcgattcagaacagaaggattattgcttttgccaatctgtatcaatatccgtttgattatccttgtaatttcgtgtaaaaaccattcaaggtttcagcttcttccctcgttctttagggtttagatttgatttggggttgggatgagtagtccgttcagtgaagagatactgattgataacctcgctaagctcaacagcactcaacaatccatccaaagtatcctttttattattattcgaattcattgcctcaattgaatacatctctgtgttttggattagctcattcacattggtgtgtcttcatttgaatgaacctcttactgtatgcttaaatgt

SEQ ID NO: 108658 - DNA, 359 bp, Arabidopsis thaliana columbia
gcctttctagggtttggattatgaacgcttttctttatgaattgtcctccgccgacgcgtgtgggcgtctattcagaacagatggattattgcttttgccaatctgtatcaatatccgtttgattatccttgtaatttcgagttaaaaccattcaaggtttcagcttcttccctcgttctttagggttaagattcgaattgtggtagggatgagtagtccgtttagtgaatgagattactgattgtttacctcgcttagctcaacctttcttatcaattcattccaattatcctttttttttattatttcaaattcattttccttttatacttatactatttcttattattttgtttta

SEQ ID NO: 108659 - DNA, 200 bp, Arabidopsis thaliana columbia
ggccttgaacaactacttctttctcttgttttttcctcagactctgttattacatgggtggtggtttccaaatcttgcgagagaaatgtattttaaaggagaaggaccatttatcgtcaatgttctaggaaccacttacttttgcgttgtagtatggcaacacgacctttttggaacattgcttattctcctaggtatca

SEQ ID NO: 108660 - DNA, 416 bp, Arabidopsis thaliana columbia
aattgatctcgtggcattgtagtaagaagctttaatttaattggtcctccaaggaaattgcatcgaagtcagctccaaattttcgatcagggttgttgagcttttgtgttaaagtttcgatctttatcgaatttcagcaaaaagctgtagaatcggcaatttggttctattgagtatctgatgaaatgagaagcaaaagatatggttggaatgattcgaggaggaatgggtgatcagaattggagtcgtttatttttctggattattctgtttttttagttattagttcatatctttgtttattgtttctttctatcattttatatttttttttttctatcttctctatttcttttattatgtattgttttatttttattttctttctttttcttctttatttctacttttttttt

SEQ ID NO: 108661 - DNA, 411 bp, Arabidopsis thaliana columbia
cggacgcgtggggtttttctgttggaagcttccagattgatgtagttggagggtggcgtgacatgtatggatttggtacgcctgttgctttgctgatgggactaggcatgtggagtctccctgcatctcctcgctggttgctgcttagagctgtccaaggtaaaggacaattacaagaatacaaagagaaggccatgcttgccctcagcaaattacgtggcagacctccaggtgataaaatctcagagaagttggtagatgatgcctatttatctgtgaaaacggcctatgaagatgagaaatctgggggaaacttcctggaagtattccaagggcctaatttgaaagctttgacaattggtggaggtttagtcctcttccaacagataactggacagcctagtgttcttt

SEQ ID NO: 108662 - DNA, 408 bp, Arabidopsis thaliana columbia
agactttattcgggaggagaaacattttccggggaatgtggtttctgggattcgcgagagaattcaaatccaagctttcccggaaactgagaaaatctaagattcatcaagagtcagtgaatcgatggtcagattgtggatgcaaatcttgcaagtcatggactaagaacgaagatgggaatcttcacgtcgtggtcaaagattctacttctcgagagtactctgttcaagaaccgtccgagaatgtaatattcatacacggttttatggggtcatcacatttttggacagaaactgtatttgaacacattcaaaaagatgattataggctcctcgcgatcgatcttttgggattcggggagagtcctaagccaagggatagtctctatacattgaaagatcatgtgg

SEQ ID NO: 108663 - DNA, 402 bp, Arabidopsis thaliana columbia
ctggaagacatggcacaagacgtggaaccgaactaaagcagagctaaatgccgagcaaaagaggagtagagggaatcgcagagtgcttatgctgggagaagaagtatgagaagggagacattgcaattttcagaaagaaaataaacgatagatcatgcgatagatcaacaccggttgacacctgcaaaagaaaggacactgacgatgtctggtacaaggagatagaaacgtgtgtaacaccattccctaaagtatcaaacgaagaagaagttgctggaggaaagctaaagaagttccccgagaggctattcgcagggcctacaagtatctgtaaaggattgattaatggcgtcggcgagggatcataccaagaagacatcaatctatggaagaagcgagtga

SEQ ID NO: 108664 - DNA, 396 bp, Arabidopsis thaliana columbia
ctctctcacacacaaacacgatccaatgacgactagcaacaacgtgaacggatgtttcggagagacgaagctgaccaaagtgttcgtaggaggattggcttgggatactcacaaagaagcaatgtatgatcatttcatcaagtatggggacatcttggaggcagtcattatctccgacaaactcactcgccgttccaaaggatatggctttgtgactttcaaagatgcgaaagctgccacgagagcttgcgaagactctactccgatcatcaatggccgccgtgccaactgcaatctcgcctccctcggtggccgtcttcgtaaatcccctaccatgacctctcctcaacaaggaccaaaaaatgggaacagggccacgccaccacatgttggaaa

SEQ ID NO: 108665 - DNA, 410 bp, Arabidopsis thaliana columbia
acatcaccttgttgctttccaaaaaaaaacaaaaaaatgaatcatctaatccctcctctttctccaacaaataggtggtggtcggaagaaacaacagcggtcgtgaccggagcaaacaaaggtataggttttgcggtggtgaagaggttattagagcttggactaactgtagttttaactgcccgaaacgccgaaaatggaagccaagccgctgaatccctccgccgcattggctttggaaacgttcatttttgctgcctcgacatctccgatccttcttccatcgccgcgttcgcctcttggttcggtcgcaacttaggaatactcgacattctggtgaacaatgccgccgtttcatttaacgcggtgggcgagaatttaatcaaagagccagagacaatcattaagac

SEQ ID NO: 108666 - DNA, 407 bp, Arabidopsis thaliana columbia
ggaggacccaagaactcaactcccacagtgatatcgccgcagcaatacaagaaaagattcaggggagcgatgacggcttattttgtgatggttcctgaccagtggtcgcctgccgcggttgtgccaagcaacagttcttcagcagaggtgaaggaggaagaagagaaagacaatcctcaagctgttggtaacaagtcctgaagtattttcagcaaacatacacaatattcagttagcaaatatagtttttattttttttggttggaatggtcttatgggtaatttgtgtttatgtattacccttggccttaattgtttcatttgcctttttcattgtctttgcatcttaattatattatataatgtagctatttgacatgtcacttatttatattctttattgtttt

SEQ ID NO: 108667 - DNA, 375 bp, Arabidopsis thaliana columbia
ggcaggaacctacatttgttggtgccaatctttgaaacgcttcatgggataaacttggtgcgctcccaattatcaaagctggtattttaaaaaccacatgctgttcaacttgtaagagacccttttttttttattcatgtctgttattcatcagtgttacattacttttagtcttttattattaacattattagtgcttttttgatgctttttttttttttttttattttttttttttttttttttttgattttttattctttattgattgttgggttgttttttatttttattatttttttctatatatattttttattttttttttcattttttcaatttttatattttttgtacatttgtttttatttattt

SEQ ID NO: 108668 - DNA, 410 bp, Arabidopsis thaliana columbia
catatgataaccctaggtttggagggcatcaaacactcagtgaaagagagagatcttactctgcagtaaatcagacaattcactgtggttttgtcaaaggaactggatttgatttgagcgaaaaggatagggcctatatgaagaactgtgtagtctctgtgtcttcttgcatttttggaagctctgattttctaaggagacctgcaaccaaaaagattagtgagttttcgaagcgaaatgtttgctttgtgatgtttgttgatgagcaaacgctatcgaaactggctagtgaagggcatgttcctgacaagcaaggatttgttggtttgtggaaaactgtagtagtgagcaatttgccttataatgatatgcgaaagactggcaaggttccgaaatttctgtcacaccgt

SEQ ID NO: 108669 - DNA, 323 bp, Arabidopsis thaliana columbia
attttactctccagagaaagaaaaaaaaaacctcctctgcttttgtgatcctttaaggaaaaagacgaaatggcaacggaatcgtacgaagccgccattaaaggactcaatgatcttttaagtacgaaagcggatctcggaaacgtcgccgccgcgaagatcaaagcgttgacggcggagttaaaggagttgactcaagcaatttaaaccccattggacgaattaagaccggttttacttaatttaaaactcggaaatattttgaaagtatgtctctgtgtaaaattattttgcaaactctcagactcaaaggtttttggtgt

SEQ ID NO: 108670 - DNA, 405 bp, Arabidopsis thaliana columbia
gaagagtatatgatgctttaaacgtcctcatggctatggatataatatccaaggataaaaaagaaattcaatggagaggtcttcctcggacaagcttaagcgacattgaagaattaaagaacgaacgactctcacttaggaacagaattgagaagaaaactgcatattcccaagaactggaagaacaatatgtaggccttcagaatctgatacagagaaatgagcacttatatagctcaggaaatgctcccagtggcggtgttgctcttccttttatccttgtccagactcgtcctcacgcaacagtagaagtggagatatcagaagatatgcagctcgtgcattttgatttcaacagcactccatttgagctccacgacgacaattttgtcctcaagactatga

SEQ ID NO: 108671 - DNA, 332 bp, Arabidopsis thaliana columbia
atttaaggttattctggagttgatcattggactagctctgtgtatgtgggctgctttggctttccctggtaaatttctctcgatccatccggattctgatgaaaacaggtttgtgatcatgtttctctcgaactctctgttttgcatcagtgttaatcaatctgaattcatgttatctagtgagtgtttttactattgaatttttctctgttcgcactttgttgaacttggtgtagagttactacgggtcttatagaagcagctgttggcttgatatggttcaacagactcgttctaacacggcagttgatggggagatatcataagatatg

SEQ ID NO: 108672 - DNA, 420 bp, Arabidopsis thaliana columbia
gagacccgacccaggcgcaccggttcaatcatttctcttcaacggcttccttatacttcgggatcggtgctcaccttacgcaacgcgcttcttgtatagattcgggcggcctgagctctctttatgcatctccgacatcgggaggcaccggtggttctgttttctctcatcttgctcaagctccagaggatcctattcttggggagacaggtgcatacaacaaaaatcctaacccagttaagcttaatatccgagtcgcagcttacctaacggtggagggaaaacctttggttcttaatgttgtgaggaaagctgagcagcagcttatcaatgacagaacaagaatcaaggagtatcttcccattgttggattggttgagttcaacaagttaagcgctaagctcatactaggcgctgaca

SEQ ID NO: 108673 - DNA, 448 bp, Arabidopsis thaliana columbia
gtaccggatcgccgtgtcgacccggcgtacccgtacatgcctcctactggtgtacggcagacaatgttgttcagtgctacatttcctagggagatacagagacttgcatctgattttctttcaaattacatatttctggctgttggaagagtgggttcaagtacggatttaattgtccaaagagtagagtttgttcatgattctgacaaaagaagccatctaatggaccttcttcatgcccagagggagaatggtaaccaaggaaagcaagctttgactctagtttttgtggagacaaagaagggagctgactctttggagaattggttgtgcatcaatggtttcccagcaacgaccattcatggtgataggtcacaacaggaaagagaagtggcactgagatcattcaagactgggcggacacctattttggttgcaaccgatgtgg

SEQ ID NO: 108674 - DNA, 350 bp, Arabidopsis thaliana columbia
  unsure (1)..(350): unsure at all n locations
aacgttaccgggttgggatcccgtggttgcggttattaaaggagtggcggtttcgtttagcgatgataggtaagtaaagccgggtgacganaaaaaatatgctataatgtttgttatctataggtaaaatattactatttattcttttatttgatactactacctttttttttttttttcgtgttataatatttatattattttattattttttttatttttttttatttttttaataatttactaatattttctatttttaattaatttatataacttttttatttatttataatatatatattttatatatatatattttttctatttattaagaaaaattttattat

SEQ ID NO: 108675 - DNA, 415 bp, Arabidopsis thaliana columbia
aatttagtccgctttctctcacttatccgctcggccgcttccacatcgcttggccgcagccgccgccgtccgccgtcgctatccaccaccagattttaaatccccgccggaagttcaccttcaatacccaatatctgttataagtttggtggatgaagttgctggatattgcttgagatcgtcatctgacctcaaaactcatagtcctgagtactttgctacttggcgtatttattttatctggttggccatttttgtcctgaaaagcttcaggatttaaggaaaacagagactttgtatagtagggtttgtcctacttattggagctgatggtgtaataatacatataatagcagaagactgcgtcatcaaatctattatcaatgtcagaaggtgatttggccgtcatgaaacc

SEQ ID NO: 108676 - DNA, 426 bp, Arabidopsis thaliana columbia
  unsure (1)..(426): unsure at all n locations
gactgaatataaatcaccagcgacaccacctttttttataaacagtctcatctctccggaggggaataaagatgtcgtgggagtcatacttcnattaccatctcatgtgcgaggtctaaggcaaccacctcacacactccgccatcttttgccaagacggcattgtctggtctcagagcttatttttccctcagtataatcctgcatagatagcttgaattaacaaagactttgatgatgcttgatattttgccccaactcttctattccttggctgttagaattacattgtttttcatgttgtggttgttgtcctttttttttattttattattttctcttttttatatttttctattttttattttttatttttttattcttttattttttatttatttttctctttaattttttatcattttt

SEQ ID NO: 108677 - DNA, 267 bp, Arabidopsis thaliana columbia
taacaacagagaaccagcgcctatgtaaccctccgtgttcaaatctacttctcctttatttaagcggtactatggtacttcgggatagcatcacacacttaaagctaagaaacagtacgtgtacaaacattgaccaccacctgcgaaccaatactattcacactgcaggttacaattttctagcggcactgacaacacattccgtgtacaagtaacctcctgctcttgataaaaaattctcttaaaattcaggataccaatatctac

SEQ ID NO: 108678 - DNA, 410 bp, Arabidopsis thaliana columbia
caacaaatggctctcgaaacttttctaataatactcaaaaacgctatttcctccaaaccaggttctcgtcgaccacaccgatgatctcctccgatatcaaccaccacttcctccgtcggagtattatcgttcgaagtagcacgtgtcatgaccaaactcctacatctcactcactctctcaccgattccaatctcctcactcctcgagaccactctctttccttagaaggtctaaccaaaatcgtcaacggcgacgaaacattccacctcagcctcgtttgtgctgagctcgcagatagtctcgcccacgcagctaactctgtttcaagactgagcaaccgctgcaccacggccagcctccgttctttccaaccgttattccatgaatttgccgacatgggtcgtgaccc

SEQ ID NO: 108679 - DNA, 399 bp, Arabidopsis thaliana columbia
gctgttgaatatctgctcggaggatgctaaggctgctttcacggcggttactgtttctctgcttttccgatcggctttggccgagccaaagtctataccttcaacatctatgcttcctactctcgatgtgggtgatcgtgttatagccgagaaggtctcatactttttcaggaagccagaggtttcagacatagttatcttcaaggctcctcctattttggtggaacatggttacagttgtgctgatgttttcataaaaaggatagttgctagcgaaggtgactgggttgaagtttgtgatggaaagctcttagtaaatgacactgttcaagcagaggattttgtcttagagccaattgactatgaaatggaaccaatgtttggccctgaaggttatgt

SEQ ID NO: 108680 - DNA, 419 bp, Arabidopsis thaliana columbia
gctgcaacaagtccagccaggaacttcaaatcttcatcgatcgttgttatgaaatctgcaggtccagtttccacctctccgctgccacagaatgtcaccctaccaaatgtcaaggttggaaactctagacaaacccggaaagtcacctcagggaagcagaacgcaatggatttaaccccaaggccaggcctttacaagggccaactcgattccacgaagagcaatagcccaaaaacagtacggtcgaggcaagctttggctgcagatgctggttccatgaccaagtcaggtaggagccaacagcacagtgtcagcccaagaacacagccaaaaaagctcgggttcgagaaacagactcgacccacaactccaaaatcagagccaggcaaaaggcaacttcggaggcagcaaacagaggt

SEQ ID NO: 108681 - DNA, 410 bp, Arabidopsis thaliana columbia
gttagatatagccacagcatatgacttaattggggtagagaccagaaccaccggcctcttgtcaagagctagggagccactaaagaaccgctctgccgtttttgctttgggtgacaggataaaaattataaaggatattgatcaacctgctttgatcccgcacatagccgaagccagctctctcaaatatccttatgaagtgctcttcaggagcctgcacaagctacttatggatacagctacttctgagtatatgttttgtgatgatttctttggtgaagagtccatattctatgaaatttttgcgggtccattttctgtcatcgatgagcacttcaatcccgttctttcaaactgttttgatgctattggcctgatgcttatgattcgcataatacaccaccaccagc

SEQ ID NO: 108682 - DNA, 415 bp, Arabidopsis thaliana columbia
ctaaaacttcactcacattaaaaaaaaatcaaaacctttcaaaaaaaccaaaaactcagacaatgttcggagtcgtcttgcccaatcgaagtttcccaatagacatctcaaccttcactcaaatcgacacattccactgggttctcgacatgaaccacttcgtcggtgaagcttatgatcaaatctcagagatgtgtatcttcttgttaaacaatttcaatcttccaccagataaagctttagctgtttatgttcaatctccaggatcagcttttgtgttctgtggtgctgtaactttagctagaccttctgctgttttatcacttcaatggcctgaacctggtagtgcagcgaagatgcaactcacggcgggtgattcgagttccttatcggcgaagatcggtgtttcggtgga

SEQ ID NO: 108683 - DNA, 419 bp, Arabidopsis thaliana columbia
caagctagaagtttcctctgcatcagagaatcaagaagttgagagtaaaaacgattcgggagatctccgaggctgcagggtcaccgaagaaaacagcaatccagctaaagaagggctacaaatcacagaggctttacaaatgcagatggaagttcagaagaaacttcatgaacaaatcgaagttcagaggcatttgcaggtgaagattgaggcacaaggaaagtatctacagtccgttttaatgaaagctcaacaaactctcgctggctactcatcttcaaatctcggcatggattttgcgaggaccgagctctctagattagcttcaatggtgaacagaggctgtccaagcacttcgttctcagagctaacgcaagtagaagaagaagaagaaggtttcttgtggtacaagaaaccag

SEQ ID NO: 108684 - DNA, 378 bp, Arabidopsis thaliana columbia
gttttctccgaaccaatccttctcttcctcggtgaatctcccgcaatcgcttcggccgcatcgctcttcgtctacggtcttatccctcaaatctttgcctacgcagcgaactttccaatacaaaaatttctccaatcacaaagcatagtagctccaagtgcttatatctcaacggctacgctctttgttcaccttcttttaagttggctcgcggtttacaagcttggtatgggacttcttggtgcgtcgcttgtgcttagcttgtcgtggtggattatagtcgtggctcagtttgtttatattgtgacgagtgagaggtgtcgtgagacgtggagaggttttagtgttcaagctttctcgggtttgtggggtttcttt

SEQ ID NO: 108685 - DNA, 415 bp, Arabidopsis thaliana columbia
ggaagataaggcgaggttggtgcaagagacaggtttgcagctaaaacagataaacaattgggtcatcaatcagagaaagaggaactggcatagcaatccatcttcttccactgtattgaagaacaaacgcaaaagcaatgcaggtgacaatagcggaagagagcggttcgcgtagaaacaacaaacatatgatgtgaattggggaggtggaagatgggatttgaaagcagggttttagggatttaaagttgagaattttatggaggagtttggattatacagagagaggggacagtatttgaaaggaactttttgtgctattacatagaaacgtagtttggtttatatatttaaattttataatttatattttttggtaatattttttttgtttttttttttatttttttgtttt

SEQ ID NO: 108686 - DNA, 375 bp, Arabidopsis thaliana columbia
tggtttcataaccacatcaccaaacgacaatgggtattgatctcatcgacctaagtaataggcgggcgaccaaaaaggcagctgcggggactgatgatgcttacctcaagcttactgtcaagctttaccgagttatgttaaggagaactaatagcaagttcaatcacagtgatattgaacaggcttttcatgagcaaagtcaacaaagctactatatatgtatctaagcttgaggcgttcatgactgacaaggaatataatattgccgaatcggttggaactataactgaggatttgagggtacacgagattccacccatgaaagtgactgccttgaggctcacagagagagcaagggctcgcattgagaaagct

SEQ ID NO: 108687 - DNA, 412 bp, Arabidopsis thaliana columbia
gtcttggcacgtttgtttttgtcggtgatcttattgccatgtcacattcagttcattgtagcgcgcatatcaacctcgggggcggtttaacttctttggaaagtccttcccgaatatcctagaaagaagcttgacttgcacattccatgtctctcttgcactagttcttctgaacagcttacccgtgtattaccttgatggtgaatccattttagagtcaagtctccagtcttttacttggttaagcccaagaaagaagaagaaagctcttcaagtttgccttgttggtgggagtctcctctctttcctcgccttcttcagaatcttcctcctcggtttacctctgagccgccgatggtaaatgcccccggtcttgaatctcaaatctttacaagatgatggttccagaatt

SEQ ID NO: 108688 - DNA, 309 bp, Arabidopsis thaliana columbia
  unsure (1)..(309): unsure at all n locations
cggaanncccgggccggcccactcttacattttagaagaactacttctttatctctatctacttaccatactataataatcctcttcttcgtgttccattataatcggtccggtcaacatacttaatacctccacttccttcccatccacccacaaatctaacaactacattactcccattacaatcaacttcattatttttaactatatacaattttttcctcctatttttaacaaaaatttttatactctttcttacctaccttaccttatctatttcttatttattaacaatatttactaccttat

SEQ ID NO: 108689 - DNA, 428 bp, Arabidopsis thaliana columbia
  unsure (1)..(428): unsure at all n locations
tagcaacaaagcaccccatggaagattatttttagaagacggaggcgtctagtttgggggggaatctatagacagacgtggagatcaattcttcntctgataagtttcaccacatgttctctgggaaaccacaccatgtctccaaagcaagtccaggcaacattcattgatgtgatcttcactaaggctacttttgctcattcttctttatcgtcttccggaattacgtacatgacgggtatgcaaaggtggcgatttttattatcttttcttttcacccagataagaactatctcactttttggtcttatttttattctatcttttataattcttttcttattttctttttttttttaccatttttttctgttttttatatttttttcattttttccttcatttttttatctctttttctctttttt

SEQ ID NO: 108690 - DNA, 417 bp, Arabidopsis thaliana columbia
cttccatttagtccgtttggatttgaatatgtgttttgactcttatgcatacacatagggtttgatagaattccccagagtcagccttttaacttttaagcaccattctgggtttcttcaaaatcttttcttttgcttatggaaggtacgaagcttgaatgttgtctttgaattgtgatcagggttgttttggcgccattgactagatcgagatcgtatggtaacattcctcagcctaatgccaaattattttacacttatagttcaacaccttgtggttttttaactttccatatctgtgtattcttcgattcatcatttttgctatcctttatttactctggattatttgaacattttcccaattttttggcatttttatccctttttttgatttgctgtctaatttgtattttt

SEQ ID NO: 108691 - DNA, 419 bp, Arabidopsis thaliana columbia
ataaagagagccagtcgagggtaaaactaaatgccaccattttcaatctttccacaataatggcggctactagagtgtggacgtcatctactaccttgacccaaaccaccttctgtttcctcgccaagcaagctttcactcttccggcgaagaaatcctgcggcggatttgtttgtcttttgcttattataatatctttgatgttttacttttagaaatttttttcttgcagcaccattttcttatccttatgtaatttgttttttttttttttttacttctttatatatttttataacaactcatgaaattattacaattttgattgttattattaaatatctttttaattatattatttatctttaatttttatacaattttttttattattttttttcattttatttataatattt

SEQ ID NO: 108692 - DNA, 299 bp, Arabidopsis thaliana columbia
gcaacagttggtctgattcagtcttctttcttctggggttaccttcttacacagatagctggtggaatttgggcagacactgtaggagggaaaagggttcttggattcggtgttatttggtggtcaatcgctacaattctcactcctgtagctgctaaactcggtcttccttacttgctcgttgttcgtgctttcatgggagttggagagggtgttgcaatgcctgctatgaataatatattgtcgaagtggttttctgggcaagagagaagcttatcactctctcttttttttagtgg

SEQ ID NO: 108693 - DNA, 182 bp, Arabidopsis thaliana columbia
acgctctagagtatctgtctcctgagacaaaaagggcgggcgtccttttttaataacagatattgttgataaacaaaaaaatgcgtacgtgaaactatggaacaagctcaaaaaaattagggcgggcgttctagagaatccaagcttacatacgcttgcatgcaacgtcatagcttttttat

SEQ ID NO: 108694 - DNA, 344 bp, Arabidopsis thaliana columbia
tgcagctccgagagcaatggagaaatcgaagatgagagcttaaaagatggaacatgacaaagctcaaggatcttttgaatggaaaagactatgtgctcacttatgaggataaggatggtgactggatgcttgttggagatgttccgtgggagatgtttattgatgtctgcaagaagctgaagataatgaaagggtgtgatgctattgggttagctgcagctccgagagcaatggagaaatcgaagatgagagcttaaaagatggaacatgacaaagctttttaactatacaaaatatgtgcgatcttttggtggcgttgttaaattaaaaaacatctttttctt

SEQ ID NO: 108695 - DNA, 270 bp, Arabidopsis thaliana columbia
  unsure (1)..(270): unsure at all n locations
aacanaacgatatccttcttatttcgtcgccgtcgctactctttctcgtcggtggtatagtgtcaactttcaaggaagatggctggtggtggcctgaanagccttatatcttcagcagtgggtcgaggtgtgaccgaagcaagagcaaggattttcggacatatgcttaacccaacgggacagagatcttctcataagatattaaggaagaagcttattgtgataaagttgcataatggtattcatacgacattaagaatgaggatccca

SEQ ID NO: 108696 - DNA, 447 bp, Arabidopsis thaliana columbia
ggtacctcttgcttcttctttctctcacgcacctctttgaagattcttcttctcttaccgggttggattcgtctcttcttggggattttgagtttgattctaattttggatccagagggtttatttatgtgaatgattccgattttggggaacttgttcgtctgaaatgttttgttgaaccggttgcgtcatcggtgcgtcttttcatggtcgttaagagtttcatgattgcatcggtgttgtgagttttacgatgctgttgttgttgatgagctgattttttttttttttttttctggtgattatttgtctcctatgtgaaacattcttaagtatttttgatcagattgatttgatcacaagtttatcccgttgcaatctctctgtttcattttgtgaacgctcatgtggatcattgattttgttgatcacttgtgggagattttt

SEQ ID NO: 108697 - DNA, 233 bp, Arabidopsis thaliana columbia
  unsure (1)..(233): unsure at all n locations
tttttggtttgagaattggacgattgagatatatgggtaaagtggcanttncagcgacggtattaaattcggtgtgtgcgtgtacaacaacnncgttaatagtaccgatgagaatgaaaagcgcattcaaatggtcatgagtgatatacatattgaaagctcttttaagaatattgtgcaacgccaattgtcaaatttaaacaaattttttgatacttttacttttcatattc

SEQ ID NO: 108698 - DNA, 431 bp, Arabidopsis thaliana columbia
gcccatggcaactccaggagttgctccaagatctgtgcaaccagcaagtccttcaacacagcaggcagctgcacaggcagcccctgcgcctgcaactccgccaccaactgttcagactgcagatacttccaacgttccagcccaccagaaacctgtgatagcaacgttgacaaggcttttcaatgagacatcggaagcactgggaggcgcacgtgcgaatactactaagaagcgtgagatagaagacaactcgagaaaattaggtgctctgtttgtgaaactcaacagcggagacatctccaagaatgctgcggacaaactcgcacagctatgccaagctctggacaacaatgacttcagcacagcccttcaaatacaggtacttctgactaccagcgaatgggacgaatgcaacttctggctggcaacac

SEQ ID NO: 108699 - DNA, 298 bp, Arabidopsis thaliana columbia
ctctcactctgtatctcctttggatgcgtttatgttgagaggaaatgtcggatcttcagacaccgattgagaggctctaagaggaagaagactcgggttgattactctgttaagttcagaaggatcattgtcatctacattgatcttccattctcaggcacattctactttctcatttaccatggagacatgtggtcagagttcaagttcttcgagaaacgtgtgaaggaacactatcgagaatggtaagaaagtcatcatacggcttaatggttgggatgcttccaaggacgggctt

SEQ ID NO: 108700 - DNA, 169 bp, Arabidopsis thaliana columbia
  unsure (1)..(169): unsure at all n locations
aaaaaacgaccgcccacctccaactaaaccttcctccttcactcttttttttctcacacancacatacaatctccgtcataaataaaactccctccctcnntccactacaaccttaaaccttacatttttatctactacctttcataatcttttatcttaaactactct

SEQ ID NO: 108701 - DNA, 310 bp, Arabidopsis thaliana columbia
ataaacttttgctctacaaaattttttattttgttacagtacgaatgccattatggatggccaaagcaattgcgttgggaaaaatgattagaatcacttctctaaacaatgctcttaagagtatgtacaatgcttataatatatttaagaagcaattcattatcaagcctttctctaaagcgaccataaatcttcttattctcattccaatacacattttcactattttgttcatagtcccttatcaccacatgtctggaaagatcaatgccaagcttaatggatctcttaacaaatcttgagtcattaa

SEQ ID NO: 108702 - DNA, 177 bp, Arabidopsis thaliana columbia
atctatgacaattttttaagctctttcttttacactaacattatacacaaacatggtctaatattataaacaggggggaccacattaaaatatcacattatttaattatcttacactataagatagaacacttaatctttgttattttctttaatgatgtttatagactctgttatc

SEQ ID NO: 108703 - DNA, 137 bp, Arabidopsis thaliana columbia
cgaagacggaaacccgggcgacccacctctcttcaatcatactcagattattttatgtaattcaaaaactgtggtcacaaatctggcgcatcatattgctcaactccaaattctattaacctaaaatcattaataaa

SEQ ID NO: 108704 - DNA, 451 bp, Arabidopsis thaliana columbia
gatcatctctcttcccaaaagccaagtccatacctttcctccatggcttcttcattgctttcccaaactagtaaaatctcctagctttccatttccacaataaacccgtgatccaaaacttgcctttttctcctaaagatcttctctttttaagttttggtttcagatacatacataacaaagtctcttcctttattcatcaatgactacagcaatatcgatgaatccatctttgtttcgagtaatctgtatactccattcgataattgcgcttactagtggaaccttaatgatgttctacacagagaaagcttcaatctttggaccaggaagtgagattgctagcaaactaaaaggatcaacaccacacgatgaactactcatacagatttctcagtcattctctggtttgcttctgtttgcaattggtttggtactgttcatgggttcg

SEQ ID NO: 108705 - DNA, 385 bp, Arabidopsis thaliana columbia
gttaattgcccaataagttgtgtgagttgtctaatctttcaaatcaaacagcccgtaaagcccataaagtcgcaaatttcgcattccaaagtttttaagaatggagaaacgttcagattcagagagtgtagagattttgggtgattgggattcacctcctccggaagaaagaatcgtaatggtttctgttcccacttcaccagaatctgattacgcgagatcgaatcaaccgaaagagatcgaatctagggtttcagacaaggaaacagcgtccgcatccggagaagtggctgcgaggagggtgttgccgccgtggatggatccgtcgtatgaatggggtggtggcaaatggaaagtagacggaagaaagaacaagaacaagaaa

SEQ ID NO: 108706 - DNA, 302 bp, Arabidopsis thaliana columbia
  unsure (1)..(302): unsure at all n locations
gcccttgcaaaccataaccaaaccatgatcatcatcatctcttggtgacagaagaaaagagttgaggaacagagaaaatggcagcacaagcacttgagtcttcttcacttacctactgtgttcagacagatagacagatatttgactcaaaaccagttgcgtgtgtctcacannnnnnactctcctttgttgctaaagctgctgcaacttcacctgtcaagcaaggagccaacagaccattggggtttgcttcatcgcatagtatctcttacttggatggcagcttacctggggactatgga

SEQ ID NO: 108707 - DNA, 415 bp, Arabidopsis thaliana columbia
aaacatccttgggcagaggaaaaagattatatgcgactcttttcctctaaaagggtctgtctttttcttcttctctcttcagatctgcatctcacggatcaatcctgtgtttgaaacaatgggtgttgcagtcgaaaactgtggtggatctccggctgatcctgctcatatcgacgagaatccttgcaagaacgcgctgctgcaccaaggaaaggcagatgacgccctcatgaattttgattcaatccttgagctaccaaataatgcccgagcggattataacagagcggtcaactctggtgcacccactaacgcagcactagagtgggctgcggctaagcatatcacactctttgtaccttgctaaataccgatcttacgctgactccaaaattaacgactagcttgatctagc

SEQ ID NO: 108708 - DNA, 171 bp, Arabidopsis thaliana columbia
aaacgcgttgggcataggaaaaagtttattgtgacttttttcctctaaaaggggctgggggtttctaattgtgtggggaggtcttcattttacggatcaatccagtgttagaaacaaagggggttgaaggtgaaaactttggtggctctgcggttgatccgactcttttac

SEQ ID NO: 108709 - DNA, 320 bp, Arabidopsis thaliana columbia
caaaatcatcattaactctaaattcttttttttcatttcattcttacaaattcgtgacgagtacaacttaatcgctgggggcataattattatactctaaaaattaaattttttcctaataatccctctatttcttatttcaatctcatattaaacctattcttattatattacctaatttacactctattaaatctaaaattttcaacacatcatgattaactacaaatcacactctttcactttctatccttctaacccctatatccttatataacaactcatctatattaataaatactatttacctaataaccttc

SEQ ID NO: 108710 - DNA, 322 bp, Arabidopsis thaliana columbia
ccggattacgtttcacgtatcctggaatcgacggtcatccaccaccgggatcgaaaccacttattgaagatttctcaatcacgctgaattccagcgatcggtgtctcctcgtcggatctaatggcgctgggaaaacgacgattctgaagatattgggagggaaacacatggtggagccgcatatggttagggttctgggtcgctcggcggttcatgatactggattgacctcttctggtgatctctgtgatctagggggcaagtggaggcctgatgttggatttgcaagatttagtggtaccataccaatggacatttcggt

SEQ ID NO: 108711 - DNA, 420 bp, Arabidopsis thaliana columbia
ctctaaatgagactgtttttggtgattatgaggttacgcacataagttatccaggaattccttcttcttcgccaaatggagatgttactggagatgctccaggaggccttccaattccgatcaatgcaacaacttttgccaacaaaagccagggaataggttttagaacgattgcaattattgcgttgtcaggttttgtcctcattctggttttggttggagctatttctataatcgtgaaatggaagaaaattgggaagtcatctaatgctgttggtccggctttggctccatcgattaacaaaaggcctggtgctggatctatgttttccagtagcgccagaagctcaagctcagattctttgatgtcttccatggctacatgtgctttattcagtaagaccttcacactcttcgagc

SEQ ID NO: 108712 - DNA, 331 bp, Arabidopsis thaliana columbia
ctcactctctgatggattacgaattttattttcaatactaactaaaaccattttggtccgatcaaacatggcgggcggaggtccatttcacgtcgtgcaccactataccaataccacttaggcgtacatatttcttcggtgctgatttgtgacggtataaacatagaagagcgagcccacctgggggcgtcagactaggtcactattctgatgtcgtacgcaatgacgtttattttctggtgatcaaaaactggtttgggactccgatggcctaacgaggactgtacgttgaccggaaagggactataataatgatttgtgacctgttttg

SEQ ID NO: 108713 - DNA, 444 bp, Arabidopsis thaliana columbia
aaactaaagatgtatgttacaaggcgtttatcggaataccagaaaaagccatcggagctgaaactgcttccaccggaaggtccaaactccggcataatggtgattcaagacgaagaatcacaggccacttgctgctttggttcttgctatgagggtagacttaagggcttgccgtttccacaaaacgtgaagctgaatgcagcgtatactagtggaggaggagaacaccagacaacacatcttactccagttgtgttcattcctgttcttgatcagccattgtcttcaaacctttactatgttttacaaaggcgtgggaagcatactggcaaagcatctgcaagtgcaacagaagaggagagggtttcaagctgcttttgctttagctatattcctgacgctaagccacaagaagcagatccttatgacatataccaacaattc

SEQ ID NO: 108714 - DNA, 437 bp, Arabidopsis thaliana columbia
gcgagttcttctctgcgtttaagccatagataacaaaccaaactaaaaaaaaaaagtttctccttttatcattccttctcttcccttgtataggtgtgatcctcttcaaggggatttctctggcgggtcatacattcgcaccgatcaaagtcggattggtctttcttaacgcaatcttgacccgattcaaaaaatttctgggtttgttagtgaatagataagaagataaatgggagctccgttagtgtgccacgggcattctcgtcccgtcgtcgatgtggcttatagtccggcgactccagatgggttctttctcattagcgccagcaaagattcgaatccgatgttgaggaatggagagactggtgactggattgggacttttgaaggacataagggagcagtttggagttgcagccttgataaaaatgctattc

SEQ ID NO: 108715 - DNA, 202 bp, Arabidopsis thaliana columbia
ttaaatctcgtgaacctaaaaacctcgtggaaaaccgtattaattgcgcccgaaggcgggaaaaaacccggttgggaggaaccaactttccaggaggccggggggggggaatcaaaaggccgggaagctccgggggggaaaaacccaaaggccggaaggaagctcccaacggagcttggtcccggaggcgccaggagaaaaa

SEQ ID NO: 108716 - DNA, 314 bp, Arabidopsis thaliana columbia
ctcattgcttcatcattaccaaatcttttttttaatcttatctctcaaatctacggtgtgctcttttctccaaaggctcggggctttcttaatcatccctatctggcttgatggtttcatttgatatctctataaacgtgtctttggaaacacggagtccataattctcgatctttatctatcgatcttcactaatatatacaagcgtgtactttattataatgcagtctaaagtgtgttaaaacaacttcatcactcgtatcttcttattttacgaatcttctcttctctttcagcatttaatacgttctttc

SEQ ID NO: 108717 - DNA, 450 bp, Arabidopsis thaliana columbia
attcatttggcggatcctgatattcatgagcttatggagaaagagaagcaacgacaagtgagaggaattgaattgattgcttctgagaatttcgtgtgtagagctgtaatggaagctttaggtagtcatttaacgaataaatactctgaaggtatgcctggagctagatactatactgggaatcaatatattgatcagattgagaatctctgtattgagcgtgctcttactgcgtttggtcttgaatctgataaatggggtgttaatgttcagccttattcttgtacttctgctaacttcgcggtgtataccggacttttattgcccggtgaacggattatggggcttgattcgccttctggcggtcatatgagtcatggttattgtactcctggggggaagaaagattcggcttgcttcatcttttttgagagttttccttattaagtg

SEQ ID NO: 108718 - DNA, 445 bp, Arabidopsis thaliana columbia
  unsure (1)..(445): unsure at all n locations
cttcgtgattgagagaatcttcaacgaaagaaagcaactttttttgggtgaaattcacagaacaaccaaggtttttcttcttcttcttcttctccagttcctacagaatcatgcctgacaagaacatcgtagaggacgttatcggtgatttggtggataacttcacggagactgttcagaagaacaaacatggttcctccttcttcgaacaagaagattccgtcagttctcgtttcaaccgtttgtttgatcgccagaagccaattcatcatgtcttaggcggtggcaaatgtaagaattcgtatacaggaacataaatatgagattggtttttcttgtaattgagtattgagagattccttcagctgcttgatgtgttgtatggaggaacaagaagatctctgcaagtgntttgatgggagcttccgcaatttgggtgcttttt

SEQ ID NO: 108719 - DNA, 431 bp, Arabidopsis thaliana columbia
gatcgcttcaatctatctctggagatcatcaaagtatactgggaatcacgttaagcttcaaactcgtcaagcatatttcgagttattgcaaccctctttaactccaagcaaagttatggatattttcatcagagcagctgaatacgcagagatttcagttcgtaaatccgatgatgaatctctgcagaaactctttatgtctgtcaaaagcgagctaaatttggatcctaagaagttgaagcaagaggaagctaagttttggaaaaagcatcctgcaactatcaagacttgagctttgatacagaaacagttaactcgtgaatcatcagtcctgtctccgactctgcaacgtgatttcaggcatgtgctagaagttgcacctcgcctgcttgaagatttgattaaagtcttatataggccttaattttttt

SEQ ID NO: 108720 - DNA, 273 bp, Arabidopsis thaliana columbia
gttccaagccgtatcctatcaaaacactgcaagtctctctctctttcaagccttggcggtggttgaatcgaaagctatgtgtcagaccgttgttctcagagtggccatgacatgtgagggatgtgttggagctgtgaaaagagttcttgggaaaatggaaggcgtggagtcatttgacgttgatataaaggagcataaagtgactgttataggcaacgtgcagtcagacacagttttacagaccgtgtctaattccgtaaagaaaacgttttt

SEQ ID NO: 108721 - DNA, 210 bp, Arabidopsis thaliana columbia
attgcactttcgataaataaatctagccctttattctatatatcattgcaggatgccttggtcggggcaattctataaactgtatgcgatgtctttaatatatttaatagacctcatacttccatagaaatagatccaaataccgatgtttaagatttttaccaacaaagttacactgtaatacccaatctaaacttgtattctctacca

SEQ ID NO: 108722 - DNA, 247 bp, Arabidopsis thaliana columbia
  unsure (1)..(247): unsure at all n locations
gcaataagtactagtgtccgggttcaaaaaaggagagcgtgggtctctntttaattaacagaaaacaaaatggcaactgatcaaattacaaaatcatggagaagcgtattcaaaggcctgcggaggttgtggctcgtcatctatggccatatcataggtggttgctgcttgttgggcttgttctgcatcttttgcacccactgcaagtgatgctgttgtagccttttcatctgtcatagacagtact

SEQ ID NO: 108723 - DNA, 205 bp, Arabidopsis thaliana columbia
attctctctggatatcatataactatctctcgatctcaaataccataaatggctgacatgatgggcacaatcctaataaagggggacaaatcaataaggcttttaaatgctagagtacttccacagacaaatgactcaccacccatggttaagaactatccaacaacaccaccctgtgcatgacatacattttttatattgacac

SEQ ID NO: 108724 - DNA, 337 bp, Arabidopsis thaliana columbia
gccgctaagaattgatccggcgagaatggctagcatcaatgagtacgaggaaggtccaggggagagggagagtgggtacggcccggatattgtgccgtattctgtgaaatcgttcgtgtcacacatgttcagactcataatggacaagaacgttgtcgagatccaccagatgtgtgagacattgttccagagcatatcgtatcgtatgttcatggtctcgccgtttccaattttgttattcttttgtttttttcttatacttcttcctttttttctttattcttgttctttctagagatttattcatctttttgatttttctatttatattttttta

SEQ ID NO: 108725 - DNA, 418 bp, Arabidopsis thaliana columbia
ctatctttctgttattttcttcttcttcttcctctttttattttctaaatttatgtgggggtgtttaatcctttttatcgatctcaagcgacctctttgtcaaacctgacaatcccaaatgatgaagaattctgacgtcgctatttattaaaaccaaaacaatctcttcttatatactttagtttcagacaggaacccaacaaaaaaatcaaaactcttttctcttttctttttttttgcaaaaaaaataaaaatggggaattgtcaagcggccgaagcagcgacggttttgattcatcacccggcggagaacaaggtggagaggatttactggtcagtgacagcgagtgacatcttgaaatccaatcctggtcattacgatgcgttggttgtgtcttctcattctaatattatcttt

SEQ ID NO: 108726 - DNA, 214 bp, Arabidopsis thaliana columbia
tttcccggtccgcccaacccttccgaaggacctttcaaaaccgaattgaattttataactgtttccgaagttgctgaacctttgtcgggccttaacaaagggaagggggggaaatcccagaaaattgttaatattcgcttaggaaatgaatcaacaagccgtggtcagtctttgaaggttgattgggaaaaagctgttgtccagttttttgaag

SEQ ID NO: 108727 - DNA, 232 bp, Arabidopsis thaliana columbia
ttggaaaaagatcttgatggagtacatacacatataatggggacaccaaacatattaggggggtctgattctatatctaataatcaatataataaatgatctaacttaaataattttgatatcatttttatgtagttacatatttattcatttaagacatgaattttaaaatatccagatttattcataattattattgttacttattatattaatttattttgattaattt

SEQ ID NO: 108728 - DNA, 375 bp, Arabidopsis thaliana columbia
gtttacattgttgaatgcttgaaagtatctttgttttaaccacactctctcttccctgttactcaccattttgtgtgtggggcctccgaaacccatttcgattaccacaatctgagctcataaatctggtttgggtttaggacaaatcagagaagaagatgatgtttggtttagagaatacgatgactttggagcatgaaaatctgaaggagaatcatgagactctgttgaaagattatgagtgtcttcaggagaggtttaagcatgctgaggaagcttatgtggttattatagtgcatcatgtgtacatagcttaggtgcttgtagtgagttacattactctttgctgaggaaagtattgtatgagagaagggt

SEQ ID NO: 108729 - DNA, 239 bp, Arabidopsis thaliana columbia
tcgcgactttctattagaccctaatctatccagactacctttttctcacagcttctttaattcgtctaggttctcgcatggtcgacttcccgcgggagattcaagcctgtttgggtgagaggaagttcagtaatcagcgaagctctcgtttgaaacgccgtgagggacgctgttcggtctgaacgtataaaatcaaagcgaggggtaatggactggatcgaacagtggagatgcaaact

SEQ ID NO: 108730 - DNA, 404 bp, Arabidopsis thaliana columbia
  unsure (1)..(404): unsure at all n locations
agagcgacccnttttgttactcatcttcacaggaaacattgttttttgtgaagtcctccaaatcgaatgcttactggaacaaagtacaaagtgttggtcaaaaaaatgaaaacacatgaaaaccattacagggcgtgcgatacgcttactaatgaagacaagaacatgccaacacccctaagttccgctttgttgtctcgacttaccaacaaaaacattgtggcacatattgtatctgcaagcatagcttgtgacattgttaaagcttcggcttacgcacatgagctctctcagtattgactcactgttggtcttaccaactatgctgcagcttactgtactggccttcttttggctcgtcgtgttctgaaaatgctggaaatggatgatgagtacgagggaaa

SEQ ID NO: 108731 - DNA, 422 bp, Arabidopsis thaliana columbia
  unsure (1)..(422): unsure at all n locations
gaaagctaatgagaggctaattcnaatcttttattttctgtctgaatcacgtatatctggaacgggtgtctttgttgacgcgcgcgaccatataattcgtcctcttgctttgatcatagctaaagagttgctcattgtacagacttttgattttgtcctatataaacatatttgcattgaatcattgtttctaatcttataaaaacttattcctagtagatattttcttgattttccatatcaataacctctttttacttcctattattcttatttttttcttttacttaattattttcctccgttcaggtggtttatacttatcaacaatctatttcttatgttgatagtttttttatttttttaattatttacttatttttttcttctattttatacctttgccaaatttatagtttttt

SEQ ID NO: 108732 - DNA, 214 bp, Arabidopsis thaliana columbia
  unsure (1)..(214): unsure at all n locations
gctccaaaattcttctccntctttctttcttttccttccaataaagccttatatcggccgattcttatcaacaactatgcggtcaaaacatcttcttatttattaacccatcaatattacttaaaacctttaactttttttattttttttttttctaattttactaaaanacaatcaactctataaccaaaatttttatccttcatattatttt

SEQ ID NO: 108733 - DNA, 334 bp, Arabidopsis thaliana columbia
caaaaagagtcacttccctgtcacatattatttcttgaaactttctcttcatcaaccacttcgtgttttttttattatccagcgtcctcccattaatccttactctccattctcaatcatactactcatatttcatccttactatcttcaacaccacattatacccttacctattcttctcttctctttcctccttctctagctctgttcacaactatccatccctcttgtctttagccttcatcttcttcactcttaccaatactctttacttaatctcataccttttcaatttcaccactcttctaccttttagcaacttaaaattttttct

SEQ ID NO: 108734 - DNA, 201 bp, Arabidopsis thaliana columbia
gcctgctttcgtattcaattctcatattcttctcaaccatggccctgctcttcggggatcgccttattttaccgtgggtacggccacaaatacatcttttaagccaatttctttcttcttcaactccatctcttctatattattattcctttacttatgatttttcttcttatttcttcccttcttatcacatatttattc

SEQ ID NO: 108735 - DNA, 286 bp, Arabidopsis thaliana columbia
  unsure (1)..(286): unsure at all n locations
aaatcttaaacgttttactttatttttttttactcaacctcaatggccncctcagcaagggctctatactaccctgggttgaccaataataccaacaatcttaccccctctacattttaagtccttgtaagcttctctctaacaattattattactgttgtcaatccaaacagcccatcaagcatcccattatacttatcttaccttgtcaatttacaaatttccatacttttactaatcacctttctaccttatcttataatttcttacattctacatattttac

SEQ ID NO: 108736 - DNA, 496 bp, Arabidopsis thaliana columbia
  unsure (1)..(496): unsure at all n locations
aatcaataatgccataaatgagaaattttattttaaaatgaagggaatttntttatggactgagtattttttagtgggtacggactatattaanacaacatttcaagcattttcgattccaaggctttgattgcatttatctacaattttgttaattttttttcattttactacaactaatttggttacagttctcttttcttttaccttatcatcacattttaaattcctatatttacactcttctatagtttttattttatttattttttacattttttttaataatataaaatttgtgttgggagatactcgtatttttttattttattattaaactttattatcaatattttttttcatatatttttttatattatttctactttatttatttattaatcttttatataattattctttatttatctatattatttatatttataatcttatcacataatattatatctttctcttaatatttaattaataa

SEQ ID NO: 108737 - DNA, 414 bp, Arabidopsis thaliana columbia
atctcttatctatctctcactctccacttttttatctaccgacgattcaacaaatcatacgggaagacaaatcaaattcttgtttggtccttatttactccttttacagattatctcaatcttacagagcaccatggatcgttgtatttattgctgctccgacattactatcttcttcttcttcttcttcctcctcaattcatcctttttaaaatctgttcatcacaacataactggttcgtttcatattaactcaaactcctttctctttttcttctcctattattttttttacacttaactcgtctggcttttttataattctcttcttttccaaactctcttaaaacttcaatttttcttacaatattacttttttcttcctttcaattttacacatttactttacctttt

SEQ ID NO: 108738 - DNA, 393 bp, Arabidopsis thaliana columbia
gaactacaaccggatcatggacaaacacattcaagaaaagatgagccctgccggggggaaaagaggtgtagcaatcgtcgattttgttcttagactcatcgcagcaatcacagctatggctgctgcagcaaagatggcgacaacggaagagactcttcctttcttcactcagttcttgcagttccaagctgactacactgatctaccaactatgtcatcttttgtgatagtaaactcaatcgtgggtggctacctaaccctctcattgcctttttctatagtctgtatcctccgccccctcgcggagccgcctaggctattcctgatcttatgtgatacggtgatgatgggccttacccttgtggctgcattcgctttcgcagccatagttta

SEQ ID NO: 108739 - DNA, 430 bp, Arabidopsis thaliana columbia
atctttcataccttcgtccacagttctctttttcctaaatttccaatcaaccttgagtgcgtgatattaccactctgtcggggaataatctaaatgattttgtagatagtcagatgaagtactggcgtcaaatagcctaatctcttggtttcgatatcgatgatgttccagtaccaagaggaaccagagctgtactgtggtctgtcgactgtaaacacccacattttaagcttaaggcttttttacccaacatttattctattgtttgtcttaacctttacaatttgctcatggtgacaaacttcgagcaccttgagttactaaaaaacaacgagttaatgaactgtgtgtgctcttactatataacttctgttgtagtatatctttctatccagctacatataactttttatatatcatgtgatgaaaa

SEQ ID NO: 108740 - DNA, 448 bp, Arabidopsis thaliana columbia
  unsure (1)..(448): unsure at all n locations
gaaaacccggcccgacccacgcgtacagtaagatacactnaatcaaaanatctagtcttttcggcgacatcttcctctncttttctgcttaattcttaaacttgtcgcgcaccatcctttcaaatactctccanaactctcttctctctccttatcctctcaaaaggctgctgctttcgatttttcctcatcttctttcactctcaataaacaaatccttaattatttttttttcaatgctttatctatcaaaccatatgcttatgttttatgtcttaatatctcctataacatctctcatcttattatattaattctcttatatgttcttgttcttttttaacaataattttattttataattttctatatttttttttatttcttattctttttattatttattttttaatttattcttttttttttcctattctttttttttttt

SEQ ID NO: 108741 - DNA, 273 bp, Arabidopsis thaliana columbia
gtcggatcattaaccttctatcatcaccatttttttttacaaatatcgaccttcaatctgttgcaactcctcattctacgcgacaaacttttactcttcattctccaacaacatcttttccctcaccatcacataaagaagaccttaacttttttatgactatcatttttatctacaatcgttcttatttcaccatttaaataatccttttctataattgatctttctttattaaaaaattttttatattttttatttaatatcacccattta

SEQ ID NO: 108742 - DNA, 202 bp, Arabidopsis thaliana columbia
ccggggcgaccgcacgcgtacgcgtgtacgaatttgagcctgagtcaattcctttttttttttacttccggttcttccgttgatggtaaagtttttcagtgggcgcttttatattcatgtttgtactaagagtacgtctgtctagtttgggattgtactaaatgttgttgttgttagatttatacttttttattgatttttt

SEQ ID NO: 108743 - DNA, 410 bp, Arabidopsis thaliana columbia
gagcaatctaagaaaagagggatttttttttttttgttgttcttccatttaaagtgcgggaatttacgagtaagggggctcatcatctatttctatctcttccgtctgcttattcttctactcccactaatcttaacatcatcgacttgtatgtcgccctttctgtcttcaccactctcattcacttttgattatatggcttcggaggcatcatttccatttaactctttcttatctgtacttctctcttgtatctttacagcatttcttttcttttaccttcttattcaagtgatcataagcatacattaaatttaactctctatctcctttattaactttttcttatttttttctcttcttcttatttcttcatttttcgattaattacttccttttttataattttt

SEQ ID NO: 108744 - DNA, 187 bp, Arabidopsis thaliana columbia
aaacccggcccgacccacgcgtccgactctttcactctctctttacaattttttttttaccattaacattaaaccctccagctggttatttattcaatctgggtcctacaaatcatcaaactttctttccaacccaaacattatctacacaatttctcgcttctctttgcttaccaaacccacaatc

SEQ ID NO: 108745 - DNA, 219 bp, Arabidopsis thaliana columbia
attaattttccctttactctcttttttttttttcataaaaaacaaccacacattgggtggtaacaaaaacaactgtgccgcacaaataaaaaatccttaatatacacatatttttttacatatacttccttatacttatatttctctatccatataccaattccactcttacctcaccttaaacatataatccactttttacaaaacctaactttacta

SEQ ID NO: 108746 - DNA, 242 bp, Arabidopsis thaliana columbia
  unsure (1)..(242): unsure at all n locations
ggaaancccggcccgacccacgcgaccgnnnaaaaacaaganaatctctaagtttaggtttntgaggaaagaaaaattctattggtccgttctccaataaagattggtaggattttaaacctccttcaatcttcactcacacgaatgtcgtaaagacactttttttcataactcagttttccaaaattgcctcatatctctttaaacacatattttttgatgtttcttttgctcatcttcaa

SEQ ID NO: 108747 - DNA, 429 bp, Arabidopsis thaliana columbia
cgatcgcgatccatcttcaattccatcttttatcttcaataccaacttgaaataaggtcgcagaaggctacgcaaggggggtatacttctatccaccactcgaaaaccaagtattgaaagcatggaacgtcttcgctcgccgtcaaatcagtaccaaattgatcaacactgagtctcgtccacacataacactcttctccacctccttcttcgattcaacgagactcgaatccgtcatcaaaaacttcgtatccaagcaagaaccaatctcgatctcgttctctactatcgggagcttctgtagcgacaacaacgtactgtttctatcttcgactccgtctctatcgcttcttcagttgcagactcagttatgtgatatgttgaaaaaagaatctgttgacattggtgatgagtatcgtgttgattctt

SEQ ID NO: 108748 - DNA, 244 bp, Arabidopsis thaliana columbia
gttttattttaactcatatacataacaatttttctacacattcttttcacaaacatctctgcgagttataacaataaccgggaacttactacaatttaacaattcaatctcttatctcctctttacttctcatcacattatcaactattcatcttttcatccaacttttcttctaactacctttatatactttacctctttttttttctctatctcaaacaaattatttctttttttttaatat

SEQ ID NO: 108749 - DNA, 420 bp, Arabidopsis thaliana columbia
gacaaaatttaatgcgtaacccccaagtctttctttcttctattcatcgccaccctcttggccggaaacttcaccgtgtgggtacgcaacagcattttaccaaacagcgacttcttgctatgaccaaaaccatcagacatgaaaagcacagaaatactaaacaaactagcaataccaaactgcgaagtcacaatattcgtcgaatacattaaatcatgacataaacaaagacacatgcttctcgttgttcccgtccctaaattacctgtaagacttgtgaactaaacatccatcaaacaaagacttaaagtcgttaaaagacattattactcactcacttttagtgctgctagaacttgtgcacaagacgagagactttacatatctgtagcacctgactccggtgtgattccgattcag

SEQ ID NO: 108750 - DNA, 292 bp, Arabidopsis thaliana columbia
atctatcttctatttactctcttttacatttatcttcaaaaagtatcctacattggatgggatcaaatacaactgctggtcaaaaatcaaaaatcacttatataaacattatcttcttcagattctactttatgcttctatttctctatccttgtaccagtttcactttcaccacaacagaatcttatgaatcacttgatccatattcaaacattactataaaattcccaattatcagctggactgttcatagttatctttctgttgtaacaatttctaatctccaacaatt

SEQ ID NO: 108751 - DNA, 314 bp, Arabidopsis thaliana columbia
aaacccggcccgacccacgcgtccgctaaaatatggtgcacgtttgctacttcctatactatggaaagaccttcaagggagccggtttccttacgagagtgagcgtctttattctgaattgaagctggttggtgagtatggtctgcgtaacaagctttttgctctttagagagctttactttttttttcttttttcccaatttcttctatgttttcttttttctttttttgaaatatttttcaaatttgttctattttatctcacttctttcatttttttctatttttctcttttttcctttatttttttattt

SEQ ID NO: 108752 - DNA, 357 bp, Arabidopsis thaliana columbia
gaccaaaaattacttaacaaccatcgcctctttctttttaaaaactatcctctcaaattcgccggctctttccattcaccaggtccctaataaatcacacatcctcaacgtctgctccttctccgtctctttgatcgaataaagtctcttactctatcttcaagcttttctttaccgatcccgatggatacaagcacgacatcaattgactctataaccaaactctccttctttcacacactcacacttgtctgattgatccatcattccatatatagtatcacatcaaagcttgctcatctgagtgcgaaatttatatctcttttcaatttcttcctaagctccctcttcgttctt

SEQ ID NO: 108753 - DNA, 227 bp, Arabidopsis thaliana columbia
cactataaatcaactcatactctatctttttcctcaattactacaaccaaaaattgagcgttatacttataagtgggcggggccttacaaatatctctttataaccacaaaaacttttacactcttccctaacatctaacttaaatcataaccatataacctaactatttcttactatttcctcacattaacatctccaacttatttcagcctatttttaattctaa

SEQ ID NO: 108754 - DNA, 409 bp, Arabidopsis thaliana columbia
gattaatcttacgattcatctcacccactttttcttgtcatgataacgaccccactctggatgtgaggactgaagcaaagggatgattctataattgaaagaccaaacgctcatcaaaatcaatctaaatcgttcgtacttatcttctcttagatttccgacatagattcttacttacaagctctgacaaaacccgatcacaactcgccgagaagaggacactatatgaatgttagaatataggagaataaggaacacaatggattgatattcttcaagagcaaattacaacaccttgttgagagcactagaattcttatctttattgttcgtagctcctttttctatttctactgttacatttttgtttaatctttcctttcactattaatttttcatttaaactttt

SEQ ID NO: 108755 - DNA, 262 bp, Arabidopsis thaliana columbia
  unsure (1)..(262): unsure at all n locations
cggcccggcccacgcgaccgaaagcttcttccttcttttttccttttcgttataagagacatacggnaatcaatgttcgtaattctttcaaacaccgccggacacaataacaacaaggttctccagaataaggtcactattatcctccctcctctctcccttaagcttaatgtgttaagagcatattctgaaaacaaaccaaggtcgttaggatttcttatggactattttttttcttttttgattcttaaagcactatcac

SEQ ID NO: 108756 - DNA, 275 bp, Arabidopsis thaliana columbia
gacccacgcgtcccaaaattttttacagaaaacttttagtctaaccaaaaaaatccaactgggtggattctaagagagaccggggccctactacatcacacacatacaacctaaacaaatgtaccaatacagcacttattactacactagtattcccgtctcaaaatctatctctcctaacaccttcacattggcaacactaacaagtcaccttacttcatctaaataaaccctactagaaactaacctgtcataaatactcctgaacttcccat

SEQ ID NO: 108757 - DNA, 301 bp, Arabidopsis thaliana columbia
aaacacccccattttcctcacacaaaacctttttcttcaactacacagttgcataacgaggcgcggtctcacaccagctcgtaccgcaacaacaaaccttgtctactctactatcgattgctctaaacctctttatgataagatcattgagattgctcccaaagacactattttaaatgatcttattatatgtttccagacacagctagagcctttggtcactcttcttttatatctcgcgcttacctcaccgtcattcttccttttctgatttttatttctaacacctgatatttttttt

SEQ ID NO: 108758 - DNA, 251 bp, Arabidopsis thaliana columbia
  unsure (1)..(251): unsure at all n locations
cgcgnccgacggtggtcacaggcctcattactgtggttatagtcctcaatacggnggacctggtaacgagtgtcagaatcagaatgtgggacggactaatcagagtcagtactacactccgcagcagcagcaacaaccgtaaccaccacgaagctcgaatcaaagccctaatcagatgaatgaggtagctcctcctcctagtgttgaagaggtgatgaggtaatgttagcgtatgctatatatagatgcta

SEQ ID NO: 108759 - DNA, 370 bp, Arabidopsis thaliana columbia
gggcggaccaacgcgtccgaacacgtgtaaggtgggaactgtctcattgtggatactaaaagcggcgtcccaacttctggtggaggtgccacgtggacggcggcagataacaaggcattcgagaatgctttggcggtttacgacgacaacactcctgatcggtggcagaaggtggctgcggtgattcctgggaagacagtgagtgacgtaattagacagtataacgatttggaagctgatgtcagcagcatcgaggccggtgtaattccggtccccggttacatcacctcgccgcctttcactctagattgggccggcggcggtggcggatttaactgttttaaacctggtcatcatgttttgttttaaa

SEQ ID NO: 108760 - DNA, 287 bp, Arabidopsis thaliana columbia
gcgtacggaagaaatggcttgcaccctatatttccttttcctttacgaaagattcagctgcaaaaccgtcgaactcatacgcgaatgggaagaacaatccatcacctaagcaatcgcctatgaagcttccatggacatctatggtgctcctcctgccgcgaaacgtatcgccttctctttctctgaaaatccagacatacctattgctctagctttctagagaccaacctactatctttttatttccttgaaattcttcttacttgaacttgatacatcctcttact

SEQ ID NO: 108761 - DNA, 469 bp, Arabidopsis thaliana columbia
gcgtccgctcgttttgataaaaatctctgaatcttttctatctctcttctcatcaaaccatggggccgtacaaatatcgtccgggtaggtcttacaactctcccttcttcaccaccaactctggtgctcctgtatggaacaacaactcctccatgaccgttggacccaaaggtcctatccttcttgaggattaccatctcgtttagaagcttgccaatttctacagggaacggattccacagccttttgttcattccctaagagccagtcctaaaggtttcttttttgtcacttattatgggtgtgggccgggcttgagctgacttatctccaaacctccctttgttccatacttctttttcattttaccctttctttccaccccttttcccattattcctttcaaaatccccttaatactctttcattaaactcctttctgtgttttatttcatcctattttctatca

SEQ ID NO: 108762 - DNA, 438 bp, Arabidopsis thaliana columbia
  unsure (1)..(438): unsure at all n locations
caaaatcttggtgagagaccaatatttcttctctcgctttccaaaatcctaactagatctggcactaatagatactggggcgctactacaacaagtatctctgcctctccttctttaccgaaacaattctgttcaagacacttctttgccgtcgctgactcttcctcctctagctccgccgctcttggaagccaatcgagttcttctgctccaccttatgagaacaaacgagggtctaagtggtcacaattgttgttgttcttgcctggagcgattaccttttgtcttgtgtcatggcagatcgtcaggatagaggaaaagttcaaaacactgttttatcaacatcaacttttgaacattgaaccaataaatctaaatatagaccattctttngataagaatcttaattctttataatttttaccgttttattttcaa

SEQ ID NO: 108763 - DNA, 406 bp, Arabidopsis thaliana columbia
acatttccaatttataaaagttaattcttttctgcatctttctctatcccctggtggtgatttaagaagaggggggattctaaacatattttgctgaatttcaaactttgtggagctcatataggttcaagctaacaaggctcccttacactgcccatgactttgtggctctacgtggccatctcaagcaaggctattcttcgaactatatgtctaataatcttttgagaactctcaaaagccatcaatccaactgtactttctctctcactttcttagcgttttacccttgtttaggtgaccatgatggttaaactatttaacaccatctattttttctgtttggcattgcttttacactcacacatctcctaattatcctttttcttatctttcctattatcct

SEQ ID NO: 108764 - DNA, 268 bp, Arabidopsis thaliana columbia
acgagaaatatcaagactaagaaacaatattattttataatcattgggagagccatcatggcggggagagcaaacgtaccgtggggggtcataaattctcctctcgttgatggtttgaagattcataacaaaaactgtgctgttaagagttttcgtgccctttgttactttttaaatcttgtttctgttcccagagttcaaggatttaagtctcaactctttatttatttacccatttctcgaagtttccttacctagatattattct

SEQ ID NO: 108765 - DNA, 295 bp, Arabidopsis thaliana columbia
  unsure (1)..(295): unsure at all n locations
ccctactcactcttctccnagtatttaacatcatagacacattcggttcccaaagccgggattctacctatcttggtactcatctataatacttctctcgaaactcctgcttctgaaagttatcttcttaatggaaacttctaagagtcaccaaagaaaacctacatgaaaaaaacagttctactaagcaaaaacacctttcccgaatgggaaaccacccgtttcgtctagtacattgcctgctgtccttaaccattgaagcatttacattaccattggcttatttaaatccacg

SEQ ID NO: 108766 - DNA, 316 bp, Arabidopsis thaliana columbia
atagaaacaaaccttttaattgttatgattttttttaccaacctatacataataccatgggcaggacctcatgttgagcgggggccgcgttaaccaaaggattacacctcataacactctctgatgacttatatgtaaagcatttacatacctatatctgatcctaacagaactgaaacactactcttaccatggtgataacctactcttacccttcgaagtaagactcttctataatccggatctagctaccttatttgcacggtttgctttgtcgagcacttttttaagactttgcaagaacgaagataaaaca

SEQ ID NO: 108767 - DNA, 409 bp, Arabidopsis thaliana columbia
attttcgtgtccctcctcctcctcctcctttttattaagacaaatattatgagtttctcgttgtggttttagtgatcggggggacaagctataaaaatcgtcaatcgtgatcggattgatttgataataatggtgaatgagacggagttttactatgtcctcggctgttagccccaccgttactgaggcttgaattaagaaagcttattacatcattgcacgcctagtgcattcagataaaaaccctaatgatcctcatgctgctcataatttccaggtattgttagaagcctaccaagtgctaagtgatccaatgcaacttcattcctattacacattttgtaagttaggtattttcaactgagatcattaatctctccgttttattttcttttcttttttgtgattt

SEQ ID NO: 108768 - DNA, 467 bp, Arabidopsis thaliana columbia
  unsure (1)..(467): unsure at all n locations
cggaannncccgggtcggacccgacgcgtccgggataatgtaacccgtttagctnctctctcttttctttacccttgcataaatcttacggtggccatgagcttggcttcgattccctcgtcgtcaccagtggcttcaccgtacttccgctgccgtacttacatcttctccttctcttcctcacctctctgtttatatttcccgcgcggtgactctacttctctcaggccacgagttcgcgccttgcgaacggaatctgacggtgctaaaatcggtaactcggagtcttacggctccgaattgcttcgtcggcctcgtattgcgtcggaggaaagctccgaagaagaggaggaagaggaagaagagaacagcgaaggtgatgagttcgtcgattgggaagataaaatccttgaggttactgttcctcttgttggcttcgtcagaatgattcttcactccggaaaata

SEQ ID NO: 108769 - DNA, 323 bp, Arabidopsis thaliana columbia
atctcttctttcttctctctcaccttaattattggattcgttctgatcaactttgaacagaatttacaacaaatcgcggagggaaatctaacccttccttcttcctcaggaagatttaagattcttgtttataaggatattctgaagaatctttttaaattttttttaaatgtttcatttgatcccacttttctgtataaagtgaaatatatacaattaaaattatttcatagtataactacttctcatttttttcatctacagagccttatcattttttttactcatttttattctttgtgttgataatcaactttaatttt

SEQ ID NO: 108770 - DNA, 104 bp, Arabidopsis thaliana columbia
ccggccctcaatataagaaaacttgacaaagaataaacacattgtcttttgctcataaaattttgagagactcctaatcaattgcggtgtatatagtttgtttt

SEQ ID NO: 108771 - DNA, 442 bp, Arabidopsis thaliana columbia
  unsure (1)..(442): unsure at all n locations
accacgcgtccgcctagtttatcgaccaaacgtcgccgtttttgattctccggatggtgtggaggttcgaggactngacgaccaaatcttcgccagagattttgacgagagaagctcttatctttgtggctgagttacagagagagtttcgtggccatgtgaagtatgccatggagtgcctgatagaggcaagacggcgttataacttccggtgccgttcctgggtttgatccttccactaagttcattagagacagttattggtgctgtgtcttcgtcctttctgctttatttttattctaatgttatgatctaccgttcttttctttatgtatttattattatttcttttaatttttgatcttaatattttattgctgtatatcagttatttttttctttaagattgtatatattttttatgagttattattactttatt

SEQ ID NO: 108772 - DNA, 429 bp, Arabidopsis thaliana columbia
accggaccggaatcccggggcggcccaccccgtccgggaggcaaaaccaaaatggaaactactcatttctcttcctcttcttcttccgagcgcaggatcggtgctctgctccgtcatctcaattccggctcagattcggacaacctgagctctctttatgcatctccgacatcgggaggcaccggtggttctgttttctctcatcttgttcaagctccagaggatcctattcttggggtgacagttgcatacaacaaagatcctagcccagttaagctgaatttaggagttggtgcttaccgaactgaggagggaaaacctttggttcttaatgttgtgaggaaagctgagcagcagcttatcaatgacagaacaagaatcaaggagtatcttcccattgttggaatggttgagttcaacaagttaagc

SEQ ID NO: 108773 - DNA, 321 bp, Arabidopsis thaliana columbia
  unsure (1)..(321): unsure at all n locations
ggccgtctcatcattccaatgccctattattttctcctcctcctcaatctccaccttgcaatgccgttctgatccagatggcctcacttctcccatcngtggatcatctctccctcgtgtccatgcctacgccttgatttcttcctcattcacctgagactctttattatcctccaatatcttaagatttccttctaatttcgtacgtcatctgtgcattaaatcccttttaaactgaagcaacatctgagttacacatatcattgcggctatatttgttcaacaacccattctccgtgatacccttctcttttcctttat

SEQ ID NO: 108774 - DNA, 318 bp, Arabidopsis thaliana columbia
  unsure (1)..(318): unsure at all n locations
aaaaaccgggccggccgaaggcgtccgaatggcggaggctgaaatatctcaaattgttgttcaacaggaagaatgagcanncnttcnagtataaccgtgtacgtcggagagcttcctggcnatatccgtgagagagaggtcgaagatttgttcagtaagtatggacctgttgttcaaattgatttgaaggttcctccaaggcctcctggttatgcattcgttgagtttgatgatgctcgggatgcttaagatgctattcatggtcgtgatggctatgactttgatgggcatcgtttgatggtggaattggctcatgtt

SEQ ID NO: 108775 - DNA, 297 bp, Arabidopsis thaliana columbia
  unsure (1)..(297): unsure at all n locations
agaagatgtctcaatcaatctcctccagctcattttcagaagaagttgttantntanatttgatccaatccaagactctgggcgagtctctncatcaatatcttgacgttaggactcatgactagtttatgagaggccattgttaggcaactaatatcgtcaacattccctacatgctcaacacaccttaatgtagagtgaataatcaatagttctttgagcaagtatctttctcttctaaacccagctgatgatattcttgtgggttgtcattatttatccagtttcttaaaagcc

SEQ ID NO: 108776 - DNA, 320 bp, Arabidopsis thaliana columbia
  unsure (1)..(320): unsure at all n locations
aaacccgagcaaannccncnccggccgacgnnncnccaccgngancagaanggcagccncnnccncaccgccnccnccaaccaccgccaccncgaagnccaagaagggaacgaagaaagaganncaagagncgcnncnaaccccgaggnncnacacgacggacnncgaggaaanggaacagcnnnncaacacggagancaacaagaaccnnaacgaagcagagnncgaggcncngcnncaagagnncaagaccgannacaaccagacacannncgngaggaacaaggagnnnaaagaagcngcagacaaaangcaaggac

SEQ ID NO: 108777 - DNA, 270 bp, Arabidopsis thaliana columbia
  unsure (1)..(270): unsure at all n locations
ctttttaaaaacttctactcattgncatcaatcaatcgccggaaaattanaatagaatgttgcttctccngaatctgctgttaaatacaatctaatatttaantattccacctctttcaagcttataaaatccattttttgctaataatctcattatcttttttttttttttcacttcattttattaataaattatttttttttatcaaaatttttttttataaatatatttcttttctatttcctaaattttttttccatatttttttt

SEQ ID NO: 108778 - DNA, 341 bp, Arabidopsis thaliana columbia
acaaaacatctctaattcaccaattttattttcctttccttaataaaaccatacagttgttcatcttccattgatgtttcccccaacacttccaccctcattatcctatttaacctgtatcaattctaattccttctttttatcctcatttccatacatattctataccttcattccattctaccaaccaacctcttacccatttcactactttactcatccaatctttcttttatattctgcaagttcgtaccaattctttccccttcaactaattatcatcctactcaagaatgtctaattacatcatcacttactttacccacacttttctgatcctc

SEQ ID NO: 108779 - DNA, 141 bp, Arabidopsis thaliana columbia
cgcgtccgaagaacacaaactctgcttcaaagttgtattttttaatgaaagtcaccctgacaatactgatgactttatatacctaagggctgaacaccacccaagcattgtacacatctccaatgcccatgaagttaaaac

SEQ ID NO: 108780 - DNA, 231 bp, Arabidopsis thaliana columbia
cccacgcgtcgacaacagagggtgacactgcgactgtcttaccaacgggtgggacgccatggctaacccgctaccaactttggtgggcagggacgtgctgattttagcgggactggcggactggtcatcctataccagcgtttgcgcctccgtttggctggtttggctgggtgggttacaaaaagatggagaacttgacttactgactgttggtcttgggtttgttaaccg

SEQ ID NO: 108781 - DNA, 404 bp, Arabidopsis thaliana columbia
attactgccacagtcgaggtgtctaccacagagatctcaagcctgaaaatctgatccttggcggaaatggggttttgaaagtctctgattttgggttaagcgccttctcacgactagttcgggaagatggtttgcttcatacagcttgtggaacgccaaactacgttgcccctgaggttttgtcggacaaaggctatgacggtgcagcagcagatgtctggtcttgtggtgtcattctctttgtgcttatggctggttacttgccttttgatgagccgaatctcatgacattatacaaacgtatatgcaaggctgagtttagctgcccaccatggttctcgcatggtgccaagagagtcatcaagcgtattctcgtacccaaccctattaccagaataagtatt

SEQ ID NO: 108782 - DNA, 379 bp, Arabidopsis thaliana columbia
  unsure (1)..(379): unsure at all n locations
cggactccttttctgacccgtggtctttattagtggatggatgtcttatanaatgaagatatcattctatgtttctgtggtccttatccctttttccaaatcttaaagttttccacattttatcatctgtttcctctccttaattatttgaagacactcaatttctatttgatctgtgactataatttttatttctgtttcatacaaaattatattttcctttctctttcccctttgattttcaataatattaatccttatgatcaaaatatgtaatctacatcttatctggtcaagctcttcattttcattattttatatgacacatattaacaactacttcattagttttttttcatttttcgatatttttttttta

SEQ ID NO: 108783 - DNA, 384 bp, Arabidopsis thaliana columbia
  unsure (1)..(384): unsure at all n locations
gcaaaacggccagatnncaccaattttattttcctcnccttaataaaaccctacagttggtcgcccgccagggatgggtgccccaacgtccccgacctcagtatccgatttaaccaggattgagactaatcccaaacactcgtgctcattgccatcggattctaataccggcgtcacatcgaccagccagactcttacgcatatgactgccttactgattcaatcgctctttcagattctggaagctgagaactaagtctgtccactacaacgaatcagcatccagcgcaagaatgtctattgcatcatcactgactttagccacaccatgcggctccttagatcttcctaaagcattagccagcagctctgagctacctatca

SEQ ID NO: 108784 - DNA, 432 bp, Arabidopsis thaliana columbia
  unsure (1)..(432): unsure at all n locations
acgttctcttaaccggacggtttttgagagttcgccgncgngatggctcctgattcgttaaagaagaactacaggtgctcacgatctctaaagcagttctacggcggtggtcctttcattgtttcatctgatggttctttcatcgcctgcgcctgtggtgacgtcattaacatcgttgattctacggattcatcagtgaaatccacgattgaaggcgagtcggatacgctcactgctttagctcttagtcctgatgataagctccttttctctgctggacatagtagacaaatccgagtttgggatttggaaaccttgaaatgcattcgctcttggaagggacacgaaggacctgtgatgggaatggcttgccacgcatctggaggattgctagctactgctggagctgataggaaagttcttggttgggat

SEQ ID NO: 108785 - DNA, 274 bp, Arabidopsis thaliana columbia
  unsure (1)..(274): unsure at all n locations
gcgacgaggncgaanacgancnncttacctcngncgacagnncngaannaanancagggggcanngncnnccgancgcgcggncncncnnnggcnncnnccaancnaannncagngannnacccgnnaagaanncaccnnnngagaggcccagnnnngaaananggcnggccaaaacgcgcgnnngaangnggnncccacngnnaccangcncggggnnangaaagcncgncnngnnggcgccacaagaggncangcccnccncaagaaaaaga

SEQ ID NO: 108786 - DNA, 190 bp, Arabidopsis thaliana columbia
  unsure (1)..(190): unsure at all n locations
cggacgcgngggccaccacccccaaatactccaaggccaggnacaacagcaaacgagcggggngacaccaagggngaaagcaagaanagcgngcccacgggncngaccanccaaagaganaccagccncaaaaccnccagnggnggagncaanganaagaacagcacaaccagcccgggaggcaccagca

SEQ ID NO: 108787 - DNA, 297 bp, Arabidopsis thaliana columbia
  unsure (1)..(297): unsure at all n locations
gggngagccaancccttttatcaagcgacangcngcggcngagagcggggggaacccngagggganggcggaagngccanggnanggaancgaacaagaanacacnnngnngcagaaggangngaacnggccncnnggacggcccannggnggcnncccnggcccncagggaccanacnacngcagnannggagcngacaaancnnnnggaagagacanngnngangcncacnacaaagccncnnngnaggcnggaaacaacancagngggancaaaggagaaggcaagccgggaca

SEQ ID NO: 108788 - DNA, 370 bp, Arabidopsis thaliana columbia
gatgcaaggcaacgttttaaagcatttatttttggttactgaaatgagcaagctggttgaggcatgtaaactgatggcggtttcacaaacagagcatgacttggcttgcaatggtggccaaggagctgcatatgaggcagttacggatctcttaaataatgaaagtgtgtttgacatcgaccggctgcgttttggaatgctatatgctttgcgctatgagaaagaaaattctgtttagttgatgcaattgttcaacaaatttgtctttaccggactccaagtactaaccagggcttgttgcaattttattttgatacatagcctatatttattatctcactggttatttattttgaaacttatttctttt

SEQ ID NO: 108789 - DNA, 305 bp, Arabidopsis thaliana columbia
ggccaacccgggcgaccgactcgtcttttcattctttgattctcatcttctcaactatttgcttgaggcaaatcgcgagagtgggcgcaacctgctacatgcacacctggaaaaggatttgctgtgtgagtcatggaccatgaaagctttgcagcatcaactagaacgttggaccaacgctacctcgggctttttcacgccctgggctttcagcctaggggtatctttcaaagacttgaccaaagagtcgaggtagctttcgtgtatctgagaaggagagtcttccggataagtgcagggaccgt

SEQ ID NO: 108790 - DNA, 432 bp, Arabidopsis thaliana columbia
tgcttcttatttggcaaaccaatatatttttcgccctttgctttccccttatatggggggcagtggagaccatttgcttgctagctgttctcaccaagatattggaaggcggttgggttccgctagtattcgccactttcttcctcactgtaatgtacatttggaactacggaagtgtactcaagtaccaaagcgaggtcagggaaagaatctccatggattttatgcgtgagctcggttcaactcttgggaccattcgaatccctgggattggactcctttataacgagcttgtccaaggtataccttccatttttggacagttcttgctcactcttcctgcgattcactcaacaatcatctttgtctgcatcaaatatgttcctgtcccggttgttcctcaagaagagaggttcctcttcagacgggttt

SEQ ID NO: 108791 - DNA, 289 bp, Arabidopsis thaliana columbia
accagcttcacatcttcttctccgttttgtacttctctcgtttctagatctcctacgatcgttatatcaaatccgagcggttaattctctcaatcacacaaaaacctaaaaccaaaaaaaaaccatgtcttttgagaagatcaaggtggcaaatcccatcttctagattgatggttatcaaattaccactgttatttttaagtctattaattttaatcttattactcccttttgtgctaatcatttttatttatctttaatcttttattatttctaacctttatttttt

SEQ ID NO: 108792 - DNA, 387 bp, Arabidopsis thaliana columbia
  unsure (1)..(387): unsure at all n locations
ggaaanccggggcgaccgcacgcgtccggcttatcagccttggatttggactaccgtttaaccatgaactcgattttgccccggagatgtgtgaaaacagaccgtgttgggccgttcacacataggtaccgaactccttaccgatcatcaggcagcaccgaaccattctggtactcgataaagagaggaccggcttacataatcgtgctagcttcatattcagcatatggaaaatacacaccacagtaccaatggctcgaagaggagttcccaaaggttaacagaacggaaactccgtggttgattgttctgatgcattcaccatggtgcaacagctatgattaccattacatggaatgtgaaacaatgatgttaatgtatgaggct

SEQ ID NO: 108793 - DNA, 364 bp, Arabidopsis thaliana columbia
  unsure (1)..(364): unsure at all n locations
aaaaccgggccggccgacgcgnccggncctngggacaaccatcggcgacagggtttattctagagtcttcttcttcttcggcggggggttttccccggcttgaggagggggtctatccttcggaaagttgttcagcaagctctttgcaaagaaagagatgcgtatcctcatggtgggtctcgatgcagctggtaagactacgatcttgtacaagctcaagcttggagagatcgtgactacgattccaaccattggtttcaatgtggagactgtggaatacaagaacattagctttaccgtgtgggatgtctggggtcaagacaagaggcgggcattgtggaatcacttctttcagaacactcat

SEQ ID NO: 108794 - DNA, 356 bp, Arabidopsis thaliana columbia
  unsure (1)..(356): unsure at all n locations
aatctataatgnnatctattgtcgaacgtgatcattgtggccaagctaacctctacatcattcgcaatacaaaagaaacttgaatctatgattctgttcattgatgaacaaaacataagtgatgtaataaaactcttagtaagatagacaagaatcacagtacttattcggcagcctcttccatcacatgttccgcggtgattggagccacggggtaataatggtaatgtagctcgccaacgtcgtctccagagagtttgcgccatccttgctgcccaacgttttacacgctagcaactccaccactagcttcatcacggaatgtagcatggtagattgatctccttgcttactct

SEQ ID NO: 108795 - DNA, 389 bp, Arabidopsis thaliana columbia
  unsure (1)..(389): unsure at all n locations
aatcattttgaancanaaatcgattttctttatatggctcttgttcaatccanaacttgtggccaccttaacactccggtgtggccnattctatcctccctccatgctccgtcttctctctttatccggagggaaatccgaccggtatccgtgcctttctcctccttcaccttctgaaacttgcccttctcgccgttgactcttcctctaaagcttttctgtcctctccactccttcaagtttgacagagaagattatcttttgaagaaattgtcagctcaataacttcaagaactggtgaaaggagatatttatgttccacttattgtttatttttatgctacatgtttgttgaccttgaatctatattttccctttaaccataaaat

SEQ ID NO: 108796 - DNA, 413 bp, Arabidopsis thaliana columbia
  unsure (1)..(413): unsure at all n locations
gcgtccggncagaggtttacgctgccgttccagtgaatcccttcgatgccttccccaatgctagcaattgttactagtccgtggcttgcgagcgttgctaaaagtttccctggaaaggccgttggagtacaattcggtggctctgctgctgcttcttcagctgttgaagcttatgcacctgcagcttcagctgatgatgatgatgtcttggatctctttggtttcgatacccttattttttttttagctttatcttttatggtttcttctataatatttctcatatttttttctttttttctgtttttttgttgggtggggttttttttatctttttctaattttttctttttttatacctatcttattttttttcctccacttatttcttcttctctctacaactttttttt

SEQ ID NO: 108797 - DNA, 301 bp, Arabidopsis thaliana columbia
gccgccggaacccgtcgacccacctcgcaccattgaggtaacttatacacagatcttttgaaattggattcatctagggcacttgttatgggtgtacaataccaaactctgtgccttgttcttgttaggcttttgcttttgactgaagttaaaaaagttaccaaacaaactactaaatcttagaggatgaaaagtacaaacccacctgatggaagtgttaaatcatttaaacccctgtcaagtagcgttttcggtaccacccaaaacttttaggtctattgggccgacatttgactcctaa

SEQ ID NO: 108798 - DNA, 234 bp, Arabidopsis thaliana columbia
ccggaaggaagcccgactcgacccacccaatcgctatctatcgactactgctctctctttgaactcggagactgaagaccgaaaccaaggtagtccccatgaaaccgtggggtggttctctcgaacaatctataccaatctccgacgatctgatcgggatgagtaacatcgacctgattgggatgagtaaccgctatctgatcgctttaatcgagatgtcgcagacacaggaat

SEQ ID NO: 108799 - DNA, 415 bp, Arabidopsis thaliana columbia
ttttacgcacacaaagttctcttcttcgtcctattttcttctattccaggtgagaagaaaaaatggcgtttgtgaccactgcggaagtgtgtgacgcgaatcaagagatgattcgaagtggccagctccgagctctgcaacccgtttttcagatttatggtcgtcgtcaaatattttcaggtccagtagttactgttaaagtctttgaagacaatggcttaatccgtcacttcctcgaagagaaaggcaatggtagagttcttgtggtggatggtggagggagtttacgctgtgcgatactaggaggatacccggtcgtacaagctcataacaacggatgggcagggatcatatttgtatgggtgcatcagagactttttttagatcaagggtgcgacattgggatgagagcttt

SEQ ID NO: 108800 - DNA, 357 bp, Arabidopsis thaliana columbia
ctccaaaatatgaatcttcagttgtctctaatctccttactcttcttcacttccggcgagtagctgaaaccttcaaaaggctctgttctcatccacagttcccttgtaaacctcctcattttatctcttatcccttctgcaatgtctctttatccataaaacaacgtgctatttctctcgtcttccttctcattctcccagagaagataggtcagctctcaaacacatcttcttcagtaccccttctttgtattcctccgtaccagtttttgttattattttcttctttatcttttttattactatatccgtgattttttccttaatcaatttaattattttttcatattttatctt

SEQ ID NO: 108801 - DNA, 412 bp, Arabidopsis thaliana columbia
gcgatggtggagttcactctcgtttttatcatgttcagttgctgcttaagggttttgcagagcgtgtttctaagagaatccgggtccatattcttactgatggtcgtgatgttttagatggttcttgtgtcagatttgtttaaacttttttagctgtcctatctgcttttttttctaaattttttttatctcatgtatcatattttttgtattttttttttttttattcttttaactttttttttattttattttatttcttttatatattatatgtatttttatattttttttatataatattaatttatttgtgatttcttctatatcttattttttattatatttattatttattaatttttatttgtatatttatttttttcaaatatatactttgtatttatttatt

SEQ ID NO: 108802 - DNA, 263 bp, Arabidopsis thaliana columbia
aatttggataattggatctttgagtcttctttaattctctatggagaaaaaggtcacacttgtaacaatctatgagaagggaggtcactgattgatgaatgaatttgctcttcttcctcgctcaatcgtaagtttagtagaaattttcagagtcttcttctcgaatagtttctgatagttggggtagaatctcatttacactttatggtatcttgtttttatcttccttcttctattatatttttttattttttttctttatt

SEQ ID NO: 108803 - DNA, 376 bp, Arabidopsis thaliana columbia
attttccatagatcattcatagacgttctcttcatcaaatcaattcatcgtcgtctgtgcacggttgtcatcaccgatcgatgggcctactccgacgtacctcctcttccccgttaccttctcagagtttttagtagtcttcctttggaacaatgagtgacgtgtttgatggatatgagcgacaatactgtgagctctcggctagtctttcaaagaagtgttcctctgctatttcgctcgatggagaacaaaagaagcataatttgtcttattttaaatccggtctggtaaatgcatatgtattgtttaggaaaatttatctttttgcaaggtccctaccacctatatcttattttcagcctccttgtcaatatta

SEQ ID NO: 108804 - DNA, 429 bp, Arabidopsis thaliana columbia
gggcggccacgcgtcgcaagtaaacttgaacttgactaattttttttttttgattgtttcctaaatgcggggggctccccttaactgcagggcgagtttcaatatctcctgctccgttggcatcaagcccatccacgttcaagactgttgctctcttctctaagaaaaagccagctcctgctaagtccaaggctgtctctgagactatcgattatctcgccatagtgtttggccctgtcaggagaatcttcttgcctgtaggactcttgtatagatcatatatcccatatttctcataactgttattttactggtgattatttttattacctatttcgtcttgtaaagatgccacataacttttctcaataccaaacttttttattgatccattctatatcgcccttgttttcatcttcttcttcttca

SEQ ID NO: 108805 - DNA, 440 bp, Arabidopsis thaliana columbia
caatggagaagtgtacatcgatcggaagatcgttttactcgagttctatgggtggatctaaggagagtggaggaggagctgttggagtcagagggtttttccagagtcttagacatactcagcaaggtttagcacttaacatggatctctcaatcacagctttccatgaaagtattggagtaatagcttacttgcagaagcggctcgagtttcttacggaccttcctaggaacaaaggtagagaattgagtttagaggaaaagagagaagtggagaaagcacttaagaacataagagtctttgtttgccatagagaaacagttcaaaggtatcgagtttatgggttaacagaggaaattaccgggaatttatggtttcctgatagagaagggaaatatctatggcttttgagttacttcaaggataattttggtatgata

SEQ ID NO: 108806 - DNA, 438 bp, Arabidopsis thaliana columbia
cgtccgcgcttcttttattctcctttctcctcaaatttaatttctttgaatgaaattatccaatttgggtggggccaaagcgtctctaggaggaaaacccatcttcttcttcttaagattctgaatcattcattgattgatttagcttctcttcgacttcttaattttacagttttttttgttttttaaactttaattgatgcaaataagcaaacttggatcgctgtgagcctgtgataatgatttcttttaggtttgtaggatctgaaggaagctacggtttattttttttatgggcaatctctaacaggtacatatcttctcttagcttctctcttacaagatctttaagttttgtctcgttcttttggagttgctatctttctttcatgttccataggtttgccttattttatcacttttgtcataataatttat

SEQ ID NO: 108807 - DNA, 390 bp, Arabidopsis thaliana columbia
cagtaaagctagacgagtggacagatgatcaggttttcatgcttgtaggttacggtggaaggacggcagtgaacgaaagaggggaagcttgcaacatcgaccagtcaaagaaaccaaaaccagattctactaatgaggaacgaaatgatttcattagaaaaaaatatgagcagcaccagtttatggatccaaaggatggtgctttgtgcacttatcagcagcctagcagaacaaacacttcaccaccgtctttatgttctgcaagccaccgttctacaaaaaaccgtattggtcatgcatttaggaatagctggggaagaagagaatctgatcacaaaggaccaaagaagagcaattccatggcaggtatggttgaagttgtggggtgat

SEQ ID NO: 108808 - DNA, 254 bp, Arabidopsis thaliana columbia
tgtccctccacttagagagaagcagtctgtttcttatctaaaatcgagaaaaatggcaaacagtggttataggtaaagtggtgtgtgtaacattagccttcttttacattgtcttattgcttgtcatgtttcttcttattttttgtttaactttgtttaatgtcttttattctttatttatctttgttttttcgtatattatttcatcttttatttattctgtcttttctttttatttttctatcattcatttt

SEQ ID NO: 108809 - DNA, 307 bp, Arabidopsis thaliana columbia
  unsure (1)..(307): unsure at all n locations
aaagcctgcagatggtgtatgtggttgttnctacatggataaagatggtcttcagggggacactgattcttcgattagagatagcgcacatactctcataataattcaaatttcaggtcttatgtacctttcgtctcaccacatcattgaacaatcttgttgttactcatagtaaagaaacgtcctcataagtattgctcattcctttgcttatttttattattttactttaccataattcttatcatcttctacattcttattgcattttttgctttaatcattctcttaggtatctttttctttt

SEQ ID NO: 108810 - DNA, 182 bp, Arabidopsis thaliana columbia
cattcttcttcactaatctcccatctttctttttctattaataataaacatggatctcaccgacagagtcatattctaggtcgcgctctatttcatcaacctatgttggcgccggtacttttcctccttaagcagccattttatcttgatcattccacctataccaaaattttgtccactat

SEQ ID NO: 108811 - DNA, 256 bp, Arabidopsis thaliana columbia
cacaaactcatttctttccaagaaacacaattttatgttttcaaaaaatcatcatcatgtggtcaggattccatgctctgttgcgggtcctttttctttcagttagaacatataaatgtgtttcttcatctacttcttcttcttcttttttctcattcttttcattatcttcttcgtcttcttctcaaactactaatttgcctttaattacccgatttaccctatctgatcttctactcatcttcttacttttatt

SEQ ID NO: 108812 - DNA, 421 bp, Arabidopsis thaliana columbia
ggctaagaccgccaccgttggagtctggatcttcgctggatctcggtttgagtccgatgaggccaactgaacggctcatttgggggatcatatgatattcaaaggcacggataggcgtacagtgagagcgttggaggaagagatcgaagatattggtggtcacctgaacgcgtatacattgagggaacagaccacttattatgctaaggtattggatttcaatgtgaaccaggctttgtatgtcttgtttgatttcctacagaattctatgttcgagtaacagataatttaccgtgtacgggatgggggtgtgggttaatgctagtggtgctgtgtcatacctttattattgtatcttttccttttacatttttttatatatattttcatttttatttgttattttttttatttttttttt

SEQ ID NO: 108813 - DNA, 275 bp, Arabidopsis thaliana columbia
  unsure (1)..(275): unsure at all n locations
accgggccggcccacgcgtccgaaataatcaaagacaaataccaaacactacatcaaattttccagacgatttgaatttgatgcgtctctaataaactgcgggncggagaatatggacaaattgaagatagcagaatggggagagaagctgaagactggtggagctcatatgagcagaatggatgattgtgttagtgaatagatatgcgtttaagctttaaccttagtaattccaaatacggtttcttgaaagctcaatctttattttctatttt

SEQ ID NO: 108814 - DNA, 136 bp, Arabidopsis thaliana columbia
caatacccaaccattatttttattttccaagatgataggattgattgcgggggctttaccgagttcaggacctctccttctctgaccttatattttttgttgcgccactctggattgctgttgctgccgatgtttt

SEQ ID NO: 108815 - DNA, 555 bp, Arabidopsis thaliana columbia
  unsure (1)..(555): unsure at all n locations
cgacgccacgtccgtccgcttttcatcctcatgaaaggaatgggnnctcaaacccatgtcctgcnnttatcttcagtgggcgtcatccgtccggcgcatgtgttttgagtgaaccaagtagcgccttggtggctcattcccataatgttcaatccattctcttnncctctctggataaccctctccgtgttgcacctatccattctatggatgaccatatcattcnngttcctctcgctttctcttcataaccccaataatccaatagcnttngctcctataaaagggggttgagaagcccgaagatgcaaggggttgaggggatggcatctttggaaccgtnnctggtgggattggggtttcaccaaagggcgaatggagcctattcnngttggtcgtgttgggctatgatcgnnngtttcgctgcatttcgttgctttggtggaggggcgttgaccgggataaaaggggatatttagctcaagctgatatctggtagacagggaataccgatttaccgaatgcagagccatntggcttctctttcttcaatct

SEQ ID NO: 108816 - DNA, 386 bp, Arabidopsis thaliana columbia
cttattgctcctgcaccaggactgttataaccgagctcttcaggttcaagcacggggtggggaagctctagtgcggggaaagatgcaacacaaagagttcatcattttatgcctcgaagatagcagtgactggagcattgcaaccactcgaaggatagtgatgcaagttgatcctgagctttctaggacaattgttgtttctacaaagcttgacactaaaatccctcaattctcatgttcatctgacgtggaagtctttctctcacctcctgcaagcgcacttgacagctccttagggggcgattctccttttttcacgtctgtgccttttggaagagttggctatggacaggattcagtgtataagtttaatgactagttcaaac

SEQ ID NO: 108817 - DNA, 203 bp, Arabidopsis thaliana columbia
  unsure (1)..(203): unsure at all n locations
aaatcctactgccgtcaaaatcgattcattgttataccagagattgaatggaaaatccagctggtcctaattcaagatccgaatttaatccaaaaccaanacncttcaaatctatctatgaatgccaagacatgattcctaggaattttcgaaacccaataatcaaattttttatgtatcctaataataaatctcctttttta

SEQ ID NO: 108818 - DNA, 346 bp, Arabidopsis thaliana columbia
  unsure (1)..(346): unsure at all n locations
aaaaaagaaaacacaaaaacaaagtatattttggcttcctcaaccatnnctttgggctcgccttccttcaccggaagggcggtnaaacctgccncatcanatgtcctcggaagcggccgtgtgaccatgaggaagactgtcgccaagccaaagggtccatcatgcagcccatggtacggatctgaccgagtcaagtacttgggtccattctccggcgagcccccgatctaccttaccggtgagttccccggtgactacggatgggacaccgcttttctatcctccgacccatagaccttctccaggaaccgtgagctataagttattcacaacatattgtccattc

SEQ ID NO: 108819 - DNA, 303 bp, Arabidopsis thaliana columbia
  unsure (1)..(303): unsure at all n locations
cactcatatataaacacatattcttactgtcactaatgcttctctctctgtctgtttctcttgtcctatagatggacaagcttncnatctctgttcgctagatctgtctgaaacagtgaggggattcctaggtttcagagcaaagtaatgtctccactcaagtacttgtgttttagaaaggtactcttgttgttgctctattccagtctcttcctattctcttcttcttctttctttgcctcatcagttgatgatcatgatctacaacgaatagaacctcatttgcgagtgagaagattgttt

SEQ ID NO: 108820 - DNA, 272 bp, Arabidopsis thaliana columbia
  unsure (1)..(272): unsure at all n locations
accttcttccaatcttcccttcactanctttagacactcttctctctctgcgctggttcttttttactcaagctgtctctttcaatctctaaaactttcacttcctctctaattatttaacccaaaccctaaattccccccttcatcttctctacttcccacacttttcttttttacaaaccctttaaaaaataaaactttttccaacttttttctctctttaacaaccctcttcttcctctccctcttttctctttcatttcaaacttcac

SEQ ID NO: 108821 - DNA, 464 bp, Arabidopsis thaliana columbia
  unsure (1)..(464): unsure at all n locations
cgtccgaacaggaaggctcatttcacagcttcctctatcttgaggcgtgtgataataaactctccgctgtgcacctatcttcgtgagaagtacaatntcanatccatgccnatccgtaaagacgacgaggttcagatcgttcgtggtacttacaagggacgtgaaggcaaagttttttaggtttaccgtcacaaatgggtgattcacatcgagagaatcacgagggagaaggtgtattgaacaaccgtgaacttttggatttattcgtttatagtattgataatttatcttcttttttattaagggggggaatcttttttctttaattattacttatagttctatttctttttttaatatattattatcgtacttatttttttttttttgttatttatttatttctattttttttttttattattttttttttttacttatttattttttattttttaattttt

SEQ ID NO: 108822 - DNA, 306 bp, Arabidopsis thaliana columbia
attgaattagccatggagaagaatactttttaaaccatcttctccaacttttttcttctccttctcctttcttcatgggggtcttctcaacttccgaccagtttcttccaaaacctaatttccaaccttgaaaccaattgtccttacccctgtccgtaaaaaattccaccaaactttcgtaaccgttccggccacttttcgcttttttttcaacaattgcttcgtccgggattttattccttcattattattaccttaacaatcgaaaaagaccattcaaaatacatttcatttgcccgagaccga

SEQ ID NO: 108823 - DNA, 274 bp, Arabidopsis thaliana columbia
  unsure (1)..(274): unsure at all n locations
aaaaaccggcccgggccgaaggcaccaatttttttttttttcaatatcatctaaaactccttcaatctcaatttcncaaaattccttgcaagtttatcaaaatctttgtcgacacattcccaagaatccntccttttttttcttaaaattttctttataattaataatttatttttttttccttttttttttttttttttctcctcttttttttaaatttttcattactttttatttcttcttctttctttctacttttttttttctttttttt

SEQ ID NO: 108824 - DNA, 190 bp, Arabidopsis thaliana columbia
  unsure (1)..(190): unsure at all n locations
caggaactcancataaatgcaggtctttgctagaagacagtgtaccccttanagcgtctgtcatcttatagaatcggttagcacaaaacttgcttcaaattctctcacttcaaaatcatacttcaactgatcaattattcatcaatttaaggagtggcttttttttttccttattatcttcacttcttct

SEQ ID NO: 108825 - DNA, 355 bp, Arabidopsis thaliana columbia
  unsure (1)..(355): unsure at all n locations
ccgaaaanccgggccggaccgacccatccggcaaaaggttgaaaaaggaaaatatgtctctgtttccactccacacaattcttcatccgacgaccgatntttttagccgcctagggagaaacactctcccacaaacctcaaaaacttcttggtttctcccaactcaatcttttcctccaaaaaggcagatatttgaacaagactttaatgtttaaaaactaccaaatactctgcttcttctggagtcaccgacactctctcaagtgactgtcttagaccattctttctttgtttcagctccaatggctttgagttcattaatgaacataaacttgagttggaatcctttttttct

SEQ ID NO: 108826 - DNA, 394 bp, Arabidopsis thaliana columbia
  unsure (1)..(394): unsure at all n locations
cacaatttttgacagacaccaagccggtannataatgaaacatataaacaaactggggtgtcattcctcgagggcgggagggatacttacananattattgctccacagcatctgctgctgtgttggtggggaaccatttgtatgttgcaaatgttggagactctattacaatattttctaaagcttggaaagctatcgcgctatctgatgaccataacccaaatacaatctattaaagaaaaccaatttaaagtgcttttgtttttatcattttttcaataacattttaagtattgttgtgtgttttctatttttcctccatttttatactacatttttttaatatatattatttctcttatcctaatttcctattacttcttttcttttatt

SEQ ID NO: 108827 - DNA, 259 bp, Arabidopsis thaliana columbia
  unsure (1)..(259): unsure at all n locations
gcaaatcttaaacgttttactttgtgcgtcactactcaacctcaatnnccncctcaacgatggctctactactgccgttgcttcnccaaaaaannccttcaanctttccccctcggcatctgaaatccttggaagcggccgtgtgacaatgaggaatactgtttccaatccaaatgtcccatcaaacaacccatggtactgatcttacctttttatttacccggcnccatacactggccaatcacctatctaccttacc

SEQ ID NO: 108828 - DNA, 253 bp, Arabidopsis thaliana columbia
  unsure (1)..(253): unsure at all n locations
cgacgcattacattttcttccgatctatacatagagatcagtttctnananagaatgatatgtctatagaggaagagaaggttccaacnactgttgactcatgagctgccgatacaacggtgaaatctccgtagaagaaacctgcggcgaaaggtggtaattctaataagacgactactgctaaagcaactaataatccttttaaagcttcttcttcaactaataataaaacaacttccttttaccctaccta

SEQ ID NO: 108829 - DNA, 222 bp, Arabidopsis thaliana columbia
  unsure (1)..(222): unsure at all n locations
gaaaacccggcccgaccgcacgcatacgcgcaaatcctgaaattattatcatttaaatcttatatggagaagaactannngccgcagattcttttgctaagggggccgctcatcataacacnaaatattatcttcanagtcatcttttgagtattcaagaagcttttttcattgacaaaattaatctttctttatactctatatactcataatataataact

SEQ ID NO: 108830 - DNA, 173 bp, Arabidopsis thaliana columbia
  unsure (1)..(173): unsure at all n locations
aaaaaaacaaaatcataactcctaacaaatcaaccnctacctcaataccataaacaatcaccccgagcattttttaaaaaacaccggctgacaacccacnnaatnncnaaaatcactcccctaaatcccctaanctaccaattccttcactcaccctccctaatctaccattt

SEQ ID NO: 108831 - DNA, 311 bp, Arabidopsis thaliana columbia
attggcggtacgaatataaacgcgattcaatatccaaaagggagaagaaaagagaaagagaggcgaggatgggagatttgggagaagggtacaagctagtgttcttgggggatcaaggcgtagggaaaacgagcatcatcacttgtttcatgtacggtaaattcgacaccagttatcaggcaacaattggaatagactttttgtcaaaaacaacgcggtatgaagataggacttttcgtctgcaattgtgggatactgcaagacaagagagatttaaaagcctagtaccaagttatatcagagatgcttct

SEQ ID NO: 108832 - DNA, 299 bp, Arabidopsis thaliana columbia
  unsure (1)..(299): unsure at all n locations
cagctacactttggcttgatcagacatcatcaacaacatcaaaggagatcacagtgtcgataggtcttgagaagaggaaggtccttgntttttacctctggttcgtcaagaacgttaaaaggtttagtcttttatcttcatttttacttttgggtttctctggtgaatattaaaaaagaggtttgacgaagagttgaagaaaggtgtgaatagacaaattgaagactctacaaaaaattaaagaagagtgaaagtgctcatcctcttttttctttttagttcattgcttttcaaggggt

SEQ ID NO: 108833 - DNA, 383 bp, Arabidopsis thaliana columbia
acccgtccgatctttacttcaatcatcccctttgaatctcttcctacttgtcacataaaaacattggggaggtcttttatagattggatgcgatactccagcttattcaatctccgaatgagaccttcctcaatcctatcttcttcctctcattcttaccaagctcataaaaaataaactgattcttataatcttcaaccaaacaagcgtgacaatcaatccgatattccgaagactatattttcaccagatgatactcccaagactcatcttcccagtattatatttacgccaacacatcatatggatataggttgagatgcaccacatggcttcatatgttcgttatgaaccacaatccaagataggcattattaccttta

SEQ ID NO: 108834 - DNA, 301 bp, Arabidopsis thaliana columbia
  unsure (1)..(301): unsure at all n locations
gcgtccgcccagctcaagtctccttcatgactaaattttttcacatctacatgacatctaacnggaggtagaatcattgctggtctgggttcgaaaactatacctcaccttgcaaaccctatccatgctgttgtcaccaaagccgtctgagaaactgaacaccaccatgacaccaaagcttaataataaagattttgttcttttctttctattataacatttccggcagtgacaagataaatgtcgtgactcatcttttcagttcattgaagatcagtggcttgtctctgccggtcttatt

SEQ ID NO: 108835 - DNA, 355 bp, Arabidopsis thaliana columbia
cttctactaaaccactcctctttttcactctctctctctctatatactctttaaaggaggcctaaaaactggcatgagaggcaactatctatgtgtattttaaacattaaccctctttaacacacccatcacccacacactccataatatctctaacacctgcattgtcacctttggttacaacaactccaactcaccaaacaaacagactcttaccaaaacctcactccctcaaacttttattccttctacaaaatcccaagacaatcccaacaacaaatactccaactttcccattgatgcaaacttcctcgctaaaaacatcatgattcccatcgaaaaacactccttcctt

SEQ ID NO: 108836 - DNA, 397 bp, Arabidopsis thaliana columbia
  unsure (1)..(397): unsure at all n locations
cggacgcgtggggttcttgttgctttaatcacaaacagaacaaacaaaaaatcgagttgagagtctctcagtcggtaggggaagcaaatanagaaatggctagctttactgcctccgcttccaccgtctccgccgctcgtccggctctccttctcaagcctaccgtcgccatctctgctcctgttcttggtttgcctccaatgggtaagaagaagggaggagtgagatgttcaatggagacaaagcaaggaaacgtctcagtcatgggtgctggattttcatcttcagcaacagctgctttgacagcacttattatcaatccctctttggcttttcttgattagatgttttcctcacattgaacacgttttcctctttttcttatctacaacctttt

SEQ ID NO: 108837 - DNA, 417 bp, Arabidopsis thaliana columbia
  unsure (1)..(417): unsure at all n locations
ccgtcatccattaccgactttaaaaacaagatttctctaagggtaccaactctgcaaataagaaggcttattatactatatggaaggacaactgaattnatctaaaccctcattcaatcactactcacactaatcattacaaaacactatcttccaaacctcaccgtcccaaaaatcactcagaagacttcaaacacaaagtatcttaactcaatcaatctaaactcaaatgaactaatcataacccttactactcaattcaaaaccgaaacatattataacaatagcacttacgtcaatcatctatccaagactcagaccccaaacatccttaaacttacttgctctgattctaaagtttatacatctaacatctctaattttcaacctaaagacacttttagttacacaatcata

SEQ ID NO: 108838 - DNA, 286 bp, Arabidopsis thaliana columbia
  unsure (1)..(286): unsure at all n locations
tggattttcttcaaacttcncatttttattgtataactttgccgctantcctttgtttgcttctcacaagaatccggtgtgacnacctcaantttctncccctccaatattttctgctcccaacatgctacctcctcctgtcttctcgtcacatgaaatanttttcctatcatcanatactacactatgaaatctatttcttgactttacttcatttaataattcatttcaaataccaccttccattttatatttaaaatctttcaattaatttttacattttttt

SEQ ID NO: 108839 - DNA, 406 bp, Arabidopsis thaliana columbia
  unsure (1)..(406): unsure at all n locations
ctcgtccgttgttgcataagtgctatttatctctcgtcgaatcttgntnnnaagatcgataaatcctatgttgtcgcgctgcgccnaaaagtatnaccaatatcatgtcttccatggaggaaacgaggaagagagaaaagccaattatactgacatggttaataatttactatgaccttgctactagcttttatgagtacggatggggagaatccttccatttttcacaaatatggaaaggagaatctcttctagagattattaatcgacactatcactttcttgcttcttagttgggcgggcgaccagtacaaaatatttctttatttcttattttataatttattttttccttttcttatttttccataattccatcacttttatttttttctttcttttactt

SEQ ID NO: 108840 - DNA, 419 bp, Arabidopsis thaliana columbia
  unsure (1)..(419): unsure at all n locations
gtgctttcaggtttcaccagtaccatttatctggaagagctctcccnacagagaaggagttgcatcctaaggtttgcggggtgaaactctgggctacnaacgaggttcgtgccaagtccaagttctggtatttcttgaggaagctcaagaaggtgaagaattttaatggacagatgctcgccatcaacgagatctattagaagaacccaacaacgatcaagaacttctgtatttggttgaggtaccatagtataactgggtaccacaacattttcaaggagtaccttgacaccattcttaacggagctttttatcatattttcacttagttttcattccttcaccgtttcatattccttttctatttagatcattaaaacagtcttttttcctacactacttttttattatattatttc

SEQ ID NO: 108841 - DNA, 316 bp, Arabidopsis thaliana columbia
  unsure (1)..(316): unsure at all n locations
cgggggcgaccgacgcgtacgaagaacctaaaaagaagagaagagaaagattgattctaaatgtcggtgacatcaacggtggaggggtataccaccagagaaagccagcaacaccnncnnctttntangaaaataagaagaggagatgggtgttttgtgatagaatgtgtaggatttttgattatttttttttttttttttttttcattattcattctctttctttttttactttttttttatttctctttattttattttttttttttattcccttttattttttttattttttatttttctttttttttttttt

SEQ ID NO: 108842 - DNA, 171 bp, Arabidopsis thaliana columbia
  unsure (1)..(171): unsure at all n locations
cttatctacagaaatggagatgagtttatctaatcgcgtgcgatgctatntnatagcaatcaccatgctttaatttgcaacttttttacttctatagacctttttcttataattcattttcaattacaacattcaatcacatttaactttttaaacacataattttttttt

SEQ ID NO: 108843 - DNA, 439 bp, Arabidopsis thaliana columbia
ttttgcttcctccctctttttcgccaatgttttctttagatctagctaatatggcgacgattttgttctttctcggttgtaatcaccgtagagatcctcccgatctgcaaatccgatccgaattctcaacgaatttgtagatctgatctgtgattccatcgttgacgacggatcttcgcttacatcgtttgatctgtcgcagatctgccgttttctatagatctagatctggatcgtccttcgcggcttcttcacatgcaagattctgtgaattgttcaagttgaggcatcatttctggattactaggagacgaatctgttgcatactgattgattgtgtgtgtattgtaatgaaatatgattttatatattagctattgaactattttatttcttatttggttttattaataatatactgtatctatttattttgttt

SEQ ID NO: 108844 - DNA, 439 bp, Arabidopsis thaliana columbia
catttctcaacaagaaggaaccctttatctctataaagagggatttcacacactggggagcagtgtttacaaagatgcagtattactccaaatgctaataatcttcaagtccagagtctcgctcgtttcgctgtcgatgagcttagcaagcacttacccttgacttttaactacatcaggctacttcttgcgaaaacacatgttgtggcaggaacaatgcaccatctaactgtggaggtggctgatggtgagaccaataaggtctatgatgccaacgttttgtagaaagcttgggagaatctcaagcagttgtagagttttaaccaccttcacgatgtttaatcccatgccctgaactttctctgctgcttgagtgatgttcttttatgctctcaaaccacattattaaaacttttgtttaaccattttacctttttta

SEQ ID NO: 108845 - DNA, 467 bp, Arabidopsis thaliana columbia
  unsure (1)..(467): unsure at all n locations
ccggnncggaaancccggcccgaccgcacgcgtacgcggatccaaacactatagacatcctatagttttctgattctccaatgtttgtctagacatgagattctttgatggtgaaggataaacnatacncacatcatattcacagggttttacttctttttttggagacacaatatctatgatttcctttatttagagactttttattctattgctaacacttcctgctttatcattgtgagccttaattatattcccatctatgaagctcaatttttatcttcttctataatataatttgcttcacagttgcaccaatttatattacatgtagtgtttagatgttattttattactttatattttctactttttcctttttctttaatttatttttcatttttttttatttaatattttttatttattattttttattactttttatattttttttttttttttta

SEQ ID NO: 108846 - DNA, 422 bp, Arabidopsis thaliana columbia
caattttggcctctcgatttagttttttgaaaccctaagctcgatttcgatcctccggcatactcggtttcgccgccgaatctctgcttgtagcgagtgttactattcaatcggcgagaatgtcgatgtcgaagagttcaaagatgcttcagttcatcaactacaggatgcgagtgacgatccaagacggaagacagctcgttgggaagttcatggcgtttgaccgtcacatgaacctcgttctcggcgattgcgaggagtttcgtaagcttccaccagctaaaggggaagaaaatcaccgaaaagcgtgaaaatcgccgaccgctaggttaagggtgcttaaaaggggaaaaagtattttaaatgactgtcgaaggacaccttcttcctgaagaatctcgtgctaaagcttgctctgcagc

SEQ ID NO: 108847 - DNA, 440 bp, Arabidopsis thaliana columbia
gaattttattgttacatggggtaaagatcacatgttcatgaatggtaccaaccttcgacgggtcgtagacaaatctgcagggtctggtattaaatcaaaggtggctcatttgtttggaagcgtagaaatgctcatcaaacttgtgccagggaattctgctggaaccgttgcagcctattacttatcgtctacgggaagtacacacgatgagatagacttcgagttcctaggaaatgcgactggtcagccgtacacgatccacaccaacttatatgctcaagggaaaggaaaccgcgaacaacaattccggccatggttcaacccgaccaatggtttccacaactataccatccattggaacccatccgaagttgtgtggttcgtcgatggaactccgatcagagtttttagaaactacgaaagtgaaggaatcgcatacc

SEQ ID NO: 108848 - DNA, 431 bp, Arabidopsis thaliana columbia
aacaaaacagatattgttcaggtatacatttcatatgcttgcaaattactctttcaaggtcttatgtcaatggctattgcacgcaaggatgctcactaaacacctgaagggcgatcacgtgatggtggtctccgttttggagaaatggagcgcgattgcatgattgcacatggtgctgctcactttttgaaagagaggctgtttgatcagagtgatgcgtatagggtacatgtgtgtgaagtctgcgggctcattgccattgcaaatctgaagaagaattcttttgaatgcacaggttgcatgaacaaaacagatattgttcaggtatacattccatatgcttgcaaattactctatcaagagcttatgtcaattgctattgcaccaaggatgctcactaaacacctgaaattcgctaaaggcatacatgt

SEQ ID NO: 108849 - DNA, 371 bp, Arabidopsis thaliana columbia
  unsure (1)..(371): unsure at all n locations
gtttcaaagcccttttctcgcananntctccgtcccctttaccccgatnntcgtttaggtcttttgggtgtngtcgcttttcgaccgagggaatggaagaagtgtaagataccttgagcttaccctagtttcaaccaatattggttgctataatcatcaatatcctgtacggattnttgcatcacnaacaatggttattagtgaaagatgaagaaggaaggttcagtgagttgaacctttatgtgnggtctaagaattcgatactgcagaagaagctcgtgagttctacaacgcttacgctgctaggacggngtttaaggttaggactggtcagttgtatagatcaagaactgatggtacggtttcgtcta

SEQ ID NO: 108850 - DNA, 438 bp, Arabidopsis thaliana columbia
atgctatatttgaaaaagctttggccatctatgctgggaagaacctggaaattcactgtgatgggctgtatcttgctacagatggggacaactatgtcatagtggactggcatgtggtagacactatcaagaaagcaacgaaaatgattctgccactccagaaaggctttttaacagtagagaagccagtgaatgctataggtgcggggaagaagggcatttctcacgtgaatgtacgaattcaccgtgcatgagcactacacatgcgaaagagtcacagactttatgctacagatgtaatggatcaggacatttatctcgtgaatgcacccaattcctgccatgcttctaagagagaccgtgaaacatctacatcatcacataaatctggcaagaaaaacatagagaactcagaacacgattctactccccatgagt

SEQ ID NO: 108851 - DNA, 439 bp, Arabidopsis thaliana columbia
gcctctaaaaggttttggagaacacaatttacacaactggagaagtcagattacttctctgtatggtgggccattggagtggctttttgttgtaaaaagtacggaagaccctgcatatcacgctgtttcccgtctattatctatgtatcaggatcatgttgaagctaaggtcgtggttgctggtttatcaacaacatgtagccagaaaattcataatcagttgattggagttgaaaaaatgcacaaagataccaaatatgtgttatttttggatgatgatgttagactgcatcctggaacaatcggagctctcacgactgagatgagaaaaatccagagatatttattcaaactgggtatcctctagacttgccgtctgggactcttgggagttattgcatctatgagtaccacatgccttgctcaatgggatttgcga

SEQ ID NO: 108852 - DNA, 442 bp, Arabidopsis thaliana columbia
gttttgaatttcagattgtgatttgaaattgcaatcaattcctcgaattgagcatctaattcttcgaaagaaatcgataatgccgaagcgaaaagcaaaggagtgtgtcaaactcactgaagaagataggaacgacgagaaacgaattcgaatcgaagagaagaaagaagacttcgtcgacgaagaagtcgaaagacaaattgctgcgattagagcaatccgtgatgttgagattgaacaaatgttaactgcaatgcggttgcttcgttcgtattttactgaggaacagctacacactcctgtgttagacttctttaaagagaatcttccggatttatcgatatcgagaaacgaagaaactggggagattgagttaaagtggagagacgaaaatggtgattcgtttgctggaaatgagaatggcgttgacatgaattattct

SEQ ID NO: 108853 - DNA, 436 bp, Arabidopsis thaliana columbia
  unsure (1)..(436): unsure at all n locations
ggctgcagctgtcatgctcggatcaattttctggaaagttggcacaaaaagggaaaacgctaatgatcttacaaaggttattggagcaatgtatgctgctgttttattcgtgggcgtaaacaactcttcatctgtccaaccgctaatagccgtggaaagatctgtattctatagagaaagagctgctgaaatgtactctgctttaccttatgccctagcacaggtggtatgcgaaataccgtatgtgctgatccaaactacatattatacactaattatatacgccatgatgtgtttcgaatggacattggccaaattcttttggttttacttcgtatcatttatgtccttcctctacttcacatactatgggatgatgacagntgcccttaccccaaatcagcaagttgcagctgtttttgccggagctttctac

SEQ ID NO: 108854 - DNA, 165 bp, Arabidopsis thaliana columbia
  unsure (1)..(165): unsure at all n locations
atctacaactgtcaaactcaaatcttttttttttaaactactaacaaatactactggcgctatttttatatacaaaagttagttaacaaaaanattctaactttaaattctacatctattacaactctctatctttccaacccttattatccttccatatatctt

SEQ ID NO: 108855 - DNA, 443 bp, Arabidopsis thaliana columbia
  unsure (1)..(443): unsure at all n locations
agaaaatcaaccttacaacagcatccggaaaaggaacttcaccattcagaacctaagatatggccggcatgaagtggtggcggtggagtggctgnttcaagaagtcctcaacttcaaatgcttcacacccacaatcttcaacttcttgtggttctacttaaaagctgctcgagccaatccagaagttgaaaggaaagccaaatccttggctgttacctcactatccgaccaaactcaactctgtttttggccctcaactgtagcagctgcactcgtggttctcgcctgcatcgaacacaacaaaatctctgcataccaacgagtcataaaggtccatgttagaacaacagataacgagttgcctgaatgcgttaagagtctggactggttgcttgggcagtaagcaatcaaaaagaacaaaaaccctaaaaccaggacacagt

SEQ ID NO: 108856 - DNA, 260 bp, Arabidopsis thaliana columbia
accacgctcgctgagttggccctgagtactttttaccatcacaggtaaagtacgggaggccaagcttgggggacacctcctgactgtgcccatctttacttgctgtttcaaggctgcaagtgtacagtattcaacttctttttttctaaatttccactacaaggaatataccactaagctgtgtccacctgattactgcagcctgccttgtatgacttgaggtaaaactcagcttatgtgcttctgaactgatactttct

SEQ ID NO: 108857 - DNA, 431 bp, Arabidopsis thaliana columbia
  unsure (1)..(431): unsure at all n locations
tgaccaggtcaaatcctcgttgacagaccgtattgacatatcaggtcagaactctggggttgagaaaaggggaagttgtgaatccttgtctagaaaccgggattctcaatacggtggtggtggtggttctgaatcggatacctggggaagaagaagagaagaaagcggtgctgctaatggctcgccaccaccgagcggtggttcacgcccaagattggtgttacagccacgtacacttcccgtggccgttgtggaggtcgtgaagccggagagtccggtcttggtcattgtggagaaacctaaaggtgctaatccttttgggaacgncagacctagagaggaagttctggctgagaaaggccaggattggaaagagattgacgagaagctcgaggcttgaaagcttaaggacattgctgcagccatggaga

SEQ ID NO: 108858 - DNA, 438 bp, Arabidopsis thaliana columbia
gggatgccggtgttcaacaacctcaaagtgttaagtatttggagtgacatgaataggggatggcaagctatgccagttcttctaaggaactgtccacatttagaaactctcatcattgagggactcttacactatgcgacggataaatgcggggatgtttgtgactgcatttctcgggattacaaagaccattcgctcacatcttgtccagtgaagaagttacagatatatgagtttcgaggaacaattagagagttagagatgatcaagcatttcttgaagatttttccatgtttgaaggagatggatatatatgctcatgagaatagtcatacactatttaaagaccctacaatttttgaacgtgttgggaaggtgatgaatttctacaatatgttatcgagttgcagtgttcaattactagtgcgcggtccattg

SEQ ID NO: 108859 - DNA, 450 bp, Arabidopsis thaliana columbia
  unsure (1)..(450): unsure at all n locations
caaaagccatagcaaccaccaccggtaccatcatctatcatcccggagccacgagcaaaaccagcgtggcctaatttcgagaaatgccataatcatcattggcacctccattatctccatattcataatccttgcaattctcctaataatcattttacttcatcgacttaaatccgcaagagtcaaagcacaagaattatcttgcaaagaaagcttcaacaacatgaacaatggtggagcttccaccaactacagctacacttctagccctgatgacatcaagagagattgtctatactcaagaaacccaacatcgttcagacaattacccccacagacaaaaagttgtaggagaagccgagccgaaggagtagaagtgtacacatacaaggaattagagattgcaacaaataatttcagcgaggagaagaaaatcggaaatgnggatgt

SEQ ID NO: 108860 - DNA, 355 bp, Arabidopsis thaliana columbia
gtccaacacggcggaattagatcgtacggtttcgatgccgagcgtgccaccgccgcggtggggagtctccaaaacctaattgaagagtgggagagagggaagagaggagagatatgtaatgtaaataaggcgggaagcgatgtaatcgttgtgagagatccgtataaaccgtctactattactaattttgattaatgtaaatttagattgttttctaataatttttaattgttattgtttcattcatttatatttattttatatcgtttgtgtttttttttatatattttatattgtatttatttttttaattaatactatacatatattttttaaatctgttatacatattttt

SEQ ID NO: 108861 - DNA, 455 bp, Arabidopsis thaliana columbia
gaaaaagaaagaaaggaaattaaagaaagagaagaaatcccttgaacagaagtattccacaaccaagacagtctcatatgaatccgaacagcttgagaaatcttgtttaacagaagaatttgagcaacctcaggttggatatttgtctgatggtagccagaacagtaagaagagaagaagggaaacttctcctgctgttgttgagagtcaaatcaaagctacacctgtagctggtaaaccactacggattcgtattgttttcaagaaaccgaaagaagctgaagctgtacctcaagaggatcctgtttgttccacttcagggactcagagacctagcgaattaccaagttctgtctctcttccaagtatctgtgatcatgatgtggctgtaccctcaacttctcttgagagtggcaaggtagcaattatttccgaatcaaagaagagaaagaaac

SEQ ID NO: 108862 - DNA, 285 bp, Arabidopsis thaliana columbia
attgaattagagcaactacattattttttttttacaattacattttactctactatacgggttttctactattggaggtgggcttatctatatcctaatcctttattaatcttataattcttgcaactaccttctctcttaatcctttttaattaatcaccattcataatataatacagcttcttactattgcttatttcttatccatattttctatctctcaataattcatatataattattatttttatacactttgattacttaaaaattcttactttctta

SEQ ID NO: 108863 - DNA, 446 bp, Arabidopsis thaliana columbia
gaaacaagcactgcatgaacgtcgtttgtctcttgaacaagatgtgtcaagattacaagagcagctgcaagctgaaagagatctccgagcagcactggaggttggtttgagcatgtcttctggacaattcagttcacatggtgtagattcaaaaacaagggctgagcttgaggaaattgctcttgctgaggctgatgtggccaggctgaagcagaaagttgcagaacttcaccatcagcttaaccagcaacgtcagactcattttggttccttctcagatgcacgtgatactcatcagtatctccagaatcacaatcctcaaaaaaggtttcttcagcaagattttgattccactcttgcctatgtaaatcatgaaaggaaacaaagacacgaggagaatgtactgtgagcggagtggagaaatagtaaaggggcaggatcttttg

SEQ ID NO: 108864 - DNA, 259 bp, Arabidopsis thaliana columbia
gtaattcacaggagaaagctattttagaagttaatcttgctgctgccagacaaattgcaagggagattcggctgagagatattggcggtatcattgtggtagatttcatcgacatggcagatgaatcaaataagagactcgtttatgaagaggttaagaaagccgcggagagagattggtcactggttaatgtatcagagctgtctagacactgtctttttgtgataacaagaaaatgggtttcttccgtgtgtatcat

SEQ ID NO: 108865 - DNA, 412 bp, Arabidopsis thaliana columbia
gtgaaattgggtactccgggaatgagattcatggtggcgcttgatacaggaagcgacctcttttgggtcccttgtgattgcggcaaatgcgcaccaaccgaaggagccacttatgcttctgagtttgaactcagcatttacaatcctaaagtttcaactacaaataagaaggtcacctgcaacaacagtctatgtgcacagcgtaatcagtgccttggaacattcagcacttgcccttatatggtgtcttatgtctctgctcagacttcgacatctggtattcttatggaagatgttatgcacttaacaacagaagataagaatccagagcgtgttgaggcatatgtcacatttggatgtggacagggtcaaagtgtgtcttttctttgacattgcagtaccaattggttta

SEQ ID NO: 108866 - DNA, 312 bp, Arabidopsis thaliana columbia
gtttcggtaaaggtttgggcggtggaggctttctagtcggcggaggtggtctaggaggcggtggtgacctatgagtcgatggtggtctattcaatgagtcaccaacttaaatttatttgctattcataaaactattttttatttacacctaacaatttctattatattttttttcattaaaacaaagatttactaattaatttttattcatcattgataatcctctttaaattactttattccacattctttaattttatcacatttttttaacattaataaatattttataatcgtctatttatattctta

SEQ ID NO: 108867 - DNA, 283 bp, Arabidopsis thaliana columbia
ccgtccgattccgggtcgacccacctcagaaacacaaatgaaggtccgtctgttcatcggcgcaggacggccaccacgagctcggtgaaatcggatgctatttgcggcggtaggagaacacagaccaaccactttcattcgaccaagaactctttgtagtacttcattcaaacggccaccgttctgagaaggaatcgtcgacctacgatcataccgcttttactgtcctgagcagccgattgtcgtcttcttttttcgcattggtgactgacaacctaaactg

SEQ ID NO: 108868 - DNA, 328 bp, Arabidopsis thaliana columbia
  unsure (1)..(328): unsure at all n locations
gtcttttttcgctctgcttgtcgtagatcgttttaaccctaaaatacgtagagagatcagacctgaaaacaaccaatcaatcatggagtacgctgtgggaaatagaaggcgcttgaaggcttacaaactatatgcccgattcgttacgtattatatgcgccattttgggaacgggctgggatacggtataagcttgggaccacatgtgggacattgaagactttggtggtaaggcgagaggaagagctttttttgatctttagaccaagcagatggaattcagtgttgatcaactntttttttgtgataaataaatatggatgtcata

SEQ ID NO: 108869 - DNA, 296 bp, Arabidopsis thaliana columbia
aaaaattcagatttgtgtaagcactgatttttaaaggggttctggatacaaagccatactggcaaaggagtgcagttaacagagggggtgttacgggactattttacagaggcatggggaccactgggggacagtttggcttagccgtttatggttcatgccatgcttgggcaccactacgtgatgttctgtcaatttacccgtgtaaacaacggcctgagagtacgacagtgtgtctagaacatatgtgggatgatggactgcacttaatactgttgcaattttactgacaatta

SEQ ID NO: 108870 - DNA, 450 bp, Arabidopsis thaliana columbia
gaatatctaaaccaacatgaactcttcttatctccaagcgagccgcgtcatggtgctcggatctaaatctccggtagaccgccgccggaaatcacttgaaagagtggataaagaactcttaagaggcaattacgaaactgctctctcactcgtcaaacaactcaagagcaaacatggctgcttatctgcttttggctctgctaaattggtttctctcgcatctctctcttaatgcttatttgccaataaatcatctctaattcctttttttttttaattagcttccgaagaaattagacatgagtagcaaaactgatctcaggtcgttgattgattctgtctccagaagtattgaatctgtttatgtccaagaggattcagtgagaacatccaaagagatggaaattaaaacttcacctgaagaagattggttctctgttgttcagcatg

SEQ ID NO: 108871 - DNA, 249 bp, Arabidopsis thaliana columbia
taagttagtaaacctcataactttttactttttttccgaagcccaagactactaagactgcggtctaattactttgggaatgagcacatacatcattgctatcttcatcctccttccattataagccacactctacttcctcatctacctctgagacactctttcatattccaagtccttttagatacgtcctaccttacactactcgaatgttccctatgtcaccaaactgcttactgatattgattc

SEQ ID NO: 108872 - DNA, 446 bp, Arabidopsis thaliana columbia
cttaacggtttctttattattcttcccattctacccctcttcttccttctaattccccctcaaatgccactgtcttgtcactaaactccaaaacccaccggaaaaaatgattacgtggcacgacttgtacaccgtcctcaccgccgtggtaccactttacgtagctatgattctcgcctacggatccgtacagtggtggaagatattctcaccagaccagtgctccggcatcaaccgcttcgtcgctatcttcgccgtccctctcctctccttccacttcatctccaccaacgatccttacgccatgaatttccgcttcgtcgccgccgacacgcttcaaaaaatcatcatgctcgtcttacttgctctatgggctaacctaaccaagaacggtagcttggagtggatgatcacaatcttctctctcagcactctcccaaacactc

SEQ ID NO: 108873 - DNA, 331 bp, Arabidopsis thaliana columbia
actgttcgctctttcctacgccatctgcgtccttgccgggaagagttactacgatgtgtggcaagtcccgaaaggtgcatctgatgaacagatcaagagagcttataggaaactagctttgaagtatcatcccgataagaatcaaggaaatgaggaagcgactcgcaaattcgctgagatcaacaatgcttatgaagtgttatcggatgaggagaagagggagatatataacaagtatggtgaagagggacttaaacagttttctgcaaatggaggaagaggaggaggaggaggccgcatgaatatgcaggacatcttcagctcgtttttt

SEQ ID NO: 108874 - DNA, 170 bp, Arabidopsis thaliana columbia
tatgctacacactttgcggttgctttcttttttcctgtctggaataacgagaaagaaggagtcactttcactgttctcgagatgcttattttattaatatttctatactcttctttaggttctgtaatatgaatgcatactattctttatcgtcgttatctaaacttaat

SEQ ID NO: 108875 - DNA, 129 bp, Arabidopsis thaliana columbia
gaagaatcaagaaaatgcaccaattggatacatataaatagttcttacggggactaccagggggggagctctattcaaaacccaaaacaagtaaccaggtgtgttgactcacagaacatctcactgatc

SEQ ID NO: 108876 - DNA, 167 bp, Arabidopsis thaliana columbia
aagaagcaacaaaaccacctaactcaaattgtcttctatatacaagaaacataatcataatgataaattgttatgaggttatgcgacgcctccaactaaagaagtgttggacttactgacgagaaacggaaagttgtttctagaatcttctgataagcagtaatttc

SEQ ID NO: 108877 - DNA, 419 bp, Arabidopsis thaliana columbia
caagtccccgtttcttcgttctcatcatcttcatcgccgattttgcaacgaccacctgtgggactcccgtcgatcaatctacgaagaagaagaagagatgagtaacacaccagcagcggcggcgtcatcatcgtctaaatcgaaagctgcgggaacttctcagccacaggaaaagcgcaaaactctctttcaaaaagaattgcagcatatgatgtatggatttggcgacgagcaaaaccctcttccagagtctgtggcgcttgtagaagacattgttgtggaatacgtcacagatttgacacataaagctcaagaaattggttcaaagcgaggaagacttctagttgatgatttcttgtatcttatccgcaaggatttgccaaaactgaaccgctgtagagaactgttggcgatgcagg

SEQ ID NO: 108878 - DNA, 367 bp, Arabidopsis thaliana columbia
ttttagctaaaataatttagttcatgcaggaatcaacacaagttgttcgtgtatgtatttcataacaaaacgccatagttcatgtaggaatttgcattcttcctcaaaattttcactctttctttaaagtgttacagcttcataactaaagcgattcaaaactgcaaaagctttatctcttcttctttgcaatacctccttttctagagctactactagcttcaggtccttctgcttcttcagccttttgctcggcctcaagtattgccaactcatctagaatgggtttgagttcaagataccgagtttctgcaagatcaaaaccatcctttcgcagcttcttgccagtatgttgggtatgctcgta

SEQ ID NO: 108879 - DNA, 163 bp, Arabidopsis thaliana columbia
gccatcttcatcctctgagatgtggagattctgcttcttcttatcgtactattcttggatgtagcgcggtgaaatcgggaatcatttctcccaagtcaaatcgagttgaagattccgcgttttaatctctatctagcctgttgcttcgtctgtccaacctaac

SEQ ID NO: 108880 - DNA, 404 bp, Arabidopsis thaliana columbia
ggaagagaaggggcctttaggggcggatagagagatctacacgtctttctactagatctcggattcattcccagaatcctctttcctcaccggctcaattctaccaagtttctaagaggtttattcatattcggcatagaaactcagaaatggtggaggatgtgtcctcctatcactaggggattagctgcacgagctcatgaggttatgactcatgagctacctccaactctgagctatctctggatcaagtagtttttttttttttttggagcctgttataagtttgtagattagatggaaaataagccaagtgttttgactgataaatatgatgttgggaggttattgggtcaaggtacttttgccaaggtggtttatggaaggagtattcttactaacca

SEQ ID NO: 108881 - DNA, 240 bp, Arabidopsis thaliana columbia
gaaaaagcatatattaccgtctttaagcttgaaataaaaggaaccataaaccatttctccttaggtttaggagttgttgccacatggagagctccctaggctcttcttcattagtggccaaaaacatctccatttctttttttctttttttaagttaactatgaaattttaagattatgtgacgtatcattcgagaagtcatatggtttatgttgactgcattagctaataaaactctac

SEQ ID NO: 108882 - DNA, 202 bp, Arabidopsis thaliana columbia
aataatttgaactcaaaaaaactcgaaatcaacatgccttctaaggttgagcattgtgacagggcgatccacacatgcatgggaatacagaagtgacaataaggctctaattgtatgatagattgcgggtacaatgacaaaagattgctcaaactttgaaataagctgctgtaacaagccaaatgaactcatgaagatgaac

SEQ ID NO: 108883 - DNA, 347 bp, Arabidopsis thaliana columbia
ccgttcgaattcggtcgcccacgctccgccaaacgtgcgttatgatttcgatggtgtggaggtcaggacgtcgacaaggttttcagattttgacgagagaactttactttgggtggttcagagagagtttgtggccattaagatgccatggagtgccggagagaggcaagacgggtttaactccgtgccgtctgggtttgatccttcactaattcataagacgtattggagctgtgctccgccctcctgcgttgtgaccgtgagttggatcaccgtcggtcagaggaagatgatcataacgctcttaacttcgagctaagttttatgttgtttgaggacgctttgtt

SEQ ID NO: 108884 - DNA, 443 bp, Arabidopsis thaliana columbia
cggtatttcctggctggaccgacgcgtccgggaagagtttcctacattttcactacaagtgaagctgtcgcagccgaagttgccgatctttctccgcttttagccttttccatcctcatgaatagtgttcaacccgttctctctggagttgccgtcggagctggatggcaaggatatgttacttacgttaaccttgcttgctattaccttgtcggaattcctattggtattatccttggttatgtcgttggtttgcaagtgaaaggcgtatggatcggaatgctctttggaatattcgttcagacttgtgtgcttaccgtcatgactctgagaacagattgggatcaacaggtgtcaacgtcgttgagacgtttaaatcggtgggttgtccagaatctagagacggtaaccaagtatcatcagaggaataaattggattctag

SEQ ID NO: 108885 - DNA, 419 bp, Arabidopsis thaliana columbia
cccgcttcttcaactccaaacctaaccctctcaatttccctccttcgccggtccacggcgtcatttcacggtggcgcttcacctctctccgacacctactctcctaaaaatccaatctttacaaaatccagaccaatatagaaatgactttaatcgcttctctgtctctcccaccaccagctatacaaagacaatcactttctgaatttcataatcttcccgctaaatctcaatccttcaattgtcaattccggtcttctagttcacctttatcttctctccattcttcatcgcttagtaactttctagattttagactaaggcggagaaacagcggattggttccagtggtggcgtgttcaacgacgccgtttatgggcagagttggattacattggagagatgggaatatgtctctg

SEQ ID NO: 108886 - DNA, 392 bp, Arabidopsis thaliana columbia
tttggactctctgatcatccagtttcttattttttacattgctttttcacttcaggcaaagcttctcaaagggaagctccggatggtgtctaaagactactcaggtgcaatttctgagactggttatattctcaaggaagatgaaaataacctcgaggcgttgctccttcgtggccgtgcctactactatttggcggatcatgatatcgcccaaaggcattaccaaaaagggcttcgtcttgatccggaacacagtgaactgaagaaagcatacttcggattgaaaaaactgctcaagaaaacaaaaagcgcagaagataatgcaaacaaaggaaagttgcgagtttcagcagaggaatataaagaagctattgcttttgaccctgaacaca

SEQ ID NO: 108887 - DNA, 212 bp, Arabidopsis thaliana columbia
ttttactctttttttttttacaaatcttaaactaatctcgtactttttttaattcctgggaggggggttaaaagaagccatggataccgagtttctccgaaccctagatcgtcagattcttttgggtgtcttcgtagctttagtcgccgatggtgctggtgctgattattttttatacatctttcacgatactcaaagtgtgtttgggttcc

SEQ ID NO: 108888 - DNA, 370 bp, Arabidopsis thaliana columbia
  unsure (1)..(370): unsure at all n locations
cctaaatttcgtcaactccacagcatcttgtttcgatcaacgaaatctcttacgcggccgcgtttttttacagatcggggcggctatcaataaatcttttcattttccatcaacaacatgctatttcaattcnagcttttgctaaagaagctgttctttcaacctttaaattatataatatattaaacattctcttttttgatattaataacaaattccatgctgcttttcatattcttcttaacgaaaatatcacccttgatccatattacccatctttcttaaaacataatgcaaatgtaatgaataccattattcaaaatacatacattttctcaaaatcttatcgcattaaacattacattgatac

SEQ ID NO: 108889 - DNA, 376 bp, Arabidopsis thaliana columbia
atcgtagtctgagaagacaattttcacaggctttgtacctggttggcacttcccctgtttgggccgttgataacaagggcatggccggcatttttgataaaattgcgcctttggccaaagcggttgtggttaaaattgagtcttactgcccaaggttattcgccaagatggttgccaagagaaatgtaacataccttatcatgaatgtcggtcctgacggtgtgggagcgcaccatcagcttaatgtgacggatcacaaaactcttttattagctgagaagccattcactgttttcggcatgaggaaccctgactacatcccatggagtgaggctggagctgactttgttgttgagtctactggtgtttttactta

SEQ ID NO: 108890 - DNA, 337 bp, Arabidopsis thaliana columbia
acgatttttatcaccaatcccaattttttctcttttacgaggaagggaaaggctctggactcgactgtcccaatgaatatgagtattcaggaatcacggtcgccgttagctgtagccacacaaacacgcggttcactgtaacaactgacaagaagggtgacttcatatcggaacttccctcaaagatcgaatcaaactgtgaagcagaactccaaggcagcgtatagcaactttatgcttgcaagaataaccttaaggcgaagattgttaagcttggctgtgacaaatatggtctctttttcaaggtgttctatttgtaatcatgttcaagaagctt

SEQ ID NO: 108891 - DNA, 441 bp, Arabidopsis thaliana columbia
ccggaggagctcgatccattgattttaagatgacaactccacaagtgaagaccgggttggtcgttgggttgaacaagggacatgtttttactagactttaattatctcctcgtttcttgttctcgcaaaggaaaaactagcaataggacaatctttattataatcttgataaaggtatttgctttttatttctatatattataagttttttattgttctatttaatgttgtttatagtattattgtttttatatatttttattatttattattttatctattttttatttttgtttttttgtttttatttcatctattttttttttatatattctttgttatttattcttatttttaattttttattatatttatgatatttttcttttttattgttctgattttattgtatatcttttatttttttatttattttatttt

SEQ ID NO: 108892 - DNA, 406 bp, Arabidopsis thaliana columbia
ctacggtcctcctggatgtgggaaaacccttttgttcataagctattgccaacgagtgccaagctgatttcatcagtgtcaagggtgccgagcttctgacaatgtggtttggagagagtgaagcaaatgttcgtgaaatcttcgacaaggcccgtcaatccgctccatgtgttcttttctttgatgagctcgactccattgcaactcagagaggaggtggaagtggtggcgatggaagtggtgctgcctacatagtcttgaaccagcttatgactgagatgacttgatatttgcctttatgaccggctgcttattttatctaccaacagacctgacattatcgattcagctcttcttcgtcctggaaggcttgaccagctcatttacattccactaccatatcatg

SEQ ID NO: 108893 - DNA, 451 bp, Arabidopsis thaliana columbia
  unsure (1)..(451): unsure at all n locations
cgaattcagactgtggaaattgcaatggacccgttagctcacgtgggtccaggtcaattagccggtggaacttttgcattggacacagaaacnttgcaatgggagaggctggataagtttggtggagaggaagagactccgagtagcagaggatggaccgcgttcacgactgctaccattgatggtaagaaaggacttgtgatgcatggtggtaaagcttcaaccaatgaccggtttgatgatctttttctttaacggattgactctgcctaattaagggagattttgttaatatgggggggggggggtgggtttttttttttttattcttttattatatattattataaaatttttgatgttctatctttacatttatattttctattattttctttatctttttatattttttttatcttttatattttttttattattttttttatat

SEQ ID NO: 108894 - DNA, 282 bp, Arabidopsis thaliana columbia
tcggcacgctacgacaagtgtgatgggtctctttggagaagtcgtgcctaaaaccggtgaaaacttccgtgccttgtgtactggtgagaagaaatacgggtacaagggttcctctttccatcgtattattaaggatttcatgatccaaggaggtgattttaccgtgggaaatggtactggaggtattagtatttacggtgccaggttcgaagatgaaaacttcaccctgaagtatacttggactctgaatcttgagcttggtttttcttggttctaaattct

SEQ ID NO: 108895 - DNA, 308 bp, Arabidopsis thaliana columbia
acccatacgagcggatggatggcgacgacaccatttgtttcgatgcggaccggatgttctactactgctaacgattgggcccgtggcacgacactgttaattacactatggcatggaccactggtgtgaactactgaggttgcgctaccgataagactttgaggggtggtgacattctaaaggtcaagtttggttcttgccacacaggggaggtggctgacaaagcccgatatgatggctgctacgcactcctgctcgactgagaaccattccgagggagacaccaaactagtttttaagagatgggg

SEQ ID NO: 108896 - DNA, 468 bp, Arabidopsis thaliana columbia
gaaaaaatgttgggaagcataagcctcatctcctgcaacttctctcgccttccacgtctgcttaaaccctccactcgacctgaaaccctaacacaatcctcaagcctccttcttcttcttcaatcacgagcttcttcttcaccacatagaattgcccttttcccgaaatacgagaagaaagtcacattcttccatatctgcaaaagctcttcaaacaacccagaagaaccagagaagactcaaattcaagatgaaggaagagactggtctagctcaattttgctttttgcgctttggggtgcgctcttgtactattgcttcaatctcgctcctgatcaaacacccacacaagacttgtactttttgaaaaagcttttgaatttgaaaggtgatgatggttttagaatgaatcagatccttgttgggttatggtacatccatgggtttgtggcctttggtttatgccat

SEQ ID NO: 108897 - DNA, 409 bp, Arabidopsis thaliana columbia
acgagcggatggagggcggggacacgatctgtgtagacgccgaaccggctattctgctacgtcggacgattgggcggggcgcaggacctgtgacattacactattgaatggaccactggtgtggactactgaggttgcgctaccggaaagactttcagggttggtgacattctaaaggtcaagtatggtttttaccacacggtggatgtggttgacaaagccggatatgatggctgcgacgcctcctgctcgagtgagaaccattccgatggagacaccaaaagcgatcttaagactggaggaatgaactatttcatctgttctacacctggtcactgcagaaccaatggcggtatgaagctagacgttaatgtcgtagccggttctgtcggaccttcgggcacttcca

SEQ ID NO: 108898 - DNA, 427 bp, Arabidopsis thaliana columbia
gagaactgtaggctctagatctgtgtctggtgctagttccgttcgaagcaggacttcatctgagagctcctgggatggatcaactacaagggggtcaaagccagctaaggatagacggaataggaaagttgtgtctggggccgcatctacactgtatggaaaaggaaagagtgttcctgagcactcaatccagattgatgatgataacagagaatggattcctgtatctagcaatgaaataatagatagagatctggggcctcgtcctactgtcccttcatttcaagttcagaggcatcaaatacatggtcatgaactagctcaggcaagtggatcagagtccacagtgtctcttgctccgtttatccttggccatggcatgcaacaaaaacgaggttgataattctggatatacgttttatcccac

SEQ ID NO: 108899 - DNA, 454 bp, Arabidopsis thaliana columbia
atttgctagctgatccttcgtcatatgggctccatggcttcttgtagattgatgtgtgcgcgtctttccgatagctcgtgagttgtgtaatgttaagtaccgtcaccagaaaatctgctctttggtctaattcctctcctatcactttcattaaggttttgctgcagtctgatggccaatggttcatgtcttggatcggtgtcgtttgattgtaaaaattctttccttgttcgcctccccaatcctcgatcctggtcacggaggtagaaaagatgaaacctctgtattctagggctctgttacgagctaaatcttattctggtttctacttgtggatcatgtcaaggccacatttacttgaactattaaagataaaccggatccttctaaaccccattactcatttcatttaataccaaatccggactatattattctaagccatcttctccct

SEQ ID NO: 108900 - DNA, 278 bp, Arabidopsis thaliana columbia
tcagtcaccaaatctcttgttctgtttttctgtctctctgcttcagtgttcttcgcgggggttgccagtttttcaggtctggggcgagcttttttcattggtcctgaactcagggttagagcagcatttgcatatatacaaggtgttttggtgacaattgatagactctaatatgggttctggaaatttgattaaggcaattatttagattgaagaagtgtaaacaaggaacttgaaatgaaaattactagtgcttgttaaaccaaaaaaaggtttcc

SEQ ID NO: 108901 - DNA, 561 bp, Arabidopsis thaliana columbia
  unsure (1)..(561): unsure at all n locations
cggtccggannattcccgggtgcgacgccaancgcgtccgcttctcgcttttaggctctctcggaattgggtgttttgtcagaaacgtgctcttcaaatctgaacctcgagaaagagtctctcgagtgtcgtatagtcttgcggtccgtttgagcccaatgnngcgttggtcaatgccacatccatacaanngggaaaccaaagnngtgccaataaggggcgacttattgcgtgnncagagtatgcgnnggtgtgaagaaatcgaggagtccgcagaccttttcagattgggcgtcacttaatncaagtcacttgagttctcttaagaatgaactctctattggaaaagggttctctgtgcttgagaactctctgaagggtcccatattttgagagcatatgctcattgcgccgatatagtgagctcgtaaggaatggtagacaaactctttgaatgggatcctccctttattgaaataacgctcacaattgagcaatggatncgatttcttcctcaattggagattgaatgctaaccatgttgaagtggtttgcttcaag

SEQ ID NO: 108902 - DNA, 403 bp, Arabidopsis thaliana columbia
  unsure (1)..(403): unsure at all n locations
ccggaangnaaggcccgacccaggcgtccggatccatccagagtatgaataggtggttctttattatggaatgccactccagaaagatcagacagagaaagggaacttaaggatcgagttcaatatcaagtttccagcgagattaactgcggaacagaaagctgggtttaagaagcttattgggtgatgattaaagcatctctgtcttgtgatgtgtggagattgggataaatttggtaatatacaatttatagggaattatctccctcttcattaaatttcgtgttgttaaacaagtcttctttttaaagaatagttttttcaagaaaaaaaagtggggattaaaattaaataaataaaaattatatattttattcctttttattataaaaaaaaatttttt

SEQ ID NO: 108903 - DNA, 405 bp, Arabidopsis thaliana columbia
gagatttctaagaagtctctccggttcagatctggtcatctaaagcccttcttccgagagctacgactttcttcctcaagggcgggtctgaattctctttttttccgaaaacagacaccacctgagtctgctgtctgaagcctcggcggagggagatgatgaagaatcttccggaggttggtaatggcggtggctcgggttttccggcggtcttctgtcggaaataagaagaataagtatcagagaatggactccgacgcggaggaatcgcagaatcatcgtgaagcataggctagaaacagtagaaccagaaaatacgttatggcttgtgccttttttgcatccttgaacaatgttcttctcggctacgatgttggggtaatgagcggtgcggtgttgttcata

SEQ ID NO: 108904 - DNA, 467 bp, Arabidopsis thaliana columbia
gcaatcggtcaggttactcaggtacgaccgacgttaccaatggcgacgacgatgtcaaatccgccgtcacagtcacaaatcgttaacgcgccaattaggcatccgataccggaatctccaaaagctagaggtccaaggcctaatgtggaaggtagagatggaacccctcaaaagaagaagcagtgtaactgtaaacactcacgctgcttgaaattgtactgtgaatgctttgcatccggaacatattgtgacggttgtaactgtgtaaattgtttcaacaatgttgataatgaacctgctagacgagaagctgtggaagcaactctggagcggaatccatttgcgttcaggcctaaaattgctagcagtccacatggtgggcgggataaaagggaggatatcggtgaagttgtgttgttagggaaacataacaaaggatgccactgcaaaaaatcaggatgccttaa

SEQ ID NO: 108905 - DNA, 460 bp, Arabidopsis thaliana columbia
tctgaggccaccagaaatggctcccataccatgtttaggtggcggaccaccagaaatgggtcccgtaccatttcaaggtggcggggcacctcccaattataatggactacctcctcctcctccttatcatacaaatccagctgctccaccaagtggtaatttcaacaatccaaacctcaacaatccgaatcccagtgctgaatctcctgaaagcaatgagtagagttagtaggtctgaatgaatcatttttctcctgccaaaaaattctcagagctcttgtttaacacaatatcctaccttttctactccaatttttatgaagaggtttagaactaacgtatgtgaaatgagttttatgtgttagatgattgtatccattagagtcatgaaaaggaaaatctgaggtttcttatctctaaaacaaactggtttatgaaagatttattaaaaggcttcatt

SEQ ID NO: 108906 - DNA, 465 bp, Arabidopsis thaliana columbia
  unsure (1)..(465): unsure at all n locations
cagtttcgatttcgaatcaaatatgaagctgaaagagtttttctgaatctttgtctttggatccgttatctgaattgtattcgccatggaagctgtgcttctctgctcgaagcttgttcctagagcggcgtcgttggaagggaaccaaaagttttcgttcaggcatttgaacaaacaccttaagtgcaattcccttcgtgctgattccagagacactccgttgctccgaggttttgaagcgataaagagtccgtctatctggagttgtgcgccgttcccagtgagaaaaggttcatgggttccacccagatgctcgatttctagctcgactgtttccgattccgataaccctttccttagccaatttcgaaccttctcttttgggtcaatggtgaagaaagttcgtgagttgaaagtgaagcccatggatgtntggaagttaactcttttgctatcgattttgac

SEQ ID NO: 108907 - DNA, 468 bp, Arabidopsis thaliana columbia
aaaagaatggcgaatccttggtgggtagggaatgttgcgatcggtggagttgagagtccggtgacgtcatcagctggttggttgcaccacagaaacagtaacaacaacaacccaccgactatgactcgttcggatccaagattggaccatgacttcaccaccaacaacagtggaagccctaatacccagactcagagccaagaagaacagaacagcagagacgagcaaccagctgttgaacccggatccggatccgggtctacgggtcgtcgtcctagaggtagacctcctggttccaagaacaaaccaaagagtccagttgttgttaccaaagaaagccctaactctctccagagccatgttcttgagattgctacgggagctgacgtggcggaaagcttaaacgcctttgctcgtagacgcggccggggcgtttcggtgctgagcggtagtggtttggttactaat

SEQ ID NO: 108908 - DNA, 459 bp, Arabidopsis thaliana columbia
gtgtctgagagactgtagtcactgtactctacagtagcactacttactcaacttttgaagagagaaaacagaaatgggaagtgtagatccttcaagactatcattggtcttgtttgcgagactgtccggtttagtagtcgcagtttcggttctgtactgggctctcttcctgcctaatctaggactcagctactctactcttcatcctctgctgatggtgattggcttcattcttgtaagtggagaagatggttgcctggttcaaggaaaacaaagaaagctgttcatttatggctacaaggaatggcattggcctctgcagtgtttgggatttggacaaagttccattaccaacgtggagttttcgccaatttctacagtctccattcttggatgggtttgctctctgtttctctcttcgctgcccagtgggtgactgggttcatgagcttctggcat

SEQ ID NO: 108909 - DNA, 456 bp, Arabidopsis thaliana columbia
tctcacatcgtgctacttctagggtttggctaatttagattcaacatctcctttaaaattctctggtcttttgtattcctagtctgtaacaatttaagaagaaatggattcgaattcatggatcaattgtccccctgtgttttcatcatcgccttcttcacgccgttaccaatctcgatcagatttgtatttgggagatgttgaaggagaagacgatttgaaagctgagtttatgtgtcctttttgtgcagatgagtttgatattgttggtctttggtgtcatattgatgtgaatcatcctgatgaagctaacaatggggtttgttctttgggatttggacaaagttccattaccaacgtggagttttcgccaatttctacagtctccattcttggatgggtttgctctctgtttctctcttcgctgcccagtgggtgactgggttcatgagcttc

SEQ ID NO: 108910 - DNA, 212 bp, Arabidopsis thaliana columbia
gcgacggcgaacggccgccacgcgtcgcgtttctataccgggggtttttgtaggtctctccaggggagatttattggggtgtacctactgtgggtgccctataggactatcacctacttatcttttctacattcaacgtgagcatacttcttcacccaaatcgtgctttttgaatcaggtcgtctctagctctgtcctcattcttgcctttt

SEQ ID NO: 108911 - DNA, 171 bp, Arabidopsis thaliana columbia
cacaaaaataaaatagacttaatatttatttactttctaatcacacggagtctctggggtgaagtatggacgtacgtgtcatcttcttcctccatcataagaccttaacttaaacgggagaaaccaaacgaaactccgatcttctccgttctcgtgtattccatatctggc

SEQ ID NO: 108912 - DNA, 146 bp, Arabidopsis thaliana columbia
tgccaagatagacgatgtaaacggtttttttttagatcggaaagcaatgtgtgagggggttttttgggcgattaccgggggaggatgaggtatctacttgtttcttttttgaatacaaagtttaagcttgtatctgtgccatcggt

SEQ ID NO: 108913 - DNA, 454 bp, Arabidopsis thaliana columbia
gtcgttttcctctgagagcaggtctaatggcgaaccagtttcttcctcttctcattcgttttcttccaatgcctcttcttcactaccgttgctgtttctctggaaacgatgccgttctgtagtttctttcaggaaatgcagaaactggtttctctacaaacttcttcttcttcttctccttcgtttttcttctcctaaatctgccgatttgaatctcgcaacgacgccgttttagattttatagacgaaattaagaaggaggtgaatttcagagtttgtcaatggagaattacgaggttcttgagcaaattggaaaaggttcctttgggtcagctcttcttgtgagacataaacatgagaagaaactgtatgttttgaagaaaatccggcttgctcggcagactggtaggacaagaagatctgctcatcaagagatggagttgatttcaaagat

SEQ ID NO: 108914 - DNA, 257 bp, Arabidopsis thaliana columbia
gcgtccgatttgaatctctcttttttctctctattatattttcacaaccctacaacgattacccaggagggggtcttaccggtcttggggtacttcccacacctcataggtttaacctctagaaatcgatccccgcgttcgaatttagatgggtatgctctttcatcgttcaatgtcttgaacttgaatggtttacggactttacccctccacaggatgggaaaaaccctaccattcgcgagcttcaacactaagag

SEQ ID NO: 108915 - DNA, 316 bp, Arabidopsis thaliana columbia
  unsure (1)..(316): unsure at all n locations
cacgcanacgcaaacatgttgaacatgcaagtagtttttttttaagagaaaaagcgcttgcatagggggggagtcaccataatacatggaaaaactcaactaaaatgggttcttaaacattcatggaccctaacaatccgtattgtggttggagttggctataacgttttattgtctttctacctaacgaaaaccactcactcacaccatattatgctgaaaaagacttttttgctagtattgtaacaagccgtgccatgttttagatgatttcacgagtcaaaaaccttcctccattatgaaagacagcaaacag

SEQ ID NO: 108916 - DNA, 456 bp, Arabidopsis thaliana columbia
ggaggattcattattcccagctcaaaaacgacaacttgaatcaaatctcgccttcttctgctccttctccaatcaccctgaatcatcaattaaccgactcttcttcttcttcttcctccggtggtaataatcgaataagccccatcattctcttcatcatcgttctcttatccgtaatcttcttcatctgtagcattctacatttgttggtcagatattacttaaagaagaaaagatcaaacctttcgtcatcaccaaacgaatctaatcaaaacccagaattttccgactccgatacttaccaaagacagcttcaacagctctttcatctccatgattcaggtctagatcaagctttaatcgatgctcttcctgtgtttctttacaaagagatcaaaggtacgaaagagccttttgattgtgcagtgtgtctctgtgaattctcggaagatgata

SEQ ID NO: 108917 - DNA, 402 bp, Arabidopsis thaliana columbia
cggatcttataaaatatattgaacttggtataaaattatacaacatgtggtcataagttaaagaatgatgatatatgatacaaaactctaatgaaagctcaaatttaaatgacataaacaagccctctttcatgaaagaatgaacacacacgcaacagcaagtgtaatatgcaccaaaccttccctctcggccctgccaaatggctttaacaatgtcaaaccaagagcttgtcgatgctggaatgaaaaggatggacgagactgaccaggctattgaacgttctaaacaggttgtgcatcagacactctaagttggcactcaaactgcatctaacttaaagggacagacggttcaaatgggccgcgttgtaaaccacctaaacacaattcagttttctctta

SEQ ID NO: 108918 - DNA, 355 bp, Arabidopsis thaliana columbia
gcgtccggttcggtcgccacgcgcgtgctcagagaggagcgggtgacgcttttagcgtttatctacaagggacggatcaaccaaaggggtgcaaaaggagactcaaaaccggtgttctaaaaatatccaagctagaaaggcgctttatttaggaagacaccacttgctcaaagagaagagactataagactaccaagaacattcatgtaccactaacacatgatgctggtaaagaataaccggttttaagagccgttattaagagcagggaggttatagacgcaaggctgttaggagcacagtgaatcaatcgaggccttaagagctaccagttagggggtgtttgaaaattgaa

SEQ ID NO: 108919 - DNA, 435 bp, Arabidopsis thaliana columbia
cgcgtccgaagaaaaatatatcacattctaagccgggtttttttcactattctcttatggtgctcttgtgaggctttgttcataccatggtgtacattcaaagccagtccaccggtccagctgcaaccactgaaaatagtcccatcaagctcacagcgatgcttgaagctggtcaccaatttaccacattaatacaactcctgaacacaactcaagtcggggttcaggtaagtgtacaactcactagctctgaccaagggatgactatatttgccccaacagataacgcatttaacaagcttaaacccggaacccttaacaggctgacatatcaacaacaaatccagctcatgctctaccatatcatttcaaaatactactctctaagcgatcttctcttacaagtaatcccgtttgaactcatgctaccggaca

SEQ ID NO: 108920 - DNA, 462 bp, Arabidopsis thaliana columbia
gtcgttcttggagcagattttgtggaaagactaaccaggaaagtgactcacttgatatgcaactttgcaaaaggagataagtatgtgagagcttccaagtggggaataatttccgtgacacctgactggctttatgaatgtgttagacagaatcaagttgtttgtacagataacttccatccaagggaattgaccactcaagatcgagaagcagggtctcagtttcatacacagtttgtaccaatggcctcaagggacagtatgtctctacctgtaagtcactctgaagacagggaaaaaattcaaagttttgctggcaaaagtggttgcgggaaaggtgaaatatataacagacttggagaaattggaaaggaacaaacttttccgtctaagaaggcaaaacttttgagagatggtcaagaaagtgatgtgtttcctgtgagagaacttccaagcaattgt

SEQ ID NO: 108921 - DNA, 469 bp, Arabidopsis thaliana columbia
ggccgccccacgcgtccgctaatgagtcttcagagcagtttagtgaagttatatattacaaaggcttgtgccctcatgttgctagaaagatatgaggtagcccgtgacactatcctctcaggtctacagattgatccctttagcggtcctctacgatccaatcttcaggaattggagaaagtgatgcctaattcgatgcgtaaaacccatggaatggctgagcggtctgatgattttgattgcactgtttgcctgaaattgctgtacgaacctgctacaactccatgtgggcatacattctgccgatcatgcctctttcagtcaatggatcgcggcaacaaatgtccactatgtcgaactgtcatttttatgactccaagaacatgcgctgtcagtgtgacactgaataacatcatagagtaaaactttccagaggagtatgctgaaaggaaatcagagcatgacactc

SEQ ID NO: 108922 - DNA, 461 bp, Arabidopsis thaliana columbia
ggaaaaccggccggcccacgcgtccgttaaaacccaaatcctatcactactttataatattcttcatcatggcctcagtaaccgtgtgcactgttgcaatcccatggtccaccacccttaaagccttaaccatcaaaacatccgccaccgtcagaatccaaactgctgctgttgcatcacctaagcttacagtgaagtcatttttaaagaactacggagtctcggtcgtatctgctgcagcttcaattgctttggccgtaaacgccatggcaatataatatctcttgggaggaggggatgggtctgtagcttttattcccaacgtcttctttatagcttaatgagacattattgttttcaataacaactctttttacctactcaatttttctcttcgtactaatactacttttccaattttcatttacgtttctattatttttttctaatcttccttattt

SEQ ID NO: 108923 - DNA, 200 bp, Arabidopsis thaliana columbia
aaaagctgcagctactgccaatatacctgttattaatgcaggtgatggtcctggagagcatcctactcaagctctattggacgtctataccatccaaagtggaattgggaaaatagatgggatcagagtggccccagatggagacgacctcgacaacgggagggctgggcggcttgtatactactttgtcgcgatgaaaa

SEQ ID NO: 108924 - DNA, 225 bp, Arabidopsis thaliana columbia
acgacagaatctacaaccacctatcgttttttttttacaccggatgatcctcgagggcggcctactcaaaaactattgggccactttttcacactcagagtcattggccaaatatttgtgatcaagagcgccttattggtggacctcaccaacgtaaagactgtgcggactctttcatacttgtttctcaactttaaagacgtgaaaatcttcttcgtttcccct

SEQ ID NO: 108925 - DNA, 178 bp, Arabidopsis thaliana columbia
aacacacccagacacaactaatggattcttttattacataaatggacttctcgggcggggtcctatactctgatgagtgatcacaactctacccatctcattttctttgtgcttgcgacacattattcaaattcctgtcttatcaactatcgaaggtgggcttggggtctaccattaa

SEQ ID NO: 108926 - DNA, 429 bp, Arabidopsis thaliana columbia
aaaagactatatttcaccgacaaacacttgtacaggcaactatgctggcgttatcctgggagaaccttactccaaaccttaccttggttacgtccgtgatgtttctagatacctatggaactttatggcagataaaacatctgtccaaaagggaaatacaacctcagtttgtttaaaaggagtctgtagcaaaactgacgaagtgtgcatcaaagcagagagcaacaaggaaggaacatgtgttgtttacacaaccagactatgttgcagtttattcaactagattgaagtataacgatggagcttggacaattctaccacagaactgatcagattctatggggatggttgatccagtgtggaccgaaagcaactgtgacactttaagggtgcatgtgtacacagtccagcactcaccatacgacaatg

SEQ ID NO: 108927 - DNA, 473 bp, Arabidopsis thaliana columbia
cgcccggccggattcccgggtgcccacccgtccgaccgcacagatccaagacattttgattacactccatcgccggcgaaaatggtgacggaaaagaaaacgaagaagtctcatgagggtatcaacagtaggttggctcttgttatgaagagtggtaaatacactcttggttacaagtctgttctcaaatccctccgtggctccaaagggaaactgattctaatctccaccaattgcccaccgttgagaagatcagagattgagtactacgcaatgctcgctaaagttggtgtccaccattacaatggaagtaagttcctttcttctttagctcgtccagtttttaaagattcattgttctcttgtttttgtgaaggttttcattgtgtataataactgagaatgtataatcttaagtagatgaaagtgttaaaatctgcttctatagaccattaaactgatgatggaagtat

SEQ ID NO: 108928 - DNA, 421 bp, Arabidopsis thaliana columbia
gacgagatcatgcaagacgttgaccttacacttgatcttgacataaatttttttgtgcacggagagccataaagaaacatcatggtatgatcctttggtgagctgttgttatgaataggcttcactcacacttgtgtgcaacaatgttatggatctcgttgtgtgatgccaccagatatttattgtgatgtgagccaatcgacgacagtgaccaagttcagatattgagtgcttcacagtgttagctattgctcaaggaaagcattactttctgagccagttacttttttctattgctccttagtatttaaagatcaattgatctcttaatctgtgacagattgattttgtcttaaagacggaatgtttaatttaagtaggtgaaattgtttaatttattttatgagcttacactgattat

SEQ ID NO: 108929 - DNA, 248 bp, Arabidopsis thaliana columbia
accgacacatccaagactttttgattttttttcacccccgacaaaaatgttcccggaggaaactcaaaaatctctgaggactcttcaacagcacacatctcttaaaacaagagcaaaataacactcttgacacaactattttatcaacaccctcctaccctccactgctaatcttactatattcctcaccactctcccaccgctatgaacatcaaatattgactactccgcattacttgataaagttc

SEQ ID NO: 108930 - DNA, 348 bp, Arabidopsis thaliana columbia
accaaaaacatacaagactttttcttttttctatggcggcgacaaaaagcgtcgccgagggtgaatacatgatgtagcgggactatcaagacaagcgttactaatagattataaattcatgaaacaatttgttacatacaactactttagcaaaagagcttatcgtctaaataggaatcttctttatttctaacaaaatcataatcttatgaatacaagacttttagcagatcgcatttttttttaagtatattgaacagcataagaagaacgacaagcacttctcttttattatggatgacgttttaaaagttatatctgatctttattttgttactctttaatttt

SEQ ID NO: 108931 - DNA, 266 bp, Arabidopsis thaliana columbia
cacacgcgcacgtccagaggcaaaacatttctatatttggccaagtgatccgccatgggagaagagaagactgtgcttcagctccctatttttccttaacttaagacctctgatttcgctctcaccgaataacctctatggacgctggtgaacaacgtgtcttcctatcgtcagagaggaaacaacgagaagccgtggcgcttttaccaattttgctgctctttccggagcgattaggagagatcggtgagaatctacatttaacg

SEQ ID NO: 108932 - DNA, 380 bp, Arabidopsis thaliana columbia
atcgggaagtggcaaatctacactatgatattcagtcgcagggagactccatggatggaaccttaccggaaaaatagtgataaactacggttaaataacgaaacaaacattaaaacgcaccggatttgtagcacaagacgatcttctttaccctcacttaaccgcacgtgaaaccttagttttcgtggctttgcttcgacttcctcggagtctaacaagagacgttaaactcagagccgctgaatcgggtatatcggagcttggtttaacttaatgtgagaacacagtcgttgggaacactctcattagaggtatctctgttggtgtacggaaacgagaaagtatagctcatgaattgcttataaacccgagttttatgg

SEQ ID NO: 108933 - DNA, 437 bp, Arabidopsis thaliana columbia
aattaattgatccgtcatctgtgcttcatgacaagattgggtctccacgtgccatcctcagtgatgacgaagatgcatctcgcgctagcatatcctctacctacaggtctgctgatggtgaggaggctcaacatggagataatttagggactgaaagctctggatcacgttctagtcatgttcgggttgctttcatagttgatgctaatataacatcgtatctaatgatgggttctgtgtcaccaggattgaaatctcatgctgtgacactctatgaagcgggaaaactcggacacactagtatcccagacctttgccaggatttgagcacattagagggagcgaaatttgagggtgaactgcaagaatttgcaaatcatgcctttagccttcgttgtgtcctggaatgtttgatatctggtggagttgctactgat

SEQ ID NO: 108934 - DNA, 437 bp, Arabidopsis thaliana columbia
  unsure (1)..(437): unsure at all n locations
gaaaancggcggacccacacacctctttgctctatctcttctcaactcttttttattagcaaagttctcctcccttccagggggctactattgttcagctggggaacaaccttctataacctttctacttattcaaccttatcaagttcctaaacactatacacgttaatctcttctacgctaacccaaaaatcctcgccgcgttaaacggcaccgacattaccttattcgttatggtcccaaactatcttctcgtcaacatctccataatcttattactctccgtcgtctgtattcgatccatcatccttccgttttacccaaccaccaagatccgttacctccttgtcggtatcgagatcctctctttactagactctgagcacatatcttcactctttaccctatttgcctattacctacctttcttaaaaatt

SEQ ID NO: 108935 - DNA, 161 bp, Arabidopsis thaliana columbia
gccatctcatacccaacatataaatttttttttcatggctgcatctctcactgtcgcgggtattttattgtaaaaaggggggataccctaatctgaccttttccaagatcattcctgtaagagctcaatcatggccaagttaacaagtttctcatacactt

SEQ ID NO: 108936 - DNA, 443 bp, Arabidopsis thaliana columbia
ctaatttcttacaccggacgattcgacaaaaatggtgaacggacgccaaggagaacgtgtcagactctatgtcaggggaaccatacttggctacaaaaggtcgaagtcaaaccagtatcccaacacgtcactagtgcaagtcgagggagttaacaccactgaggaagtgtcatggtacaaaggtaaaaggatggcttacatctacaaagccaagaccaagaagaacggtagtcactaccgatgcatttggggcaaagtcacaaggcctcacggtaacagtggcgttgttcgagccaaattcacatcaaacttgcctcctaaatcaatgggatctcgagttcgagtgtttatgtatccgagtaacatttaaagcagtgtgtactcgtcatcaagtggtttattatctgcaagcctttgtttatggaccttgtttattatttgac

SEQ ID NO: 108937 - DNA, 153 bp, Arabidopsis thaliana columbia
tcgctaatttattaccactgacgattaggcatattttgtgtaagggacccaaagaaaaacaaaggagaggggtggccgttttaaaggatccaagtttacatacggttgaatgcaaggcaatagtttttcaatagagtaacctaaattaaatta

SEQ ID NO: 108938 - DNA, 231 bp, Arabidopsis thaliana columbia
accaagttgacccacctattgcgcttggtttttaccacccagacaatcttaatacaaggggattcttctctttgttcgacgtactctttaagcaagattcgcttgagagctgtcccgatggttctaaatgatttactacaaatgcaaatttgctgactaaaactttcctcgtaccttgacactagcgttcctaatctattttttcattattcaatggttactgcatgatgc

SEQ ID NO: 108939 - DNA, 246 bp, Arabidopsis thaliana columbia
atatcatttccaatttataaaatttatattcatgccccgcacctttctctatccccgcgattattataaaagaagaggggccattcaaaacatacttttcataattacaaactttctaaatctcatatattttcaatctaacaaggctcccttacacttccccttaccttatgactctactcttccatctcaagcaaggctattctttcaactacatccatattaaactttttataactctcaaaa

SEQ ID NO: 108940 - DNA, 440 bp, Arabidopsis thaliana columbia
acggtggatacctaggcacccagagacgaggaagggcgtagtaagcgacgaaatgcttcgggaagctgccacaggtcgtggtgtagtatttgccaccgaagctcttcttgctgagtacgggaaatcgattcagggtttgacatttgttattcaaggttttgggaatgttggaacatgggctgcgaagctgatccacgagaaaggcggtaaagtggttgcagtaagcgacattactggtgcaatcaggaaccctgaaggtatcgacatcaacgctctcataaaacacaaggacgcaactggaagtctcaatgatttcaatggtggagacgctatgaattcagatgaattgctcattcatgagtgtgatgttctcattccatgcgctcttggtggtgtcctgaacaaggaaaatgctggagatgtgaaggcaaagtttatag

SEQ ID NO: 108941 - DNA, 243 bp, Arabidopsis thaliana columbia
gactagactgcccttcttttgggaattttttaggattcctcgttccttcaaaatgggcgggttattaatcttacagggggcatttacctcctgaagtatatactcttttaaacaggtgatccataaccagataattgcttgtagaaagcttgtactgctgatctatttgtcaaacacaacttgttactattttacgtcagacttgaataatgaattgcattaagcatgtgaagattgcatgca

SEQ ID NO: 108942 - DNA, 299 bp, Arabidopsis thaliana columbia
gttcatcttctacgactaagcaaagcttcttttctaaaattccacaggagatgagagggcgggttgatttacgaagctgggggaaaatatgtgaagcagaccacccagggtgggattagcggcagccgaatgggttcaggtcttgatgggtagtggttcgacattcccgccttactcctacgctcttaaatttgaacggggtgttagacattatcatgtcacgatccttggcgttgcttgcgatttgagtgaaaacatcaatcttcttcctgtttactccatttacaagcttcttccat

SEQ ID NO: 108943 - DNA, 229 bp, Arabidopsis thaliana columbia
aaaagagctttggaggttgttggtgatgttagacagaccaaatcacttaaattaatgggtttttcgattatctatgagagcgattcttctgactattcattgagtggtggggaggagcaagctgttgctgctattggtgatggctcatcatcaaggcaggagcaagaacagtattctgattttaatgacattggaggtgattcttcagattctcactctcttatcaatg

SEQ ID NO: 108944 - DNA, 269 bp, Arabidopsis thaliana columbia
caatttccaagcagagatgacggtgaattttatgttctcgcgtcttgtgtgtaaacacggacccttctatcgtgtagtgggggccgattaaaaatcgtgcatggacggttaacatattgtggtgtttggcttatatgatccacttcaaggcattagaagatgctgatagagtgagtctcaaaatttacagtattaagttctggttttctgttggagctcaaccattatacacagtggaaagctattcttttcagggccgttttgatacc

SEQ ID NO: 108945 - DNA, 426 bp, Arabidopsis thaliana columbia
gctaatcatttgcaactccgacgaacgttttatcttctccaacaagtagatagcaatggagacttcaagtccttcaggtttggggaacggagctttgttgaggagattcattggccaaaaagtcagaactgtgattcaagtgactggttcagagattggatctgtggttggcaaatctactgatgatcttcagatcgttgttagaggatcgtctcctccttctcctcttactacttaccttgaggttattggaattgcagagagtgataacgctattcgagctgaaacttggaccaattttggcaacacttttgatacacagaactacaacgagctatgtaagctagcaaatggggtgttcaagcacttgttcatctaatggtgtgatgatgattatgatcatggaatcgtttccatttaaaacat

SEQ ID NO: 108946 - DNA, 242 bp, Arabidopsis thaliana columbia
cgtcaatgttcttgtgagatctaactttctctttgttttttcagaagcttagctttttttaggagggttttttttgcacattgagggggacataccctaattttatattttaagttctatcgatggcttcactactatctcgcatttcgttcattgctctccgagctctacatctcgctttttcagggcaaggtttacagatatctcatctttgttgtcttacagtctcctgctatatctta

SEQ ID NO: 108947 - DNA, 294 bp, Arabidopsis thaliana columbia
gaaggtattgttccttttaatggtcgtttaagcaatgaatcatcgttatattctaatttggggtcacggttgggagtaccttctacttatgatgacatttcttattcatgagtgtgctttagttattcctactttttgctacattattttacaacaggttctgatttgttttgttacaaaacagccttttaatcttttttccttattttcattatatatttatttctttcttttctatttattttacatatttattttctttcttccttttttttttttttattttttttttta

SEQ ID NO: 108948 - DNA, 423 bp, Arabidopsis thaliana columbia
atttcaaggatgttttagcagatgatgtttatatagtttcgtctttaccttctacacatggtgatgactagacctgttgaagggaagaggactccacttcatgcttctcctcaatggattcgtgctcattatcttaagcgaattaacagagaaagagttttacttctccgtgactcgattcaagactctccaaagacctcccttcagatcttcagaaactccgatgcaaggttgctttccaagcgcttagattttctccgaggattcttgaactcggtaataaactagcttcaagaatgcgtaaccaaggacagtattttctcccttcatctaagaatggagaaagatgtttgggttagaactggttgtctccctggtttaactcccgagtacgatgaaatagtcaacagcgaaagagaacga

SEQ ID NO: 108949 - DNA, 414 bp, Arabidopsis thaliana columbia
cttcgataaggattttactctccagagaaagtaaaaaaaaaaaaacctcctctgcttttgtgagccgttaaggaaaaagacggagtggcaccgaaatcctccaaacccccctttaaggacttaattgtttttttaagtccaaagccggtcttcgaaaccttccccgccgcaaaaatcaaaccgttaccgccgaacttaaggagcttggcttaagccatttaaaccccattggaccaattaagaccgcgtttacttaattcaaaacccgaaaaatttttgaggatatggcctttgtgccaataatttggccaagtctcacaccccaaagtttctggtgttggctcgctctgattctcgagtttgcccatctcacatcttgaatttccaacctggtgaggttttttttgtcagaaa

SEQ ID NO: 108950 - DNA, 427 bp, Arabidopsis thaliana columbia
cacttgtgtcttcttctccaacactaaaccctaattaaatgagattcttccgcaaaacctggctttatctttctctcttcgtgtacttctttctttatgaatcttccatggctgcaaatacaatcagaagaggcgaatctttaagagacggaatcaatcacaaacctttagtctctccacaaaagacattcgagctaggtttcttcagtcctggaagctctacgcatcgtttcctagggatttggtatgggaacatcgaggataaagctgtggtatgggtagcaaacagagcaactccaatttcagaccaatctggagttctcatgataagcaacgatggtaatctcgtgttattagacgggaagaacatcactgtctggtctttaaacatcgagtcaagcactaccaacaacaacaacagagtctt

SEQ ID NO: 108951 - DNA, 433 bp, Arabidopsis thaliana columbia
cacgcgtccggaaacacatctgatggaatatcatctgtgattattttcacgaatgattttctaccatacgggggaggaactacttcttcctgtgggaaccaatccgggtggcgctacgtgccaaccatcacagaggaaatgaaactaacttcagatgtgatgggaagccgtctgggaaaaccgccatcttccatggaaagctcacctcctttcatatggtcaggtttaagttccacaaagatccaaatccagccattatccacaaccgaaataccgctgcagatatcatgtttctctccaggtatctacgatctgtcttcatatgaacttaactgggagctatctgagcatgaaagtgcaacatcatcagggacatgccaaggttatccttattaccttactgttcttcagtctgagtgagctattatagttc

SEQ ID NO: 108952 - DNA, 161 bp, Arabidopsis thaliana columbia
taccaattaaagccacaactaagaaatttttttatgcttaaaaccccccaccatctggcgggttatatactatcccctggggcactctaaaccattttatttaatctttttactatcttaaaaaaatcttttacctattcaataaatttcattcacctcca

SEQ ID NO: 108953 - DNA, 314 bp, Arabidopsis thaliana columbia
  unsure (1)..(314): unsure at all n locations
tcaggccccggcgacgtactgactganttaaagaatacctnnttttcttctctgtgntattnnaggtctcnntctcttcgtggcgttcgtctgggggtcccctcgcttaggaccccccannaaatnncgatccttggaagggagggcctngnncggcnntcagcntnncgggaagggtctttcgtcttacctgtcaacccgtctcccccatacaaaaggcgagatnaatttccaactggggttggtttcttgggattgttccttggtggggttggttaaagggaaccactattgcnnctcttcgtcttctcttt

SEQ ID NO: 108954 - DNA, 431 bp, Arabidopsis thaliana columbia
ccccaggcgtccggttcaattacacaggctcttgagttcctcattcctgcttataagggacatccacgtgtcatggcatatgtcctacgagttttagagtcctaccctcctgaacgagttacttttttcatgccgcagttggtgcagtctttgcgctatgatgatgggaggctagttgaagggtatcttcttagagctacccaaagaagtgacatatttgcccacattctcatttggcatttgcaaggtgaggatgtgcaggaaactccgaaggatggttctatcgataagaatgcggcattccaagaaattttgccacaggttcggcagcatatcattgatggtttcagccccaacgccttggacatgttcactagagagtttgacttctttgacaaggttacttctatatctggggtgttattccctct

SEQ ID NO: 108955 - DNA, 159 bp, Arabidopsis thaliana columbia
tcggaattacaaacaaaaatgcttactttttatttttactttcattgagctgatatttgggcgggccattttagactatcgagcaagatccatatatacctatttgcataccttcaaacaaactaatccatacaagattccctgaattaatcattaaat

SEQ ID NO: 108956 - DNA, 351 bp, Arabidopsis thaliana columbia
ttgggccaccggatggccccataatcaatgtgattgacactcctggtctcttcgacctggccgtgtccgctgagtttattagtaaggaaatcgtcaactgccttattcttgctagagaagggctacatgctgtggtgttagttctatccttgtcgactcggatttcacaagaggaagaaaacgcactttgtacgttacagatgttgttcgggggtaaaatcgttgactatttgatcgttgtattcacttgtggtgatatgttggaagatcgaaatatgactttagaagattatttgtccaatggttgccctgaatttctaaagaatgttctcagactatgtggaggcagaa

SEQ ID NO: 108957 - DNA, 312 bp, Arabidopsis thaliana columbia
  unsure (1)..(312): unsure at all n locations
aaccacttncttatccacaccaaatttcgaacttttctcaaaaagctcccttctttggtttcaaaatggcgtctgcgggggctttttttttccccttccttctctgttcttcccgtcagaattagttgggaggaggaaattatcagcaaaggtcaaagttagctccaccaggaggacattcatccgtttaattgttagacctaatgtaaaggaaatatctttagaccagctctataaatcttcttcacaagctgtttataataaacttgcatattgtgtggctcacactctcgcccctagagggaggaatgt

SEQ ID NO: 108958 - DNA, 408 bp, Arabidopsis thaliana columbia
aagatgtcgaccggtttagctctgaatcgctgttcagtttcggtatgtagaacggccgttgctttacttaaccggccaactggctccgttgccaggagtttgaaattcagtcgccggctaatcggaaactgctcgatagcgccggcggatccttatgttgtggcggacgacgataagtacggtaacaaacaagttatcagtctcactcctcgcctttacgactatgtcctctccaacgtccgcgagcctaagattttgaggcaacttcgggaagagacttccaaaatgcgaggtagccaaatgcaggtgtcgcctgatcaagcgcagttgcttgcaatgcttgtacagatgcttgcagcagaaagatgtattgaatttggagtttacacggggtattctttaatggct

SEQ ID NO: 108959 - DNA, 375 bp, Arabidopsis thaliana columbia
gggcgacccactcatcccttataaacaaatccaacaacgattttgtttctctctctggctctctttcttttgacgtgttcataacgttattcgaacattctatatatatatgtttcttgttgtatcttcatccctctggaaaaggatgttagaatatcatttcatgattctattttttatctcccccctgtagtcaccttccatattactatctattacaagcttcttcctccataatatcattatcttctaattcttcctacttcttcccatctttttaatcatcttcttccttatctcttcttctctctttctttttattattcttttttctcaaaacctctcaaaataatttattctttttatattctactt

SEQ ID NO: 108960 - DNA, 356 bp, Arabidopsis thaliana columbia
ccagtgtgtttcttcatcgcccgtttatttcatttgcttctagaacgaatcatgctgtgggaaaatacggtaagggtcgcgtgttaatttcatgggcattgggacacgtcgtcttccggtggttttatccatgactgcgatggctgattccggtgaggaggccgtgaaatctgttttgcctggaaatggcatatccatcatggtgaatggatgtagtggcataatggtgaaagcttgtattaaagcagttcactctttaagagtaaatattgtttccatatcttttttatctgctgttgaggttgtttatgagattcttagttcttcttttatgttatatttacttttttaccttt

SEQ ID NO: 108961 - DNA, 412 bp, Arabidopsis thaliana columbia
acgcgtgccggcaacactcatctactggtgatatggcctcggatttatcatctcatcaccaaccaaactccttctctgggatcgcgggtttaaaactcaacatggggagcgccacataaccactttgtagacttcgccgtgtgcatctgggaggaatgagtctacttgctttgagaggaacttggttgaggagacgatttgaacgtggtaggatttgggctgatcggatggctagctccgtcgagcattccagcgataaatgggaagagcctgacgggtctcttcttcgatagcatcggaactgagctcgctcacttcccgactcctacagctctcactttacagttctgtctgattgtgtttacgtggcacttatgcttctttctctgtctcactttcttactatatttat

SEQ ID NO: 108962 - DNA, 424 bp, Arabidopsis thaliana columbia
aaaaaccggtccggccgacgcgtccgataaaagttctcttctccgatcgatctctatcatattttcaacttcaaattccctttctgagattgtattatccgccatgggcggaacacaattgatcttgttaggacttaccgattttcctgctttgttccgatctcttcaatctcttcacgccttcaccgccgaaatttcatcaccaatcaccaccgtctatctcagaaaccctagatttccccgcacagaagtcaactggtgttggatatggaaacaccgtagagatcaacttctgcatctcctgctcgtacaagggaactgctgtatcaatgaagaagatgttagagagtgttttttctggattatatgtattttcttgctaattaccctgcaccagctccaaaactttttcttgctatagttg

SEQ ID NO: 108963 - DNA, 257 bp, Arabidopsis thaliana columbia
cttttatcaagagaataagtctgttcagattccaccattggttgatacaaaggggctgggtacttcattgtcgaggaatctactttctccaccatcttatctacataagtcttttgatgactatgatttaacattgagaaaaccttttgatgtaaataaagtcttttgttgttgtttttatttaatatttaacatcatatctattttttttatattttatagattttatcaataactttttttctattttatttttt

SEQ ID NO: 108964 - DNA, 272 bp, Arabidopsis thaliana columbia
aggaattcgggggccggccgacgcgtactattcagtctcatctcgtctgagaattattatttatttcatggcaatcatacttttgggaccgggttatttgcaaggtggtagggaaccaccttacacactccttcattttctgtcaatacggtatcgtctgggctcatatcttatctttccctcagttaaagccttcatatatttcatgaatcaacaaagacttttaataatccgtacatctttccccaatctgtctatttctttacatttat

SEQ ID NO: 108965 - DNA, 409 bp, Arabidopsis thaliana columbia
gaaaaccgggccgacccacgcgtgcgaaaaaagaaaacacaataacaaagattatatttgcttttttaaccatggctttgtcctcccctgccggggccggaaaggctgtgaaggctgccacatcatatgttctcggaagcggccgtgtgaccatgaggaagactgtcgtcaagccaaagggtccatcaggcagcccatggtacggatctgaccgagtcaagtacttgggtccattctccggcgagccctcgagctaccttaccggtgagttccccggtgactacggatgggacaccgttggtctatccgccgacctagagaccttcgccaggaaccgtgagctagaagttatccacagcagatgggccatgctcggagccctaggctgcgttttccctgagctattggc

SEQ ID NO: 108966 - DNA, 330 bp, Arabidopsis thaliana columbia
cagaaatgagtgcacttctctgttgttaacattaacacatcgttcttcttcatgtctttggatttcttttttggatggcgattctatatcaaccatatattttctttagataattttactagattcatctctttctctattaacaacattttaaataaatgacattttaagaaagtgattatatataagattttcttgattctgatttatccttttttttagtcataatatcttaaagatattataatttattcttttttttaacatattcacattcctactttatttttcccttcttctattaaactttttctttcttgaatatttaaa

SEQ ID NO: 108967 - DNA, 255 bp, Arabidopsis thaliana columbia
tatggacaaccacgtttatacactactcctcttacctgtcaaggccgcttttaattacacctatgtgctcgctaaaactcgtcacaacaatgacttttaacatacacacacatataactatagatgagatcaacccgactattacaaagcgtttgtcgttaattgcgctagagaacacggacgctaaccgtcaatcttacagtgacctgcttgagtcttctccagtacttggacagtacatctcctgagctatcc

SEQ ID NO: 108968 - DNA, 366 bp, Arabidopsis thaliana columbia
atgaagagaagtgttgcactgcaaaaaggacttcctgttcttggtgtattcaggacattaggtgcaggtggtgttgaccctgcaatcatgggtatcgttccagcagttgccattcctgctgcagttaaggcggctggtttagaacttgatgacatcgacttgtatgagatcaatgaggcatttgcatcttagtttgagtattgccttaacaaattgtgacttgacccatagaaatatcaatgtcatctgatgtgcattggccataggccatcctttgggctcttcatgagcactttgtgttgctacattggtgattgtgattaaacgcctttttttgactttttattgttagtattttttattttt

SEQ ID NO: 108969 - DNA, 369 bp, Arabidopsis thaliana columbia
aagctatatcccgtcttcaacctttatatgtcccctgcatcgaaatcactctcctcgcattgaggctcagagaccaaggctaccctcaaaggaacatccacagttgcaccaagctccaaagattcaaaagctttctcaaagacatctggagtgttccatctcttaggtgatgatgaaaacatagcaaacaagaagcctttggctggttctcaggtctcaggtgttcctgctgcatccactgcccataaggatttggaggttccgaaacttctaactgcacacaggttacttgattacaacccgcgtcgatgagaacatacaagctcctgttcggacatagagagttctttttgcgttctttgttaaaca

SEQ ID NO: 108970 - DNA, 333 bp, Arabidopsis thaliana columbia
agacccctttaaccaaactcttaaaaaaaattgactcaactatctcctcaaaagatctcgggccaacatactacgtgctaggggatcttctcgttcgctaacctagaccacaaatcaaaacttttataaacttcacatgttcaaaccaggagccgcatcatcaaactttaccacttatatcaaacacatagcctatacagccctcattactaagatccgcatacttttctccactactaatatgaggcactcccatacaccatacttatatcgttatcacaccaaccactttcacttattattatacatcatgcacagaggcttacacttctc

SEQ ID NO: 108971 - DNA, 417 bp, Arabidopsis thaliana columbia
ggacgacccacgcgtgcggccaaacctttctcataacctaaatattcttcttttttcgatacatttttaaaactaaagcgtaagggtgcataacaacgcggtagaggtcacatagctctacattccatgtaaatgctcttcaacaaacaatacgatcacatcaaacgatcatgcttataatcagcttaacatttatcatcttgatgctaatgttctctacactggccaatataccacttttgctctctgcggatttgttcgtgctcaagtagacacatacagtggcctggacagtcttcttctgaagaagaatgtctcagtttaacaactatgacagacaatctgacaatttcattagctctttgttgttttttgaggtttccattcattaacctatgttggctttttcatttaatt

SEQ ID NO: 108972 - DNA, 344 bp, Arabidopsis thaliana columbia
  unsure (1)..(344): unsure at all n locations
cggaannccggggcggccccagccgtccgggataattttgtcccgccggttcctaactttaaattttttactcctcctcctccacagtggggctaaaacaccaataccgaaccaggtttgaatccatttccgaatttggattttacctcaaatttttaccccattttttggcggagggggttttttttttcccccacaaaaaaaaggggggggggggtcctctgcccacaattaattgcttattattaactcccccccccaaccaaaagttttttttttttctcgaaaaaaaaaatgttgtttttaaattttttttttcttttagggtaaaaataaaaaggggg

SEQ ID NO: 108973 - DNA, 260 bp, Arabidopsis thaliana columbia
cgggccgacccagccgtccgttaaagcttggaatggcaatctactattttttttacatttttccaccggtaagggatgaaagggggtcttttcactcaaagggatccaccaaccataatgatgaataatcccccccccggggggtactttcaagataacgctcttcttcctattgggaacaaacattccggtaccaaacaccctaacggaaaggatggagctgttcaacaataacaccaaatggggaatctttaaggggt

SEQ ID NO: 108974 - DNA, 180 bp, Arabidopsis thaliana columbia
tttattaaacctaccaagggttttggttaagctaaaactggataaagaacataacttcagaccacagttttatccacgaaaaaggccgcctggcctgtggtgtgtaccaaagcctttagttttggggggccctccccccaaggcctgggccagtggtgggtccctgaaaatccggggggt

SEQ ID NO: 108975 - DNA, 328 bp, Arabidopsis thaliana columbia
cgaacaactttctgggcccatggcaggctcttttctgttttggctttggcaaaaccaacaggggggaatttctttttttggagcagcaacaccattggagccatccaaatttttttgattttggagctttgggctttttggtcctgaatttgggttcctctaaccctatttgggggattcttgggaccactaccaaaaccaatccatttcccatggggaaccaaccaaattccaggggaaaccccaaaacggaattacccgcaatggtttttagtcctggaagcaggaacccttccttttggaacgcttttaaaaaaactgtttttaa

SEQ ID NO: 108976 - DNA, 204 bp, Arabidopsis thaliana columbia
accttctttttttttttgatcccgaaaacccaaaaggggggaggtctcgtttttggggggagaaacaccaccaacccaacccaatcataaggagttagaaagctcggggctctatagtccgccatctgggaaagaaaaaccaaaatggcgggatagcataggtaccacgacaaaaaccaatcaatttccaaataggacccaccg

SEQ ID NO: 108977 - DNA, 414 bp, Arabidopsis thaliana columbia
  unsure (1)..(414): unsure at all n locations
acccggnccggaatcccggggcggcccacacccgtccgttccgatccagccaccggaggattctccgtgttttttttgcccccccactttcaagggcggtggctgggaacgctcaaactccatggttttccgggcattttcattgggggaaggaggtgaaccaggccccaggtccaaagcctgttgaagggaaagagggggccccagaggttcctccccaggctgaaggggttaaaacggaccaggctaaggaggaatttcttgtgggggaaccggtttttgtagttgaagagaagtttgaatttgttcctgaatcaacggaggtggcttctggggctcctgctgcaccggaggacattgctgaaaagactcctgttgctgttgaagaaattattgccaaaacccctggtgaag

SEQ ID NO: 108978 - DNA, 422 bp, Arabidopsis thaliana columbia
atttattttttttaaaagaaattcgtaggtcttttcattaaccaaaagagggcccaaaaggtggaggcccaaggggggaagggggccaacctatgggccgttggatcgccacatgaccccgggcccaaaattaagttggcagcaggcttaaacggaattaaatttgttcagttggattttgtaaagaacggccaacccgaccaggttctttttgggggtaccaaaggccgggttttcccagctgatccgttggtgattaaccatccagacaaacatttagttttttgagaaggttggtttagccctgaaggtttcattaaaggaattaagttcatttccaacaagaaaacttttgatgtcattggatccgatgggggtcctaactttactttacaggttaaggccaagaagatcattggttt

SEQ ID NO: 108979 - DNA, 343 bp, Arabidopsis thaliana columbia
accgaattttttggggatttacccaagggctttggcttcttcgttgagttggaacctaatgggggctttcaagggctggctttttttttcacctccgccttttttaagaggcgattggggtttttcccccaaaccctctttaacggggccttttcctttggaaaattttaaagctccgtttccgtggccaatggattcggcccataaaaaaggggctggtaccaccaaaaccggccgtgtttttcctgggcaccgactcggcgtaaagacctacggggcccaagttgctaaaccggtggctatcatggttcgtaaccggggcactaagttccatcctgggaaa

SEQ ID NO: 108980 - DNA, 434 bp, Arabidopsis thaliana columbia
  unsure (1)..(434): unsure at all n locations
cggggcggccccacccgcccgaccgaggccaaaagggccccgggccgnggccttcctaccgcaaaggcaaaaggccaaaacggccgaccaggaaccgaggctaacctggcaaccaacaaccccctaacctccaacccaaaaccagtggaggctaaccggaaaggcaaaaggggaaagggggggaagaccggaatggcccaaagcccggctgggtccgaagcccaggacctggcggatcaacaggacggggcgcccaccgaccgggcactggacttaatttggggagggcaccaaaccacaacaccattgggggataacccacagaccaggaaagacatggtgggccaaagatggccaaaattaccaacggaccagaaggcaaaacggaaggctccaaccgattccggggggcccaacaccaaaactcaaggggg

SEQ ID NO: 108981 - DNA, 305 bp, Arabidopsis thaliana columbia
gggatgttttaaaggaagaatggtaggatttcagcttcagtggtttaacctggaaagcgttcagttcttttgggggttggggctcttttgataaagttcattaaagggaaggaaggaccgccccaattaaaccttgaaggggaatggggggtgaaaatcttttttccttcttcagggaccaaagtccttatcacctttaaaggcggttcattggattgggtgactaaagtttcaaaaggattaccacccatttttctatgaggttttaaggattccaagttttaactcctaccactttgtttaac

SEQ ID NO: 108982 - DNA, 432 bp, Arabidopsis thaliana columbia
  unsure (1)..(432): unsure at all n locations
gaatncccgggcggccccacccgtccgttccttttttaaaaggaaatccgtttttttttatatgaggcagaggagggcccaaaggggggaggcccaaggtgggaagggggccaacttttggaccaatggatcaccacttgaccccgtgcccaaaattaaccttccaccaggcttaaacggatttaattttgttaagttggtatttttaaagaccggccaacccttaccaggctccttttagtggtcccaaaggccgggtcttcccagttgacccgtttgggattaaccatccaaacaaccatttagtttttgtagaaggtgggtttatccctgaaggtttcattcatggaattaagttaattttcaccagaaaaacttttattgccattggtcccgatagggttccttaatttaactttcaaagttaaggac

SEQ ID NO: 108983 - DNA, 371 bp, Arabidopsis thaliana columbia
cggaatcccggggccgccccacccttccgttgccaaaactccattccttaacatgttctttttcgggggattggttcagcataagccgccgcaccttccaccgtttgaggaccttacctttggaaaaatcaagttcagggttttggattgggggggccataaaattgctcgtagggttgggaaggattcctttcccagggtggatgctgtggcctacctgggggatgctaatgccaaagaaggatttgcagagccaaaaagggggctggttgcttttttttgggatgaagccctggcacctgtcccgtttttgattctggggaccaggatggaattccctaatgcagcttctgaagccaacctgaggttta

SEQ ID NO: 108984 - DNA, 441 bp, Arabidopsis thaliana columbia
  unsure (1)..(441): unsure at all n locations
gaannncggggnggacccagccttccgaccaaattttttcacaccaccacaaccactttttttttttttccacacacaaccgaaccatgggcaatggccattctaacttgggcccaacttttctttccttaaaccaacctacttccgccgaaccattttaactaattggtttggttttttccacctcctcttcaaccaccgcggattttgccgtttaaaccacaaacgcctccgccccaattgcctaaaccggaacctttttcgactgtttggagacccatttggtaattaaaaacttaagccaggccgccggggagcacacggagatacctcattcagatttccggggaagccgccgggaaacgtggttccgtttttttttcctgggggaaaccaatttcccccgaggtattttaagtttttgacattttttggattaaa

SEQ ID NO: 108985 - DNA, 238 bp, Arabidopsis thaliana columbia
accatcttaaaaccggttccctccttgtgtttgttccggagctacggtccatcttgaatgccttttttctctggtaaaaatcactttaagaacctttgttaagctttgatgggagtgggtttaactttttagggtttggttggagttggaccttaatggtatagaggtggggaccttgtgcccctctatattggtttccaggggtttctatgtggcgtctccttgctaaattttttct

SEQ ID NO: 108986 - DNA, 427 bp, Arabidopsis thaliana columbia
  unsure (1)..(427): unsure at all n locations
cggggccgccccacccgncgcggaaaagggaccaacccccggaggnncccaccaaagggcagccgagggggaaaacgnnaccgannccgggggagggagggcaccggcccgcccaaaaacacaagacccnaacaacaccgnggaaaaaaaggggnacaanggacggaccccaggaanaccccnaaccgaaggagggggagcagggcccgaaggggggcagggaaaggaaggggcggggaaggggacaaacggaggggaagaaaagaagggcaaaaacaccaacccggacaaagaaagggggccccaaggggaaacaaccgggggggggccccccaaaagaagagaaacccccggggcggcaaagggaaaaaccaaggggaaagggggaggggaaaaaaaaaaggaccccgaaacaaacgggggacca

SEQ ID NO: 108987 - DNA, 362 bp, Arabidopsis thaliana columbia
gggaatcccggggccgccccagccgtccgatttaaacgcctttttttctcccggattatttttttttggggattccagggcaaagctttttaatttcctcgaaatggccggcgaatcttactaaagggttggtggggcaatgaagggggcgcctttggtggttttggccgccccaatcggcatttttttccagggttgggccaatgccaccatggttggggctttggttattttcaccaaagactggattttaccacccttggttcagggcctggtcgtggctttgtcatggatcggggcaccggtcataacaactggttcaggaccgatttttgtttggttcggcggaccccccatgctca

SEQ ID NO: 108988 - DNA, 340 bp, Arabidopsis thaliana columbia
  unsure (1)..(340): unsure at all n locations
ccaacccgcgagggcaccaacaaccgnggnaaaggcaggccagaccnccgccggcgggggaaacccaaccgnggggggggaaacccacccgccaaagggaanaaagggaccagcagcgggcccagggggggcncccacgggaaccaaggaggcccnggagcggagggagggaggaccggccacccngggaaggggggaaccaaaggcggngggcaaggggaacaacacaaccggcccagcacnaangggaagggacccaaccaagcagacggcaanggccaacncaagggcccaggaacnggccggaccccaaaacggggggggggggggcaggcaaaag

SEQ ID NO: 108989 - DNA, 443 bp, Arabidopsis thaliana columbia
  unsure (1)..(443): unsure at all n locations
aaatnccggggcggcccaagccttccgagggaatcaagggaaccacggcttgcgggttttgtttttagcaggatgggccagttgggggtgggtttttactttgttaactgggtggctgccaaggtggtggttactcccaagcccattgccattgagcagaccttgggggagtttaaggccgggggatttttaattgtgaccagagacacttttggggggactttgggtgaaggaccaaaaatggttttttacctaagggaagaccagtgggggtccctgggggggcgaaggctaaaggattgggggaagaaccactttgggttaataagtttcccaatttttttttggattgagaggaccattgaaaaggaaatcttttttgataaaaaggaggaagagaaaatggttgaggaaggcaaggttaaggaatttgattaggtaaa

SEQ ID NO: 108990 - DNA, 452 bp, Arabidopsis thaliana columbia
  unsure (1)..(452): unsure at all n locations
gggantnccggggtggcccaaggcgtcggaccacttttaaaaaactttccggatcaatctttttggcttcctttaactggacctaatccgcatgggattaaaggccaccccaaaccggttccgaggtcgtggaactaacagggttggggaaaccccagaggaggtttaaggatttaatggttccatttccaaggggcaagggttggggaccagttgggattttaacccattccgggggccactgggggcaggatggtttcttggagggtttttttaacgttaaggaccttttcgaggcacgaccaactgatttcttggtttgtggttccccaaaaaccggtccaactgggttaaaggcattaacttacgcaatggtaaatggttttggttccgacgaccgccgaaaccaattcttaaaacgaaaccttaacgggttggtcctttacgttggg

SEQ ID NO: 108991 - DNA, 319 bp, Arabidopsis thaliana columbia
  unsure (1)..(319): unsure at all n locations
gggncgggaannccggggcggaccacagcgnccgaccaaaggnaaaccgaaacccgaaccaaacaaggggggngggaaaaaacccaagggcgaagaggaacaaaaggaaagnggggggggcaacaaaggcaaaaaacgggggggggncccccggaaacgaggccaagccaaaggcgaaccccccggcggaaaagccggcaaggngnaacccggcggaagacgcaaaaaagccgaaggaaaaaaaacccaggccaaagccaaccaagcaaaaagccagcacaacccaaggaacggggagagaaaaaccggcgggagaacc

SEQ ID NO: 108992 - DNA, 419 bp, Arabidopsis thaliana columbia
caatggaagaagggctttttaacctggaaattttgaaacctaaccttcctaagtggttgtttgaataaaagttgtccaaagttttccaggggggacctggctttccaaccgttaaatggtttggggttgaaggggcctttaatgtcctcgggttagactggtgggggcctacccttgaagattttttcattttttgtggtaggaaactttaattaaggactgtcctaatgctggcggatcaaatgatcaatcgctttgggtttgtccttaaaaggtaatttttccttggggccatcaggcctgccacctttttgttgggttttggagggcgtgcaaataaggtttccgtaatcgactttggtttgccaaagaagtccagggcctcaattcttcagctttttccttttagggaaaccaaa

SEQ ID NO: 108993 - DNA, 441 bp, Arabidopsis thaliana columbia
  unsure (1)..(441): unsure at all n locations
gaatnccggggcggccccagccgtccgaaccaagggaaacccctccggtccaaacagattcaaaggggacttttaaccaccccattccaggaggaggaccaagggggggctttttaactatgcccttaataatggcaaacaaggggttcgggaaaggggcaggctttggatttttccagaccatgatttttaatctgatgagggattccagatggggcctggttaaaggccaaactgcttggtcaatgggggtggctgttcctaatttaatgcctttggtgggagcttttttttaaaattaatattggggtcgttttttaaccatggcaatggtttttttttccagtttcctggggatgggggttttatggttaacggcaatgttgccgcaggtaaaaccataaccggttgtagcaccagccggacccaactgcagttccg

SEQ ID NO: 108994 - DNA, 286 bp, Arabidopsis thaliana columbia
gggccgccccagccgtcctatcggaacctaaaaatcctaaaagggaccttttttttaccagtcctgaaaatggaggggggattgggctaaattggaaatggattcgcattcttggcggcggttccataagcagttaacagttttctttttaccaggaccaaaggggccaggatcatgactttggcctttaacaagcccgtctccgttggggtgaagcctggtacccgggttcagttaccggagtttgtccaaaaaaatggttcacggattcagtttcgtaagggga

SEQ ID NO: 108995 - DNA, 344 bp, Arabidopsis thaliana columbia
gggccgccccacccgtccgttaagaaccgtaccggccgaaaatttttttttggacaaaaatcggggagggcatggaggggggtggttccttcctggaaggcgccgggaataccaattatttcgaattcaaccatttgtgcaattttttgagggaactgtcttatggggccacccaaggtggaacctctaactcgcaagagggtcaacttttctctttccaaatggcttgttggaatgccccataaccctgttttgcggtcagccccacttgaagtttgaagtaacttttaagtctttgtctttaagggattcaaaagtacctgagttcccaagacttgtttcct

SEQ ID NO: 108996 - DNA, 297 bp, Arabidopsis thaliana columbia
aaaaaaaaaagttcctttttagtttttagggaatattatttttgaccgattatgtaataaataatttacgggttaaggtagctttttaataaatgggaaggggcccaagttaatttccctaataactttccgcccccttcccaaaaaaatccccccaaatccaccccccacccaattaaaccttttattttggatttaaataaactattccggggcctccaatcaaatgggttcgattctccggcgtaaccttttccggggatcgggaattttctcaagcccatgccctaatttgac

SEQ ID NO: 108997 - DNA, 357 bp, Arabidopsis thaliana columbia
  unsure (1)..(357): unsure at all n locations
ggaaacaaaagggggaagaccggnggaatgggagcgggatttgtaggaggaccaacaagggcggggatggcatggaaaggtccagatatggaaggggcagtggtggaaatttcggtccttagaataaacgctgggaacagggatcagcttccgattaacaggccaggtttggacgatttcgtaaagcattgcaagggaaggaatttttctttaagaccggagggggggaaccaggttagggaggcggttttggccttggcctttgttaacacaccgactaaaacgactggtttgggggctgggaaagttgctgatctaactaatggggagagggttgttcgaatgaccgcggttgta

SEQ ID NO: 108998 - DNA, 287 bp, Arabidopsis thaliana columbia
ggaccagattttttgaaacggggctggaccaataaattccttaaggaccaagggcggaggagcttcgaggtcggaaaccaaaaggcaactcgattttgtgtaaacaccgggggttccctgggaggttccgccacaaggaatctcggtcttaatggtaacgggaaccttggtctaaaacaaaaccaacattcctcctcaataaaatcaacggtggaattttcccttctggaactttctcggcggcaacaacaatgggaaatcttatctcggacaatcctcccatacgt

SEQ ID NO: 108999 - DNA, 434 bp, Arabidopsis thaliana columbia
  unsure (1)..(434): unsure at all n locations
cggggcggacccaggcgncggccaccccaaaggaggagccccgggcaaccttttcacccaacccccgggagggggccggccgaggcggaaagggagcgggaggcccccgcccacccaaaaaccgaaaaaggaaacgcccggccacaacaaccaggggcaaggaggcgggaaaaccggaacccaaaggaggcggggaacaagaccagaaacgccgggcggaggctggcggggaacccacggcggaaccaagcccccttggggacgccagggagggggccggggggggaaaaaccaacaagggccgcacaaaacaggaccaaggcggcgagggacgggacccccggaccccccgaccggaaaaaccgaggggggaccaggatgggccaccagaccaaggccccgtaggagggggcggggccggcggccggggaagg

SEQ ID NO: 109000 - DNA, 354 bp, Arabidopsis thaliana columbia
aaaatttccaaaaggaggtcgaacctttttttttttttcgccatgagtttaaccggtcctccaatcggccggaccgagagggaccttttcgctgttccaaccccaaccacgggggaaattttccgggctctttgtcccggcaggaaaggaatgggaaagctgggtaggccacttaacttaaaaggatcgaccttccaccgggtgattcccggtttcaggtgtcaaggaggggatttaaccgccaagaacggaaccgggggggaatcgatctacggtgctaagttcaaggacgggactctttttaggaagcttccaggaccttgggattttttcaagggtaaacttttggtccta

SEQ ID NO: 109001 - DNA, 448 bp, Arabidopsis thaliana columbia
  unsure (1)..(448): unsure at all n locations
cgggaccggaaggccggggccgacccacccgnccgagaaaagggcgacgggaccagggaaaggcccaaagcccgtggccgccgacccccgccaccacaggcagggccgcctggcgccgaccaccgcaaaggagcccccaaagggccaaaaagaggccacggcccgggccaaaaggacaggcccccccggcggacccgaccgtaaaaaaaggaagaccaggaggggcccccgaaaacgaaggaccacaaaacctgccaagggaccaagcaacacccgggccccacccaaaaccaccgggcgaccggaccggggaaggaacccacacaagacgaaccggggagcggcggaataagcccgccggagggaaaaggaaggggacccacccccaaaggccaggaccaagaggagggcaaccccggagcccccaaagggggggaggcccaaagcc

SEQ ID NO: 109002 - DNA, 448 bp, Arabidopsis thaliana columbia
gggccgggaaacccggggcggcccacggcgccggcggaaaggcccggacaacggtcaacgggacaatcggcccaaccgcgggggtgggccggggcccaacaatcccggccgccgcaaacgggcaaaacccaataaaatcccggaagggagtggattggggggcgagatcctccggggggaacacggggccggcccagaattccgaaatggaccccccaaccgaggggaataggggaggaccgaccaccagatggtggaaaaggagcaggcaaggggggttttgggaactggacctggtttgggggaatggggtgggggagaaggtaaatcccagggacgaaaagggggtaaaaccccaaatcaagggcccaaaaagggaaaacccggacctcgggaaagggcaaacggaacaggaacagcctccggaggcagggggtcaaaacccggg

SEQ ID NO: 109003 - DNA, 367 bp, Arabidopsis thaliana columbia
  unsure (1)..(367): unsure at all n locations
aaaaccaagcaccaagggcggagcccttncaagaccaacacacaggggagggggcaaaaaccgggggggggcacctggccggaaaaaccaacatctccggggaccaatggtcgggggatgtggtaagggttaacgctgccgttccagggaaaccaagggaggcctcccccaaggctggcagggggtccaggtccggggcttcccaactggctaaaagtttcctgggaagggccgtgggagaccaattcgggggctttgcggcggctgttccagttgtggaagctgaggccccgtgcacttgcagtggaggatgatgatgacatggatcttttgggggccgggaccgaaaaagaaaagaaggctgcaa

SEQ ID NO: 109004 - DNA, 423 bp, Arabidopsis thaliana columbia
aatcccggggtggcccaaggcttcgggccgaccggacttaatttttttaattcggaatccttgttgggcccggcaaatccggtggggtttcgggggaacccgcttccgtggttgaaggatgagctcgatttcgggattccgcctttaaaaaacctggatttcctggagaggggggggcctttttttaagcctaaccatttgatcatggtccaggacggagatccatcgaagaagatccatgtccttgaaggttacaactccaagctttacaccaggaccgccattaaccgaatcctgggacctaaggcttttggtttttggttaaaggattttgttggtcgatgcttggggaccatggggtttaagaggaagttttttttaaccatggatgacgatggtttcgttgccaaggatccataaggc

SEQ ID NO: 109005 - DNA, 427 bp, Arabidopsis thaliana columbia
ggtccgcccgccgcccaaaattttaaggggggggggctggttaatttttttttttccagttggacccggattgggtgatatcctggcttttatgcgggaccaataatttccgattccatatgggatctttggttcccgactatgaccggccttttttccgttttaaacggacctggatcttaatctccatggtggttaacccatggacctaaacgtttttttccaggaccttggtggcctccatttcttcggggataaacatcttcgtaacctccgatggttcaggacccaggagcaaaaagggcctttagactccatcaggatggatgtaatcggggggggggtttcccgaaactggggattccaaagaattggggaggcagttttaccttttaatccggaaaaggatttcgaggctcttttggat

SEQ ID NO: 109006 - DNA, 409 bp, Arabidopsis thaliana columbia
cccagccgcccgaaaacccgttttttttttttggaccaaactttattttttcccctcttggatcctcctccgtaggaccgattttttttaaaaccaccattgccgcctggccttgaaaagtccgattccttggttaacctcgcggaccaggcggaagggtccaaaaggatggtaaagttaatggaaaaggtttccgccgccgtggatggcaataacctaaccgtaaaaaaccgaaatcttttttccgccgttaataaaaaggtgattggggctcgccggccctgggggcgtatcatttaatcatccgaccaaaaggaaaagagccgtggtaccaataaccacttcccggcaatccgggaatttaggtttaagaccgagacggacctttccggaatctgcaacggaatcc

SEQ ID NO: 109007 - DNA, 396 bp, Arabidopsis thaliana columbia
cgattattactttgcttacctcgagattctctttccttattcaactctcatctgtaatcaatagagggggcagcttcatcagctggtgttgtcgtaaatggtttgtcagtgtacacaacaaccaaacagaggttaattaaacatttttccggcagacagactagctaggaatgagacatacttacatccactgttgagtgtattgatcgctcatgttgttgttactaacaagcatgaattaatatgtgattttcctaaagttcttgttaagaaatgatggtgtcggtttgattgctagtgggaaatcaattgctgatgaacatggtgtttctttcccagaggatgtcatgttctatgtttatagagtacttgtataaggatagggtgtatattctt

SEQ ID NO: 109008 - DNA, 321 bp, Arabidopsis thaliana columbia
atataacttcaactccatgtctgttcattctcccattcttgtgtccttgacgctttacggacagagaccattctttttcggagcgactacttctctaatattttcctctccatggctcccgtgtagggggcttcttgtcttgcaaaggacattgtcctttttgaaggaaagtaacatactgtctcctgctattagatcattcaccactcaagcttcattcacttctaccactccacagatttctccacctactacttctccggaaaagactcatttctttggtctcaatgatgtaaatcggattttgactaatctttatgg

SEQ ID NO: 109009 - DNA, 264 bp, Arabidopsis thaliana columbia
ctcggcgaagctttgtcccggagtttgtgcttatccgttcgccgtaccggcgtttataccgggattaaaaccggttaaatcgcctaacggagatgttggagtagatgggatgataagtgtgatagctcacgagattgctgagctggcgacgaatccgttggttaatgcttggtacgcaggacccgacccggtagctccggttgagatagcggatcttagagagggtatttttggaacaggaggtggtggtctaatcacagagga

SEQ ID NO: 109010 - DNA, 261 bp, Arabidopsis thaliana columbia
gaaacccaaacccttattccaaaaaatggtgtttttgctctcaaaacctctactttctcgggcggggtctacttggcttcgttggcggctactattctttgagactgtaccccttctaaaccattaccagcacctaactaaccaccaaaacatccagtcttaccgtctaaaccatctgacgactaaaccatcttaactaccgtctgtaaaacctcctactgcaatattttttctctttttaacaccattctattctaccaa

SEQ ID NO: 109011 - DNA, 539 bp, Arabidopsis thaliana columbia
  unsure (1)..(539): unsure at all n locations
cggtttcggaattncccgggctcgatcccacgtcgtctcgtcccacgtcgtctcgtctatgtttgtaaaccgcgccgtagtaatcgaaccgtnnatgagagncctttgaanngaaatnncaagagnncggctataagggctgcngnntctgccccgcttcnnnttctttagagcgaatagtnnattggcccacntnncttttcacncnngctattttnncttctttgtcccctcgttttccaaggggattgtcatccgagatgcagcccggtagcttccgggaatatctcacttagtnagtcgccggcaaagnccaatggtggtttntgtttcggttcaatatgncgggaatatccgtcggcgatgcgaacccggatggaggttatacccggaccagttttagcacagagaccaaatttactaaaaccggtgtccggtttggagaatgaaaagaagagttcacagtgaaagcgtaacgaaatggttaagaattggacagttccatactggtttgctcaaaccatttatcggtttagatt

SEQ ID NO: 109012 - DNA, 434 bp, Arabidopsis thaliana columbia
ggacgtagagatgaaagataaccaaaccccaacgcaatccgtcgtctctgctcctacctccacgctacagaatttgaaggagattgcagctctgattgatactggatcttatacaaaggaagtccgtcgtattgctcgtgctgtgcgtctcaccgttggactacgaaggaagctcacgggttccgtgatctcttctttccttgatttcgctttggttcctggatctgaagctcacactcgtctctcttcttttgtgccgaagagtgatgaacatgacatggaagttgatacagcatcatcgaattcccaagctcctcctaagcatctacctgcagagctcgagatttactgctacttcattgttcttctttttctcattgatcagaaaaagtacaacgaggccaaagtttgttctaccgctagcattgctcgcc

SEQ ID NO: 109013 - DNA, 253 bp, Arabidopsis thaliana columbia
gttatttctttttacccatggctgatgggcacattacgcataaactagggtccccacaaatttacacgatcttattcttctcttttcgctatattttccccgcacaatcttgggtggatattctcttataaccaatgccactgactccagatcttattatctttaataatgggtgagtctagttgtgtggaaaaccagaagcttgtcagactatggtagtatgtgtttttacttggggaggacgagggttggt

SEQ ID NO: 109014 - DNA, 421 bp, Arabidopsis thaliana columbia
ctcactctttgcttgtgccactcacagtctatggcggatgagatggcgctagcgaaaccgatgtccaagttctttggcccaaagctctcaaaccctatcaaattcctttccgtccgacagtcatccaccgtgatcagaatgccagcctcttcctgaccggctgctacaaccaccgtcacctacaagcccaagaagggaacgaagaatgcgattcaatgagcagcttcttactccgaggatctacactacggacgttgaggaaatggaacagatctttaacacggagatcaacaggaaccttgacgaagcagagttggtggctctgttttaagagtttaagaccgattacaaccagacacattttgtgtggaacacggagtttaatgtagctgccgacaaattgtaaggacctctgcgacag

SEQ ID NO: 109015 - DNA, 359 bp, Arabidopsis thaliana columbia
  unsure (1)..(359): unsure at all n locations
ggaataangggcccgacccactcgttcgtagtctcgtgggctcttacacactttttttttttaccttctttaacttcattatgggggggcttctaatccaatccaccgtttcactcccttagaactttatcactctacagatgttattctgccgtcgttgttatctcaacagttccttcctatgttctatttcttcattcttcgtgatgcatcacatcgctaaatttttaaaatcccatgatctctgtcgagctttctctggtttcacttccactcgtttcttgtcacggagcaatcctccctcttcaaatcttctttttccgttgccgtgtcgtggggcacactcatcctcctatttt

SEQ ID NO: 109016 - DNA, 436 bp, Arabidopsis thaliana columbia
tccttatctttctcttcgcgacattgacaaaagaaaaattgctcaatctttgaaaaaccagaacaattaacgccggtgattgtttgtatttcgctatgttatctgagactttcaacgatgattcatcaaggcaacaaacgatgttcacatcggcggaagtttgcttaaatcgaaaaatagcaaattggattcggagagttatcgccgacgccttccccaaattagtgttaatggcggataagcaagtggttgtgagttaaggagaaactgtaaaggaattcgtctatgcacttcaatgaagtttatcatcaccggttggagacaaagatagacaaagacacgtaacttgcaactcatgttccacttgatgccaaaagagacatatgattcgtttgctttgttgcttttttttagctttgtatgtttccaccacatg

SEQ ID NO: 109017 - DNA, 437 bp, Arabidopsis thaliana columbia
agagagtatacgaaacgcacaaccgaagaatcaccaaagagaaagggaattatagcttccgtttcgtggattataaatgcactgtggaattctatgttactcatttcttggttcgtgagggtagagcaagaataggaaagaagcgaagagaaacacttagaatcgatgctatggatcgaacctcttccagatggaaaggtgctaatatcttagtgttcaatacagctcattggtggtctcattacaaaaccaaatcaggggtcaactactaccaagaaggagacctgattcatcccaaactcgatgtatcaaccgcttttaagaaagctttgcagacttggtcatcatgggttgacaaaaatgtcgatccgaagaaaactcgcgttttctttagaagcgctgcaccttctcattttagtggaggagaatggaactca

SEQ ID NO: 109018 - DNA, 235 bp, Arabidopsis thaliana columbia
caaaatcttcatcgatcatcatcattatgtgagaaatcctccacgtccaaggtgggcaatgctgtaaccaaatcgggtccaaattctgggtagatatctgtgacgaacacggcgttgatccctccgttcgtttcaacggtgatttcgccgatcttaatctagtacgttccaattgttttttacaatgaagctattggttggttgtatcgtatcttgttttgtctttattgatctt

SEQ ID NO: 109019 - DNA, 435 bp, Arabidopsis thaliana columbia
ggtagtgcaagtgcaacgaataaagagtttgatgttgatgtcgatgttgatgttgatgttgatgttgatgtcgatgtcgatgtcgaggttgaatatgaaggtgatgtgtatgttgaagaggctaatgacgagggagaagacgttgatggtaacgacgagggagaagatgttgatggtaacgggcttgaaattgtggcttgtgtcgataatttaagtgttgcttatagtgagagtgattttggaagcagtagtgatgctcgtagccaatgtaatgatttgtctgatgctgatctatatccactgtctctggataacacacaaggaccaagaccggttcgtatgaaccaaggctcgggtggcggaaggaagaaaaacacgaaccagaatggtcaggcttctcggtctaagaaaatagttggtaatggcccacgtggt

SEQ ID NO: 109020 - DNA, 359 bp, Arabidopsis thaliana columbia
gttctttacaggaaaaagttgaacgtctttttagtactaatggagatgcagcagggggggccgtaaccagagggggcatgtttagtgtagttgtaattcagaggttgtatggaagtgtaagatagttctatgaactgtccatttgaaagcattaaaaaaactcatgtaagcgattgtgaggcgtcaactgctgtggaacctgatttagttaaccaaggcgctatggattttcatggtgaagcccatggtaacatgtatggtgcaattgtgtggagatactgatacttataaggatcttgctattttattttattctgaggagctgacattaaatttaaagaggtttatttgatactttt

SEQ ID NO: 109021 - DNA, 391 bp, Arabidopsis thaliana columbia
ttagctaaaaagctcatatttcgaaggctgttcgaaatgatatatagcttccagtctcctaacgaatttaacattaaacagaaagataagtcaaagtaaatttgctgtaacttatagtaacttacacaagtcttggccaaaagaaagtttgaaaatttaaaaaaacaaaaaaggggttagaagggactgtttgttgttcatttggaaacaaaattgtattcctttttggtccatatattaagacacatttatgtgtatatttttttttctgtgcccttctttttcgattttgtcttattcattatgagctttattaacacttctcacttgtctttgattcatcattcgttgcttactttttctttgatttattatatttcttacaaccttt

SEQ ID NO: 109022 - DNA, 200 bp, Arabidopsis thaliana columbia
gcgctcgaccgcgacggccgccctcttagatgttttataactaaaagagcccattaatactaaagagtctcactctgagtctaagacataaaaacttgcatcaaaagaaacaataaactttccaagaacacacatgtctttcttatccctaactgtgaaaaaagagagccagtcgtctgccttgattggctgatgataac

SEQ ID NO: 109023 - DNA, 177 bp, Arabidopsis thaliana columbia
gcggttgttcgggaagacgattctgggatcatctgtggttttcttgatcggttttggtttgttgttgctcacgctccgttccctagatcctaattcgtctttcatctacgacaactttttcttgtccgcattccaggtggcttctagattgaacacctcttctttctttgttgtggc

SEQ ID NO: 109024 - DNA, 405 bp, Arabidopsis thaliana columbia
acgagacacgaaagcgagagccaaatcctaaaatcgcagctcttctcgtcatcgatatgcagaatcactgctactctatgggtgaaccaatcctccaaaacgctctcaccaccatcgacatctgccgacgcgcttcaatccccgtattcttcacgcgccacaaccacaaatccccaaccgaccacggcatgctcggagagtggtggaacggcgatctaatcctcgacggaaccactgattccgaaatcatcccggaaatcaatcgccaggtcaccggaccagacgaaatcgtggagaagagcacgtacagtgcgtttaacaacacgcaccttcaggagaagctggacaagatcggagtgaaggaggtgatcgttttcggagtgatgacgaacctatgctgtgaga

SEQ ID NO: 109025 - DNA, 441 bp, Arabidopsis thaliana columbia
ccggtgcggagtcccaggcgtgacgctaggaccgcgacggtcgtcctcttagatgttttataaaaaaaagagccgttaatactgatgggacgggatgtacatctacgagttggatccatacataaaagagatgtataaatttcaacagcacggaggtcgacgactgcatgcagaaatgggaaagaaagaaaaaaaggagacacgcttaggtaccaaaaaactcacagatttacaccaaagagtcttgttaaaacttgttcagcatatgcatcttccttaccaaagcatttaaatcccgaggtttctcaggagctgaccccatcttggagtatcctcatcaaaaatgtaggtcaaaggtgaaactaataccccactgcctccggccggtttaagttgctttacagagtcgtatagggccttttttggtacacaaatcacgat

SEQ ID NO: 109026 - DNA, 380 bp, Arabidopsis thaliana columbia
gcggcgacagagagagataacgagagagagagagatggagaagatgagaggacatgtattagcagtgccatttgcaagccaaggacacatcacgccgattcgccaattctgcaaacgacttcactccaaaggtttcaaaaccactcacactctcaccacttttatcttcaacacaatccacctcgacccatctagtcctatctccatagccacaatctccgatggctatgaccagggagggttctcatcaaccggttctgtcccggagtacctacaaaacttcaaaaccttcggctccaaaaccgtcgctgatatcatccgcaaacaccagagtactgataaccctattacttgtatcagctatgattctttcatgccct

SEQ ID NO: 109027 - DNA, 395 bp, Arabidopsis thaliana columbia
acccacgcttccgatctactctctttaaaagattttcgcaattattatcaacaagcagaagatgagccttaaaggggaatctcaaagaattaaaggagccaacctatttctccattaatcgtcacatgacaccgtgaccaatatttagctcgcagcaggcatagactgaattcaatatgttcagtttgattatgtcatgaacgaacatccctaacaagctccttttctttgtaccaaaagccatgttctcccatctgatccgtttatgattaaccattcagacgaacatctattttctgtagaatgttgatttagcccttatagtatcattcaatgaattaagttcatcttcaacaatataacttttttttttatttaatcctttaattgtactt

SEQ ID NO: 109028 - DNA, 289 bp, Arabidopsis thaliana columbia
ggaaacaatattttaatctatcagtaacatgatcggcaacttatgaacctaaggccggcttgttgggtcccggcgcctaacagtggagtcctgcaaatggggggagagagggtttcgaccgtgtctatgctcaatcttaatctaacaaaaggtcgtgtcaaacgtttgtgtcagggaagctcccaaagacctttagctcgctaagccaggggggaggcacctggggactcggagacatgtgctcacgagaccatggggcggagagccgagtgaaagcggacttggggag

SEQ ID NO: 109029 - DNA, 271 bp, Arabidopsis thaliana columbia
ctgttgggtcagtgaatatggtgcatcattcaggggtagctcaacgggtttagtcccgatgagaggttgtatgtttgctgttgggcaagcgtttgagaaaagtgaagagcatagtggtaataccataggtggaaagaatgtagtaggagggaaggtcgtttcaagtagccaaaagtatctctggagagataccatcaagtggtctagcgaatagctttaggttctcccaaaggagactgcttgtttcagctcatattcctacttgataagc

SEQ ID NO: 109030 - DNA, 409 bp, Arabidopsis thaliana columbia
acccacgcgtccgaaaaaatgtcgaagaagaactttttagcctttagaaagaagcagcacgagtagaatctggggaaagagaaagagtgacaggagatgaagatcaagaagcttcatgccaacaagaataagatgaaagttgatggaagtgggaagaagaagaaaggtggattttctgttggcaagaagaaattaaagacaaaactgactccaactgctaaagctaaagctgctcaagcaatggagctagacaattgacaaggaacttcgttttttttcacttgtatgtaaaattgttcttcattgatcttcgtctttactttggagaaatcatgttgaagctagcttcttcttataggttaaactcttatgtatcactctctcttttgaatgcaagattttgctatct

SEQ ID NO: 109031 - DNA, 417 bp, Arabidopsis thaliana columbia
gaaaacgaccaagaggatcttgaattgcttctgtctctagacgatagggttctcgaaactcctcctggttctccttctgctgcacccggatatctcacggatgatgaatcccccaagcgtaggggtcactctgacttgtctgacttcagaagtgttgttcaagattgcattgactataatcctaaaccaatcgccaaaaacactaaacccaaaggctccaacaactccaataccaatgacattgagaagttttctggcttgcgcattaggaatcaattacttagccctgcagagataagtgatctgttttcagatatccgtttcgttcgattgccaacaataaagaacttgctaatgggtgacaaactctctggctgctgggcgacaatgggagtgataacagagaaaggacaaccc

SEQ ID NO: 109032 - DNA, 255 bp, Arabidopsis thaliana columbia
cgacccactcagaagactgacgagagaagattgactttggagaaaaggagtcagggatatatgattgataaaaggatagatcgattgtgatgaaggtctgtgttggacaggatccagatacactttcgttttttgtcctggtttctccgcatgcaaatgtcggagtatcttacgacactccccgtaaagttatggtgtctggttgactccaaggtccttgactgttacgcttgtcatgggctttcatgtataagt

SEQ ID NO: 109033 - DNA, 418 bp, Arabidopsis thaliana columbia
cagccatctctaatcacattttacaatcgcctcttcaaatttcccgataaagaaaaaatgagttccggcgccggcagtggaacaactaaaggtggcagaggaaagccaaaagctacaaagtccgtctctcgatcttctaaagctggtcttcaatttcccgttggaagaatcgctagattccttaaagccggtaaatacgccgaacgtgttggtgccggtgctcccgtttatctctccgccgttctcgaatacctcgccgctgaggtattggagctagctggaaatgcagcaagagataacaagaagacacgtatcgtaccacggcacattcagcttgcagtgaggaacgatgaagagcttagtaaacttcttggaagtgtaacaattgctaatggaggagttttgcccaacattcatc

SEQ ID NO: 109034 - DNA, 405 bp, Arabidopsis thaliana columbia
  unsure (1)..(405): unsure at all n locations
gacccacgcttctcttatgaattcaagaggtttttaactatttcttcaatgcgcccgttnaaagattccatggttattataaaagtatccaaataaccaacaatctttacacattctccttttataatattctatcgtatgtccaacaatattacctcatcttataatggatatatgtttttgttcaagcttttttcattttttccactatctcattttctagctcatatataattttattactccattctatactgtttttcacttttacactccacatgatttataatattaatatggcttctttttaagcaaatatattattatttatttcctctgtgattccttttttttgtttttcaagaatactcgtgttaatatttaaacacttttatcactcccaat

SEQ ID NO: 109035 - DNA, 412 bp, Arabidopsis thaliana columbia
agagaacaaaaaatgggagagagcaaacgctccgagaaaacgcgcgttttggtggttggagcgactggatacatagggaagaggatagtaagggcgtgtttggctgaaggtcacgagacttacgttttgcagaggccagagattggtctcgaaatcgagaaagtccaactctttctttctttcaagaaactcggcgcacgtatcgttgaaggttctttctccgaccatcaaagcctcgtatccgccgtgaaacttgttgacgtcgttgtctccgccatgtccggtgttcacttccgtagccataacattctagtccagctcaagctcgtcgaagctatcaaagaggctggtaacgtaaagcggtttttaccatctgaatttggtatggatccaccacgtatgggacatgcgc

SEQ ID NO: 109036 - DNA, 355 bp, Arabidopsis thaliana columbia
ttattaaaataaatttataagttttataggcttactttttagcattaagaaatttaaataacttcaaaacacacactactatagatcaatggaaacaatcttaatgaatccaagtacagctcataaattgaaaaagtacacctaggaccctaaaagcacacacttttattcacatcacacaaaattatatagatttcatgaaccagaagaaataaaaaacaattgttgacactataaaaaaagctttcagatacacagtttttcttgaatagaaaggaataatcctatttatctagttctaaatcacccactgcccttttataaaattcaagcttacttactctttcatatccac

SEQ ID NO: 109037 - DNA, 412 bp, Arabidopsis thaliana columbia
ggctgcttctcaggttcaggcagcatttcgtgggacaggtggaaacaaaacatctgtctcggagggtgtcgaggcatctgttatatatgttcgcttcaaggctgctgcaaatgagcttaaacctgtattggaggagattgagagtaggtcagcaagaaaggaatatgtccaaatccttgcagaatgccacagactatactgtgaacaacggctctcgcttgtcaaaggcatagtgcaccaacgagtatctgatttcgccaagaaagaggcactgccatctttaactagatcgggttgtgcatatctgatgcaggtttgtcatatggagcatcaactgtttactcatttctttccagcatcgtcagaagaagtttcgagtctggcacctttagtggatcctttgtctacgtac

SEQ ID NO: 109038 - DNA, 423 bp, Arabidopsis thaliana columbia
caaagatggaagtcaaaggcaattaggtgttttccgggtgattccaactccagacatgtgggcaaccagaaatactattaaggttaacgacgcgaatgttgatggagctgaagatgttcctgaagaagaagctgtgtgtagaatctgccttgtagaattgggagaagattcagaagccttcaagatggaatgtttgtgtagaggggaactagctcttgcccacaaagaatgtacaatcaaatggttcaccattaaaggaaacagaacatgtgatgtgtgcaagcaagaggttcagaatctccctgtgacccttcttcgcatgcagaattctcggggtagtattggagctccagacgccgaggctgcacactacagtttatggcaggatgttccaattcttgtgattgtaagcatgcttgcata

SEQ ID NO: 109039 - DNA, 264 bp, Arabidopsis thaliana columbia
gaatctcgacccacgctcgtgcacgctctatgacttgcaaaggcctggcggctttggactaatgctaaatgccaagacgacgacgatacggtcctgcatacaattttatttacaaacgtgaagctaccgaagcaaaggtaaggggagacggattgcctgccgtggtgaccagactgtgattaagagtgcgtctgccggcctgcttattggaggtcaaccactcttgggaatacatcatgagcattgtgacataatgctaattac

SEQ ID NO: 109040 - DNA, 419 bp, Arabidopsis thaliana columbia
  unsure (1)..(419): unsure at all n locations
tcaaacttacaatcaaatatggtttttcaaaagtttactctcatnggccttcaagaagcttctggccatcttcgaagatccaagaaatncatattnacctctttgccccccttcttacaaactattcctcacaagttttccttaaagttttttatttatcactgctacttcttcataccaggtcttaagtgctattaatgaaacttgttctttaccaaccttattggacatctactatagaacatatccatagaggttcattaactataacatcgatttttccgtttttttcttccatcattataagtaatattttcaactaatgaataatctaatcacatactcctttataatttctatcactatttcttaaatattttctcattttaaataatattaatgtattattaatctttttt

SEQ ID NO: 109041 - DNA, 395 bp, Arabidopsis thaliana columbia
cttggattcactgttctgtggttacctccaccgacagaatctgtgtcacctgaagggtacgatgcctaaagacctgtataacttgaattccagatatggaacaattgatgagctaaaagatacagtgaagaaatttcacaaggtcgggatcaaagttttaggcgatgctgttctgaatcaccgctgtgcacacttcaaaaatcaaaatggtgtatggaatctatttggaggacgtctaaactgggacgatagggcagtagttgcagatgaccctcatttccagggtagaggaaacaagagcagtggagataatttccatgctgctccaaacatagatcactcgcaagactttgttaggaaggatatcaaggaatggctatgctggatgattgaag

SEQ ID NO: 109042 - DNA, 429 bp, Arabidopsis thaliana columbia
cgttcgttttatcctctccatcggattctttttatatcttcgatttctcgtcattggatgggtttcaggtcaaattcgggggtgacaccgttggtaagctatctttcagcaaacatgcatggttatgaagatgaccttgatgaggaagctgggtatgatgactattacagcggtgatgaggatgagtatgaagatgaggaagaggaggatgaagaacctcctaaggaagaattggaatttcttgagtcacgccaaatgttgaaggaatcaattcggaagaaaatgggaaatggaagtgctaatgctcaatcttcacaagagagaagaagaaaacttccttataacgactttggttctttctttggtccttcaccgcctgttatttcctcaagggttatacaagaaagcaaatccttgcttgaaaaccag

SEQ ID NO: 109043 - DNA, 400 bp, Arabidopsis thaliana columbia
agatcctacacgtccaatgtccgccgcatggtccgtgttccgctccgccgcaagccgagcatcgtccaccgcatttagagtctccgccggacccaagcctatgccgtcatcggcacggaccgcgtttcggatgcctaaacagagtcctctaacaaatcgcattttcagatctccggtagaactaagctgttgcgtggagacgatgctcccttaccacactgccactgcttccgctttgctcaattcaatgctctcagtttcacgccgtggttggatcgttgatgattgcaatgatgatgtatgatgaattactggggagaggtcagcgatgcatgcagtctaagacaagatggatgactcttgttctcaccattgcagtaagcaggaagattttcttaag

SEQ ID NO: 109044 - DNA, 455 bp, Arabidopsis thaliana columbia
cggacgcgtgggttcgaattctcatctctaaccatgagcgcaatctatctcctccgcaaaggttccacgaaaactccttcacgatttcacagaagcctcttcttctccactttctccaaggattcaccaccagatttatctcgaaccacctcaattcgccatttatcatcaagccagagattcgtctcttcgtccatttactgtttcccccaatcaaagattttaccaaatcgattttccgagaagacgacgggaatctccgtaagacaattctcaacatccgttgaaactaatctcagtgacaagagtttcgagagaattcatgttcaaagtgatgcaattttagaaaggatacacaaaaacgaagaagaagtagaaacagtttctattggtagtgagaaagttgtgagagaagagagtgaagctgagaaagaagcgtggaggattttggaaaa

SEQ ID NO: 109045 - DNA, 413 bp, Arabidopsis thaliana columbia
gtcagcgagtagcttgtggtatgttttggggtatatggaggcaaagaagaggctgaagagaggagatagagtgttcatgatcagctttggggcaggtttcaagtgcaatagttgcgtttgggaagttgtgagagatcttaacgttggagaagctgtagggaatgtgtggaattattgcattaatcaatactcatcaaaatcgattttgaatccgtttttcgagtagtttggttggattcatgaagaagaagatcctgattctttttaagtatgcccgaaggattttttttgtaattttttttgtgtatcatttgttaatattcatattcttttttctcatactcgtaaatttttacaaatgtgtttctttttagttccattttttcctttacttctctttattattaatttaa

SEQ ID NO: 109046 - DNA, 399 bp, Arabidopsis thaliana columbia
gggcggcccacgcaaacggaatgagcattctaaacactctatgctttttttatgctacttggaccctctcaaatttcgtcggtttctattcacactgtggcttttaccaataccatactgcactctcagaccttgaacacctgatacattctacttatgaataaattttaactataatcattttattctctctcttacctctaccaaggcacaaattacaaaattcaatttctcatttaatcatacttttattcctacactctactatcttcttcagcatcaataaccatctgtgcttattactatcctttaatttattggttacattatcacttatgattatctttatcacacattttgttattattcatgtcgcccttcttatcctatttattcttt

SEQ ID NO: 109047 - DNA, 452 bp, Arabidopsis thaliana columbia
cgaagaccgactccgaggtgacaagccttttatcttcatcgccgactagatctccccggggaccagcctacttcgtccagagctccatcacgtgactcccacgatggggagaaaacagcaacatcattccactcaacaccggtactcaccagcccgatgggatctccaccacattctcactcttcctcaagccgcttcttcaagatcaacggctcaaaacgtaagggccacgctggagaaaaacagttcgctatgattgaagaagaaggtcttcttgatgatggagatagagaacaagaagctttgcctcgtcgatgttatgttttagctttcattgatggattctctctactctatgctttcttctctttgattctttatgcagctgctaaacctcagaaacctaagatctctgtttagagtttaacgtttgagcaacttaaggttcaagc

SEQ ID NO: 109048 - DNA, 343 bp, Arabidopsis thaliana columbia
cggggggacccacgcgtccggaggtgttcaaggagagaagagagatagtcgtttagaccaaaacgttgacttaatggggagcgttttttcacgtgatggagcatctcaaactgtactactttatctaccaattcattcccaaatcttatgatacctgcatcggcataatcactttaatatggtagaagctcaacatatattccccataaccaagctgatacattaaatttgttaagagcttgtttgctgacatgttaaaccactttagcaaatcttaattattatttccctcagtctttgttttcattatcatcattcatcatcatcactatcttttatttat

SEQ ID NO: 109049 - DNA, 447 bp, Arabidopsis thaliana columbia
cttggtgaagggaagcctgagaatcaaaatttttttatcgtgtttacgcggggagaagctgtccagaccatagatatgaatcaggacaattatctggaggaagcaatcaaaatgagaaatctacttgaggagtttcatggaaaacatggaattcgacgtcctactattttgggagttagagagcatgttttcacgggaagtgtttcatcactggcgtggttcattgtctaatcaagagaccagttttgtaacgttgggtcaacgggttctagcatattcactaaaagtttgaatgcactatgggcattcagatgttgtcgatagaatatatcatattactcgcggatgaaacagcatagtatcccgtgtttttaacaactgttaagatttattttgctggtattaaacttgacacttaatgctggggaatatcacccaccctgagtt

SEQ ID NO: 109050 - DNA, 260 bp, Arabidopsis thaliana columbia
aacttatcttatgaatctattaagattatttctaatctctttcctactatatatatggagggcttttgttgtagcctagtggttgcatattaaccccttgtgtctctcacaatcccactattactgaaacatacatatagacttagctcaagatatgttaatttgttttcactctaatatagatagagagagaaagagatcggtgaggaataaatggcgctaggaataggtctgggatgacactacatacacgaaggtgt

SEQ ID NO: 109051 - DNA, 435 bp, Arabidopsis thaliana columbia
ttctagtcctactgtccttgatgttttcaagctcttacaagtcattagagctgggagaaagatcagctctttctctttctgtgccgacagctccaaaagaatccttaggaacattagctctctctttgaacaataactcactggaattctattcccttaaaagcagcgaaaacgcgaaaactgttaccattgaacaccaaggacatcgctctgatgtgaggagtgttaccctcagtgaagacaacacccttttgatgtcaaccagtcacagtgaagtaaaaatttggaatcccagtacaggttcctgcctccggaccattgattcaggatatggattatgcagtttgattgttccccaaaacaagtatggtattgttggaaccaagagtggggtacttgaaaacattgatatagggagcgctaccaaagtgggag

SEQ ID NO: 109052 - DNA, 434 bp, Arabidopsis thaliana columbia
cttcgttggtttactcttcacaagatttcttaagttgattctataattttgactcatgaacatgctgatgcagtacttggcctggatgatatacgttcagtgcaaccatttagtcctactaatgatattgatcctactccaatttttgtaagccaatacgctatggaaagccttgctgtgaagttcccgtatttggttcagaagaaacttaaagaaggccaagaagttaggcgagtagcacagctagattggagagtaattgaagaagattgtgagaagccatttgtagcttcaggtttatcattcacgccacttccagtgatgcatggagaagactatgtatgtcttggcttcctttttggtgaaaaatcaagagtggcttatatattcgatgtttcacgggtttcttcaaacaccgagtatgctatatcaaa

SEQ ID NO: 109053 - DNA, 456 bp, Arabidopsis thaliana columbia
cggaaagaaacagtagaatcgccatggcagttatatgtagaagaaaacaaaaaagaagaagaggagggagaagcatcaatcttccgacatctctttcaagccttcttcagacgtaaaaggactcaaattcggcggccaaataatcgtcaaatcattcacaatccgacgagcaagaacattcgagcttcttaaactcctctctctcccttcttcatcatcaccgccgcttctttccacggcggcttaccttccgacaaacttcacaatccttgcacaccacgcatggtacacactaacactaggtcttggaacaagaaagtccaaagttgtggtcttcgtgttcgaaacagaggcgatgaaattatccgttgtggcggcggaaggaggaatctggccatcggagattccattgggagatgtgaacaagaagatgatcagaaagttaaagaactggga

SEQ ID NO: 109054 - DNA, 231 bp, Arabidopsis thaliana columbia
atttttatttttcctatttgggggggttttaggggagaaagtggggctttgcttaatgacaaatcatacaaagtctcgcaaatttacatttaaaagttttaaaccatcacatacaacctattttttttccttatgatttctactcgaattcaaaacactgaatgaaaatctatatacaaacttgttaaacttggtttacttttcgggaacaataatggttgcaaaggccca

SEQ ID NO: 109055 - DNA, 398 bp, Arabidopsis thaliana columbia
ggcgggcccacgcgtccgctctcttttactcctcttcccaaatttttttttctcgccctcaaggtgttgctaaagggggggttaaaaaaggcaaggcacagctcttcaaagacggaagtccaatggtgtacagtggagctgtcgacaggatcatcggaaaaccacctcctcagacaggagatgttgtcattgtagctgatggcactgagaatcccattggttggggtttgtataactctgtttctatgttctgtgttcgccttatgcagcttcaacacgaatccaccagagatccttcttgtgcattgaacattgagaagcttctccaaacaagaatcgctgaagcagtttagttgctaaagagattggcactttccctcgtctatacttaatgctta

SEQ ID NO: 109056 - DNA, 257 bp, Arabidopsis thaliana columbia
  unsure (1)..(257): unsure at all n locations
ggggggggangcgtacgatttcttctgatccgatctgactctgttctctacccatcaatggcctccagatctcgtgaagggctattccgacattgtgaaggccatcaatattgcactggtcaccggaatcactgtccaagatggatcttacctgaccgagttcctgctcgagaaaggctaccaagttcacggtctcatccgacgatccttcaattttaacacttcaccgactcaaccatatctactttgatccccac

SEQ ID NO: 109057 - DNA, 184 bp, Arabidopsis thaliana columbia
cgaacaaagaagtcaacgtttggtctccttttttttattgaactgcggttcccatcgcacctgacgactctttcgctttgggagaggggaaatatctttaatttgtagggttgatgatactctccgatgggacctacaggtgtaaagtgaggactcttatcaccgataattattataatcatgt

SEQ ID NO: 109058 - DNA, 223 bp, Arabidopsis thaliana columbia
  unsure (1)..(223): unsure at all n locations
gacgcacgcgttcagtcattgcatccgctaccgactggtttttgtttctttgacaaaaccttcanttcttggcggtgattaaaacccaaatgcgggggttaacaaatccaatactctactccctttgatagtattctccaaacggaacaaactataaaccgagagaacgcagcaacgatattgctttctctatgtaaaagagacactgacaaactgatcacta

SEQ ID NO: 109059 - DNA, 437 bp, Arabidopsis thaliana columbia
  unsure (1)..(437): unsure at all n locations
ggccattcgaacgctatgtgcttttctaagagcgttgagatattgaaaccagtgggtggtaaggaaaagagaacaggtgatttanttagtaacgctcagccctcagatagagaggagaaaagtagcatttcctcaagatttcaaattgggcaacttgggaagtatgtgcagttggctgaagctcaagagaaggcttgcttaagcgttttacaatgtagatactgagaaaatttgtgagccgccagaggaagaattgccacctcgaaggccacatgggtttgatctaaatgtagtttcagtgccagacttgaatgaggagttcactccacctgattcttctggaggtgaagacaatggagtgccgcttaattcgcttgctgaggctgatggtggtgatcatgatgataactgtgatgatgctgtgtctaacggtagac

SEQ ID NO: 109060 - DNA, 317 bp, Arabidopsis thaliana columbia
gaaatggtttcggactcggacctcttgttcttatctccgggaaattctccttagctgcggcctattttcttcgactgcggggagcgttcgccgtcagctggaggtgtatttcggcgtcgtattaaccgatatgaaagctttcgttagggaacaaatcgtttcttttcttgaaagcgatgctttgttagtagcaaacccgtcaagaataataagactgtaatggcgatcaaaacgatgaatagggaagtgataacgatgatgtttagaccgaactaccggttaaggctaagaaacgtggaggtgggtttaacattaat

SEQ ID NO: 109061 - DNA, 415 bp, Arabidopsis thaliana columbia
caacttccctattttctgcttctttttgttcaactcctacacactccaatcacacaattcacaacccattgagaaaccaataaaataacctcaatcaaaaaaaaaaaaaaaaaaaaaaaaggatgaaaatctcaatttagtaaaggagaaaaaagccatttcgaataacttgaaaaggttttggttttgcagagaaaatgaaggaaaggcggagagtggtggaggagtaggatacgtgagagcagatcagatagatttaaagagtctggacgagcaattgcagagacacttaattaaagcatggacgatggtgaagaggaagagtttgagtgatggtgaagataactgcaataacacccgtcataaccagaacaactttggacatcgacagcttgtgtttcagaggccgtttttt

SEQ ID NO: 109062 - DNA, 253 bp, Arabidopsis thaliana columbia
  unsure (1)..(253): unsure at all n locations
ggcaganntctcccctttacaagaaataatttttttttggcttcgatcgaatttgccgcaggtgggttcattttcttccgagaacagtcatcttcttcctcataagtctctcccagtgttgaagcagtgagctaagctaaagaacaaggaacaaaaccaaattatgtgtttgcgagatcagtctcatagctcatgagatgtagagtgtttaatcttgatattgagatgctatactgtagtcagcttgaggagt

SEQ ID NO: 109063 - DNA, 432 bp, Arabidopsis thaliana columbia
  unsure (1)..(432): unsure at all n locations
gtttggaattccgtctagaccactcgtccaccagtttctccttccctactcatttttttcttttgtgtcttcatttcttgcggagtccttttactggtagctggtgattttcttacatcctccaagaaacgcagagtgtgttttgatccaattaatttcaaagtattcaagcttagtaagagacattaacttattcacaatgtggccaattnttttttgaactccaacatctacttctgtgttgggtctttccattggacatcacattatttgcatatgaaagtatggtcaatgtaaagttattatttatccattcacccctactacgttaaactctttcaattttacttttccatcttgaatatttatttatttctcattgtctgttttcttatattttttttcttgatattttgttgattactatttttt

SEQ ID NO: 109064 - DNA, 304 bp, Arabidopsis thaliana columbia
  unsure (1)..(304): unsure at all n locations
cgacccacgcgtcctcttttagtctgatctattacaagattttttttttacattaacaacccataattgcgggggatgttttcaaaacagaggataggacctacaatttataccttcataactcgctttaccactaagctttttatctatgtcaccaatgcttaggaactcttaagcttaacaattacaatcttctttaaatatncactactgttacctcatctttatctaaacttttatatatctcttatcctttaaaaatgcttattatggtctcctaatatagagtaacttgttatgcctt

SEQ ID NO: 109065 - DNA, 192 bp, Arabidopsis thaliana columbia
gttctatgatcagctatcttatctctcgcgatttatttctagtgctaatcttctaaaatgaggtgcgtacatatatgtatctgagctacttattaagaaacagtcctattttattagatctcttcatatatttaatttctagtaattcatacttctaccttctattgttctttttattaattctactttccc

SEQ ID NO: 109066 - DNA, 357 bp, Arabidopsis thaliana columbia
gtattccattcccgacccacgcgtcctgtaccttcttctctttatgataattttcttttaatctctccaagctcttttctaaggaaactatttatccttacaggggtgcttccatctacttcttacaactctcccttcttcaccaccaactctagatctcctgtattgaacaacaactccttcataacctttttacccatatgtcctatccttcttaggattacctattttttagtagctttccatatttgacagtgaacatattccatagctcttttttcattccttattaccattgcttatattttcttatttgtcactcttgatatctctatccttacttgtgctttctttatt

SEQ ID NO: 109067 - DNA, 298 bp, Arabidopsis thaliana columbia
ctccgagatcgtaaaatatggagatatttttctacagctgatacttaatttaccgaggacttcttccaacactcgggctttccaaatatccaaacacatctttagtctctttcctctttcgtaactcctcatcttacccatcaaaactcgctatctccgattcctataccgacaattccttaaccttcttcaattcaaaccgccgtctcttgactcgctcactgattccaccgtttaggtattcgttaaaactacttcatgttgattttcgctccttacttttaccattttcctctct

SEQ ID NO: 109068 - DNA, 444 bp, Arabidopsis thaliana columbia
attttgaaaagttgctacaaaatgtcaaagaggaaacggaacagaaaatctcagaagctgcgagcaaggcaataagccagagactgcagaagctgcaaaccaggtttgacagatgtgtcaaagagaagcaatttcttgaagatttgaacgaaaatcttgtgaaaaataaggacgtatggagcaccaagattacgaaatgaaagaagggagaagaaggcagttcgggcaaaggatgaaaagattcagggcttagaagaacagcttggaaacctaatggcccaaatggatggtgagagtgaagtctcagagacgaaagaggtccaggacgccactgtctcgaccaccaatacctcttcttctggggcagggaatgttatacatgcaaataaaaagaagagttacagaagaaagggttagatcaagattcaaactctaccaaatctc

SEQ ID NO: 109069 - DNA, 297 bp, Arabidopsis thaliana columbia
atcagcttttgcaaagatagttcactccatctctagctcagaaatatgaagaacgggaccgtctaaatggtgttagagatggtcaaggtcacttccataaattacttggtagcaggttcggatgggcgtgtatcatctgttaagcttgcttatgggtcttctattgaggctgtcactgctgttttttgatttgagtcttttacttcttttggtccattattatctttgttttcatacatttcatttgtaattttttattctcttttgcttttttatgtcttgttctttctatatttt

SEQ ID NO: 109070 - DNA, 342 bp, Arabidopsis thaliana columbia
tcgcgatggattaagatcaaaccctattgttgtttaattgctaggaccaacaggggccgtggctacatcaatcaaagcatttaaatctataggttttaatgtaagcaccatggttgcacttattgttggtggccacactgtctgtgttgcacattgtattctttttctggatttgtttatggttcctatatgttcattttcttttttctttttttttgtttgtcttgtctttttctattcgtctcattagattctatgtacctttatttgtcttcttttgttggttttgtcttttttttgtttgttgtttttttgttattttcatatcttttatttttttta

SEQ ID NO: 109071 - DNA, 441 bp, Arabidopsis thaliana columbia
gccctttctgaaggaaactttgatgaagcaattgagcatttaactcgggcaataacggggaagccgacttcagctattatgtatggaaacagagctagtgtctacattaagttgaagaagccaaacgctgctattcgagatgcaaacgcagcattggagattaaccctgattctgccaagggatacaagtccgaggtatggctgtgccatgcttggagaatgggcagaggctgcaaaagaccttcaccttgcatctacgatagactatgatgaggaaattagtgctgttctcaaaaaggttgaacctaatgcacataagcttgaggagcaccgtagaaagtatgacagattacgtaaggaaagagaggacaaaaaggctgaacgggatagattacgtcgccgtgctgaagcacaggctgcctatgataaagctaagaaaga

SEQ ID NO: 109072 - DNA, 372 bp, Arabidopsis thaliana columbia
atagtattgagactgttatgagtgctcatttgtttgatggtaacatatctattcccgggggagattaaaatatgcctggggcggttattgctttgggaaggcttaacagaccagggattatggtttatggtggaaccattaagcctggccatttttaagacaagacatatgacattgtatctgctttccaggttatggagatttgttagtggctccataagtgatgaacagagaaagactgtcctccatcattcatgatctggagcttgagcctgtggtggcatgtacacagcgaatacaatggcttctgctatcgtagcaatgggaatgttcctttcttacagttcttcaatacctgctgatgacccattg

SEQ ID NO: 109073 - DNA, 427 bp, Arabidopsis thaliana columbia
gcgtccgcaaagttgccgcttcgattccaaggagtttcctatctgagaaaatgggattctggggaggggaagtgaaacctgggaagcctggagcttattatccaaaaaatgaacaaggaaagattcacgtgacccaagcaactctaggtacgggtttgagcaaagaaaagagagtgattcagtgttcaataagagacaaggtcctattgcttgtgttcattgttgccaaacaaaatcgaatgttgccctctgaatcttgagtttgacgatgatgatgagccagtggaattcaccgtgactggtgacagaagtatccacttgtctggattcttggagtattatcaagacgattaagatgattattagcatgatgaagatgattcaaatggtattgatggtggtgagtctgaggaagacgattcgagtg

SEQ ID NO: 109074 - DNA, 418 bp, Arabidopsis thaliana columbia
acgcggtattcaatattttcagtttgattttttcaagaacggacaacccgaacaagcaggaggtctttttaccaaaaggggagttctcccatcttatccgtttagtattaaccattcatacgtacatttagtttctgttaaaaggttgttataatccttaaaagtttcactcaatgaatttagtatatcttctaaagaagacttctatgtcatttgtatccgatgtgggtactcacttcactcttcatattaaattacaataagatcattggctttcatgattctgtctagagtctatcttaatttttttaggggctactttactccatttacttcttcaacttccgttgactccttccaagcagtttacttcattttgttattatttctatactatttgcttttttttcttactttt

SEQ ID NO: 109075 - DNA, 202 bp, Arabidopsis thaliana columbia
gtctccagttaattctaatgaggaaaaagattttcaggctcaacctgcgccatctgtaggatccggagatacaatatgggttgaggggcttgttcctggcattgacttttgcaaccatgatttgaagcctgtggcgacttgggaaggtgatgggatccgatcaatttctaagggtcctttctccatgtaccttttttttgtt

SEQ ID NO: 109076 - DNA, 423 bp, Arabidopsis thaliana columbia
tgatattctcaaggttcatgccggcatttttttttcgacaatgatgtttcacttgaggtgagagcatattagaacacctgtatttatcttaccatatctcgctaacctctttaatgatgctgctatattgtccgtatagctatcacggacatctatatcatctaaagatactgattacttcattttttagaattgtttttttcattaaatgtacatatatttccgtttactgtttccataatctttatttcttaccttttattttattctttcatatattttttcatattattttttttcttggtggggggggtgtggttcaactttttatttttattttcttatttatttatttattaatttattttttttttcatcttattttcttttttcttttttttacttacttataatctcttttat

SEQ ID NO: 109077 - DNA, 267 bp, Arabidopsis thaliana columbia
tcgttatttgtcggtctagaatttgatccggggaacaaggtcagtttagtttatatatacccttttttctcaagtttaaaaactacattgaaccataccaccagtatgaacgaacatgacccaatgatcaagtcaggaaggaacgaaccaactcactcgcaggtcttttcgtacagattgatacataaaaacaattccattaaagtttctgtcttgggaacatgattttatactctacttgggttggtttaaaatctttcctttttt

SEQ ID NO: 109078 - DNA, 314 bp, Arabidopsis thaliana columbia
gtccgaattgctacaaactctaattaattttttctttcttttcataaaaaaaacccaaccataaaccgtggaactctgtcctttttttgcctccttgtaactttccttgttaaaaatcaatggcgtcatctagcatcacataccggagctcaagctcttccgacggtggtattaataacccgtcggactccgtcttcaccttctactaacgaaaacttaaataaatgttattcgaaccaatgattttttacctttagtctattgattccttatactgtatacacttttctttcattctttactatttctatatt

SEQ ID NO: 109079 - DNA, 443 bp, Arabidopsis thaliana columbia
  unsure (1)..(443): unsure at all n locations
gcgtccggagatgtgcaagatgctgatattcaattggttggtacatgagctttcagacttggatgtggctgggattaagccatgggtcatgcatgctgaantcgccgagaaattcatgtgttgtgagaacagagtgatacttgctggtgatgctgctcaccggttcccgcctgctggaggttttggaatgaacactggaattcaggatgctcataatcttgcatggaaaatagcagctcttgttcagggttctgcaaactcttcaattcttaaaacttatgaaacagaacgtaagccgattgcccttttcaatacttgactcagtgttcaaaacttcagagcagctatgtcagttccttcagcgctaggccttgacccaacagttgcaaactcagtgcataggtttattaacaaaacagttgggtcgattcttccaactgggc

SEQ ID NO: 109080 - DNA, 243 bp, Arabidopsis thaliana columbia
agcttttgacccttctattttaacgggcttagaatcatctttcttctcttcttcgtcctccatcagattctttctttcctattacctttgccttcttcttcttcctttcctctttctctatcttcctctcaattcttttactggttattttctttgtaatcaacaacaagtttacctcttcttcttcttttcttatcaaaaaccgtagtttctcaaatctttgttttgatacttaacaaagag

SEQ ID NO: 109081 - DNA, 239 bp, Arabidopsis thaliana columbia
ctctccctctctcaaattctctaaaattttctttgagcagatgaaaagaatctccatcttgttctctatctcttggctatctctctctctaaactattcactcacacagtcattcttcgtcttcttctgtttcatgcaagattcaaaggcctcacctgcatgtactcaatcatcatctatagaaaagagatgtgtgagtgtgacataaaaaaggttatggcaaacataaaaccttgttc

SEQ ID NO: 109082 - DNA, 319 bp, Arabidopsis thaliana columbia
cccgagagccgactcgcaagaaaagacttggggattgacctaggtgggattggaatcgttttgggcgttggattggggattggccttggcggcggttcggcctccggtgctgcagcaggttctgcatcaggttcaggttccaaatcatcatctagctccagctcattatcaagttcgagttctagtggttcgggtggttcatctggttcatctgccggttcatttgcttgctctagagctggatcaggatctggtaactaaattataaaaattacttttcgacttaaagtgtgaaacaaatagtatgttttatgttttt

SEQ ID NO: 109083 - DNA, 203 bp, Arabidopsis thaliana columbia
tataatctcaaacctcaaatctttttttcttatcacaaaatcttcctatatctgtgggatttttacaaccgacatctccacctccatcctcctcttctccaccacctccacaaaagcctcaaccacaaacattcaccccccattcaacaaaatcaacgccttccaagattttttcaccttacacctaacactaacccttcatc

SEQ ID NO: 109084 - DNA, 310 bp, Arabidopsis thaliana columbia
tttccggggcggacggaggcgtccggttgtgttacaatgcgaacactgtggtttttttctgaagaagccaaaggtcccgtctgaggggatgatttgcagagccaacaagttatcctgcatcgattgctgagaaatgtttgggagagatactgtgcaaggacataaccaatgcattactgaagctgagaagtatggtccaaaaaggcagtcaaagtcagcttatggaacacctgcaaagccaaaggacatcttttagcaagagcctgactttgatattaatgtcggcttattaaacccgaattcatggttt

SEQ ID NO: 109085 - DNA, 348 bp, Arabidopsis thaliana columbia
cttcttcttcttcttcttcttcttctttggtttttgtgagctaataaacagagaggaatggccataaaaaaacctactttgtctttcaacaccgaaattaaaggaaatctctttttctctattgagcttttttcttcagcggtgaaatctcccttccttgtctctcaatagtgatttttacatacagctccgctctcaagtttcttcctcttttgattctgtttccgctctttttgggtttacttcggatttttaatcttaaaattgaccaaaccctaatttgatttcagttttagaaacggcgagggggtatttattttgttttccccaccactcttttttcttctt

SEQ ID NO: 109086 - DNA, 204 bp, Arabidopsis thaliana columbia
cgtacatttcattttattctcaaacttcaaatctcttttccttatcacaattcctccctctatctggacctttttcacaacccccatcttcctcttattcctacaattctacaccatctccacatttttttcttttccaaacattcacctaccattcatcaaaaactacaccttctcatattctttcaccgtctccttaaactt

SEQ ID NO: 109087 - DNA, 356 bp, Arabidopsis thaliana columbia
gggtccgaaagaacagtgacaggcaaaattcctcatgttagtctattcggaagacctcacaaaaaaaacgtgatgtggttctcagagaagaaaaattccacgtatgtacccctaaaacacctagcgttcgtgagaattgcaacgatccatattctggcttccgtctcaaatctctacgaatacgctaaacaaaactccggtcctttcaaatccgccgtggaaaaggtcgataggaccgtcaccaccgttgtcacccctttttatcataatatcaaagatgttcctgtttctctcctggtctttttaaatcacaaggggggttgaagtttcttcacaattttttttttcattgctcc

SEQ ID NO: 109088 - DNA, 348 bp, Arabidopsis thaliana columbia
acaacttccaacgatcacacacaaatggctttgacgtcagcagctaccggatttatggtgacggccaacgtcccggcggcaataggcggtggttcttcaaagagcaccaccattgtgtctttcttgccgatgagaagcttcggttcaaggctagtagtcagagcggctgaagatacaccttcggcatccgcctcgtcggatagttcttccaccaccgctgctgctgctccggcgaaagttccggccgctaatgctaaacctccttcaattggcccaaagagaggatccaaggtactgatggatacataagctttgattcatggttattctttaaaattttgagtttat

SEQ ID NO: 109089 - DNA, 195 bp, Arabidopsis thaliana columbia
ctaattcatacttttaaactgcgagtggctcattaaaaaaacggacaactcaacatttttactactaatcagacaacctcaattattttatatcttcttctttctacacacccaagctaatgtcacaaaccctattattatacacaagctataagcttcctaactcttttttttaaccacatcaccgttttcacc

SEQ ID NO: 109090 - DNA, 364 bp, Arabidopsis thaliana columbia
gcgtccgtttgccattgaccgtgtatggaccgagtcttccattcccaacgtccgtagcccaccaccggtgggggatgattcctctcagctggacaagaacctcaaatccggctacaaagctccaacacctgggaaattcactgaggctctccgtctcttcctttctatcctgcacaccatccctctagtggtagtcgagacaagaagagaagtggatgaggtcaaggaattaatcgttatcgttaaagaatatgtccttggtcttcaaatggagctcaagaggagagagatgaaagatgatcccgtgaggcagcaagagctcgctgcttacttcactcacttgaaccttcaaaacacctactta

SEQ ID NO: 109091 - DNA, 373 bp, Arabidopsis thaliana columbia
atttctctctctctctctcgcgatcaaaattgttaaacaatctcttagaagaaatgcgaaattctctctgtttcaattgcgattcaaatttcaaaaactgacaatggggaaaccaacggggaagaagaagaataataattataccgagatgccaccgactgaatcttccaccaccggcggaggtaagaccggcaaaagcttcgatcgatcagcaaccaaatcattcgacgacgacatgacgattctcataatcgagcattggagctaaaagaagaaggcaacaaattattccataaacgcgattgcgaaggaggcatgtttaagtatgataaaacccgtaagctattacctagagatcatgggagatgtatct

SEQ ID NO: 109092 - DNA, 276 bp, Arabidopsis thaliana columbia
  unsure (1)..(276): unsure at all n locations
gnngagctnnatgccgagaaggtttacaacttaggtctctgngccatcgctcaggctgaagctttacgttacaagcttcttggtggtctcactgttcgtagggcttgctatggtgtgttgaggattgttatggagagtggttcttatggattcttgtttatttttagttattagcttttttctgttattatccatttcttatgttgtactctattagttttttttgtttatttttttaatttttttcttttgtttattatttttttttcatttttt

SEQ ID NO: 109093 - DNA, 125 bp, Arabidopsis thaliana columbia
gaccacgcgtcgccaagatccaaacaaagagggttccttcaccagcaagctgactcccgggaggcgtgaggatgcaactttctactcaaatccaaggagccacccttatctgtctagctccgggg

SEQ ID NO: 109094 - DNA, 318 bp, Arabidopsis thaliana columbia
  unsure (1)..(318): unsure at all n locations
gaattccgcctacgacccacgctacacacaaatgttaaattgggaggatttttnttttagtctggggataatatgatgggggagggtccccttgctcaacgatcttcaaataaccactatgacgaggctacggaggatagctgcagccgcaagctcgaagctgctgtttcgaaatgggatgagactgatgctatagtcgtctttggtgccaagcttacgggaagcgaagtacttgataaagattgcagtaaaaaaaatgtttgctgtaggcacagcttctctaggacatgtaccattgctggatgtgggcccgttttc

SEQ ID NO: 109095 - DNA, 283 bp, Arabidopsis thaliana columbia
gatagcatactccaaatgctgaaaaaagcctgatgttattagcattcctaccaagactgggcccgagtctccattcaggatttcttggcccactattggccaaaccacctgagcactaggtccaatgtgagtaggatcactcagccatgcttcataattggaaaaacgagcaccatggaaatacatgccactcatccaaagaaagatgatagagagttggccgaaatgggcactaaatacttttcgagaggattcctcccaatcactggtatgactatcaaaa

SEQ ID NO: 109096 - DNA, 295 bp, Arabidopsis thaliana columbia
ttttgaccgacgcgtgcgtgattctttcgtctctaatgaccaatttttcttttttatcaacgaggaaaactcgcgagtgggctcatgaatagatgctaaaatctcactggagaaatagataatactgctgtgaaatgcaacacacagctagaaattattctgttcatgctaacaataaaggtatccaaactagcgaggactacagattctacactttatcatactaattccctgagtacagcaacaaggataagaccttacactttcaattctctgtcaagcataagcataagct

SEQ ID NO: 109097 - DNA, 253 bp, Arabidopsis thaliana columbia
tgaaaactccttacaacactcttgtttgatttatctaacaccgtatctgacggttacagcggaggaacttctctgggagctgaaattattggaactttcgtacttgtttacacacgtttctctgcaactaagggagttcttactcgcattttgagaccagcacgttatgctagttctagtgctgttgcgaatacaatttcttcaacgccggcttacttgagcttgttaagtggtggttctcgtgctgcgctta

SEQ ID NO: 109098 - DNA, 376 bp, Arabidopsis thaliana columbia
cctctctctttaccgcatttattactttttctgagaacaacaacatctgggcttttggaacttatacaactaactttcactcctatgtttcttattaatcaatgcactatctatattacaacattgccgacttctctgataacattaccaactcctattactacttttattcttactctcatttttttatttcattaataaattttaaatgatgtattgttaacaaattctttttaatgtctttctttacataaaacaattttttttatcatatacataatctctatttttattatgtatctggatcggggatctttttttttcttctattccttaactataatcatcttacttattaccctattttattattttt

SEQ ID NO: 109099 - DNA, 390 bp, Arabidopsis thaliana columbia
ctccaccgaaaaatatccccgggacgggtgaatggggggatctgaaatatatatcaaacgcaaacccagtacactaccagtaccagtgactgatccatcaaagcttccaaagtgaaactacgacggatccagcacctgtcaggcttctggagaagacagtgaactcattctataccctcaggcaatattcaaggatcccttcaggaaaggcaacaacatcctgttgatgtgtgatgcttacacaccagctgttgatcctattccaaccagacaagaggcacaactctgctaatatcttcaaccaccccgacgttgccaaggatgagccttggtatgggattgagcaagaatacactttgatgcaaaaggatgtgaactggccaattggtt

SEQ ID NO: 109100 - DNA, 224 bp, Arabidopsis thaliana columbia
cctttttagccctcccctttttcctttataaatcagctctctctatttagggcggtttctttaaaaataagatccccacttcataaaaacccctaactttacttggaaaagttcttcacttatcatccttaaatcgttaacatccatgcctgatcaacaaaccctaaattcctttacttctcctcctactaaatccaatgatctatctcactcccactctactt

SEQ ID NO: 109101 - DNA, 327 bp, Arabidopsis thaliana columbia
  unsure (1)..(327): unsure at all n locations
aatggggggtggccgacgcgtccgataaaccatcatctctacttncttttttcttctactacatcaaacacttccgagtgcacggcttaatttatacggatactaattcaaatctnnttctctttctctaccattctacaccttttcaatctcttaactttccacttgattctcctattactactttacatctcttatcaatttcattcatctacatcaatctaatttatacacacttccaaaaacctttctaaacccttataaattactctatgttaatctataagacacttttagatctagccacaactctcattttttcagggg

SEQ ID NO: 109102 - DNA, 429 bp, Arabidopsis thaliana columbia
  unsure (1)..(429): unsure at all n locations
gcgtccgnatctgccaatttcaccgtgatagttttgatccttctcaggaacttccttcnagggggaagtgttttcctataggcaattatttcctctatgccaaagtggttcaagatcatctcttctcaatggtctaaaggcaagatgtataccttttaatccccaataaccatcatcttcctaaaatcttaatagttttttccgatttacttacatgtaaagatttgtttacacaatacacatcatgtcttatgataaatatattaaggcatcttcaacagacactgccaccatctactttggcctgagacaggtggaacgctgtaaccctaacagcatctctctctccaatccatgctttccttctaaattcaatccaatccaatctttctgtttatttttacagttttttaagctctgttttcacca

SEQ ID NO: 109103 - DNA, 284 bp, Arabidopsis thaliana columbia
ggagctgacaggcttcttcttttgcagtcttcgttttgttacggctttcaccaagcgctctctcgacgaatgctcttcgcgtaaaacggggagctgcgctggaactgtactggtcggaaatctgaccggaaaactacgctaaaccgtactagaggaatctggctaagagagtcagcgaatttacagtcaaaggacagaaagatgatgggatgggagggcaaaccagggtggggcggagagaatcgcctatacagcaaaactataaccggctgacttcatgtctt

SEQ ID NO: 109104 - DNA, 447 bp, Arabidopsis thaliana columbia
cgtgcggactaagatcaccactttgatccagttgaatctgaatttgagatttcttacggcaattcggtgggggattcaaaatggcaagtgagggagcaaaggatccatggaaaggagaagagtggggaactgagaatgagaagacgaagaagccaacaacaagtggtgtgaaaacggtgacgagagcgaggaaacaaataccgaggggacttgaagacaagtacgaagcttacttcctcccgcgaaagccatggccaagggctcttgcctactatggaagtttcatccttggtgggatcggtgctggtatggttattgaagcttggatcaacaaaaaagtcaaagaagatggaggagtcatttgggaattcgacaagtgatgatagataagtatgtaaggaacatctagagagagtgtctcccttaacacaaatccgtagattggat

SEQ ID NO: 109105 - DNA, 312 bp, Arabidopsis thaliana columbia
  unsure (1)..(312): unsure at all n locations
gggggccgacccacgcgtacttttacctcatatttcaatgactttttattcttcatagcttcaatacttanctaatcctaggactattcatattcaatcatcttaccaacataaccaatatttcaactcttttatactaatcttatctctcaaaacttctgaagctttttatattctcaagcttatctcaacaacaatcctcttttctatttttcaatctctatatttaagacatttttattataatttttaacatacttttaataacactttttttcaagtgtcaaaaaaagttcttactaccttattcaa

SEQ ID NO: 109106 - DNA, 430 bp, Arabidopsis thaliana columbia
  unsure (1)..(430): unsure at all n locations
gcgtactcccagaatgcacacattttatgtttccatgttttgaaaggccaatcatctatggcgttggggcactatcttacggttggtatancaccacttgtagtcatgatcttcatatggtgaaaattggattaagggttctcacacgtcccatgggtgaccgtttgcctcatatttaccgaacccttggctagaactacagcgaatgggttcttccttccatcatccatgaaaccctaaaagcagtggttgctcagtacaatgcaagccatctcattacccatatagaatcttttatctgagagaggcgggggagtgtttcatatctttcttttaactttgacatttctcttggatgatgtctccataacaactctgacattcttcaaataatttacctcaacttttcgggcataacaagtttcttttt

SEQ ID NO: 109107 - DNA, 371 bp, Arabidopsis thaliana columbia
  unsure (1)..(371): unsure at all n locations
tttcccacttatcnntctctctttcaacttctaaggacggcgctnaaccagggagcaaggggtgttttcttagaaaagatgatatcaagatggaagtcacaaagaagacgtacttcgaatctttcaccaaaagagtcggggaagatactattgaggaaatgaggaaaaccatacaaaccgaagaaaaaaatattcggaattgctatgaagaatcaactgaatggataccatctgaattattcgtagaccttatccttcaggattcgattttcattatggagttaattatcagacgtgggggggggggggggaatacattcagatgacataaatttaaactttgcaatcgttatgaatgatttactcttgct

SEQ ID NO: 109108 - DNA, 260 bp, Arabidopsis thaliana columbia
ttacacacaaactcttaaacacacacaaaataaaaaaaacagacactaatacttcaataataatatcggtcttatatatcaattagtgttgtgtttatcttctttagatttagtctcctctacattaaaaaatctcagaaagacactatgacatttaaaatcgatcttcttatctccctttagagtaagatctctttctgctctctttatttccttttttctcaaattcttattttaaatgggaaagtcccataataaaa

SEQ ID NO: 109109 - DNA, 419 bp, Arabidopsis thaliana columbia
  unsure (1)..(419): unsure at all n locations
agtaggttcaaaattggagtttttttatgaaacgatcatatgataaaggggtaacgtggactgaaagagaacagcgggctcctgntattctcggtcctatcaaaaacaagcccattttgcttgaagacggtactctcctttgcggatcatctgttgagagttggaattcttggggagcatggatggaggtcacttcagatgcgggtagaacatggagaaagaaagggccaatatacattcaaggcaagagtcttagcgtgatccaaccagttccataccaaaccgcaactgggaacttacggattttactcatatcctttactggcatttacagaatctgtatctcaaagtctttggattgcggtgagaactggagtttgcagtaccaacgttctcccaaacccaaattcatgtattga

SEQ ID NO: 109110 - DNA, 322 bp, Arabidopsis thaliana columbia
gaattaccggccgaccaggcgtgcgattttgaaaccctaatttctcttcttttccccaataaaaaatgtctgaagttgagtaccggtgcgttgtcgtcggccttgcctgggccaccaatgattaagatcttcaaaggacgttctcacagttcgtcgacgttatcgattctaagatctttaacgaccgcgagagatttagatcaacttcattagcgttttaataacttaatggctgtgcaactattgaccaataaaattgatcaaataattatattggtgaagagatctcaagtgtttttagattatgattcttcatcttatt

SEQ ID NO: 109111 - DNA, 198 bp, Arabidopsis thaliana columbia
aagctttgcaaacaatcatcgccacctacatcattcaagaaaagaatgatcgctacacgatggggtgttttacgctaaactcagggacatcctaaccagaaagcacgctgaagatcgataccctccctacgtggataacgtttctcttaatcacactgagatcattaaaactgccacccatacccaaaacgttcttag

SEQ ID NO: 109112 - DNA, 432 bp, Arabidopsis thaliana columbia
cacgggttccctcctttcattgactttttttggagttacttctcatcaactgggggagggactgaagctctcggggggttgaaggctatgacctcgaataactttccatatatatcagtggttctgcgtgtattcgaaactatgatgaagtctgcaagacacagtgaagcacaagatttactttctatgtgcccaaactatatccgtaataatccggatgttctagaactctttaataccatgaaacccaacgaatctgctgtagaataacctttggctgcttttgcttagcttcagttgtagtttacattccttcaagtcttttaggtttctgggcatttgattcaaataatttggccagaatattttctgctgttcccttttgtttacatgtattactctccagtcatccagtaactttcttcatcaacc

SEQ ID NO: 109113 - DNA, 427 bp, Arabidopsis thaliana columbia
attactccttcaaccatatcattcacatcttctcagtttcgataaaacaaacaaagccctgggatttttacttgctatatcggtgtctctctcccttctcctctataaacatacatataaattaagtacacaccaaaatgtggacgatgggttacaacgaaggaggcgcagattccttcaacggaggaagaaagcttcgtcctctcatcccacgtctcacttcttgccccaccgccgccgtaaacaccaactccgaccaccgctttaatatggcagtggtgacgatgacggcggagcagaacaagagggagctgatgatgctaaactcagaacctcaacatccaccggtaatggtgagctcacggtggaatccgacaccagatcagttaagggttcttgaagagctttaccgacaaggaactagaac

SEQ ID NO: 109114 - DNA, 428 bp, Arabidopsis thaliana columbia
atcagaaaattccgacttggtttgtttttcttgctgtttttgctgtcttgtccggaatgtggtatcaaaccttaattgtgccggaaaatttagagggcgccaaaaatgtattgacaatggctaagaccataccaattcctgtcgctggaccggagagcattgagtttgacccaaaaggagaaggtccttatgctgcggtcgtggacggccgtattctcaagtggcgcggcgatgatctcggctgggttgattttgcctacacatctcctcacagagggaactgttcaaaaactgatgtagtgcctacttgtggaaggccattaggacttactttcgagaagaaaacggtagatttgtacatatgtgatggttacttggggctcatgaaagttggaccatagggaggctctgccgagttaattgttgat

SEQ ID NO: 109115 - DNA, 231 bp, Arabidopsis thaliana columbia
aacaccctgaacttgacctggctgtatgttttcctactctaaaaaatcaattactattttgccggtgacaaaaatggcagggggtgggtctctcacactctacggtaccacttctttatagtgctgcgacaacatcaccagcttcaatgttttcttctcatggatctaccaccgtcgattggtcttttcttacatcactgtcctacgtctacagatccactctaactctct

SEQ ID NO: 109116 - DNA, 387 bp, Arabidopsis thaliana columbia
tttgaattccgggcgggaccgcacgcgtccgtacaaaggcctggtacttcctccttttgttttatctgtgcaagttgttgtgattcgtgtgccctacaaagatgctagtgacggaaggaatttatgatgcttgtactgctactgcatctgccttgtgtgaagccggtatccgtgctgaagaagatttaagggacaactactctcctggatggaagtattcagactgggaaatgaagggtgttccattgaggattgagattggtcccagagacctataaaatgatcaggtcagaactgttagacgtgacaactgagttaaagaagatatcccaagaggtagcttattccaacatgttaaggaactgctttaaaagatccagcaaaaca

SEQ ID NO: 109117 - DNA, 375 bp, Arabidopsis thaliana columbia
tcgctattctctctctctttctatgtcttgttttttcagccgtctcaccataaagctgaccgggagcctcacaaacattgagtgtgttacactaatctcttaaatagagagccgtaatttctacacactctgatcgctagatggaaacggagatatcaggaatggataatccatctatgaccttggacgaggtttccatggaacgcaacatgagcttcgttaaggcattgcaggttccttattatctatctttctgctactagctcttccttgaccacatattttttgatggttctgatcaattatgattttagtagaaattaatagctatgatcacattaaacttggtttaagttgaggcatattcatgtcctc

SEQ ID NO: 109118 - DNA, 246 bp, Arabidopsis thaliana columbia
atatctcatcctcacaattcgctcctacactctccataacgtttaatctctacatcgccatctcaatcatctccattctataaaaccatattcctaaacatctatcaataaccctcacactcattaatatcaacgacacaacctctaacacctttaaagcgccttaccctgatcataacaccattatttctaatcattttcacaccatatatgtctcttccattcattacttcattcatttacaca

SEQ ID NO: 109119 - DNA, 431 bp, Arabidopsis thaliana columbia
  unsure (1)..(431): unsure at all n locations
gcgggtagttgtggagttctttgcttttctaaatggtatataaccggaggaggaggcggggggaatttacatgcgggaacattgntcttcgatatccttaaggtcgagtggtctgtagcaagcatctcctctcaatcttctgtcacatccaacaagggatttagtctagttcttctgcaacacaaggataaagatttccttgtagcttttggaggaacgaaaaaagatccttcaaatcaggtcgatgcttttaccattgacaagaacaagagtgtatcaccaacacatccgcaaacaacttccaagaaaaaccccggccgtttactgtttggaaaaagatcttcttcctcggcagttttaacctctgatgaatcggttaaagcctcttcacagaggcttgatgattcagttgccagacagaaactttgctt

SEQ ID NO: 109120 - DNA, 398 bp, Arabidopsis thaliana columbia
cgcgttcgtattaatatttccataaactagatctcactttttttttcatccatatcaccgataatgccgcggcgtgacttcctatccctgtcactcctccttaccattcccaccgtctccactgtcgcattacccaactattaattcacatgtgtttacacattctttcttataaccttatcaaccttcatagccgttacagattctatcatactctctagagtttacgacaaatactgagactacatatatatccgaaacctaaaatcatggggtggtctaatgggaccagcttactactactaccagaggggtaatctcacatttcagcgactaatcaccatgtctttctaccccaccttgttcattaaatttttcctattactttttcactacca

SEQ ID NO: 109121 - DNA, 419 bp, Arabidopsis thaliana columbia
ggaaagcgagagacaacaaggtgtttttgaatcttacaggatgcaacacattcaccagaccgatgactttttgaagaagatgaggaaacattatggaaaacttaacaagatggaaatgagtatatgggaatgttgtgagttattgaacaatgttgttgatgaaagctatccgtatcttgattagcctcaaattcaacaccttcttcaaaccgctgaatccattctaagggactatcccgactaatattggctccatctcactgacctaatccatgatcatgataatgtttttcttcatgcaaaattcttagattattcctaatttgctgtctatgactatacatttccagtttgtatgtaccttcgtacttagccattattcaccacatagttttttaaatgtaaccatgatatttaac

SEQ ID NO: 109122 - DNA, 373 bp, Arabidopsis thaliana columbia
ctctaagtgcactgaaaaacagtttatccttccctaataaggtgcttcaaagttgggaggggtctctttttactccatgtacatggtttcatgttactcgcaatatcgacaatttagttacacgtgtcgaccttgggaatgcaaatctatcttgacagttcgtaatgcaacttggtcagttttcaaacttgctttacttgaagtcttatagcaataacattacttggtcaatcccagtacagcttggaaatcttacagaattggtgagcttggatctttacttgaacaatttaagcgggtctattccatcaactttctgcctacttaataaactatcgttacttgcgtcttaataactatagcttatctgtag

SEQ ID NO: 109123 - DNA, 468 bp, Arabidopsis thaliana columbia
  unsure (1)..(468): unsure at all n locations
gaaaaaaaggaggttatgttatcacatgtgtgtttgaatgtgaaatgcaacgaggatacgcttgtaggagtttgggagtcctgtacaacgatagttgagtgacggccttatacgaatatgattagatctatctgttgatctgttattttgagacaagtacataggaatacattgtaaacatgatccatgcattggcgcaagaaattctgtcgtttgataactcaagatctaacgatgcttcatctgtctgtatcaaaaggcagaagagattctgatgatggacatnggaggaaactcaacattttattcccaaatgccggggtctctagtcctaaaagaagtatacactggatgggttcaagcatctctacatctaaaaccagcgtttggccaccagaagacccatctgccaagattgatgaagctggtatttctggaaatgagaatggtaagtctggagagaaggtc

SEQ ID NO: 109124 - DNA, 334 bp, Arabidopsis thaliana columbia
  unsure (1)..(334): unsure at all n locations
taagcaccataaggacatcatcaattttttttttgctcttggtaagctccnaanggagtgagagtattcaatgagagcgtgtgagtactcagcaccaaatccttgtatagattgattcactctttgattgtgcttatttttctgatccactcaccatatcttgtttctaagagcttaacaatgatttgttcaagaataccatttgacctgtgaagaatgccattgattattcccttctacagaatagccatatcgatgagatttgcctttgttggttgaatgcaccattatcccaaattttcaactaccttttgaattactttttttaaaataa

SEQ ID NO: 109125 - DNA, 233 bp, Arabidopsis thaliana columbia
ctaaactttattggagaaaccctaatcgtctacaatttgtattccacgcaactctatccgcgaggcgtctgtctcatagggggggtgcacaatcaataaatgaagacgcctatgatttcaattgtaaaaatgcccacgagtaattgcttaccacctattacacgttacgtaaaattcaacgttgttaatctgattaattttttgtgatttgctttattaatttgcattctaat

SEQ ID NO: 109126 - DNA, 379 bp, Arabidopsis thaliana columbia
gtataatcctattgcttctttctcttttccttcctcatccaaaaaatcgggttcgtttcaatttcgacagcatcagctctctcatcactctcttcactctcactccacacccatacctcttctttcatctcctctttctccacaaaatccatctactttttctccttcttcctcaaccaccgcttctcatctttcactctcttcaaagccttatcgaccgataccgaaaccatcttcttccaatactaaacaccacaaataaccgcaaatgtcgtcttccacccaccaattgctcccgaaggatacgtctctccttcctatttcgactaacgaagctaccagacatacgaagagatctctacccctttttaagagctct

SEQ ID NO: 109127 - DNA, 406 bp, Arabidopsis thaliana columbia
ctctgaaatgttgccaaaaaacggttttttattttgtggcctatgcgaattttgggggtgggccctttttaacaaacccatcaccgtccctcgtcagaatattccggcggtgggcttgttcacctttggtgactccaacttcgacgccggaaacaaacagactctcaccaaaaccttactccctcaaactttctggccgtatggaaaatcccgagatgatcccaacgtcaaattctccgacgccctcatcgctccaaacttcctcgctaaattcattgaggataccgatcgtgatcccgccggtccttcaaccgaacgtcaatgtctcacgttgaagctagtttccgccgtcgctgatgctacttctactctggagcttccgggggaattttttgacttctgaatt

SEQ ID NO: 109128 - DNA, 252 bp, Arabidopsis thaliana columbia
cggggccggcccacgcgtacgctccttaagccaacttgtcaacagactttctatccgtccttactaagcttacccaggagtgtggtatttaagtcgaggaggcaaaaccagtaaaaggttcaactacattgtccatggcctatgcctgagcattgttcgttgatgcatgcttgaaaggactcaactgtgttccagatgtcatagaatgctcatacgtgcaatctacaatcaccgtgcttcctttctttgtct

SEQ ID NO: 109129 - DNA, 187 bp, Arabidopsis thaliana columbia
gccgttctgatcgggggcatatctattgtctgtacgtttcactttgttataagtctggggattttgtgtggcgcctgggggtcaacgtggggcgattgctaagaagcggaccaacttatgggactcgtgggatctcgctagggagatggaaggctaattaccctgtctaatgtagctgggagagctc

SEQ ID NO: 109130 - DNA, 404 bp, Arabidopsis thaliana columbia
cgttctccttctctctctctctttcacacacttatttttttctttgtaaaaagcttccttcgtgacgtgagagaacagagactggcgctaactcacttcctaacggtttccacactcaaaattacacttttgccactccggcgaacaacaatatgatcacatggcacgacctctacaccgtcctcacggcggtgataccactctacgtagccatgatcctcgcttacggctcagtccggtggtggaaaatcttctcaccagaccaatgttccggcataaaccggtttgacgctattttcgccggccctcttgattttttccactatatctccttaaacaattcttacgcaatgaatcttcgatttatcgcagccgatacactccaaaaactaatcatgctcact

SEQ ID NO: 109131 - DNA, 396 bp, Arabidopsis thaliana columbia
ccaaaaaatatccttaatttaaccttcctgggggcccaagttgggcggggttgattttgagggtggtgcgccccacaatctatgcatttctatgcgggtagcttccacaaagattttcagatacattggggtgactgccgtggaaaggtgctcgacagagatggaaagcttctatctctctcgctcgacaaatcctctggatccggttttcagtccaaccaggagtttctttatggcaaagcctaggttcaaatgaaacttgtccctggtaactcatcttgaacagtaacaacattctatcttaagtctccgggaactacttgggatgagattgatttcgagttctttatgaaaccctaagttgtcattccgaatacttctccatactaatgttta

SEQ ID NO: 109132 - DNA, 206 bp, Arabidopsis thaliana columbia
acctcgtgatgagcatatcaacgaccatctcactccatcggcggaaggggaccgtgaaaaggggccatcactacaaggccgagacacggaaactacacacaacactgatcataacgaccagacaaagattcaatattcaagacacttagatcatcgtctaccacgaacaacagacctactacagctgtctaccaattaccgtctac

SEQ ID NO: 109133 - DNA, 267 bp, Arabidopsis thaliana columbia
  unsure (1)..(267): unsure at all n locations
cgcatacgtaaaaactnataattaacgttctttttttatactctcgtcctacacaccataacgggggtggtctttattaaagggggggcaccccctactcccgtagtagactttactgatgaatacaaccattattatcaaaaggagactttttgtttgtacttaacgaccgttaagtcaacaattcctactaacaatcttttatgacttcttttaaagatatcaaataaagagatccaatttatttttgtttctttatacaacatt

SEQ ID NO: 109134 - DNA, 400 bp, Arabidopsis thaliana columbia
ttcgacagtcgtagaacttgctagcagctattctgttatgatcctgggaaacgagggcagtgagactttaacgctgccggatcttccttacgattatggcgcattggaaccggccattagtggagagatcatgcagattcatcaccagaagcatcaccaggcttatgttactaattacaataatgctcttgagcagcttgatcaagctgtgaacaagggagatgcttccactgttgttaagttgcagagcgccatcaaattcaacggcggaggtcatgtcaaccattccgatttctggaagaaccttgctccttccaatgaaggtggtggagagccaccaaaaggatcttcttgttgtgccaattgacgcttaactttggcttcctttgaaggtctggtg

SEQ ID NO: 109135 - DNA, 216 bp, Arabidopsis thaliana columbia
gctctggctcttcctcttctaaacatttaaatattttctgacccccaacaaagaggaggcgcggaaactaaacggacgggcggaccacctactatgtcagcaacgacctaaccctccctggatggtctcaaaactccgagtgacaagttttcatcttagcaaccagtgacccctagacagagccagtcccgtcgtttggttgatacagatgaacca

SEQ ID NO: 109136 - DNA, 407 bp, Arabidopsis thaliana columbia
ataaaatatttttatgggtcttctcatctcccacaaaaacgccgctttttaagggtgtgttatccttctaaaccccacatcacccaaatgataaaggtctctaaactcctttaccccaaaggtttccatataactttcgaaaacaccgtatacaaccacaaccgtcttctccggtcccgtggccctaacgccgttaacggtcttccttttttccgaattgagtccatccctgacggtctacccgaaactgacgtgaacgtcactcaggacatccctactcttggcgagtccacaatgaatcactgtctcgctccattcaaggagcttcttccgcagatcaacgcatggaatgatgttcctcctgtgagctgtatcgtatccgacggttgtatgagcttaacacttga

SEQ ID NO: 109137 - DNA, 476 bp, Arabidopsis thaliana columbia
  unsure (1)..(476): unsure at all n locations
gcgtccgaagaggtcttgagggaaggaaaatgaatgatgactattgtttcttgcactttttgaggtcaactcattggagtgcttgacaatgaccgagagcggttannctttgtcgatgttcttttcgttcaagcaatcaaacaaaacttggaacttganntgaaggagcactcacttagaattgttgaccacaagagcntgagattgancttgaaggtcattggagaggagtaccagcgcaggaacagcattcctttggagaaagctattaccaaagacactcgtggagattacgagaagatgctcgtcgcacttctcggtgaagatgatgcttaatcaatcaatcctccacagagaaacataagctgctctacagcttctgttatctcttatctccctctctctctctttgatgagtttcaaatcgtttgattttgtttctacaaaaaccttgtttgttcttgtgtgtgttttga

SEQ ID NO: 109138 - DNA, 236 bp, Arabidopsis thaliana columbia
aaatacacacatacaatactaacaattagtagtttactatacagatccacatccccgggggggtatatatatcagctgctcgaacaattctaccagctttacttcttcttcaatctcaaacctccaattttttccttcgcacaattcttttaaaaccataactccaatcttcttaattctcctcttacttttaaccttatccctctacacatattattccttccaaaaactccttt

SEQ ID NO: 109139 - DNA, 446 bp, Arabidopsis thaliana columbia
cgaaaacagggtcaacgaatgtgtgcaaattttatttttgtttcttgagtttaattcaggagtcaggatatttgattcccaaatctttgatttttgacttgcttacatcaaaagattcatccttttttaataatctgagctcaatccaatccaagacataccaacttcaaacaactctcttgtcctcgcccctcggatctgtttttcagaccaaacccatatcaaaagtttcaacatttaagctcaaaacagagccaaatcttgaatctttctcctccttgcaagttatggtagtagaagagcaaagccttgaaaacggcggatccgtacatgtggtcaaaggagaaagtaatttccgtaatgtggtgtgtggtcctgtacggtggctaaagatgttgtcttcagagcttcattggagctttgtgtttggtgtagtcttactatat

SEQ ID NO: 109140 - DNA, 308 bp, Arabidopsis thaliana columbia
taaaactaaaaaaaaagatggtattttattatataaagctttactctattctctctgtgtgtgttttctatatctttcgtgcgtctcttcccttccatccttccaaaccctattccccaattctcattccctttcttgagcttctcccgttttattccaacccttctcctactcctagtcacttctataatccttatttgaatcctgatccgtctccgagtcttttttcttccattactctaaaccttgaccacattcattctctttcttccaacaaaacaccccactatctattcacttttcgtctc

SEQ ID NO: 109141 - DNA, 454 bp, Arabidopsis thaliana columbia
cgcgtgcgctcagacgactagcagcaagactataccgtttaactttgatgctactgatcctggggtgggcctagaatcaaccactgctactggtctgttcgtggatcctcttgaagaatttgctgctacagtcagctctcaggggataaaaccatcaaatacttcacatacttctacaaaactcaagcctccgcctaaaccaacacaaaaagtgaacagaggtaagagtgtaggaatgtcttcaatagacgaacttgaagactttgccatgggtactatgcgacgtagtgccttcgcttctgacactgctagtaaatatagagaagctgaagatgctgcaacgaagaataaacaagttggtgtagatgaccttgactccttttttagcgctcggtccagcagtgtactcgaatcacgtaccactactgaaacatcttccaagcaagctttcaac

SEQ ID NO: 109142 - DNA, 403 bp, Arabidopsis thaliana columbia
gggaccaatgggtttcacatttttcctattgtaatttttttttttttcgaccacaaatagatcatggtcgcgtgttttaggaatagagcagttgttacctgattccgtttcaacgttgttcatcgaaacggtgaacggttcgcaccagttcacgattcaaggttactctctagccaaaggcatgagccctgggaagtttatacagagcgatatcttctccgttggtggatacgattgggcgatttacttctatcctgatgtgaagaacccggaggaccagtcctcgtatatcttctttgttcatcgctgtagcgagtgattctaatgatattagggctttgtttgagctaacgcttattgctcatagtgtttattggtaatattttttgcatttgctctttgt

SEQ ID NO: 109143 - DNA, 255 bp, Arabidopsis thaliana columbia
atcaccctacttctctctctggggctgtatttttaaaaatggggagcctccttatactttatgtactctttatctcactctcgatagccatgtctgcaaggaggggaaatattgtaaagaatacaattattatttcaaggtaacacctactgtgtcatttgcaaattccttttctagactcctgaattcttctacaacatacccgtagcaaccgttaatctatcatgctatgacaggttatacaaatttaatatt

SEQ ID NO: 109144 - DNA, 257 bp, Arabidopsis thaliana columbia
  unsure (1)..(257): unsure at all n locations
acgcacaagttcaatcaatggctttcttctatagttattctctatgcttgaacgcctttagnccatggcgcgagttcttcgctctatctaccagttgtctctccatcccttccatactcctctaccccatctcttctctccaagaatttcgcatgctcccagtgtttctcctcctttaccggaccgccattaacctgcctcctctctattctcctcgcgtcttctctaatctcttaaaaaccaaaaaccctaccctc

SEQ ID NO: 109145 - DNA, 277 bp, Arabidopsis thaliana columbia
aatgctcaaccttatttcggtattttatacatttatcagatctggggaagttgctacatagttttggggtcaaaaccttttttgaatttacattttttgtactggttagtgcactaacaatgccataagagaggagagagtgaattcaaaatctactgaatctgcattatgttggtgcttaatagactcgatcttttccttgctcttgatgtgggaacatcaaaacgattgttatctacaatcttaggggatatattgacaaacataatgtggtacc

SEQ ID NO: 109146 - DNA, 444 bp, Arabidopsis thaliana columbia
aaagatcgcaagaactcaagctatgtaacattgcagaaagaggtaactaattttaaacggggtataaaaaaagaaattccttgaaaaatatgtacaaccaaaattaattcctctaaatattgaataaaagctttgtagaacaaattaaaatgctcagatttgttttggtctatatccctgtttcgttatagttttctttagtatacagtagaaggatcgtcttacatcataaaagtccagactaatttcagctggaacagcaagatcttgatgaatttcactggtgaatactgattaaagggttgtatcacacacactttgcatatctctattcattatctgctcaacacgtcacacgtgcttttcaaaaagatatacatgtttgttgaaaccattgtttttgtttttttatttccttcagaattagaaactatttttaaaact

SEQ ID NO: 109147 - DNA, 187 bp, Arabidopsis thaliana columbia
  unsure (1)..(187): unsure at all n locations
ccttctgctccaactacttccttatctaaattctccgccgnnactnctcccacgtgcggttgcttctaaaactgcaactgcttctgctttttcaccggttgagttcaccaaaattctccactcctgtttgcgagttgtctccaccaccgacacttgttccagagagctctctttctgttcctgcacc

SEQ ID NO: 109148 - DNA, 477 bp, Arabidopsis thaliana columbia
gaaaccgggggggaggacgcgtacgcatgatccaggcttaccttgtcacttacattcttcttatctctcacgcaaaagcggttggtgcttatcctaaatgcggaaagtttataggtgggaagatctaaattgcacatagtcctgcttgtttcaaagcacatgaccttgctgattcacaatactgatcgttcattgaccgtgcacttgactttaattttgtgatggcatttatacacaactacatttgtagattatccacatatcatgaaagtcattgttggtcatagtttgtctaaattttcaactgatcttaatagtaatattgtaagctttatatctgatttgtatgtcattaacttcttttatttcatttttttcataccattttaatgaatccttaattcttttatatccattatttgtttttatttttttttttatctcctagtgatattttatcaattcttctatttactt

SEQ ID NO: 109149 - DNA, 332 bp, Arabidopsis thaliana columbia
tttacatacttacaatggtgctccgatttcttttagtgagcaggccttcattttaaaggcgggttagcttggagctggggagagactccatccttaatgttctgagcacacagtttttgtttgagacttgtcacctgatgttaccgaccacatgcttactgaaacttttaaagctgtgtattcctttgtcaaggtatctaaagttgttaatgatagtactactggactgtccaagggttattgatttgtcatgtttgctgatgaaagtgagcatatttgtgccatttactgatatgaatggtcaatactgctcattaatgtctattcttact

SEQ ID NO: 109150 - DNA, 280 bp, Arabidopsis thaliana columbia
cgcgtccggtaaacttactttggtgtcatgaccacttttttcctattgaacacaaccatcccaaccagcgaggtttaaatcttatgcacctactcacacaaccaacccgttgtgttgatccaggtgtacgaaggagagagagccataaccaaggacagcaaccttcttggacaatatgagctcttcggaatatctccagctccttgtggtgcaccccacatcacagtctgctttgacattgatgccaatggtattcctaatgtcttagcatgtggacaag

SEQ ID NO: 109151 - DNA, 224 bp, Arabidopsis thaliana columbia
tgacgcatggcctgttttgaattccaatttttttgaatttggtgttagattggggtaggctttaattgagatttggctgttaactctaaattcgataggaagcagtatttttatccagatcttcctaaaggttatcagatttctcagtttgatattcctattgcatctggtggttatgtggatgtggatattcctctcgagtatggtggtggacatatgaatat

SEQ ID NO: 109152 - DNA, 318 bp, Arabidopsis thaliana columbia
  unsure (1)..(318): unsure at all n locations
ggaancccgggccgaccgacgcgtccgtaatgaacactttggtcttgttcatgtggtttcctttcgcagccgcagccgcagcagccggactcttcgtctctctttgcatcccttactctttatcaatcccgatcctcgccttttccggttgcagactaaccgtcactaacgactacgtttcatctcaaaaacaaaaaccaagtcaacgcaaaggttgtctctttgtttgtaaccataggactttattggaccctctctatgttgcatttcgcttgagaaagaaaaacatcaaaactgttacgtatagtttgagtaggg

SEQ ID NO: 109153 - DNA, 393 bp, Arabidopsis thaliana columbia
gaatacccggccgaccgacgcgtccgatggcttttattggaatgagaaacctggtgtctctttatatcatactccgcaaagggggcattgctgtaaatgagtatccttctctctcataccacaagtgtgattacatggcgaacactctattctatacttctctcctgtatcacgataccacagagcacagattagcactaaccgaattttgcggcatgtggagttatgcccaataacggagcatgctagcgtgtcggacccaaatagagtttccacattacatcactggacttcaccttatgttgatgatgatgctaatgctgagcgcgaggacagtgcctctgagctcgaaatcttatagctaaaagcgataggctgttaaagagctaaagc

SEQ ID NO: 109154 - DNA, 447 bp, Arabidopsis thaliana columbia
actaacaatttatttttacatctacatattatttttaagtactatcaagaatcacaagggggggggtatattttaagcacagggaggttaatcagccaacctatttaactattgatctacacatgattcctttactaatattcattttcttatattcatatactgtatttaatattatcagtatgactatttcaagaatttacaacccttacatgcttcttttcttatttccaaaggtcgatttctttcagctgatccttattttattaaccatccatactaacatcttattttcttttgaaggatggtatagtcctctaattattcatttctaatgaattatagtttatcttccaacatgatagacttctgatattattttattcaattatgtttctcattttattttacatattaaaaacaatattatcatagcttattatatat

SEQ ID NO: 109155 - DNA, 235 bp, Arabidopsis thaliana columbia
caacaaatcttaaacgttttactttgtttcttttctactcaaccacaatattctactgggcaggttttatatcctgcgcggccttctccattaatgccatcaatctttcccccgcgacatctgaagtcctattaagcggtctcttgacaatgaggaagacttttgccaagccaaaagtcccatcattctacccattatacagatctgacctcttaattacttgctccattcttct

SEQ ID NO: 109156 - DNA, 184 bp, Arabidopsis thaliana columbia
tacactatgaatcttccatcgtttacgatagtgacgccaacctccacaacgtggctatgtttaatttaatgccacccaaagatactataattgcggaagctcatacgcctgattgatacacacagtacgtcttcgtgcatctcttctcttcttctgcactcattgacttctcctcaaccatcct

SEQ ID NO: 109157 - DNA, 422 bp, Arabidopsis thaliana columbia
gaattgggggggcgacccacgcgtgcgaaaaaaaaaaaaacacaaaaagttttaatggccgcctccacaatggctctctgcgggcctgccttcaccggaaaggctgcgaacctttcccccgcgtcatctgaagtcctcggaagcggccgtgtgacaatgaggaagactgctgccaagccaaagggtccatcaggcagcccatggtacggatcacgaccgagtcaagtacttgggaccattctctggcgagtcaccgagctaccttaccggagagttccccggagactacggatggtacaccgttggactttcaactgatcccgagacatgcgcaaggaaccgcgagctagaagttatccacagtaggtgggctatgctccgaaccctaggctgcgtctttcctgagcttttggctaggaacg

SEQ ID NO: 109158 - DNA, 399 bp, Arabidopsis thaliana columbia
atttactcctttttattcaaggggacggcatattatcctatgggcgaaacacctttacttttttgacctctatacccggacttgttccatttcttcagccaccgttgactttccacaccttttttgtttatgtttccggatggtgtcagtaggatctaccctctatttctttggatgcctatacgcttcacgccaatacaactgtttctacttgtttgacactaccactaacgagtgttaactgtttacttccttctaagaaggacccactcttcgtagtttccactcaatggcaatcgatgaggtaaacttcttcttttttcttagtagatagtgttaccgtacgacttattatacttttcttttacaacatcctttattataaatattttcattttt

SEQ ID NO: 109159 - DNA, 468 bp, Arabidopsis thaliana columbia
  unsure (1)..(468): unsure at all n locations
ttctctttctctcttttatttaatccaatcatgngttnatctccncgagcacgcgtttttaatttcgggggagccacatcccattgttataatgatttagcctctatatcgttgatctcccactatctcgtaactcttttattttcttgatgatgtggatggctctttttttcatcacttaccatctttattatctgttcaagatgtgatatccattcgatataccattgcttgtccctgtaaagtttcatattacttaacttctacaacaggtaactacatcaatctgctttctatggtcctataagctatcctgcatttgcttcaaggacttctgcttttctatactttttctacatttgtcttcatgaagaagtacattttcatcttttattactatttctttctttcttaatgatctcattttaaaagctgatatctctcttgtatcacacatcaataaccttt

SEQ ID NO: 109160 - DNA, 269 bp, Arabidopsis thaliana columbia
  unsure (1)..(269): unsure at all n locations
cttcctctttatttaatttattccaccaccaattcttatccgggctgttttatacgtatgagttggggcntccaaccatttaactatcatttagctcattattacttctattgttacatctttacttgtgatgcaactcttttctgtttccaatattattgatgttgacaacaatgttcttgatgatcttgccctcttaaattgtgcttaaaatcttctatgttttcttattgctcatttttacgcttttgcatatgttctttctacaa

SEQ ID NO: 109161 - DNA, 382 bp, Arabidopsis thaliana columbia
  unsure (1)..(382): unsure at all n locations
ggggcgaccgacgcgtgcgccctactgagatgaataccagatttatatttattcgatgatcgagtaantcattgcaccgtgttcataacattatctgtagtctgcacattggttcagctagcttgagctctggattccaaactggaacaagagctttaactccagagtatgaacaagtccattggtcttctacaagagagagtttgaactctgaataatgaggagaaacaacaaggggttaaattctgctgccactttcttccttttttaggtttcaggattgtatgttttgttaattgattgtaccagtttctcgaagaggcgagagttttgatgaaaggtttaagatacatttctatatacttgtgtgaaagaagctaca

SEQ ID NO: 109162 - DNA, 373 bp, Arabidopsis thaliana columbia
  unsure (1)..(373): unsure at all n locations
aatgcattttatatgcctcacactgctttatatctataaatcgctagaactcattatatcgtnttttgaaacatcccctaggcatccttccttcatcaatgccataatgatcattattaattctgattcgtacaaagctgatactgaactttcagacaattaattggtctttgtgtctgtcaatgaaccctcctctgatgatactgacattgacattaatgatattgcatcttgattgtgtagatcatatgtttcttcatctcaaccatcttctggattgttgattattcctctttctttgggtgctggtgcggagttcaatttctaaaaagaatcatactataaatcttcatttaaccttttatttttatat

SEQ ID NO: 109163 - DNA, 466 bp, Arabidopsis thaliana columbia
ggaaaacccggcgcgaccgcacgcgtccggacaaatctagtcgttcctatgcttttgtgttatctatccttgaaactgtgtctggggggggtgtcatgtgttgtgaggttggatcttgagtgtgatgcacttcttattgagatgttccagcatttcctcaaggctataagggaccatcattcagggaatgtattttcatctatggagaacataatgacccttgttttagaagaaagcgaggatataccttcagagatgctttcaccaatcctacattctgttaaaaaggatgatgagatttcccaagtatcacggatgttgtcagaacaagttctcagttactgttctagcaagctcaaaacttatctgaccgaagcagtgaaatcgtcgggtgttcctctagataagtatagtaacatagtggttttgatatgtgaagggacattcagtgtcttgcatcatgacc

SEQ ID NO: 109164 - DNA, 230 bp, Arabidopsis thaliana columbia
atatcattaccaatttataaatatattattccatggctgcatctttctctggcgccctgtattataatggaagaagaacgcacattcaaatcaaacatttctataattcatacatctataatctcacaaatgttcaatctaacaatgctcccctacactttccttaactatttatctctacttatccatttcaatcaatgctattcttttaactacatatcttaataaac

SEQ ID NO: 109165 - DNA, 226 bp, Arabidopsis thaliana columbia
gcgggattcaacaatgagggtggtgatggtaattttctcttaaggacctttgagcgtcataggggaactggcaaagggagtgactacaagccttactgatctcttcgtgggaatagtggaactccaatggaagagatagctgctgagactgaaacataagctggtgttgagactgagaaagatgttgtagagaatccagacattgattatataaccactgatgcta

SEQ ID NO: 109166 - DNA, 301 bp, Arabidopsis thaliana columbia
gcgtccggtcaaatctcattatttagattacacaaattttactttaattaagccatatggaaatcggggtggttttaaaatcaaggtggcaaatgactacactttctgtgatatcttacttacaaccactggttaatcaaaacctcaaggaggcaaaaatctccaccgaggcagaatagaataactatggttacacacataattgatttcactgtccctactacaccacacattatctacttcaaatactcataaactgatgcgccattcaattatgtgaatcctttcatccccaatacaa

SEQ ID NO: 109167 - DNA, 116 bp, Arabidopsis thaliana columbia
cgtgactctcatgttcctattctagcacctttctttatcggattcgctgtgatcttggtgggagggagtaaccatcccctatgactggaactgtaatcaatcccacaagaagtttt

SEQ ID NO: 109168 - DNA, 188 bp, Arabidopsis thaliana columbia
ccagataaatatttggtttatactaacaacgatatcaaacctcgcccgctttttttaaaaacgcgcgcgactcctctttaactcaatataaccattacacataaccaccctctcatctatatccctgatattgaaccaattgatcataccattatctacatcattaactcaacttatcctgacaatca

SEQ ID NO: 109169 - DNA, 370 bp, Arabidopsis thaliana columbia
tttaattatttatttttttacacaatacttcatactcaaccgcggccattttatcagtgcactaacaccaaattctcctacaaacatccaatactccatgccttcatacaaaaaaccttaacacaaacaatctaaaagaattcaatccacacataaataattatctaaactacaaccacatacaattatattatacatctaaaaacccaactcgacaccacaatcgtgtaatagtaaacaatactataattatcactcacaatcaaacaacttcaaacaaagatatgagcctaaaaacaaattacattaaaagcttaaattacacacagctctaatacaaacataatatccactcaaatatcaatacttc

SEQ ID NO: 109170 - DNA, 449 bp, Arabidopsis thaliana columbia
  unsure (1)..(449): unsure at all n locations
aaacccgggccgaccgacgcgtccggtccaatcactttattaccacacaatttcataagctgatgccangaacacccaaacgccgcgtttttttcaacgagagcaccgcgataaacaacccaaaaaagacacaagatcacaacctggcaaagaaaaagactgcgcaccaccaaagtactacacaaactaaacctcctaaaccgctcacagctcacaaacaatcacctagggaggaaccaaattcttgaaaccaacagaagcatgaatcctcacccaaaacaaactaagactaccttgacgctcctgctgcaaacccaaacaagcctgcagaggccactgcntaatgctaaaaaaatacaaccaaaaacgctcctaaagaagctccctaaaacacacctgacaacatcaagctcgaaacacctcccaacttatacccctcaccatacaac

SEQ ID NO: 109171 - DNA, 439 bp, Arabidopsis thaliana columbia
caaagactccatgcctttatcagttgatcacaaaccagatagagaggatgagtatgcgcgggtagataaagctggaggaaaagttatacaatggcaaggcgctcgtgtttctggcgttcttgccatgtccaggtccatcggtgatcaatatctggagccatttgtaataccagatcccgaagtgacgtttatgccacgagctagagaagacgagtgtctaatattggccagtgatggactttgggacgtaatgagtaaccaagaagcttgcgattttgcgaggaggcggatcttggcttggcacaagaagaatggagcattgcctttagctgagagaggtgtaggagaagaccaagcgtgtcaagctgcggctgaatatctctccaaactcgctattcaaatgggaagcaaagacaatatctcaatcatagtgatcgac

SEQ ID NO: 109172 - DNA, 396 bp, Arabidopsis thaliana columbia
cgcgtccgcattatcgtccaccgttcgatgcgacggcttttattaagattaaagagttgggtgggatcgctggtggtattactaatatggatgagtttggaatgggaagtaccactgaagcttctgcttttcaggtaactgcgaatccgtgggatttgagtcgtgtaccgggaggttcatcgggaggatcagcagcagctgttgcagcaaggcagtgtatggtgtcacttggtagtgatactggtggaagtgtgagacagccagcttcgttttgtggtgttgtaggtcttaagccgacttatgggccgtgggctgggggtgggcttatggcttatgcgtcttcgttcgatgtgattgggtgttttgggtctactgttgctgatgctgggatgcttc

SEQ ID NO: 109173 - DNA, 355 bp, Arabidopsis thaliana columbia
ggggtttgagcagtggagtcggtaactatgttatgcggaggctctcgcgcctccgggcagttgttttaccatcgtcgtcctcctaggctcggtgctaaggttttgcggaaatcttcgttcatgctcagaccttgttcggctatatcgcagcagcggataaagtcgtcgtttaggtctcactgtaaaactccaagaaaaatcccagctcctctcgattgtttcagccagggagatgatcatcctgagctttcaactgaaaggctttccccaattgcaagaagcattttttctttaggggaggtgggtggcctgcatatttgtcatttagagctttcaatttaagcttcaagaattg

SEQ ID NO: 109174 - DNA, 418 bp, Arabidopsis thaliana columbia
gcccaatacacatatacctatacaattttatattcactaaccccataaaacctaaacgcggtgtttttttactcgggagcgttcaaacttacaccccaaaccaaacctaaacactatacaattaaacgctacataaactcaaacaacaatttacaacaatacacgataatgcaacccgtatattccttatcatctatctatcacaaatatgatccacaccgtaaaaaacaacaaaaaactcctcactccctaaatgtaacaaaggtgcacacatgttgttctcttaatacaacaaaactctagtaaagatgctgctacaacttaaacaaaatattacaacgatcaactacttacaaatactttcataacacccactgcttacataaccttattaccaacccttccccttaccgatttt

SEQ ID NO: 109175 - DNA, 374 bp, Arabidopsis thaliana columbia
ggcaaatgactctattggtgaggaagtccataagttggttgcaggactacctgaagggcggttttttctctaggagaagggcgacttctacacccaggaagagaagaatgatcctgaatttgcaaagaagcttgctgctcttgccgatgtttacgttaatgatgccttcggaactgctcacagagctcatgcttccactgagggagttgccaaattcttgaagccttcagttgctggtttcctcatgcataaagaacttgattaccttcccttaactgatgcaaaccccaataagccgggcggggcggatctattaaaatacaagcccataacaaaaaatggttccattgactctctcttgaacacttatgaca

SEQ ID NO: 109176 - DNA, 427 bp, Arabidopsis thaliana columbia
gaacagggaaacttcgtgagtctaagtcttactgttagaatgcgttgaggatatacaataagcggggtgcctgggacaactgtggaggagattgatgtaaatattcccaatactaacatcaatcgatgcaacctcagattcttgtccactcgcaatcatagccatactagcaagaacaagatgctcaagagcgttttcataatctcctttagcctcgcagataattgccatcaatctcctatcagctgcttcctccagtgaagcaggttcactatgcgctcggtgaatctctagagtcttcttgcataactcttccgctttattgaactgcattgcttgaacatatgcttctgctaagtacctgcaagtttcaccaactcgtggatcagtatcacccaaagtctggatctggatcttaagaccttct

SEQ ID NO: 109177 - DNA, 485 bp, Arabidopsis thaliana columbia
  unsure (1)..(485): unsure at all n locations
tccgtaggcttttggaaacggtacacttgcttagaggataggtattgctatgatgccctgaaggttccgtgggggggaaatttattagttcggttgcgcaggttctttcgttattgacttagaacgaacatgctttcgttcaaccaatcaacagatctggatctttgtnnggcgtaaattctaagctcaccgtcgttatacgttctgatgagggtgttacccggaggagcanttatttctccgacgcctgttgaacagtgaaggatctcggatggttgcacctgggtataccgttgacgcgagttaactggactgggactgtgaaaggacatccttatacttacaaaccaaaggaagttgtgccagagttgatccagagactccggcgatcgaatcactctagctcctactttttcgcccgcaaatttactccggattgcttgaagccgcttttggccattgcagattctgtgattttcaaagat

SEQ ID NO: 109178 - DNA, 426 bp, Arabidopsis thaliana columbia
cagagattgtgaagattggagtcatgggtatattaagttacgccgtcgccggcggtggaggggcagtaatcggcgcgtgggagtcactggactcatcgaacctggatccgaattcatcttctggtactgctgattcatcttcccctatggctcagatcagagcttcgccgccaaaatctgttggatcatcttccatccccgtagctttgctttcgtctctgtttattgcgaactcgtttttctccttcttcagctcaatcggatctcgcgatcgggtcgggtcaatgatccagttacagatcgtggcagtggcagtactattcctatattacgccattctaacatatctggtcaactccaaaaacgctgtctttgttgcacttccgtcttcgattacaactttattgcttctctttggcttcattg

SEQ ID NO: 109179 - DNA, 341 bp, Arabidopsis thaliana columbia
cggggccgaccgacgcggtccgtactgcttaaccctcttctaaaaggtgttgttctttacaacatgatgcccgatgagggatatacgccgcctttatgttgcatgttatggttggacaatttcccaaggaaagaaggtatggagaggaaggatgtgatgtccaagaatgtttccatctacaagtctcaggctgctgccttggagaagcatgccgctcctaactgcaaggatcttgttgtggccaacccggcaaacaccaacccattgaacctcaaggaatttgcaccatcaatccctgaaaagaacatcttttgtttgacaaggcttgaccacaacagggc

SEQ ID NO: 109180 - DNA, 382 bp, Arabidopsis thaliana columbia
ctcataaaaataaaaaccggcgcgtttttataaatcctaatacaacccataaaagaagttagaacctacaacaaatcaatacacataacacttaaaagaagaatctaatcaaacagacaagaaacaataaaaactagatggcctaattaaacatccctaaacgctcttctcatgtatgccttaatctctcataatatacaaacaaaaaactctcaacaacaacttctaacaatcctctctctttcaaaactacaaaagccttgggaaacccgaaatgattctactccaatttctccacaagcacaccaacaaataactgccactttagggataccacaccctatgtgtcatgcacatccattctcccttctaaacataccac

SEQ ID NO: 109181 - DNA, 381 bp, Arabidopsis thaliana columbia
  unsure (1)..(381): unsure at all n locations
agctcacaaaaaaagaatanaaaattttcattctcatcnnaaaatccatnactccccgcccgttttttaaaaaaataacgccccccacacaaacnaanattataaccttaagtgtcatatccaaggcaaccatctcacccccaccacaaatctccaccaacacaccattacactgctctcataccgccaaacctcctcactccaatcctcaaaaaatccatctgaaccaaccaacacctaaaacaccccgtcttacttcccccaaccagacaatttctacgaccctaaaaatacatctctatccaacgacaacaaagcactcttatcccaaccaagaaccaacctctatttctcactatcaagaatacaaaccaatcttta

SEQ ID NO: 109182 - DNA, 464 bp, Arabidopsis thaliana columbia
  unsure (1)..(464): unsure at all n locations
cggaaaaaccgggncggcccaaggcgtccgcaatcataacaaacccaaaaaacaatttcttttttactatcataaccatggcggtgctttggtgggcttattgagctagtaatgagaagaaggtgaagagttcatactttgatttgccacctatggaaatgtctgtagcatttcctcaagcaactccagcctctacatttccaccttgtacttcagactattatcatttcaatgatctactgactccggaagaacaagctatccggaagaaagtgagggaatgcatggagaaagaagttgctccaataatgacagagtactgggagaaagcagaatttccattccatatcactccaaagcttggggctatgggtgttgctggtggctcgatcaagggttatggatgtcctggtctctccatcaccgccaatgcaattgccacagcagaaatagctagagttgat

SEQ ID NO: 109183 - DNA, 184 bp, Arabidopsis thaliana columbia
  unsure (1)..(184): unsure at all n locations
acccaaagccattacacagttttatttgtagacctctccatttctcncctctgcggcacgggttttatatttgcgagagaacgcaacacncaacaacccaacgaagaagaatgaaaaaggatttgaggattacatttgtagtcgatttaagctatatcgacgaaacgtcttcgctcgtttcgaa

SEQ ID NO: 109184 - DNA, 451 bp, Arabidopsis thaliana columbia
  unsure (1)..(451): unsure at all n locations
aaagattgaagaattgcatgaaatacggatttcattgtcagcctcggagaaggaggagaggacgtgtttttggcagcggacaaggctganatggggaggaagaagagggcaatgtgggaaagaaagtggaagagattggacattgtgaaagcttttgcatctctctttgtccatttcctctgtctcttggcgcctttcaatttcacttggccggctttaagagtcgccctcattgtctatacggtgggtgggctcggtatcaccgtctcttaccaccgaaatttggctcaccggagcttcaaagtccctaaatggctcgagtatttcttcgcttattgcggccttcttgccattcagggagatccgattgattgggtgagcacacatcgataccatcaccagtttacagattcggatagggacccacatagtcctaacgaaggattttggt

SEQ ID NO: 109185 - DNA, 479 bp, Arabidopsis thaliana columbia
  unsure (1)..(479): unsure at all n locations
cggaatggaaggcccggcgcgacccacgcgtacgaaaaacacacacnacccatcgcgatctatatctaggcgagaggaaactgtggtttgggcgcttttttattatgtttctcacgccgcgaccaagcacaggatccttgcagagcttgcccgcgttgaacaggaagtcgctttcttggagaaagagttgaaggaggtcgagaacacagatattgtatcaaccgtgtgtgaggagctgctatctgtcatcgagaaaggacccgatcctctgttgccactaaccaatggacctttgaacttaggatgggaccggtggtttgaaggaccaaatggaggagaaggctgcagatgcttaatactttgattcgctagacagaataacttttggccacatccaccctccatgatacacacacgctagtttcgaggatcagaatacatacatacctatgtttattatatagatagaacgataatgg

SEQ ID NO: 109186 - DNA, 309 bp, Arabidopsis thaliana columbia
gcgaccggttcgacttaaccattccagatttaagccgtttggtaagcctaaagaatgttggcttctcgaacggctatctctctggccggatacctcgatatctggccagtcttccttcgctgcgaaatctgaatctttctatgaacaagtttgagggaagggtgccaacaacaggagtgtttcgaaatgctacagcagtttctgtttttggtaacacaaatatttgcggaggcgtccgagaaatgcaactaaagccatgcatggtccaggcatttccaaggaagagaaagcctttgtcagttagaaaga

SEQ ID NO: 109187 - DNA, 432 bp, Arabidopsis thaliana columbia
agaaaaatcaaatctttctctctctctcttttgttgaaaacccatttctgtattgtgggcgagctactttactactaagaagaagtgaagcaaaaacagaggtttttgaaaatggagaaaaaacaaggctttttctctgctctcagacacgaagttgtgagaggtctttcgccgtcacgatccagagcaaggtctcgttccgttagtcccgctaggtctagttcacccatgtcagctctcacttggggaagaaagaacttaactggaggaggcggtggtggtggtggcggaggttactatttagcgcaaccagagcagttaattgggagatccggaagtttgagacctgtaatggaaggtcctgatccagatgaaggaggaggaggtggtaatataggaaaatctaaacgactcgggtcgggtttaggtcac

SEQ ID NO: 109188 - DNA, 355 bp, Arabidopsis thaliana columbia
  unsure (1)..(355): unsure at all n locations
aaaagaaaaaaatnttgacaacacnctatattcacaaaaaccccaaaccccccaacccggcaccttataaaaagggcgcggccccccacaaaaaaanaaaccaataaaaacccgcacaaaaaccacgccgaacacccgacccccaaacccgcagaccaccaaccaccggaacaggcacaacccagaccaccacatcaacccagcagaacggacagatctaagccacccaccacaacgaagaacagagaaccaaagaactcaacccgaagcaaccacccccacagatacaaaacacaaaccgcgggacggacaaagagaccaaacaaacaaaccctaaacaaaaaaacccctacac

SEQ ID NO: 109189 - DNA, 393 bp, Arabidopsis thaliana columbia
ggacgaccacgcgtccggtttcacttaatcacactctatacaaaaaaatataaattttctctcaaatctgcaaatcttgtttcctgtgcaccaaatctcttctctcttcaactaaaaaatctcacttcttctcttaaagacgagccatttctgcttcggcaaccttttctgcttcaggaaaaatttctctctatgcatctaacttttccagaacatcaggatctggtgtctctactaataatacgatcactggactcttacctctttctgctgcagtttatatgatttaaaatcaacaagttctttcttcttttatgtaactaaactttattgctatcaaaccttattgttttccaataagaccttttttctataaaatttttctattctaac

SEQ ID NO: 109190 - DNA, 369 bp, Arabidopsis thaliana columbia
gaacagccaaatatgccaacaagggcacccttatttttttttgaagcaaaccgaataatcggggaatggctaaactaatggtgcgacgcccattcgcacttatctctctacaacacaaccacagctgccttatcacattttcaaaaatccacctctcttcttactccccgacccactcaaccagattcacaattctagcactccaaacccacagtttgctagactatatacctatctcccaagtccgcttcacctgtatctctatctaccaaaaaccccttatccgaatccaaacaaagcattccttgcttgcggtaaaatagccaatacatgtgctcactcatgtctgaattaataatttcacaagcc

SEQ ID NO: 109191 - DNA, 436 bp, Arabidopsis thaliana columbia
  unsure (1)..(436): unsure at all n locations
aaaaagggacggcgcgacgcgggcgaaaaaatagagtggaagaagagagaaagagatgttagttttatgcaacaaaaaaaatanagggggaatggtgttacagggaagggtggcagaaacaatccatgtcttgaatcacgatcctgaatcttccaatagagttgctgctaaccaatggcttgttcaattccagcttacttctgcttcttgggacgactccacttctctcctcacttctccgaatgtttctcttttctaccttcaattcttcgccgctcaaattctccgccgaaagattcagaacgaagcatcgaatcttcaatctacagctaaagatgctcttctcaatgcccttcttcttgctgctaaaaaatatagctcccgtgttcctcacctttgacgcaaatatgtttagctctctctgcgcttcttcttt

SEQ ID NO: 109192 - DNA, 259 bp, Arabidopsis thaliana columbia
  unsure (1)..(259): unsure at all n locations
aaaaaaaaaaaganggacgcgngcggnaaaaaaaccatttttattctcgacgctctttaacttttccacatcgaaaanaaaacctgcgatcgttaaaactttgagaaggcgccacaccaaaatcanaatnaaaaaagaaacccaacttccattctttattaaattcactctttcaatgtataccctcaaaacctcttttaacagacaactccagaactacaactaataatacattcagaccaactcctttttttcctat

SEQ ID NO: 109193 - DNA, 211 bp, Arabidopsis thaliana columbia
ttttataaaacatacatacaaaaaaagggcactgtttaacactgatggatcctatgcactcatttatttaacattacattgtttaaaatattcaaaatctgcttgactcaatgaacaagcttcgagttataccttccagatcaccttctaattccaaaaaaaaccctatcattattatcgattttgaaatgccactttattgtaaaaacta

SEQ ID NO: 109194 - DNA, 303 bp, Arabidopsis thaliana columbia
caaaaaaaaaagggacgggtttatactgagagggggcgtgtccctcattaaatcactcataaaaagtttgatggtaactactactcggataaccgtagtaatactagagccaacacgggcaacaaaccccgacttatggaagggacgcatttattagataaaaggtcgacgcgggctctgcccgttgctctgatgattcatgataactcgaccgatcgcatggcctttgtgctggtcacacatcattcaaatctctgccctatcatctttcaatgttatgattgtggcctaccatggtggtaa

SEQ ID NO: 109195 - DNA, 427 bp, Arabidopsis thaliana columbia
  unsure (1)..(427): unsure at all n locations
ctctaatcaatactgctctttatgtttcactcgagaaggacaacttccgcggctgggatcttattgcggtgcggctncccacaaaaaacctatnattnaacctcaatctttaagcacatgggatgcaattggatctcttggagcgaggaactttatgctctgtaggaaaccagaggagaagaacgttgaggaaagtaatggaagatctgactctaccattaatggtgcaagaaaaggnggaagcttgaaggcttggatcaacaaatccttcaatctcaaaatctcaagccattgagatggattttcttctcttttttatgaaataataagaccaatctttgttttatcatcattatgttctttgcttttcggtttcgattccaaagtttgttattttcatctttcattcatgaataaaaatgtcaaa

SEQ ID NO: 109196 - DNA, 282 bp, Arabidopsis thaliana columbia
aaaagctatttatctttctgattttatgggatacccactataatcttctgtgagagtacttcaacaatttcttctatgtttttcaattcacttttattcgaaagaaaactacttgtcctcctaaatgattcggattcttctcattctccgatcctgctgttatttatatggttcttcacgacattcaccatattgattatagtgatgttgttgtcataacaacaatttctatagattatctatattcttctataatatcacatactttttattcttctaata

SEQ ID NO: 109197 - DNA, 347 bp, Arabidopsis thaliana columbia
  unsure (1)..(347): unsure at all n locations
aaaaagggacgggccgacgcggccggccaaantaaagcctaaaaaaattgcctctttgtgttttaatgagtctactaatccctctgttttggttgaacaaaccggtgaggaacntntgcaccttaattgtttacgtgtgcttcatcaacttgcagctagtaccacatgtgctgaagcaatggctgcaactagtgctggaaatgcacaggtggttccacttctcatgaaagcaataggatggcttggtggaagcattttagcactcgagacacttaagcgtgttgttgttgctggaaatcgggccagaaattcncttttttcgcagggtctaaaggttggtctcattg

SEQ ID NO: 109198 - DNA, 351 bp, Arabidopsis thaliana columbia
  unsure (1)..(351): unsure at all n locations
aatagctccaaacaccttttacttccacaattattctctacattaccatctatattncagtgtgtctgacaaaacatggttcgacaanaanaaacccagctaattcaaacaccatcatatcagattatcattcactcctaatttctagtttcctttgcaccattataaacgcaaaccgaaaattaaacctgttttttacatataaaacaatcacagctctatattttgatataaactgcgaatccagtctacttttattactaaatcttttattctacacaaccaattattttcatatacatacgttgacgctaatacaatgtttagccttttatcccagatcatacattt

SEQ ID NO: 109199 - DNA, 261 bp, Arabidopsis thaliana columbia
  unsure (1)..(261): unsure at all n locations
aaaaaaaaaaaaagggccgaaacaaacaanactgctaaaaaaaaaaaaaaattttaatttaataaaaaaacaaaaaaaaaatgcatccgtttaatataaaaacaccgccccccccccnaacaacaaaataatatcctatactttcacacccaccacatttaatccaatctataccaactcattaatcaccaacaaaacccttatccaaaatcttatatcaaaaattcattctttcaaatcctccaacacccttcttacatt

SEQ ID NO: 109200 - DNA, 473 bp, Arabidopsis thaliana columbia
gcgtacaaatggctccaatcgccttctacttctactattattctctacataaccatctttggttcctgttatattacaaaacgtgcttgaatgtttgaattgcgagtaatttcaagaccatgatagcagattatcattcaggcctaattggtagtttcttttgcagcattataaactcaaactgaaaagcaaactttttttttacttctaatacaatcatatttttatttttttatataaatagttaatcatctctactctttatactaaatctattattcttcattattatttatttttatattctttttgtgggtgtttaattcattttttttaaattttttttctaattacttttttcctttaccttattatttttttttcattatttttatatattttactattctactttatcctatctattatatattttattttttccttttttaatatttttaatacattatttt

SEQ ID NO: 109201 - DNA, 264 bp, Arabidopsis thaliana columbia
caaacagcggaggccaatatctcctctttatgccttcgctcgctctatgggctttgtttacctaaatggggcgcgctctaagaaactgaacttgttacgaaggagaaaaacagggctgctgctgttgcaatgaatgctgagatccgccggaccaaggcacgattgtcagaggaagttcccaagttgcaaagacttgctgtcaagcgtgttaagtgccttacaaccgaagagcttgctgtgagaaatgaatttgttctcgctctt

SEQ ID NO: 109202 - DNA, 310 bp, Arabidopsis thaliana columbia
atcttggtttgccagatacacaaccaatcttttccactgacttatctgagaataagcatgtcaaggagattgaaccatcattgaagaaccaactcattatctcaactgttattatgactgtcagcatttcttatctgtcaatgattggctaaccaaccttctttaccatcttgaacttgggaacacaaaaagttgtcaagaacttccagctattccttccagtttgttttgaactttaaaactttacttattaatgatttcttcaacttattactaccctctttacctctacagcccttttcttatattt

SEQ ID NO: 109203 - DNA, 372 bp, Arabidopsis thaliana columbia
  unsure (1)..(372): unsure at all n locations
aaaaaaaaaagggggcggccgagcgaacaattctctcaaataagagcatttcttatttcaaaattctcaatnannnctcggtcgggtgtaattagcgcgcgggccccccancacaacnnaaaaaaaaaatttctggaaacaacaaattcatacttcgcaaccttaaactatcgatctttacatatatataaaaactgaaatgaaaataacatgaactctcaactcgtaaaaatacttacacccccaataattccttattttaccaaactcccctctgttacaccattgaaaacttttcgccaaacaatggaatcaagaaattcaaagcttctgtctactcaaactactccaagaagccctccttaaaaccaa

SEQ ID NO: 109204 - DNA, 187 bp, Arabidopsis thaliana columbia
aaactcaataataaattttatatttttcaagagaaagtgaaagaaatttttaaggtgttgaattattgacttacaatttaaaatcaatcattggtgcaagccataaaaaatcttgaatcactaacatagacctataccttttatccacaatttatttaataagttcatccatatgatactgcatcac

SEQ ID NO: 109205 - DNA, 316 bp, Arabidopsis thaliana columbia
tctttatttctttctccctcccaatcattttatttgtccatatgagaatggttttaagaccactatcgagtacaaattcaaccatgaagaaaatattgttaagataactacttacacacatatccacaagctaacttcttctctactcaacaaactagccatttatattaggaactttcctaagttctgatactcagtcaatttgtaaacttttatccatctcactatcgtttctacccaaaagatccttctctaactacccctagcttcttttaccaaatcttattaattaaattcaacatgatatttcttttct

SEQ ID NO: 109206 - DNA, 355 bp, Arabidopsis thaliana columbia
gaaaaacccaagttcgtacccatggctctgttttttttttctgggaactcataataaacctggggagggagtgcttaaagatgggcttagttctcaaattcaggcaacatttatctcaaacctcatccagattatcacttctttctcgaatcggcggttaccggagttacacccaaccggcgaagattgaagatgaagaagaagaagaattcgatcagagaaagctcccaacagattacgatccagctacttttgatccaacagagcatcgaaatccaccaacggatcgtgtattcagacctcgtagacgagatctcatctctaacattattagaaatctccgagcttggttcga

SEQ ID NO: 109207 - DNA, 316 bp, Arabidopsis thaliana columbia
  unsure (1)..(316): unsure at all n locations
aaaattaaaaccctggctggttaaatataacgcccgtccatcttaatcaaaaaaaaactnatatttgaatcttattttactaaatttcatactttttggatctcatagaggttcaagctaacaattcaccctaacactttctcttacatttttttttttttttgtcatttcaaacaagtctatacttcgaacgaaatttctaataatctttttataactctcaaatttcatcaaaccaacactacagactttctcaccttctgtgcgtttgacccttatcaaattaccattatttctaaacattttaacacattta

SEQ ID NO: 109208 - DNA, 307 bp, Arabidopsis thaliana columbia
  unsure (1)..(307): unsure at all n locations
gacgaccgacgcgtgcgctacggacctcctggatgtgggaaaacctctttgtgcttatagctattgccaacgagtgccaggctatgttcatcagtgtcaagggtccggagcttctgacaatgtggtttggagagagtgaagcaaatgttcgtgaaatcttcgacaaggcccgtcaatccgctccatgngttcttttctttgatgagctcgactccattgcaactcagagaggatttttaagtggtggcgatggaggaggagctgtttttttttacttttttttttttttagacttttttttttccga

SEQ ID NO: 109209 - DNA, 403 bp, Arabidopsis thaliana columbia
  unsure (1)..(403): unsure at all n locations
aaaaaaaaagggggggggggggaagcgananagatatactcncaagaattttttttacctaaaaacaaaaaacaagggggcctgtgatattcgggggcgcgaacncanatactatctactcnnctaccctcgaaaccattgcaaacatggggaaggtcgtcgacagcctttatgtccggtctgccaaaatcatgtcctgagagagtgagtgagttggtcgtatgaatctcattctatcgttctttctttctggttttagatatcgattggactcaaagaaactgatgtttctcaatggagaaagtaaactggtctgaatggggcacattactcggtctgcttatgatcttattatgtcatgcgttcttacctcttattagcgcttaaaatgtaatttggtttt

SEQ ID NO: 109210 - DNA, 390 bp, Arabidopsis thaliana columbia
  unsure (1)..(390): unsure at all n locations
acaccnancacaatcttttttcttataacnacattcatcaaacccgcgcctgttacttctacaagtaggccagttccttaaaacctacaaacaacactttttcctttaattcttctaataattattatcttcaatatatttcacacaattttcattctttcactctttctataaaaaagactggagccgcccctgcataagtcaccactaccaaagcctaaccttcttaaactaattcctataattttatcatcatttttttcatattttttatacccatcaaagaggctacaccaagacggacttttaaaacttttttacaacaaacctctatctattttttacttacaatacataatattcacctctatatattaaactcatcttttt

SEQ ID NO: 109211 - DNA, 203 bp, Arabidopsis thaliana columbia
ttctgttgcaggggcaccaacactaactgctatcattgcccttatcattatgagaaaacgtatgagaggatacagtgcagttgctagaagaaagcgatcttccaaagcttctttgaaaatcgaaggtgtgaagagcttcacttatgctgagttggctttggctacagacaattttaatagatccattcaaattgggtaagggg

SEQ ID NO: 109212 - DNA, 352 bp, Arabidopsis thaliana columbia
  unsure (1)..(352): unsure at all n locations
ttttacaaaaacaaaaaaaaaaaaagcgtcatgtggtaaattttcacaggggcccgccccacaaataacaaancaagtcgcttacaatgtattctccattcaaaccccttgtcacagccactgaagatctcacctccgtcaactctccacctccactctcaaacctcacgcaagaagaactcaataaaacctccgcttataaatccatccaattcatccaatctcgaaatcgtatctttcttcgcactgcctccacctctaaacactctcgggctcgtatcagcaagctttttcccaaaaagaaaacctcactcatataatcccaatcctctctttaaccacaacccattaa

SEQ ID NO: 109213 - DNA, 247 bp, Arabidopsis thaliana columbia
  unsure (1)..(247): unsure at all n locations
aaaaaaaaaaagcaaaaagaattttattttatactcaaaaaatatcacaaatncgggtattgttttatttttaaagcaagtggcggcgcncanaacacacatacaaagtgaaacaaagtgtgccaataaggcacttattgcttcaaagtatgcgtgtgtgaatatcgtcgagtccgcatactttcatattgtcttcactaacaagtcaccggacgttcttaatatgaaccctattggaaaggaccct

SEQ ID NO: 109214 - DNA, 295 bp, Arabidopsis thaliana columbia
  unsure (1)..(295): unsure at all n locations
gaaaaaggggcgggncgaagcgaacaacncaaaacctaaaccagaaattctttttataaaaaaacaaaaacaaaggcccttgcttattttgcagcggccctaaccccaaccaaaaccaacacaacaacaataatttaatcaacttgcaaaaccacaaactactacaaattctgcgtctcatctctcaaatccgacccaagaagtcccacagccgacacaaaaggtctcgccttcattatggactgcgctgatattacaaacgccacctccaccgcaaaatacatttttttgaaac

SEQ ID NO: 109215 - DNA, 521 bp, Arabidopsis thaliana columbia
  unsure (1)..(521): unsure at all n locations
ccggtcggcccacgcgtccgacccaacaaaacccacaagtcgaaatctctatatccgttgagagtttgttcctttttttntgtnctcggagatggaggctgtgccggaggatgaagagtacagtttcagggaagtagtgttgccgtctttgattccggtagttcctgagccggaacttgagagagagatcttatagaggagatgaggaagagattttatcgtctctttttatcaattgtctatttgttcatccccctttttttttgtcatcttttactttttctttctatcttcctattattctttaatctttttctctctttttgggggggggggtgggttctcttcttcttattttcttttactactttttttttttgtcataatattttttttttcttattaaatttttttttttttccctattttttttttttttctctttatattattttttgttatcatctctatactttttttttctttcttaatattattttttttttacacatctttttttt

SEQ ID NO: 109216 - DNA, 412 bp, Arabidopsis thaliana columbia
  unsure (1)..(412): unsure at all n locations
ccggaaccggcaaggcccgacccagcgcgtacccgtacatcaaagtactccaaggtagaacatgcctctggtcttatggaacaatgtannngcaagggaagtcggcagaaatggtatccgtaacttggggggaaaggattagactctgagggctgggctcgggggtcccagttccgaacccgtcggctgtcagcggactgctcgagctgcttccgcggcgagagcgggtcgtcgcgtgccggccggtggacagactgagaacagctctcttgggagctttcaccgggcgtataacatttcacatataactggtacggacactgagaatgcaactgtgtaactaaaacaaagcattgcgatggtccctgcggatgctaacgcaatgtgattttttcccaatgctctgaattgt

SEQ ID NO: 109217 - DNA, 364 bp, Arabidopsis thaliana columbia
gaaaataattaatcacttgctaattctaagcttcttctctttccaaaaatggcgtcatcatgggctttagctctcaggagacgtctctcttcttccaccgtcgccgtccctcgcgccttaagagccgttcgtccggtggctgcttcatctcgcctcttcaataccaacgccgccagaaactatgaagacggtgtcgataggaaccatcactcaaaccgacatgtttctcgccacggcggcgatttcttctcacatatactcgatccgtttactccaacgagaagcttgagccaaatgctgaatttcatggaccaagtaagcgaaatccctttggtatcagctactcgtggaatgggagcttctg

SEQ ID NO: 109218 - DNA, 492 bp, Arabidopsis thaliana columbia
  unsure (1)..(492): unsure at all n locations
nntccgctttgcttcnnttcgtagcccccgccgtcgctcgtgaattctctntggccggagnncttcaaaagggccaacgagaaagagcgaactnnnctatccgccgtgcgtcgtgcacgccnnngtgctaagaaatcctcatgggcagnnntccacgcgtntnnaccctgaggctcttgtatcnnntctgccgnntggtaacctggccggcgnnngcgtcgagcctaaccgnntcgcaaaaaggaatgtcatcgaaggcnnatcggtgaacctannacaataaccgccgtggagcacaattacccttcaccgtgaaagaagctgatcaaagaagaggaaaggactntgacgccgcgcgagaaagaccgcgcttcatgacttgtttggagactattgatgagacgctggacgagctccatgaaacggtggaagatcttcatttgtatccaaccaaaaaaactctccgggaacacgccggagatctcaaacact

SEQ ID NO: 109219 - DNA, 425 bp, Arabidopsis thaliana columbia
gttcattggttctctattttgaactcgcttatggtgatcttctttctggccggtataggtgtcgtcatattcctgagggcagggagaagggatttgacaaagtatgaggaactggacaaggaagcacaggcacagatgaatgaggagctctctggatggaaacttgttgtcggagatgtgttcagagaaccagaaatgccaaagcttctatgcattatggtgggagatggggttcgaattacaggaatggctgttgtcactattgttttcgctgcacttggattcatgtcgcctgcctcaagaggaatgctactaaccgggatgattattctctatcttttcttgggtattgttgctgggtacgctggtgttcggctctggagaacttgcaaggggactttagaaggatggagatcacttttctg

SEQ ID NO: 109220 - DNA, 450 bp, Arabidopsis thaliana columbia
ccgggcgaccacgcgtccgcgattaaatctcaaccgtccgtttcaaatctgatcaacgtcgccgaccgtttgattctccgtgatggtaatgccggagatcttgcgggagcggtttcagctcttgatctcatggctcgtgatgggattcgtcctatggactcagtcactttctcttcacttctcaaatcttgtatccgagcacgcgattttcgtctcgggaaactcgtacacgctcgattaatcgagtttgatatcgagcctgattcggttctctacaattcgttgattagcttgtattcgaaatctggagattcggcgaaagctgaagatgtgtttgagactatgagaagatttggtaagcgagatgttgtttcgtggagtgcgatgattgcttgttacggtaacaacggaagagaattagatgcaattaaaggttttggtgagtttctg

SEQ ID NO: 109221 - DNA, 155 bp, Arabidopsis thaliana columbia
ctgatttttgcattatttagagagacaacttttattatatacgggaataataaatttaatcgactgtgtcttaataatgacggggctgaaacaaacttgggcaaacattttatttctagccaaggtggagatcctagacagagctggccccatta

SEQ ID NO: 109222 - DNA, 365 bp, Arabidopsis thaliana columbia
aaaaactgacattttagatcttatgttttcttggtctatataccggggggtatcttacctaagagggaacaaacgcttacagagctgatacaggcttaaaagcatggacactgatcggtctcttaaccgcccgagacgtacgtgattgctctgagatactgatttcacagtttaagtaagaaagtatctctcttttaaccgtcggcaccccggtagacgggtcggtcattccctcttctcctcgtcctcaccgggaagtgacaactcgctccactcaatcttgtcagaccggttgcttgtcagcaataacaagcggacgtgattactgacggcgtttgggctaaaccaaactcgagtgtgagttg

SEQ ID NO: 109223 - DNA, 340 bp, Arabidopsis thaliana columbia
ccggtcggccacgcgtccggttgaggttaacgacgacaaacactttttttcaaacctcgtccatttttacacaaacctgtttcattcctccacagacatgttcatttacaagaaaggtttcggtaagggtttgggcggtggaggcggtctaggcggcggaggtggtctaggaggcggttgtggcctatgatgcgttggaggtttaggctgttgtatcttgattaatttttttcctgtctatttttctttttttcctatattttttttttttacataattttttttttctcatcttttttttttttcttctatctattttttatcgtgggggggggggggg

SEQ ID NO: 109224 - DNA, 577 bp, Arabidopsis thaliana columbia
  unsure (1)..(577): unsure at all n locations
cgggtcgagccgacnngcgtccgtgaatctanngaaatagttttatttagttggaaatttatattgtatagagagagannnatattactaccaccgagtctgtttctatagaggtnncctaacgagagttaccnnncacaatccnnaggaaaccccnnttatttgagaattcaaaattcatnnnttctttcttttttctgtngnntttgtngannttttccnnncgggaaannntattttnntgggtattttatgtcnntctctngnntttttgctttnntcctttttcatagnnngagtcatgnntgtttcttcttgggtcttccttagcttcttctttaataaagtcctctctctttgtgagaaatctctttcgaattttcaatttnnttgttccattgtgagctatctgtatggatcacagaccagagaaaaagatcaatatctttttaccgttaatggaggaagtattctccggcgatcgcaggtcctttcaggccattctccgaaacccagatggatttcaccgggatcagattgggtaaaggttactgcaataaccaatactcaaatcaag

SEQ ID NO: 109225 - DNA, 430 bp, Arabidopsis thaliana columbia
agtcaccaaaaaaaaaaaaaaaacacattttgtttcaatggccgcctccacaatggcggggggctcccctgccttcgccggaaaggctgtgaacctttcccccgcggcatctgaagtcctcggaagcggccgtgtgacaatgaggaagactgttgccaagccaaagggtccatcaggcagcccatggtacggatccgaccgagtcaagtacttgggtccattctctggcgagttaccgagctaccttaccggagagttccccggagactacggatgggacaccgctggactttcagctgattgggagacattcgcaaggaacctggagctagaaattatccacagcatgtgggctattgctcggagccctaggctgcgtcttccctgagcttttggcttggaacggagtcaagttctgttgaggcggttt

SEQ ID NO: 109226 - DNA, 454 bp, Arabidopsis thaliana columbia
acgctctctttatggactcaactaaattactatctgttacatacgcctccaaaacaacccgcctgataatcaagaaatctgagagaccgaaacctcacaattatcacaaagctaccgatatagaaatacccagaacataattcgtatataccctgattcttttgcatatactctaaaccaactcataaacccagatcctcacgaagacaacaataactctacctactttcaagaaaatgggtccttcactacaggaagaaaaccaaacgctcatgataacaatttcatcgcaataccaatcaagcaagcctgtttgacaccacaacaaactcatccaactatattcacccataagctactattgacttttcaagaccctgttaataaacccaaaaaaccaattcatatccctcacatatacttcaacgtacttttctacctcatatccctgaca

SEQ ID NO: 109227 - DNA, 464 bp, Arabidopsis thaliana columbia
gattcgagctgtgtttcaagctgcgatttgtatggctctctatctctatttagtacctcagtttgcgttaactcggttcactgaaccagtgtaccaagaatggggattcttgaagagatttggttaccaatacatggcgggtttcacggctcgttggaagtattactttatatggtctatctcagaggcttctattattatctctggtttgggtttcagtggttggactgatgaaactcagacaaaggctaaatgggaccgcgctaagaatgtcgatattttgggggttgagcttgccaagagtgcggttcagattccgcttttctggaacatacaagtcagcacatggctccgtcactacgtatatgagagaattgtgaagcccgggaagaaagcgggtttcttccaattgctagctacgcaaaccgtcagtgctgtctggcatggactgtatcctggataca

SEQ ID NO: 109228 - DNA, 311 bp, Arabidopsis thaliana columbia
ccggggcgacccacacttcacttacttttcatcattttatctaaactctaataattaccacgaagaatactacaccaccgaggcttataacaaagagagagggtgagatcacaaaatatcttattttacacaatcttcttcatatggaagatttctgtttctctacactcttatattcaaaaatctttgtatctgattaccatatctctattcttcccacttcaatgctaaaacatcaaatctttttccaatcacttttattctaacaaaaacttatcttccatcttaattaactttagatttcttttatt

SEQ ID NO: 109229 - DNA, 425 bp, Arabidopsis thaliana columbia
gcagaggcttatcttcgccggaaagcatttgtaggatggccgcacgttggcggatacgatggccataaggaatccacgctgacttggttctcaggctccgtggtggtatgcagattttcgttaaaaccctaacgggaaagacttttactcttgaggtggagagctttttctctcatttgacatcgtttaggccaagatccatgttttggtgggattttctcctgaccatcatattgtttttcttttctctttttgttatttgaatacttttttttcttctttcttttttcttattttttggagtgggggggggggggtggttttattatattcttttatatttatttttattttttatttctttttttctttattctttttatactgtcttttatttttttttcatctatataattttttttttt

SEQ ID NO: 109230 - DNA, 471 bp, Arabidopsis thaliana columbia
  unsure (1)..(471): unsure at all n locations
cttattcactcgaaaatcaggtagagatccttatttttttctgttataagatggggttctcgtcaggagtatttgttggtcaggatgaccgangtctacttgctctcaaagctgcacaaagattgatggcaacaaacgatcccatcaaagtcgtggtcaaaggagttgtcttgcttaatactagcttatcaaggtaagtattttcagcttttgcatgaatacttctgcacacattactttggaagaagcacctttgtcgcccttttttattcactgatatatctcattttgtaaattgccgtgcgggtgggggaggggtctatatcactacatattttcttatgctatatattctttcttttcacttttattgttttgttttaagttctttatgattattgtattcttttttttcaaaaattttttttcctctaaatttcatttttttttaaaaaatactttttttttttt

SEQ ID NO: 109231 - DNA, 386 bp, Arabidopsis thaliana columbia
  unsure (1)..(386): unsure at all n locations
gtacagctccaaggatataggttttctccaagatgataggtatgtagtaggatggttattatagtcgcttgggcctnatccantgtgaacgcgctgaggacgcatcctggatggtggcaccgtgagctccaggaggtgagaggacaatcttcttcatataccgcccagagctttggttttcactaaattctactcaaatgtaaagaagttaaggttttgctttatctcgtgtcaagtcaaattacgcttgattttctattttcttaaagtatttggataggcgagaaataaaatttttctttatttttgccctaaacttaatatttgactattttcctaaagtgctatctctcttttttatatgttgattccttttaaaccttaat

SEQ ID NO: 109232 - DNA, 472 bp, Arabidopsis thaliana columbia
  unsure (1)..(472): unsure at all n locations
gcctccttttcgtttgccactttttgatcaatctaaactccaaaacacagagccatgcgcgggaatttttacccgagcgagatcgtcnatgtgtacgtccgtgtaaccggaggagaagtgggagccgccagttctctagcttcaaagatcggtcctctcggtctcgcaccaaagaagatcggagaagacatttcgaaagagacttttaaagaatggaaaggacttttttttactcttatgttttctgttcataattgttaagtttatgttaccgtttttctatttttttaattctcggagtggggggggggggggttccaaatttagaccttaagattttttttattattaatctttattttttcattttttttgtttttttctataaattattttatttattctatatttatattttttttttttaattttattttttaatacttttatatatttctttaatttaatattt

SEQ ID NO: 109233 - DNA, 429 bp, Arabidopsis thaliana columbia
  unsure (1)..(429): unsure at all n locations
ttcaattcactaaatctttttccaccaatttaattaatccgcgtgatgatcaaaaagnttggcgggattcaatccagaataggcaagatccanaacaaccaaaatcacaaccagagatccgtagttccatcaaaaccctcgtcaaatcagtaccctaataaccatcaattatggacttacgagaatcaccaacgaattatttataacaacaatagtaatagtgttgatccatatcgaggaggatgaggacagaagaaagtgccaatagaagccatttttctatctggtgagcttgaaagcatgatcacggatcatcagaaagcaaaaagaaccaattgattggttcgtgcattttctagcaatataaatttatattgtaatctttttcaattttaatcaaacttgaccttttactgcaggtttaaatta

SEQ ID NO: 109234 - DNA, 416 bp, Arabidopsis thaliana columbia
  unsure (1)..(416): unsure at all n locations
gccatgtttgctcagttagcaccatcgccgtcttcttctccggcgaacgttagccacttcgtgcagcgtctcaccttccgtcagtgtgcatacnccntctccncttctcttcccactgcaaattcctctcgtccaccaccaattcagattgttggaggaaaggatttgaatttggatgttacacggaaagatgattcaattgggttcaaattagaggcaaatgaagatgaaattgattggatgaatctagaatctgatattcgtctatggactagagcattacgtcctgttcagtggtatccagggcacataatgaaaacttaaaaagaacttaaggaacagcttaagttgattgatgttgtgattgaagtccctgattcttgtatttccttttcgaacactcatccaaaaattga

SEQ ID NO: 109235 - DNA, 342 bp, Arabidopsis thaliana columbia
  unsure (1)..(342): unsure at all n locations
ggtgaggcgattgccgttggtagtcataagttcttcttcagtaccaacatcaatgtcattctggagtcttaacaacccaggggtgaggaacttancaccataacanatagcattcacagcataatccttgacaacaagtctcttgtaactcgtcaatatcatctcaagaggcataatcaccctcctttgatctctgctgttaaaagacatcttaagattatgacaatctattaaagcaatcttctttattatcatgcttatatgcatttgtatgttttctggttttattgtcatatcttttcttacattaggactatttttattcactttttttttttcttc

SEQ ID NO: 109236 - DNA, 267 bp, Arabidopsis thaliana columbia
  unsure (1)..(267): unsure at all n locations
cgcgtccgatctcctcttgcaaaccaacgtaaaacactttctaatagatcaatatggctgtantaatnaagntggcattcatttacttggcgtgcgtgattaaaaccnttccaatcacatcaaacgctcttattagttgtgtcacctttaacatcaacctgtcattttgcattgcctactttacccgaggtgcttcacttacccaagggttctttatcttctttactatactttaaaaacatggtcagtacaaccccatacctttat

SEQ ID NO: 109237 - DNA, 451 bp, Arabidopsis thaliana columbia
gaaagtctttggaagatttagttctagcttctcaagaaggtgttttcgtaaatattgatggggagttttacttgaatagggagtggggcaaacttcaagaatttctggtaagcaggtcaatgtgttgttgcgtatcaatcctgatgttgatcctcaggtgcatccatatttttcttctgtgtacaagaactcaaagttttgttttattaacctgttgcttctaatgtttctggatgatgtgttatctcattccaaagtgctttatcttgtttcttttcactttcaccttttttcttccatggcgggggtggttgtattcatattttcttcttttcccattttttaattcaatattttattttttcctcacatctttttttctcttttcaattttttttttatatctttttttttttcattttcttttattttcttttactctttttttttt

SEQ ID NO: 109238 - DNA, 214 bp, Arabidopsis thaliana columbia
  unsure (1)..(214): unsure at all n locations
tccggtcttgttttgtaccgccannttagattgaactcctatataaacctctnnattattggnnattggatccatcatgcnnttatatagctccaacgccctgtgtcgcgcgaatttcactctttttggtttcttttccctttcnntggtaagaaatccccgctcnttctttcnnnctctttcttntnntttcttcagtgatggtacccgtcat

SEQ ID NO: 109239 - DNA, 262 bp, Arabidopsis thaliana columbia
gtcttcggatttagaacggagacagcttgatgtatagagcgcttcttcggctacaacaagctggcgctaatggcgggttgcttgtgatcactctcaccggagccgtcatcttctctgttttaccgatttttaggaaattttgattgtggtggaaacttgttgtggcaactctactgagaaagtttgaagaagctggaatcaaagatatagctagagttaagagggttcatactaacttgtgctcgttttgagatgtgctgtt

SEQ ID NO: 109240 - DNA, 464 bp, Arabidopsis thaliana columbia
cttccgaagatttttcttcctttcttttttttattctcctccatgcaaaattggaaaggcgtaagactaacaccaaccatacgccatcgtgcgacgtgaaaattggagaatctgattggctgaaggattattgaaattgaaagttattgtgatcgagttttgttttttcctgatggtggaagaagcacaattggatcctaaatcgaaatcgattccgaatgagaatttgaaatttggagaaagggctttgtctgccggaggcgccgcttttatatcggcggtcatagtcaatcctctcgatgttgttaagacgagattacaagcacaggctgcaggagttccgtatcaaggctcgtgtcgtcttggttgtttcgacacgaattccacgttggtacatgatttgagaagtaattctgctccagggatgtgtagaattactggctctgcatctgtatgctcagata

SEQ ID NO: 109241 - DNA, 451 bp, Arabidopsis thaliana columbia
ttccagtttgttgaggaaggtaaatggacattagatgctgaaaatttgaagtttaagaggggttttggtgaagcaaaagcgaaggagctgaaggtgaagcaagcacaactggctaaggcaaacgatgatataaatccaaatttgatagaggtatccgaacgtgtcccgagaaaagagaagcccaaggagccaattccagatgttgagtggtgggatgcaaatgtcctcaccaatggcgaatacggcgaaataactgatggcaccattactgaaagccatctgaagatagaaaaacttactcattacattgagcatcctcgtcccatagagccacctgcagaggcagctcctccaccaccccaacctcttaaactgacaaagaaggaacagaagaaactgcgaacccagaggcgtctagcaaaagaaaaggagaaacaggagatgatcagac

SEQ ID NO: 109242 - DNA, 507 bp, Arabidopsis thaliana columbia
  unsure (1)..(507): unsure at all n locations
cgggcgcggccgcacgcgtcacgcacacctaacaatctctctctttcttatctcttctttttctctcttcccannatccttgttgtcgtgagtctgtattctaaccagtgtgcggggangacnncaagccgtcaccagagaagaaccttctcagagnncgtttttccgatctccncttgancgatctctccgatatctcttctcgcagcaaatcctccttccaccgttcctactaacccgccacgtcaccagatccctccgccgtctcctgcagctcctccggctaaccgtagcaacaatgacgacaatgttagcaaagatcaccatgggaacgcctcttctaattaatatcgcttttttttgtctttggttttaatataagtttcagccttttaattatcgcataagcctttcttttctcttaataatcagattttgtctttctttactattgtatgataatcccatgaatcaatcgtagtttcgtatttcgggtttatggtggta

SEQ ID NO: 109243 - DNA, 460 bp, Arabidopsis thaliana columbia
ggagatgagccgtggagcgtatttggcgtgttaagacttgacggtggtaatacccaatgtgagtgatggtccaaccagaagggtgctccaaaggctaaacggttatgcagaaccgggtcggatcatggctataatgggtccttccggatccggaaagtccactcttcttgactctcttgcaggtagactcgcaagaaacgtggtcatgaccggtaatcttctactgaacggcaagaaagctagattagactacggtctcgtagcatatgtgacacaagaggacgtattgttggggacactaacagtgagggagacaataacatactcagctcacttgagacttccaagtgatatgtctaaagaggaagtgagtgacatcgtggaaggcacaatcatggagcttggtcttcaagactgttcagacagagtcattggaaactggcacgccaaaggagttagt

SEQ ID NO: 109244 - DNA, 474 bp, Arabidopsis thaliana columbia
tagagacccatccctcacttcaaagtttattttctcgaaggatcttctccaactctgtctgatctatttttccaaatttgcaaagcccaatacgttctatagaatcaaaaacattacctttaaaatggctcatttacttttatcttcatgcccattaataattttatttatcatcaaccataacaacgaatatattaacctctttctttcctacttttatttatttatcttcctcacattttctttaatctctattttttcattttatatttttctcaattttttttttttatttctttttgtcttggtgggttatttattattcctttctttactttaatacttttctctttttttattatattattattttttttaatttttattctatttttcattttttttatattacttttaattcttttcttctctattttttttttttttctatttttctataatatttttattttt

SEQ ID NO: 109245 - DNA, 227 bp, Arabidopsis thaliana columbia
  unsure (1)..(227): unsure at all n locations
ggaaaacccgggccggccgacgcgtcacggttaaggtctcatcgatcaacggataataagtatcgtgaaggcaaacaacacnntatnttgatgacttaccgaatgctgcctcccccactaaatccaangccnnaatctaatttattcaacccttttacttcactgtcaacctttttattattttccataacttctttttaaccctccaatcactcataatttatctt

SEQ ID NO: 109246 - DNA, 397 bp, Arabidopsis thaliana columbia
agcaaactgcgagttctaagcctacaggtatgttatttattgaaatgttccattgatcacatggtggtaactaagcagaagggggaaatcaacgatgacaatgatctttacatactcaagaacataaatgtatccgtgattgacacaacattatggcttatccagttgcaaatacacatactagtgaaccatccagaaatacagattctgctaacgcactaactaacacacatattggaccggatgtcaagtcaccatgcctaatcttaacaaactttcataccttcaagctgaacataaggagactattggtctgacaattaccattactttgctcaatcctaacatgaacctacatgatgcgaacttcgatagatactatatacgagcataaagc

SEQ ID NO: 109247 - DNA, 401 bp, Arabidopsis thaliana columbia
  unsure (1)..(401): unsure at all n locations
actcttcttccttcttcttctctctcgatttattataatccacacgcaaaaatntnaagccgacaagctgctgtttcggggctgtccaatttggcnaangctgctttcggtcttggaacggcggcgacggtgctgaatacatcgcttttcaccgttgacggcggagaaagagctgttatcttcgatcgattcaggggagtgatggatcatactgtggttgaaggtactcatttcttgatcccgatttttcagaggccttacattttctttttccgtacataacctcatacttttctattgggggggggggggtgaggatcttcaaatattttattttactctttttgttcatttcttattcatgttttatatattattttcttattttatttacatatatt

SEQ ID NO: 109248 - DNA, 322 bp, Arabidopsis thaliana columbia
caacctctcttctctcttcctcgttcaacaacaatggagttctggggagttgcggtgacgccaaaaaacgctactaaggggactcctgaagaagacagccttgtccacatttctcaggcttcacttgactgcacagtgaaatctggagaatctgtggttttgagtgtgactgttggtggggctaaacttgttattggaacactttcacaagacaagttccctcatattagctttgatttggtttttgatttattagtttatctatcacacatttgttcctaattatatatttatttcgtgggggggggggggtttattattt

SEQ ID NO: 109249 - DNA, 277 bp, Arabidopsis thaliana columbia
  unsure (1)..(277): unsure at all n locations
ggaaaacccgggcgggccgacgcgtccggttcatgtaaccttgtccgaattgaaggactgatataaagaaatcgttcatactaaatttgtngtttatcaaatggagagcgagtaccatttataaanataatcttccctcccgataatttcaatccaactcctcacctacagctccttcatcttgcaacacctcctttcatgtctttgacaaatataataaattaattatctcacattttcctatctttatttaatttcattactcttttttcatttt

SEQ ID NO: 109250 - DNA, 462 bp, Arabidopsis thaliana columbia
cgtccgaacaacaacactaatcaaaaaaaaaaagcttattcttctagagacaatggcatcaacattgggcgagctcatgcagtggtcttgcccgaacaacattccttggccagactaaagcctcaagctttaacccccttcgtgatgttgtctctctcggatctcccaagtacactatgggaaatgatctttggtatggacctgacagagtgaagtacttaggacccttttccgttcaaactccgtcttacctcaccggagaattccctggcgattatggttgggacaccgccggtttatcctcagaccctgaagcctttgccaaaaacagagctcttgaggtgatccatgggagatgggcaatgttgggagcttttggttgcataacccctgaagttcttcaaaagtgggtccgtgtggacttcaaagaaccagtctggttcaaagccggttcacaaatct

SEQ ID NO: 109251 - DNA, 162 bp, Arabidopsis thaliana columbia
  unsure (1)..(162): unsure at all n locations
ttcatttatcttctccnatttaaaaatgccttcnaaaaaagaatcctccatctacagtcgggtttttaataacagaccggactccaaacacattcaatcccaatactcctataaaccctatctcatcatcttctactaacaatctctatccttttcttaata

SEQ ID NO: 109252 - DNA, 426 bp, Arabidopsis thaliana columbia
  unsure (1)..(426): unsure at all n locations
gaaaacccgggccggccgacgcgtccgcgaagccaaagaacaatttctccgtcactattataaccatggcggtgctttcatctgcagatcgatctagtaatgagaggagggttaanagttcatactttgatttgccacctatggaaatgtctgtagcatttcctcaagcaactccagcctctacatttccaccttgtacttcagactattatcatttcaatgatctactgactccggaagaacaagctatcctgaagaaagtgagtgaatgcatggagaaagaagttgctccaataatgacagattacttttagaaatcattatgggggggggggtcactccaaatcttttttctattatttatcctttttacttcttttattttttatattttttttttttttattctttcttcattcttttctt

SEQ ID NO: 109253 - DNA, 225 bp, Arabidopsis thaliana columbia
  unsure (1)..(225): unsure at all n locations
gcgtccaaaaaggcgataggattgcttataagcggtactcttttgtatcaccatttcgctaatctcaacgctactcttctctcgcgtcatctccgacctnctcatctttctcttatcttcactcgccattctctgccttctttttcgtcacctcaatttctcggtaccttttgatccattagagttccaaatatcacaagacacatccttttacaatttcgcgct

SEQ ID NO: 109254 - DNA, 275 bp, Arabidopsis thaliana columbia
  unsure (1)..(275): unsure at all n locations
cggaaaacccgggncggccgacgcgtacgccaaaacaaaaagaaagaacaatggccaaatcncttagccttacaatctttctctttgtctggatatcttccaatgtcggagccgctcgacttctcnatgaggttcaaactcatccacatttagtcccccaggtacctgaagatgaagatgttattccacattccttaacaacaactccaacaccaattcctctcccatgaccctccactgtagtaccctagccaatcctaaattatctttattct

SEQ ID NO: 109255 - DNA, 476 bp, Arabidopsis thaliana columbia
gttgctgttgctgctcttggtatgctcagttccattgccactggtttggcaattggggcgtatggtcccatcagtgacgagatgctggtggtattgctgaaatggctggaatgagccaccgcatccgtgaaagaactgatgctcttgatgccgctggaaacaccactgctgctattggaaagggatttgccattggctctgctgccctagtctccttggctctctttggtgcctttgtgagccgtgcagggatccacaccgtagatgatttgacccctaaagttatcattttacttcttggggggggggtgcttgcttactgtttctctttcattacaattaacaatttttttatttcttattttttaaattatattctaatatattccttaggttacttcatttatttaatttatatttttttattttattttttttattttattttttactctatctatttttattatttattt

SEQ ID NO: 109256 - DNA, 254 bp, Arabidopsis thaliana columbia
  unsure (1)..(254): unsure at all n locations
tccgtttgtttgtgttgtaagcatccctgttatcatttcgtttatccaggtnaattctgcaaatccttgagcagctgtcagatnataaanactttgntctctccttatagtggatttggatctcataagttgaagtttgacatatcttctgagaaagttaatacttgtgcattatgaatggatctcacaatcattcaaccttattaattacatcttcatttactttacgagttttctttttttattcttttttt

SEQ ID NO: 109257 - DNA, 291 bp, Arabidopsis thaliana columbia
  unsure (1)..(291): unsure at all n locations
ttcccccaccttcaccatttttattttatatttcaccgcaaananttactaatagttggttcatttacaaacgtgagggcgatttctcactcctaattcttcaattaatgtcatcttaatcacaaacttatcttcttcttaaaccacctctaaacctattctcatattttataataacaatcatacatctactctaattttaaaagatatctcccatacttatcctcaatttaatcccttgttatcttattacctcctctttatcgatatttctatcttattattctccta

SEQ ID NO: 109258 - DNA, 468 bp, Arabidopsis thaliana columbia
  unsure (1)..(468): unsure at all n locations
gaaaaaggcaaaaagttatactctatcttcttttctttctctcctcctcacatccaccaactgctgccttctctcaccgcgagaggaaccnanagacatgattctgataaactctaattctccgacgctaatctcagccgttagattcgtgggctcatctccgttcaccactcgggggctttctcagtccactgtctcaatctctagaaacaaaagcttcttcttccacttcaccgagacgaaggagaagaacgcaagaagagattatttgagagtatcaatcgtgtgtgacgcangagggatgtttccggtggatccatgggctccaaccattgattcacagagcatagcatcacaactcttcgctgtatctctgtttccttacattggctttctctatttcctcactaaatccaaatcagctccaaaactcacacttttcggtttctacttcttgcttgccttcgt

SEQ ID NO: 109259 - DNA, 167 bp, Arabidopsis thaliana columbia
gtccgcaccgctgctgttcggcatcttgcctctagcggtgttgatgtctacactgctgttgctggaccgttgttatcgctttatgggccgcttcataattttgcaaactatgctgtacttaatatgttgtcagagattattacttttttaattattccatacttcat

SEQ ID NO: 109260 - DNA, 450 bp, Arabidopsis thaliana columbia
caatttttctgagcttcaaaaatccactctaatggcttcatctgcatttgcgtttccttcttacataataaccaaaggagcctcaacagattctttcaaatcaacttctctgtcttcttctcgatctttggttacagatttccatcttttgttctccagacccatctttttcggtcctaaataccaatctgccaagtccgctaaaccggaatctccagtcgccataaactgcttaaccgatgccaaacaagtttgtgcagttgggaggaggaagagcatgatgatgggcttgctcatgtctggtttaatagtttcacaagccaatctttcaacagcatttgcttcaacttcagtgtttagagaatacatagatacatttgatggatactccttcaagtaccctcaaaattggatccaagtccgaggagctggtgctgatatattctttag

SEQ ID NO: 109261 - DNA, 198 bp, Arabidopsis thaliana columbia
gcccactcggaagaactatggaaagttggagccgccggagattagcgggactataagaccggccagtcttattgatggacgctaaagaagggctttcagacgttgaagtgaccctctctttatctacgttgcagatgtcaatagccgtctgtgctgcgaatgcggggtggatctgtatgtggcctggggtgactatct

SEQ ID NO: 109262 - DNA, 470 bp, Arabidopsis thaliana columbia
  unsure (1)..(470): unsure at all n locations
gaaacccgggccgaccgacgcgtccgaattgagttattattctaatatatctgtaattataggtgcaggaaacccacataaagcagcgatgtctctttccaaaagctgggaaaatgctaaatctgcaccaaaaggtagccaattggaagctaacaagaaagctatgtcgattcagtgcaaggtttgtatgcaaacattcatctgcacgacatcggaagtgaaatgcagggagcacgcggaggcgaagcatccgaaagccgatgttgtcgcttgttttcctcaccttaagaagtgatgaaagctattatctcaactataaaggatttcaatggatgacgtatggattcttatctttcctaattttgtattaaagntttgacaaaatnaatggnatctatttctctttactttttttaaccattagtttattgctatgataatatatcgaagctttttgttgtatctttttt

SEQ ID NO: 109263 - DNA, 484 bp, Arabidopsis thaliana columbia
  unsure (1)..(484): unsure at all n locations
accgnntggaaaaccgggccggccgcacgcgtccggcctcagccgccgcacgacctcttgtcaccgtccaaggacttgacggtgacatgagcaccggtcagatccaccaccgtcactggaccagacgtcatgactgctccagttcgacctgacattgtcaacttcgtccacgcccaaatctccaacaacagccgtcagccttacgcagtctccaaaaaggccggtcaccaaacctccgccgagtcctggggaaccggaagagccgtgtcacgtatccctcgtgttcctggtggtggaactcaccgtgccggtcaagcagcgttcggaaacatgtgtcgtggtggtcgtatgtttgctcctactaagatctggagacgctggcaccgtcgtgtcaatgtcaacatgaagaggcacgcgattgtttctgcaatcgctgctactgctgttccagctcttgtgatggctcgtggtcacaagatcgaga

SEQ ID NO: 109264 - DNA, 284 bp, Arabidopsis thaliana columbia
  unsure (1)..(284): unsure at all n locations
cgtacgtttgttctcttgagtggaaaaaagttgctttcactaaatcagatccgacaataccnaggggcagggattaaatcaaggaggtccttttaacacctagaaggaaagatgcaaggtctttgaagatcaagataagcacggacattgttaagttcaaggtcacgcttcttaaggtaccattacacactatgtgtctttgacccatttaaagacgattactttaagcactctatgtttccattatttgtgatagcatacatcattgaagatattacccatat

SEQ ID NO: 109265 - DNA, 344 bp, Arabidopsis thaliana columbia
  unsure (1)..(344): unsure at all n locations
acgctgtaacgttcgatcatcttgtatttcattttaaccactcattgtttttagtttggttaggaagaatcaactatggggacgaanagaagcgttggaactttgaaggaagcggatctgaagggaaagagtgtgttcgtgagggttgatctcaacgttcctttggatgataactctaacatcaccgatgacaccaggattcgtgccgctgttcccaccatcaagtacttgatgggtaatggatctagggttgttctctgcattcacttgggccgtccaaaatgtgttattttttagggcaggggggggggggttgtcccatatttttctaactttttcgtttt

SEQ ID NO: 109266 - DNA, 441 bp, Arabidopsis thaliana columbia
gatcagaaagggttcccactttctccattgtttattcttttgttcgattcttctcgccgggatttggtatcaaaatggcgtatgaggaacactttcagcaaacttctgaagctaaatatgattgtcttttatttgatatagatgatactctttaccctctcagttctggtttggccatggaagtgaaaaagaacattcaagaatatatggttcagaaacttggtattgaagaagataaagtccaagaactttgcctttccctttataaaatctatggaactactatggctggtctcaaggctgcgggttatgacttttattatgaccatttccatcgttttgttcatgggagattgccatactcaacactgaagcctgacccaattcttaggaatattattcttagcttgcctatttggaatagttgttttactaatgcat

SEQ ID NO: 109267 - DNA, 328 bp, Arabidopsis thaliana columbia
  unsure (1)..(328): unsure at all n locations
ataccggaccgaccgcacgcgtccgctctattgtatgaaatcaaatccaaatctattttactcttgaagacaacttaaaactttcgccggtgtctcttcttttcatgttcaataaanctcattgagctattgcattttcaatctcttctaataagctcaatgagcatatatttagaaatgtttgcatggtatcagagcatcagtccatctaaaggatttatggttttactctcactatcttagtctctgctcactctttgaaacgtcgagccttctatctttcccacaatatctaaagcaaggctagtctttagttttttttactttc

SEQ ID NO: 109268 - DNA, 419 bp, Arabidopsis thaliana columbia
  unsure (1)..(419): unsure at all n locations
tcttatctataactagtaaaaaaaaaaacacagaaccgttcaatttccgcctccagaagggctctctcctcccctgccttcgccggaaaggctgtgaacctttcccccgcggcatctgaagtcctcggaagcggccgtgtgacaatgaggaagactgttgccaagccaaagggtccatcaggcagcccatggtacggatccgaccgagtcaagtacttgggtccattctctggcgagtcaccgagctaccttaccggagagttcccctgagactacggatgggacagcgctggactttcanctgatccctagacattcgcaaggaaccgtgagctagaagttatccacagcaggtgggctatgctctgagccctaggctgcgtcttccctgagctcttggctaggaacggagtcatgtt

SEQ ID NO: 109269 - DNA, 399 bp, Arabidopsis thaliana columbia
gtcttcgtttctaagataataaggttttgtttattaaagcatcgataaaaggcggggcagggagacaatatgtgggggggggagactgtctctgttgttgttactacaaccgttgctgagccagaagacattccagaggacatatacttaatgactgcattggagttgactcttaagaaagctcatacttatggtgtattatgacggattctccatgaatgagctaatcttatctagaagcatgtggctaaactcgttgaattggctgaagactgataccattcttattatttcaagctcgggaaggctatctgttcttatcacgaagacaggttactatcatttccaagttcctaaaccttaggctaatgctctaatctatgcaacatttattatcac

SEQ ID NO: 109270 - DNA, 450 bp, Arabidopsis thaliana columbia
gttagttaatagttaatatgacgagttatgtttagaacttttacttataccaaaatagatggttgaatttttacttaatatggggctacaaccaagatattttgttatctgaacaattccatctacgtttagtctctttcttttgctttggctaatggcaatgacactgattccacagcttcccgaaagtcttgattgatggtccatatggtgcaccagcacaagactacaagaagtacgaggtggttctactagttggtctcgggattggagccacaccaatgatcagtatcgtcaaagacattgttaataacatcaaggccaaggaacaagcccaactaaaccgaatggagaatggaacaagcgaaccacaacgaagtaagaaagagagtttcaggacccgtagagcttacttctattgggttacgcgtgagcaaggctctttcgatt

SEQ ID NO: 109271 - DNA, 424 bp, Arabidopsis thaliana columbia
aaaacgaataatccggctatgccaccggattaattcgttttcggacagaaagatcaaatggctggaataccctcgctcacggactggtataactaccggaaaaaacttttcaccgtccctccagtggcggagagaagaagagctttgaagatgttctggtgcggtgctcggagaagggtgagagacgagggaggtggtgaagatgaagatgaaatgtatggatacaacgaggaaatggcgatgttggagatatatagccagtcgtgtagagaagaagcgcttatagtgacggccattgtcgacgagggagaagtggaagttgtaatctttaaaggagtgtcgtcgtgcttgagcggagaaacggcggtggatccggctaggagtgtgttgccggagagagcagtcattacaaagattgatagag

SEQ ID NO: 109272 - DNA, 431 bp, Arabidopsis thaliana columbia
gacctaactaaccacatcacttcaccggattaaacctccaccgtcttcttccgccccaagggctggctccatggccggcgggaacctacagctccgtcacgcatactccatagctcaattcgttccaactgtttcttctcctcctcctcttcctactcagcgagttcgcctcgggacttcaccctctcgtgttctattatgcaatctccgagctaattccgccgccgctccaatcctgcgaactactcgccgttcagttattgtttcggcgtcttccgtatcctcagccgtcgattcggattcggtggtggaagatcgtgatgacttggggaggatcccgttgcttgaagttagggatttgagagcagtgattgctgaatcgagacaagagatactgaaaggcgtcaatttggttgtctacgaaggagagg

SEQ ID NO: 109273 - DNA, 299 bp, Arabidopsis thaliana columbia
aaaattattcttaccatttatttttttttaaatgcaattctttctttaataagcctgtttttattaatatggcggccgacaaaaatatttctactaaataccatacttctttgaaaaaagctatttcataccaaccccttagtttatctattgaaaccactgaaataatttttcaacattaccaatcacatatttttaccgtaagttatacaacaaatcttgatcactcatttttttctgtccaatacttatcatagaactcttttgactactgtatattaagtaactcatttagacca

SEQ ID NO: 109274 - DNA, 303 bp, Arabidopsis thaliana columbia
ctcagacagagagtgagagatccaattctgttctttccacctcccttatgatacacgtccgtgttctttttcttgtcggctaccctaaccctatccaccaatccctacttcttcttcgattggactgtctcttacctctctgcttctcctttcgacactcgtcaacagttaattgtgataaatgggcaatttcctgttccgattctaaacataactacaaattgtaatgttgttatgaatgtgaagaataatcttgatgagccatttcttcttacatttaattttaatccaacatatgaaaaa

SEQ ID NO: 109275 - DNA, 411 bp, Arabidopsis thaliana columbia
  unsure (1)..(411): unsure at all n locations
gcgtccgttaccgggttgggatcccgtggttgcggtttggataggagtggcggtttcgtttancgagcatggggaagttttgccgtgggacgggaaagganaggcgataatggttgtgatcgatagggaaaagaagacggtggaagctgataatggatactactaccttgttgtggctgatggtgggatgaagttggatagaggattggtgttgaaggagaaaggagtgaatgagagcttatgaatgggtgttttggtcgttggccccctagagatgatgattaatagtggctgatatatgatggagatggggagggggttataatttccaaaataattaaacaaatgcttatatgctcttgcatctgcatatatgtaattattctcattgaatggttttattctataaat

SEQ ID NO: 109276 - DNA, 477 bp, Arabidopsis thaliana columbia
  unsure (1)..(477): unsure at all n locations
ggaannnccggggcggccgacgcgtacggtgatgaaattggcatgcatggtcttttctttcatgattgtggccggtccaatcacggccgactctcttatgagtgggggcgccgtcaacaacaacctgncanggtgcattgcctacttgacccgaggtgctccacttacccaagggtgctgcaacggcgttactaaccttaaaaacatggccagtacaaccccagaccgtcagcaagcttgccgttgccttcaatctgccgctaaagccgttggtcccggtctcaacactgcccgtgcagctggacttcctagcgcatgcaaagtcaatattccttacaaaatcagcgccagcaccaactgcaacaccgtgaggtgatgagcgacggtcaaatgaagctactagcggatgtttcgaatattatataatcgatgagataatattaaataaagatgttcgaatggctgtactcttttcaa

SEQ ID NO: 109277 - DNA, 424 bp, Arabidopsis thaliana columbia
accgccgtatatccacggccgtcttatcaccggcaacaaccgtaggtttttgttttccggcgcgatggaggtggataagaaggacgagagagaggctgaatcttcggagcaagtggtgaatccatgggaagtgtccgccaaagacggcgggaagatcgattacgacaagcttattgacaaatttggatgtcaaaggcttgacgagtcactgattgatcgtgttcagagactgacttctcgtcaaccacacgtgttcctccgccgtagtgtcttcttcgcccaccgggatttcaatgagattttggacgcttatgagagaggagacaagttctatctctacactggaagaggaccttcatcagaagcattgcatttggggcatttgattcctttcatgtttaccaaatacttgcaagaagctttc

SEQ ID NO: 109278 - DNA, 212 bp, Arabidopsis thaliana columbia
  unsure (1)..(212): unsure at all n locations
ccgggagcttattgaatgaatgaaggaacttttcttttggtttccaagctttnctacnacgatgcgctttatatttggccgcgcccccctaattaacatatctattacattctttacttgaccaccacaatgctagatctttcaaccatactatcagcaaccaccattatccaactctcactacagagaaaaaacatcaacactttttttac

SEQ ID NO: 109279 - DNA, 463 bp, Arabidopsis thaliana columbia
  unsure (1)..(463): unsure at all n locations
gcgtgcggcccgacaacaattgggcagactatatgcgcacaggtgttgtggcaattctgcaaaaccgtgtggcgccttccgaaaagcttcatgcgttgattctggctgagaatatgatgtcaatattgggtgaaaagtggcttctcggcggggtaaaattacccaatgttgatattccagctgataggtgtcttctgttggtattagagtcatcgcatgttgaaatttctgtattgttaaatgatctcgcttacaagaagtatgaagctcctaaagataattcaactgctgaagacattctcttgaagcaacggtatctacccatcgngttttcactggtagaaaagatcatcaaatatatatcatctgctggtgaaaacgaagggactctatctgacgaagctgtctttcaaaaggtgattaaaatacttaatgagacagtaggagcggtgttcgaatatct

SEQ ID NO: 109280 - DNA, 416 bp, Arabidopsis thaliana columbia
  unsure (1)..(416): unsure at all n locations
gaaaaccgggccggccgcgacgcgtacgntctttctaacttcacacatgacttttttttttttaattcaatcgttttttccccgcacgggttttttacttgttcgggctattcaactctatgataaaaaacctcttttgttctgtcaacaacatagagctattttatgcaaagattgcgattcatcgatccactctgtgaactaacacacaatgaaacactataggtttcttcttacaggggttaagctctctgcaacatcttttgtttacaaacctacttcgaaatcttcttcttcttcttcaagcaaccaacatttctctgtccctggatcatcgagctctaattctcctcctctcaagaaacctctctcatctccttctcatatcaacacgatccaacccttttctaatatca

SEQ ID NO: 109281 - DNA, 483 bp, Arabidopsis thaliana columbia
ctcatttctggggtttcacatttcatcttcaccagaatccatcacactctctgaaatctgaaaatgattagcacagtacttcgccgatctatccttggtacgtcaaggcgtactctcgccgcttcggtgacctccattaacgcagctctatttcataaccttgctccagccgccgccacagtctccgatctagcaaatggagctactaatgtcaagtctctcccttcgaattcgagcccttttggtgttaaagtgagagactttcatgttaaatctgtaccgtcggagtttagatcgtcgattgtttcttctgcgggattcgcggctcaagagtatgctccttcttatgagaacgatggagggattggagattcggagagtgttggtagcagcggtggtggtgatgggcttgcgatagctgatcttggtatatctccggagattgttaaagcttttgaagggtgggggtattgagaaactctt

SEQ ID NO: 109282 - DNA, 376 bp, Arabidopsis thaliana columbia
ctaagctacagaagaaggatgcagcgtatagtaacgcttctcttaagcgttcttcatgctagagtggtgacagggcatgcaacgcaaatgggtgtagcagagaatggagactcaaaaccggatagttctaaaaataatccaagctcaagaaaggcgtcttctattctagggaagcaacaaccacttgtctccgaaaagagaagagacttatcagaagatactaccaagaacattccatgtaccactaaaacacatgatgcttgcagtaaaagaataaccgagtttttaaggaagcccgattcatttagagtgggcggggtatgaatcattaagattttctaaatggctttgctttatgatcactagtttttatttt

SEQ ID NO: 109283 - DNA, 418 bp, Arabidopsis thaliana columbia
  unsure (1)..(418): unsure at all n locations
ccggccggaancccggtcgccgacgcgtccgcacttttttcagccgcatcatccttctcccttgtgcgatatcgtttgcgtgagatgtgtcgtaaaagtagctagccaggggtaaagagaagtttcacatcaacattgtggtcattggccacgtcgattctggaaagtcgacaaccactggacacttgatctacaagttgggtggtattgacaagcgtgtgatcgagaggttcgagaaggaggctgctgagatgaacaagaggtccttcaagtacgcatgggtgttggacaaacttaaggctgagcgtgagctgtgtatcaccattgacattgctgtgtggaggttcgagaccaccaagtactactgtacttgtcatgatgctcctgttcatcgtgattttattaagaacattatcac

SEQ ID NO: 109284 - DNA, 462 bp, Arabidopsis thaliana columbia
gtatgatgttaggaagagtgtgattattgtttctgagttcatcggttgttctccatggctgagtggtgcgatccgtgtggatgcgtgaaacatcgatgcagtcactaacgccatgagctctgcaatgacgatgtccgacaaagagaaaaatctgcgccaccagaagcatcataagtacataagctctcacaatgttgcctattgggcgcggagttatgaccaagatcttcaaagggcgtgcaaagatcattacaacaagagattctggggagtcggattcggtctttttttcaaggttgttgcgttagatccgaatttcaaaaggctctgtggtgaaaccatagttcccgcgtataggagaccaagcagtaagttgatcctattggactatgatgggacaatgatggatcaagattcttttgatataatgcccagtggtgatcttaatttgcttttaatcgc

SEQ ID NO: 109285 - DNA, 449 bp, Arabidopsis thaliana columbia
acgcttaccggtggataccctagtgcacccagagacgtatgaagtggcgtagtaaggcgaccgaaatgcttgggggggagttgaataataagcgtgaggatccggcaaaattccccgaataggttaacccttttgaacctgctgctgaatccatgtggcaggcaagagacaactctggcgaacctgaaaccatcttagtatgccagaggaaaagaaagcgaaaagcgattcccgtagtatgcggcgagcgaaatgggagcagcctaaaccgtgaaaacggggttgtgggagagcaaaaaaagcgtcgtgctgctaggctaagcggttgagtgccgcaccctagatggctagagttcagtagcccaaagcattactagcttatgctctgacccgagtagcattgggcacgtggaatcccgtgtgaatcatcatggaccaccttgcaaggc

SEQ ID NO: 109286 - DNA, 227 bp, Arabidopsis thaliana columbia
actacacctgtccagatctcgccttataagttttattttatgccatgtctccagctaaaggggatagtaccaataataatggggcgagggccaactccttaaaggcggcaaaagctgtcaaatttttacaagcctttaagaataaagacatattgtataggacctaagttatcctttcacaatacttagactcttactaagccttgtactgagaagtactcaaaaat

SEQ ID NO: 109287 - DNA, 341 bp, Arabidopsis thaliana columbia
gtgtattaccctgcaggaggaaccatttacttttctcctctcccatccacaacatctgtgcaggcaccttataaaccgcgggggaactcccaaaaataaaccctatctctttaattcttaacagcatcttactcttacactttcaacaatctaaacattcatcattactagtaacatcacatattcatattcatcctatactttctacccctattatcccaagatcctcttaacatcacaaactctactccaaactccaaatatgtccctaaaactatccttcatttttcaataacttcatatatcgtgtcggatcaatacaacacctttatacccaataa

SEQ ID NO: 109288 - DNA, 148 bp, Arabidopsis thaliana columbia
  unsure (1)..(148): unsure at all n locations
ccggccggaanncccggtcgaccgcgcgtcacgattctctaccgttttcaagctcaaccttaatttccactacgatctcttcttcttctgtaatgtcattttaaaaaggcagggtgtcattcaaaccttcntcttctttataaatgtt

SEQ ID NO: 109289 - DNA, 340 bp, Arabidopsis thaliana columbia
  unsure (1)..(340): unsure at all n locations
gagcgcgtacgcgagaccagatgnttttacaactctgaccgtaatatgtagtcacccgcaggaaatctggttaccattcgtggacgggaggtgttaaaagcgtgagggagtgacgtcaaacccaaatacgtatagagacccttgnnnagttcgtatttctgctgnnngagttatgtnncaatcagtatgtgagtctaagtccccaaaatnngttctgttnngcgttttcaattttaatgttcacagtttaatttaatctttcttctttcaatggtaacgaatctcatggagtcaaagtaataaatggttaagacttatgtttgctgaataaaaacgaatt

SEQ ID NO: 109290 - DNA, 460 bp, Arabidopsis thaliana columbia
gccaagttccctggagtgccatacacattcttctcgcagagacaaggctgcaaagggtctcgttaccaagatgctcatggtccagacaactttgtccctagaattcctctcgctggagggaagaactatgagcctcaaagatgttgggaggatatttttgatgctattagcaatgcaaaacacttgatctacattactggttggtctgtttacgctgagattgctttagtgagggactcgaggaggcctaagcctggaggtgatgtgaccattggtgagctactcaagaagaatgctagtgaaggtgtgagggttcttttgcttgtttggtatgaacagaacttcttgttaatgtgcttgtaaaaagaatggcttcattgtttacttctttattaattataccctgaaatttttttaatgtgtagtttttttccattcggttttttttttcctttattaa

SEQ ID NO: 109291 - DNA, 299 bp, Arabidopsis thaliana columbia
acgataccctttcagcctcagaagtggtgttccttgtgctgcatcttgtgggctttggcgaatgtagcttatcttgggggtgcaacacaagctctcaagacagagaaaaggaacactgcatatgttgatgcggttatgactgtcccggccaaggctatgctacccataagcggaatcaacattgcttttaaccgcgagttggtgggtccagctttggtgcctgcactcagattggctggagaagggaaagtgagattggaaacacttgaagatgtttggtgttggatgtttctgaaaca

SEQ ID NO: 109292 - DNA, 259 bp, Arabidopsis thaliana columbia
  unsure (1)..(259): unsure at all n locations
gcgattcgagaggcttaacaagtctgttgctatttctgcaccaaccacttcatacacgcatgtagacagaacaaatgcgggggagcaggtactatacaaactcggttaaccatgtcaaggatcccttctcgtctatcccagtaggaggaggaggaggtggagaggtaagaaaagaagagggtgaagaanatgatgattaattagaaggtgaatactaattatttggaggcgatagacatattgacaactagattttcga

SEQ ID NO: 109293 - DNA, 435 bp, Arabidopsis thaliana columbia
  unsure (1)..(435): unsure at all n locations
aagaccttcttgctcagtgtggcgagcatcttgagaaaggtgacatccaccagggtccagcggtgcgtgggttagcaatggtggctatgtctnaagaactgggagttgatatggagatccgttctctggagcggatgctacaatacggagaacaaaacattcggcgtgctgtgcctttggcccttggtctcctttgtatatccaatccaaaggtgactgtaatggacaccttgagccggcttagccatgacacagattcggaagttgccatgtcagcaattatatcattgggactgattggcgctggaactaataacgcaaggatagccgggatgcttcggaacctctccagctattattacaaagacatgagtcttctcttctgtgtgcgtattgctcaagggcttgtgcacatgggaaagggtctcttgacac

SEQ ID NO: 109294 - DNA, 296 bp, Arabidopsis thaliana columbia
acaaattactacttcagaatagatacctaacatactttagcctgagttcagcactctgcgagacgatatctttatactactgggccctaatattttagcgattgatcagttgaagggcttaggtaattccgctgagcagtgccctaaaagccttagcaaaccttggggagaggatcatgaccttcaactcagggttatattcttaaagtgattcgcatctattttgggagtctaccgtattttcatagaaaacaaattttttagcactgatgctttttttaatagactgtctcgtt

SEQ ID NO: 109295 - DNA, 388 bp, Arabidopsis thaliana columbia
  unsure (1)..(388): unsure at all n locations
gttttgaagcataaggaaaacatgttgggttttgttgaagaagaagaagacgatgaagagggggagtattactaagaagaaggggaggtaaatgaggaaaaggacgcagagggtaagaggaagagaaagccaaaaacgtctcttgtacaaaagacgaaaagaagctttgatggaggagtactacaagctagattatgaggatacaattggagaattgagaacaaggtttaagtatgcgaaagtacaaccaaacagatttgaactggatacaggagagatacttaccttagatgacgcanagctgaaccaatatgtgccattgaagaaaatggctccttatgtggaaaaggatttggaggtgaataggcataaggtcaaggagcagaaa

SEQ ID NO: 109296 - DNA, 405 bp, Arabidopsis thaliana columbia
  unsure (1)..(405): unsure at all n locations
ggaannncccgggtcggaccgacgcgtaacggaaaacaccaaaaaccaaagattataattttcttttctcaaccatggcttttgtccctcccctgcctgggcgccttaaaggctgtgagggcctgccgcatcagatgtcctcggaagcggccgtgtgaccatgaggaagactgtcgccaagccaaagggtccatcaggcagcccatggtacggatctgaccgagtcaagtacttgggtccattctccggcgagcccccgagctaccttaccggtgagttccccggtgactacggatgggacaccgctggtctatccgccgacccagagaccttctccaggaaccgggagctagaagttattcacaacagattggccatgctcggagccctaggctgcgtttttcc

SEQ ID NO: 109297 - DNA, 385 bp, Arabidopsis thaliana columbia
cggggcgaccgacagcgtacggagaaatcaaataaaaaggtaatcctatttctaccaagcatttcttagtctcctcgggcttgttttatattttacggtgtggtgaccaccatactaaattatattcttcaaagcaatcaactttacagtcattttttcatcgataggtaatttaattttactattcacctacttatgttttccctaaatacttttaatatcttaatactgatcaatacatatctttttaaaatctttattccttttctttatatattttttcttcttatttaattttttaattatattttttttaattttattgggttgggggtgtaatctatttttatattctttttttttatttttatttttttattctttt

SEQ ID NO: 109298 - DNA, 469 bp, Arabidopsis thaliana columbia
acagaacataactaaaatcgagaaaaatggtataacagtggtgaaggtaaagtggtgtgtgggcattatcctacggttggatcgcctcattactcgtcaagttcctacttatccgtggctacactgttaaggcctacgtccgagatcccagttatccgataaatacacaatacttagtttcactagaaggttcaatgtaaatactttacttgtacaaagcatactcttttgtactagtgttctttttactctgctatttttaattcccattgtttttttctcactacttttattacatttacttatttatgcgtggggggggtttttttcaattttattttattttactttctctttttctattatttcatgttattttattttttctctttctattccttttcactcttcataatttttttaatttttactttttcttctttctttttctttattttttatttttctt

SEQ ID NO: 109299 - DNA, 215 bp, Arabidopsis thaliana columbia
ggtcgaccacgcgtccgctaaagaacaataactagaaataaattatttctttagttatcagagtccacaccttatggctggctttcataaaaaagacacgcggatccgatgtccatagctccaacaccatagcccacctttcgagcgaaatccatccaaatggagaaatctcatatcttccgtgagaacttcaaatggtcttaccgcatctaaag

SEQ ID NO: 109300 - DNA, 442 bp, Arabidopsis thaliana columbia
  unsure (1)..(442): unsure at all n locations
accgcggaccgccgtgggtagaacttatggcaatacttcttaaatgaagccaatccatgccttacacggggtgctgttctctctgttgtggtggcggcgactgncctctagctanctcgccttcgcccatttatccatagtcanntctcaggctgtgtttgccctcgctcgttcttgatgattgttatactcgaccatcagtagtagcttagattcctttggctctaagagtgaggagctcatcctgattctctcagtccttgttcatatgtcggtgatgatcaccggaggtaggagccttaaaccagtacgtattggctctgtatccttcaaaatgccctcttctttattggctattcaaacgatcgagggctgatgatgtttacactaaagctangtatgttctacgtgaccaatgaggtaccatattgcttttgttttg

SEQ ID NO: 109301 - DNA, 390 bp, Arabidopsis thaliana columbia
ccggggcggccgggcgtccgaggattcaatcccaaaattgattgggatgcgttttacagtttcctcggaagttctatcgttgcgagattctccaaggagcggggtttgagtaaaatcacgaagttgaaaaggagatttcatgttcattgggagaaaatcagtgaagggaatgatccgaaatttactaggtctagtgattctgaagcctttggattttcttcgatgatttggggacaaggtgaatttggtaatgatgatggtatggataaggagatggtgaaggagcacgatgtaaacggaaatggcgcatctgtaaatgggactgctcgaatagcacaggataactagattgggtaggagattgttaagggagccttaaggaaaccttta

SEQ ID NO: 109302 - DNA, 467 bp, Arabidopsis thaliana columbia
ctttagtcctctacaccaaaacatgatcaataggtatctcatccgaatattccacgtgtcaagcaagctgtggctaggagggattacacagtccacgtcagctctctagaaacggctcaatgctcttgtccttgacacttttcttccacttcttcttcatcatctttaatcgttgggaaaagtttgatgatacggagtggacaattcttggtgtagaaggagaatctgagagagagagagtcatggaagctctgaaaaccgcaacttttagccctatgtcggtgttatccgagaaaagatcagaaccacgaaagcctttctcgctccctaacctctttccaccaaaatcacagagaccaatctcccaagaaagcttcttgaagagattcaatggtggaattggctcttctaacttctgttctaagcagtgcaacagcttctgctaaatccctgacgtacgaggaagc

SEQ ID NO: 109303 - DNA, 373 bp, Arabidopsis thaliana columbia
aagaatggatcaagttgtgataaatatccagaatggtttgataagactaacggcaagccaaatttaaggaagtgagacagtggacccactccgactccgaggttccaatgccctaatcatcacctttacctccatctccttttctcaggttctcataagtgagtgtacttcaagctgaaattgaaaggactattcaatatcttcatctgttgttaccaatctcttcttgtgtctgctaagtggaaacttttttaacagcttcatcacctcatacgtccttatctgtgtttcaaggtagaggcaaagcccaagcggagttaacccatccttgttcttcacttttatgtccgccccttttatcaaaagaagcttt

SEQ ID NO: 109304 - DNA, 396 bp, Arabidopsis thaliana columbia
cgtccgattctgttcatcttcttcttcataatatgccattgttcatgtctctgtgtcctatcacatagcacgcacgctatctaaggatgggctctcgctctttctcactgagaggacactaaaaaaatggcgatgagacttttgaagactcatcttatgtttctgcatctgtatctatttttctcaccatgtttcgcttacactgacatggaagattttctcaatctcaaatactccatgattggacctaaaggacacgcacttcacgactggattcactcatattctcctgatgctcacatgacttacgacatcgaatcatgttaccacaatacatctcttatctttcttaaccacttgttcactactgtgcttgctacaatttcaccagagaat

SEQ ID NO: 109305 - DNA, 473 bp, Arabidopsis thaliana columbia
  unsure (1)..(473): unsure at all n locations
cgtccgagcggttccaagagttatttgctcaaacaaagtacatggaggctgctgagcttgctgctgaatctggtcagggcattctacggacacctgatacggtggccaaattccagagtgttcctgtacaagcagggcaaactcctccattgttacagtattttgggacccttttgactagagggaagctcaattcatatgagtctttggaactatctcggcttgttgtgaatcaaaacaaaaagaacctcttggaaaactggttggcagaggataagttagaatgcagtgaagaactcggagaccttgtcaaaactgtggataatgaccttgctctaaaaatatacatcaaagctagagctactccaaaagtcgttgcagcttttgcagagcgaagggagtttgacaaaatattgatttattcaaagcaggntgngtacacacctgattacatgtttttttgcaaacgatac

SEQ ID NO: 109306 - DNA, 542 bp, Arabidopsis thaliana columbia
  unsure (1)..(542): unsure at all n locations
accggnnncggaannncccgggtcgagcccacgccgtccgagaaaaccagactctcccagagaaggtaagactattggacacnaagtatancttttttcacgtggtcggagaagtacatgaagagaagatgcaannaatggatgaacaacnagcaggaanagtccaaagnccaagagtacacnatccaacatntgtcgctcagatgnnagagtctcagatcctaagncctctatttctncgctggagaaagggatctgcggaaaancctcttaacttagaganngtttgtacttgttnngcatctgaatcgcagcggactaaacgagctagcttgccatggtgatcaagataccaaaacttacagacacaacaagctcaaccactcttggagattactttgcagaggttaacgcaacagtggtacttccaagtggagttcacagtctcccgcacaaaggagggccgtcatcactgatccaacgatggaaatcagatggatcatgtgactgtggaggctgggacacgggatgtaaccttagaa

SEQ ID NO: 109307 - DNA, 315 bp, Arabidopsis thaliana columbia
gggcgagcgtcgaacactaagctaccactctagctttggtgatctgaatcattattctcacgaggtgggttacatgctggctaggtcccggtagctcaactctgactgggaagctcgaggaacctattctttctgtctcactttatggtggtttgcccctctacctccgggtctagcagaccggcctactgtcctgagctgcccacagatgggatcaagacatgaggcgcagaacccggccacggcggacctaactgctggcagttcgtgcagagagcacaagaagggcggcgatgtaacgtcagacaaaacttt

SEQ ID NO: 109308 - DNA, 435 bp, Arabidopsis thaliana columbia
gaaaacccggcccgacgcacgcgtacgttcttttcaaatttcacccacacaacttctttattcaacagcaataaccattactgacacgtcttttcttactcaaggcagcgtccactcaccctcacacgatctcgatcactgcgtaagacatcgattttactgaatagaaaggagacatactcgtaatccggagtccacagataatgacttagccaaatactgtaactcaaagtttgagaatccgatctttagcaaggtcaatgcttacttaagtggacttttatctcaagtctcttccgaggaagatttcactattaaacctggtcaagcgacgggtctcatgctttcttatttatgaacaaaatatatccgctttatcgttctagtcactttttttactctccagttctttttataacctatattttatccttt

SEQ ID NO: 109309 - DNA, 472 bp, Arabidopsis thaliana columbia
  unsure (1)..(472): unsure at all n locations
ttttcccatcttttaatcaccatctttattttctttctccagcatcatcatanagggaagtttccttcaacattcaggagagttcatanataatcaaatcagtttgcgatggcccaaaacttgtaagcaaaaggcgggaaaggaggcaatcatcgggatgatttactcgaccatgacaatatcgcaaagattcatgtacaaggtggtcatgaagggattcagtacgtcaagtttgattatgttaagtctgataatctcaagattggtcaacccaaacttggatcaatccatggtctctcgcgttaaggattcactcaaacgtttgatatctatcccaccagtgagtatattgtatccgctgaaatgtttactatgatgaatctaaaggtattattcaagcactttaaattcaaaaccaacaagaagacttccttcatgataggatacgattaaaattgtttgaaattctcac

SEQ ID NO: 109310 - DNA, 404 bp, Arabidopsis thaliana columbia
  unsure (1)..(404): unsure at all n locations
ttcggaatttcccgggtgcgacgccatcgtcgtccgtccntggccagtagtcaatattgcttgtcttcaatatgtattaagnnccatgcccatgtgtnnaagtatgagacggggaattcagtatctggtgagaacgtggcgagattnggctcatnnntaaatcnnagttatttagtttggtttgganntggtaacctacctacntnncggataacnncgtagtatatttcttaganngctaatatcgtgcatacataatcccctgtacttatgtgaaagggacccgcatttattatgataataaggggtcgacgcgggcctcttgcccgttgcttctgatgtattcaatgataaccctcgacggattcgcatgtgcctcttgtgctggcgacccgcatcattca

SEQ ID NO: 109311 - DNA, 334 bp, Arabidopsis thaliana columbia
ttctttttccaatccaatctcacatcatttcttttaaatagcaataacccatgttgacagtgtcttttttactgaagccacctacactatccctcacatgatccagatcaccacgtatgcgatcgatgtaattgaatgaaaaggtgcacatcctcgtagttcgtatgacagaccaagacttcgccaaaaacggtcactgaaagtttgacgaatgctaccttgagcatcgacgatgctcacttaaacggacttttaactcaagactcttacgaggaaatatttactaccaaacctgctcaatcgactgttctcaggcttactgctttaagatcaa

SEQ ID NO: 109312 - DNA, 465 bp, Arabidopsis thaliana columbia
gttttgaattttgaaattgttcatttccttctctctaccattccccctctctctttccgggtggcaaactcattcagcagcgggcattgattctctctagagctgacaaatccagaatcggatctcaggagacttgaagctcgctcccacgatgaatcagtaccacatctacgaagctattggacatggcaaatgctcgactgtgtataaaggaaggaagaagaagacgatcgagtattttgcctgcaagagtgtcgataagtcgcggaagaacaaggttcttcaagaggtcaggatccttcactcgctaaatcatccaaacgtactcaagttctatgcttggtatgaaacttctgctcacatgtggttagttctggaatattgcggtggtggtgatctcaggacattattgcagcaggactggtaacttgccagagaatctatctattggcttgcttatgatct

SEQ ID NO: 109313 - DNA, 293 bp, Arabidopsis thaliana columbia
ttcttatcacaacccaatcacacatttcttcttttcacaagcaataaccatcactgacgctttctttctcactaaagccaactccactactccttacatgatctagttcacttccaatgcaatcgctgtacttcactggtcagtttacatactcgtaacacctgtcacagaccatgacttagccaaagaccattactgactttttacgattccaatctctagcaagttctctactcacttaagtgctcttttatctcaagtcactctctagaaagttttcatctgctaacctg

SEQ ID NO: 109314 - DNA, 248 bp, Arabidopsis thaliana columbia
ttctttttaaagttcaatcacacatctcttttattaaatagcaataaccaatactgacagtgtccattttactcaacgcaactccactcctcctcacaagatccagttcacttcgaaagcgatcgatgtaactgaatagaaaggaaacacactcgtatccgtattacagaacatgacttagccaaatacggtcactcaaacattttcgaatcctatctttatcatcgcctattcccacttaaatgcac

SEQ ID NO: 109315 - DNA, 279 bp, Arabidopsis thaliana columbia
  unsure (1)..(279): unsure at all n locations
aanannanatttatanccattaaacggaggatttttttatacaggtgtggggggcccattttcttcctttttcacacaaaaacacattttttcccaaatatttttacaacctcataaaacacgattctataaaccctccaagtttctttgattttattccaaaacacatcttttttttaaaaatcccctttttcacaagacagctaaaattttccctatggctattaaaatatacattgaaatttaccactttttaaccctatataaaaaatttatttt

SEQ ID NO: 109316 - DNA, 287 bp, Arabidopsis thaliana columbia
  unsure (1)..(287): unsure at all n locations
ctcaacattttatccgtcttgtgcaaaggttaatggaaagacaacgtctcgaggaagaccgagaggtctatcttctaaggggggacaagatgcanagcagtcccttttaagcagggctactagtcctcagccagatggtccaacagctggtggtagcttaaaatcaatgaaagacaaacctagttcgcaagataaagagacgcctgaggtctctggtctgaaaactgctgtacctgagggggagataacagtagggtacttaatgaagaaaagttcattaacaaatt

SEQ ID NO: 109317 - DNA, 227 bp, Arabidopsis thaliana columbia
atcagaacaagctgcgacgtaaaatttgtttcgacatccgaaaatggttgtgtaacctgatactatgttgagatgggtcgtaaagaagtattctataggttcatattgtctatgcacgccccagatgctctgagattgcttggtgaagaagtaacgtttgacgaatctagttttcttggtgctttccaatacgttttacagcgtatttatatgttcattactgacat

SEQ ID NO: 109318 - DNA, 293 bp, Arabidopsis thaliana columbia
  unsure (1)..(293): unsure at all n locations
cggaaaanccgggccgacgcacgcgtccgcaaaacatcatcatatattctattgtctgtttaattncttctaagtgcaaaagancagaaattgtattcaatgaagatgaggctcatagtggtgtttatggttgctattgtggctttctccgccgtaggaaacttggctgcgcagtctgaggctcctgctccaagtcctactttctattctgttatttttgtcccgtcattgtttgcatttttagctgttttttcttcagtttttctcttttaataccaatcttcacatttcat

SEQ ID NO: 109319 - DNA, 470 bp, Arabidopsis thaliana columbia
tcgttgactcgtgtgtcgaaatctctcttttttagaagaggagagacgaaactgttgggttagtttcctacgccgggaaggtgggaactccggtgaacagagaatggggctgcatttggctgctctgtttttcatcatttcaccactcttcgttttctcctctcaagtccagcagcagatcggttctaatcagaacttgatcaatgatctggactcagctaagctcagaatatctcaattggaagctgttcttgaggcgacaatacataagttggatggtaagaccctttacttgaaagagcgtgagaagttgatccaagttgctgaaactcagatccttgatttgcaatctgcttcatacattgacaagagcggcttacctttggttcaaaagaggataagcgagttagaagaataggtgaaacttttatgggctggcttgagaacaaccacctttgatcttcaccttt

SEQ ID NO: 109320 - DNA, 241 bp, Arabidopsis thaliana columbia
atgccttgtaagcataagtttcatgttcgttgtattgttccctggcttgagcttcataggtctggtcctgtgtgtcgttttgagcttccttctagtgctgatgatgatgatgagactaagactgattccgagagagtgctgagaacaagaaatgttcgggaaacgagtaacggaaacgttgttgagaatgtgggaaatgcggatagaggaagagaggatgaggtgaggagtggaaatggga

SEQ ID NO: 109321 - DNA, 366 bp, Arabidopsis thaliana columbia
gaattccggggggacgcacgcgtccgcagaaatcctccttccagctctcaatcatctggaactatggatccgacagacagagtaagcaccattgtaaaagctggtgctggaaagtttgcagtgcttcatcttcgtttcgataaagacatggctgctcattcaggctgtgactttgaaggtggcaaagcagaaaaactggcgctggcaaaatatcgccaggtgatctggcatggaagggtcttatattcacagttcacagattaggagcttagaaacaaatggctgctgtcctgtgacaccataagagattggtttacttgctgcagctttgggttgcaaatacaattactctttttatttaacttt

SEQ ID NO: 109322 - DNA, 505 bp, Arabidopsis thaliana columbia
aaaacccgggccgaccgcacgcgtccggagaattagatatttccgacacgaggcattttcctagtggctcatggcgtcatcatctgggcggacttctaagataatcgacggcaaggcgattgctcataccatcagatcagagatcgccgaggaagttcgcggtctatctgagaaacacggcaaggtcccaggactagctgtagttattgttgggagccgaaaggattcacagacctatgtgaatacgaagaggaaagcgtgcgctgaggttgggattaagtcatttgacgtgggcctaccagaggaagtttctgaagctgatcttattagcaaagttcatgaactaaattcaaatccggatgtccatggcatattagttcaactcccattgccgaaacatattaatgaggagcatatattgtgtgcaatcagcattgataaagatgtcgatggcttccatcctttgatattggtaagctagccatgaaaggcagagaaccccctt

SEQ ID NO: 109323 - DNA, 418 bp, Arabidopsis thaliana columbia
ctcgtcgtctctacaccatctagaagacctttatctcatggctgtcgggaagaacaagacccagttcttattttaggaaaggagggaagaacaaggctgttgatcccttcttcaagaaggattggtatgacgtgaaggctcctggttctttcacgaacaggaatgttgggaagactcttgtttccaggactcaatgtaccaagattgcctctgagggactgaatcacatggtgtttgaggattttcttgctgttctacaaaatgattaggattatgcctacagtaagatccgtcttaatgcgggggatgttagtgatagtattttttaaccctatttttttatttgattttaacacttctcatgttttagttatttttttaatattattcatatcatttatattatattcatttcttt

SEQ ID NO: 109324 - DNA, 446 bp, Arabidopsis thaliana columbia
catcattctctggatctgttttcgcccttctccacgattcagcagtttcaggcactgttgtgtctatggatgccaaggggggtgacacaatctgctcgagagatgcgatcagctggctccctgacgaggttctgggtaaaatattgtctttaatccccaccaaacaggctgtttcaacatctctccttgctaaaaagtggaggactatctttagattggtggatcatctcgagttagatgactctttctcgctgcaagccgtaaaggaccaaacaccaggtctccgtaaacatgtgaggtttgtgtttacggaggacttcaagatttttgtggatcgaactctggctttgcaatgtgattatccgatcaagaatttctctctaaaatgccacgttagcaagtacgatgagcgtcagaaagcttgtgttggccgctgaatatctaat

SEQ ID NO: 109325 - DNA, 185 bp, Arabidopsis thaliana columbia
acgtggttcaaggccggcacaattaccgagatgctactgggcgccgctggcccgctaagcattaccaggctactagtatctagagctgtgaaggctacagcccggatggtccatggagaagcaggactgtttacccagggagttgaccatggcctgtctgaccccgggcttgagagtgagggaag

SEQ ID NO: 109326 - DNA, 205 bp, Arabidopsis thaliana columbia
cgcgaccgccaattcccgtcgacccacctcgttctcccatttttatcttcttcctgtctgaatttgatggtgttttttaggaaaagccatgtaggatattaccacttgttggacaatggaactggaatgggaagctgtttgtgtgatatccccggagcaggtccaagattgtggcgcctggccactgtgtatggtggatggtcag

SEQ ID NO: 109327 - DNA, 433 bp, Arabidopsis thaliana columbia
aattttctctagatccacggatccatttttctcgggaaaattcgaaatccgccgggggagggaaactcattcatggggtgagctaaaacatggggacggagatccctagatcggcggagatatcagaggcattgttaccaccggaatctgagaaaaccgtgacggcgacggaggagcatgtacctgagtggaaagagcagataacgattcgaggattaaccgtgagtgcgttgctcgggactttgttctgtatcattactcataaactaaatctgacggttggaatcatcccgtcgttgaacgtggctgcgggattactcggtttcttcttcgttaagtcgtggactggtttcttatcgaagctagggtttacagtgaagcctttcactaagcaagagaacaccgttattcagacttgtgttgtcgcttgcta

SEQ ID NO: 109328 - DNA, 262 bp, Arabidopsis thaliana columbia
  unsure (1)..(262): unsure at all n locations
atantgatcatctaaaggttctatttttcttcttttgttccgtgtattatctcggtatagtaaactaattaaggtgggataaacggtcatagttgttacacttgctctttatttttcattgctaaattggttttgttgacagattgatcttttctaattcaagaatatttctcttaataataaaagtgtactctccattttattcttttactcatataattatttctcacacacaatatatctatttattaaaaattttatt

SEQ ID NO: 109329 - DNA, 325 bp, Arabidopsis thaliana columbia
ctctctatacccatttcaacttttctctctactttacccaaaatactttctattaaacttatcaaaaacaaacttacattttccacaccataatcatttactatcattccaccaacactcccttaccttttcctatcacatatccaactctcctttccaatacccaaatcattattcaacatctactataaccatatcaatttttcctgcattcaagcttccaaattactcttctatattttttttatccaacatatcatcctctttctattaatttattaaaaaacatttcccattttcatatctttaatattcctatccctaa

SEQ ID NO: 109330 - DNA, 401 bp, Arabidopsis thaliana columbia
agaatagtgtgtgtgagtgttattctccttctccttcttcttcttcttcttctccacaaagaacgaaaacttttttctggtgtctctcaacttgcagaagaagcgatttacacaagtaaccatggagcggctgatttctcatcctcctctcatgatcgtctcagaccttgatcacaccatggttgatcatcaagatcatgagaacctctctcttctcaggttcaattcattgtgggaatacgcttatcgccgtgactctcttcttgtcttctctacagcaagatcacctgttctttataaagaattgagaaaagagaaacctttgttgactcctgatatcattattacatcaataggaactgagatagcattttggtaactccattggttctgatcatgct

SEQ ID NO: 109331 - DNA, 393 bp, Arabidopsis thaliana columbia
gcaagcgcttgcctgactgaaatgtgaagccggatggtatatatctgtttgatgtcttcgaggagtggtatccgcatcaagccggagatattttagctgtaataatattaagaagtgaaactctggtctgaatcagtcgccggaaaatacactccaactcgatctcaagctcctcaacagtgatctctgcagcctccaaccttgtacttgcgctccgcatcgctacttcgtcccacgcatcatcaaagcagcaaaactgcatcgtaaagatagaagaaaatgaccctatgctcggttttctctggagccaaggaacacatactagtgagaacagagactcaaccatagtcacaacggctcttctcacttctttcaaaacctcagcaacaaaca

SEQ ID NO: 109332 - DNA, 266 bp, Arabidopsis thaliana columbia
  unsure (1)..(266): unsure at all n locations
ggaannggggggncgaccgcacgcgtccgcttcgaacccactttgcccactcttttatcttcaaaactagactcaattccctcgcttgtgttttttcatataccgcgcatactctctaacttcttccacaccaaattcgactctctcctattccactacccatcaatttctcaacccacctacttcttttcccgtctcgttatcagtcccatctccaaagaatacccgccatcttcttcttctcattaccttctcttttaattcac

SEQ ID NO: 109333 - DNA, 394 bp, Arabidopsis thaliana columbia
  unsure (1)..(394): unsure at all n locations
ttcataaatggcnaaatcttgcatttcgtctagatcttatnaatcggggcggggcttatttacgaggcggttcctncacaaangtccagataccgtggaagagcttctcgaaagacatctatcgaagaaagagaaaccaataatcgatcactatgaggcttattttctgaatagacagcgtctgactagcacgctccgtgaagcgtttattttgtacagagacatattacgagcgactctgttcttcacgttgattgatttcagtttaaatttatttaagtaccttttgagtgagagcgcgaggaattaatttaaacttctccattttatactgattccttagttttctcaagtctttttattattattaacctctccctttttatctttttta

SEQ ID NO: 109334 - DNA, 312 bp, Arabidopsis thaliana columbia
cggccgaacccggcgaccgacctcgagaaaactctcttttttgttctccttatcctggaataaaggcgggctttcagatttgtatcatcatctaagtaaaaggtgatcaagttacaccactattgccaaaagctgcgcgtatgcttcaaggtttcaggcttaagtggtaccagagctctatttaaagctcacctacgactctcatctgattaatttctcgcatccgtgtgcacactgtttccggttgccacccagagagaaggtactacttgcctgactttatgggggtttgtgcgctcaaacgtgtgtcta

SEQ ID NO: 109335 - DNA, 380 bp, Arabidopsis thaliana columbia
tcagacaggactaccaatatgatgaactgatgatttttttttttttttttttggctcaacaacaaactttccattcacccatttatggatacacagtctagctcaacagagcttttaacccaaattggtacaatagaatacaactttagatcataattctcaaaagaaagagattccttagctattctatctgccactccatttccttctcggcttgtatgcacaagcataaaatcctcaaacttgctaagtagatactttatgtcttggataattggattgagacttgacaagcataactttcatgtaaccaaagacacaagttgctgagaatccaccttaaaaatgatcttcctataattgaatcgggagttctagat

SEQ ID NO: 109336 - DNA, 245 bp, Arabidopsis thaliana columbia
ctctttcaattaatgacatttttttctcactaaccaactggactgtgagaatgcagcatctctctcttcatacactcatcacctttccatcgacttattctccactgataaaacacggattaaggatggagaccctaaaccaaaggtctctactacaaagggggctggatttcgcagagacgcggctgttgaagcaacgcaactttttgctggccagctcactgcaccttttgggagcatgtcgt

SEQ ID NO: 109337 - DNA, 186 bp, Arabidopsis thaliana columbia
cataaggttggtaagtaatactctcttttctctaggttctaccacttcaaacccgaatcagtttcaaaagaagaggtggatcctatctcacaaaaaacactatctatatacttaacacatgctattttctactattaatctacccatatactttatcttttataaatttttattttatctttattt

SEQ ID NO: 109338 - DNA, 431 bp, Arabidopsis thaliana columbia
gcgtccggtgataatcacggcgacaacaacaatggctttctttcctaatcctctctctctaagcgtgggcgagcctgctttcgaggctgggcttcaagattccggttacctcgagctcctcgatcaccgcacctccgccgctgcagctgccgcttcctcctccgcctccgtttcatcctcagctgccgcaacttctgcggcatctgacgatgtcgtttcatccattaccggtggatgcttcgcttctctcttatctcgactcgtcactgtctcttcttttcttactattaaccctttctctaagctctgcggcgatgatttttcccgagatactacaccgtggaccaccggtttcatcggcaattgagactcttattcgttcccgtcgtctttttagcaagcgagaatgagagttcatgagaatatcaaac

SEQ ID NO: 109339 - DNA, 441 bp, Arabidopsis thaliana columbia
ggcgctgtaaatcaactgagaaaatggaaccctccataggaacaacctaaaacacgccggagaaatcaagtgctccgagtgctccagccaccatatgcctgccgcctttccttccttccggatgctgcacaaactgcggcggaccaacgatttcagaagcaccaccaccactagcttcattcccagagatgtcaccaccaccaaactatcgtccgatccgagctccagcaatcaatctcccacacaactcccacacgaaacaaatttcgcggcgtggttgtattgtttagctaggatggggatagtgaaagaagaggattatcatagtttggttgctagggtttttgttaagtatttggagttgatgaggaaattgcaaatggtttattggttagaaccagctggatctcatggagtttggggacttgatgattaccaatt

SEQ ID NO: 109340 - DNA, 436 bp, Arabidopsis thaliana columbia
  unsure (1)..(436): unsure at all n locations
cggacgcgtgggtaaactcaatgatatggcaactcaaaaagagaaaccttcctccaggtggttcaaatggttttgcaccaaaaccttaaagttaaaccttagtttccaaaaccgacgaagatcaccaaaatcaaactcttcgtcaaccttaaactctccaagaagcaacagtgatgacaacaacaacataaagagtcaccaggcctccaaagaagagctccgtcaagtcttcagccatttcgacagcgacggcgacggtaagatctcagcctttgagctcagacattacttcggctctgtcggtgagtatatatctcacgaggcagctcaagaggcgataaacgaagttgacactgacgcagacgggtctctagggtttgaggactttgttggattgatgacaagaagagatctntacggtgacggtgaagttgat

SEQ ID NO: 109341 - DNA, 444 bp, Arabidopsis thaliana columbia
  unsure (1)..(444): unsure at all n locations
acgcgnntccgggtgaaaagaaaggagactttgancttcttctgggatgtaactttcttctnngcacttcttctcattagagcgctcgcgtgtgttaaaatagattgtggagatgnngcgataggaaaccctccagaagtagcaaccttattgtnggaaggangaacccactgaagccgagtccctcttaatggaaaccgagtctcagnttaagttctgacttaacgaagagtcttgatctcggctgaagtgaaggaagcccaaaanggataataacccaagaagaagaangatggacctgaaaggtaaatcaatttcgtgtttttgatagatcttgtagttgaagtatgtaattatgacgggaaaaagatggaactttggtctctttcgtgtgttcttgtttattactagtttagattaatcaatctggttatgtcatcagag

SEQ ID NO: 109342 - DNA, 420 bp, Arabidopsis thaliana columbia
cttcctcactttgttcatcatcttcttctccgatctaaacaacaatggcgacacgaggagcgtcctcagcaagagatgaattcgtatacatggcgaaactcgccgaacaagcagagcgttacgaagaaatggttgaattcatggagaaagtcgcgaaagctgttgacaaagacgaactcaccgtcgaagaacgtaatctcctctccgtcgcttacaaaaacgtcatcggagctcgtcgtgcttcgtggagaatcatttcatcgatcgaacaaaaggaggagtctcgcggtaacgatgaccacgtttcgttgatccgtgactacagaaagcaaaaacgaaacggaacttttctgatattctgttgacgggaattctttaaaacttttttgaaacgaattcttgggtctcccctggttgttt

SEQ ID NO: 109343 - DNA, 328 bp, Arabidopsis thaliana columbia
aactatctttttttttttttcacttttttcattttctgtgttttttttttttttttgcgggggggaagaaaagaaatttattaatgggtgtaaacaacaaaagccccacggatttgtaaaaatcgcacccccccaaaaaaaacaataacgtaaattcctgggtacataaaaaacctacatgacaaagtttaaaggccatgcatccccctcaggccccaaccaaaaccagcctgcacttttggggggtcccacccgcaccacagttagaaagcgaaatggttatggatgagatcacccaagttttgcaagcttacatgggggcctcaca

SEQ ID NO: 109344 - DNA, 429 bp, Arabidopsis thaliana columbia
tgtgctgctagtttttgtgaacgatcagattcaattatgcaccgtgtacatctactggagaaccgtttacatatcaacccactagacgaagagaaatgggttcctggcatgggcaccatccactcagctttgaatcggaaatgtctccctttgtgctccactcacatcagtgatgtatacttgggtaaaataacccttcaggatgttgatagtagttcattcatcgatctcaggtgatgtctgttactctcttctacaattggttataacatctgcacgagagtaagaagtaaaaatggccattgctgagatcaggcgaaaatgcgtgccaacagggtgtatcacatacacattttgtcttgatttcatcatgataggaaaatgaatgaatacttcataagcaactgtctggctgcgcaatggcatagt

SEQ ID NO: 109345 - DNA, 311 bp, Arabidopsis thaliana columbia
gctaggagagctggtgacttgaaagtgatcaagacgtttgggagacaggtgagaagttatcgcttgaccggtgggactcaccctgtgcttgtaacagcggatggtggactgcaactggagggacatgaaagctcaagcctggagacagactggtggctacatgcgagcagagacatggaattacccaagaactcatcatggatgagctggaagaggctgtcagacagaacacagtctggaggacctgtcttttttttgagaccgttttactttggtttagctcatggccaacacttcgagcagatcacaga

SEQ ID NO: 109346 - DNA, 468 bp, Arabidopsis thaliana columbia
  unsure (1)..(468): unsure at all n locations
cggaaaggccggaccgacccatgcgtgcgtttgcttataccctttgttacaaaattttatttttgtctcatcgggatgctgctagaggcgcgtaatcttactatgaacccccctaccctcagcataatacttcacatcaacgttcaccagagaatcttgcactaccacaaactgcttccaattatgcttctcacctctcaattactgcccaagatgttccacatccctcacagnaagtattggctccattattgtccgatttggcatgataaacgctaccttcaccgtaaattacatttctcgaaacctctaccgcaccgagaaacacaccgttctcaaaaaggtcttacaagattgctccgagaagaatggtctcgccgctgattctcttcggctgacgattcaagatcttgatgatgaagcttatgactattcctccatgcatgtgttggcggcgcacgattattc

SEQ ID NO: 109347 - DNA, 383 bp, Arabidopsis thaliana columbia
  unsure (1)..(383): unsure at all n locations
cggacgcgtggggaaattttgaaggttactgttttttctctttggggtcaaaattttaacagaaaggaggggaaatttgtgtctgaaaaatgtggtgtgcttgctatcatcagccattacctgccagttccgtcgtgttgaatcagcaggcgaagcaagaagagagtctgagaagaaaacaagtgttcttcttcttatcctcatcatctccttcaagcttaagcaccaaacatcaatggcaaatcagtaattatcctaaaaatgggttcagactaaaaccaaaagcgagtgtgttgcctncttctgagtctggtgatatcactacattcctctttggtagtggagcaatgatctccatgtatttggtaaccaattttctggtt

SEQ ID NO: 109348 - DNA, 383 bp, Arabidopsis thaliana columbia
  unsure (1)..(383): unsure at all n locations
gatttccttgacgtggggaaatgctttgtcaccatggggaagcgtaagatacgtgacatggacgataaggaaagcattgtgaacatattgggggataatgaaatggatggattgctgggaatggacgctgaagaggtcgattgaaagtgccagggggtcgtctgaagaacgatgtggcaggaagagaatctaagaagggatgactatacactgtgattgatgatgcactgaaaagcggtaaagcttactactaatttctatatatacaaaagccggtgtaattgtttgggtgacccaatttaactntttgcgatatattctaaacagataatatgactggctcttttttgggatccatcaagagataataaatctaatatttt

SEQ ID NO: 109349 - DNA, 204 bp, Arabidopsis thaliana columbia
gaaacgggaagcacgaaatgtcttatcgacgccaggagctaagcgtctggcaaacggggaggctgtgcttgaatctaaaattcacctttcatactattgcgactgcaaccctaacattctggccgtcattaagacatcaacgacactggagacgcttcggaccgatacacaaccgatgaagggataagagcctgcagggggttt

SEQ ID NO: 109350 - DNA, 420 bp, Arabidopsis thaliana columbia
ggctcccaaaaaacctctactcacgcagattactgcacagccagaagtagctaagccattggcgctcgaagaacctacgaaaccattggctattgaagctcctccatcttccgaggcaccacagaccgaatcagcgcctgaaaccgcagccgctgctgagtcaccagcacctgaaaccgcagccgttgctgagtcaccagcacctggaaccgcagccgttgctgaggcaccagcatctgagactgcagcagcacctgtggatggaccagtgacggagactgtgtctgagcctcctcccgtagagaaggaggaaacttctttggaagaaaaaagcgatccgtcttcaactccaaacacagaaacagctacgtccacagaaaatactagccaaacaacaacaacgcctgaaagtgttacaac

SEQ ID NO: 109351 - DNA, 492 bp, Arabidopsis thaliana columbia
gctgattcagcttggtgtccccatctttggtcatgtcaaggcggatgaaaactctaacgacaccaacggctctgttaacatcgagccaattccaccacttcttgagagtgtcattgatcactttgtcacatggagactcatcccagaatacaagagacctaacggctgtgtcatcaacttctttgaagagggtgaatactcacagcctttcctcaaaccacctcacttagaacaaccaatctccactcttgtcctctctgaatcaacaatggcctatggacgcattctctcaagtgacaacgaaggcaacttcagaggacctttgacactctctctcaaacaaggatctttggtggtgatgagagggaacagtgcagacatggcaagacatgtaatgtgtccatcacaaaacaaaagagtaagcatcacattctttcgtattcgacctgacacatatcataaccattcacaacccaacagttctcgcaacga

SEQ ID NO: 109352 - DNA, 343 bp, Arabidopsis thaliana columbia
gcgccgccattcgtcgccacgcgtcaagcttaacctaccgtaattttcgacatgccaccaaaacatccgggtggatcaagaagaggcttaccccaaccacttaggcgggctcgtggttatctgcttgatcttgctcgcgctcagctcgatgcttacagacactgcatggacaccctcttcggctgtcgcgtgcttactatgcttcgctttgcgtgcttgtgcgctacattcgggccttaccctgcgtccttgggttactcgggtactactctctcgggatcttcggatgtactttggtcgcgcgtgttctctagctgcacgtgcagcatcagcgtcgctttgc

SEQ ID NO: 109353 - DNA, 439 bp, Arabidopsis thaliana columbia
gcgttcttcatcagcgccgcgttctcaaagttgctctcacagtctccgatctcgaattttgtaagttatggctggaaaagctgcataagctgtggcaaagacagtgacagggtttcaacatccatggagggcgaaactcgataagtacagaaccgagttgacgaaaggtgtgtggggttattgggagatgggagcatggaaaccgttagggataagtgcacgaaggagggctatgctgaggaaagaagtgttgactaatggagaagattggccttatgatccagagaggaaagctatgaggacaaagaggaaagggcataaatgtgatagaatttcagctgagaaaagagagaacactgcgaagcttatgttgaagatgcctcagatgttgcttgattataagaagagaaggtgggaaaagaagatgaaggaagaagag

SEQ ID NO: 109354 - DNA, 428 bp, Arabidopsis thaliana columbia
  unsure (1)..(428): unsure at all n locations
atcaaggacacgtcaataataaagctgagaaatctggtttagaggattcaaatgcanatggctccaaagggaggtcactatctccagaaactttggcattgatgtgtgacgaacgggacacaatgttaatggttgcagcttcacctaattgttcggtggagcctacgtcacagctaccaaacgggcaagaccaggtttatgcagaacaagaaaaagtagtattaaccaagttccgtgactgccttaaccgaataatctcctgtggagaagtaaaagaatcaaattgttctatgtcaagaatggatctagatacacctgtacaaacgactgtcagaatcgacccagtggttcaacaagctccagttgcaaatggagtttcacaaaccgcaaagcaacctttccagcttaacacaacaacaccaaacaca

SEQ ID NO: 109355 - DNA, 364 bp, Arabidopsis thaliana columbia
gacgctcggtcaacgatcccttttgcattagttagttgatcgaatgattgaaatgggtcggtggatgcttgaggagaacttggcactgattccctcatggctcaatcgagttgatggcgaattgacgaaccccatgtcttcgccagggagtgtcattgcagctctaaaaggcctaaaagcagggctgctgggatcatatagttcttatggcccataagcttccagtgaacggctctttaaagctcggaagaaacagctaccattacaggaggtactgagtgccatagcttggaactgtattctatggatgctgtgattcgtgcatgttgaccaactctaactcacatgctttaatgacagagta

SEQ ID NO: 109356 - DNA, 381 bp, Arabidopsis thaliana columbia
  unsure (1)..(381): unsure at all n locations
gcgccgccattcccgtcgacgacgcgtcatccttgtgttgctaaccctacattttttgcggaattgctagctcggggtggaacatctgagccagctaaagaaccacaccaccaaaactagccaaaccggcgtcacatttgaaagctccaacctaaacgatctggagagcgaagcaacgggagctaacaacataggacttaaggggtccacagaagtgatggtcgtcaaaagacatgacctattaatacaaagactggagagagccgcagaaccatncttactggaaaactgtgggagaaacatgcaggctgatgctgatcttgacatgagacactttttcaacattctacacagagcacggtgtttggtgtgagactgaca

SEQ ID NO: 109357 - DNA, 240 bp, Arabidopsis thaliana columbia
  unsure (1)..(240): unsure at all n locations
nctttttcgcccttctgaagtccaccaccggggtaatctctatgaccagtccctttgttgaagaccggaaagtgaaagtggctgcctttatacccaggtttgggtaattcccatggtttcatgggcaattcttgccggggatctttcaaggacaaactcgcgaagcgatacaatagcctgagatactctaaacctctaccaccaactgctttaatccgccatcaccgacgctgcaacatc

SEQ ID NO: 109358 - DNA, 187 bp, Arabidopsis thaliana columbia
gcgccgccaattcccgtcgaccgactcgcaaagatgagaagctatggaatctctcaatggaagactaagtgtaacgcattggaaacggtgcagtttggaaccggtaaaaaacagagcggaatgtgagagaataattggattcagactgtgcttgtcgagttttagggagactgcatcgagcggtaga

SEQ ID NO: 109359 - DNA, 477 bp, Arabidopsis thaliana columbia
gcgattggaattgcccctggctctcctgagagaccacaattggtgaaaggaaatatgcagctgttctctggggatcaacagcggagccgggcccttgaagcacatgctgcatcttttgctcagtttaaggtccctgggaatgagaatccttcgattcttatatcatttgcaagcaagagctttaatgctgggcagataacatcaaagctgcatgttattgaacttggtgcccaaccagggaaaccatcatttacaaaaaagcaggcagatctctttttccccccagattttgctgatgattttcctgtggccatgcaggtctctcacaagtttaacttgatttatgtcatcaccaagcttggcctgctgtttgtatatgatctagagacagcttctgctatctacagaaatcggataagtccggacccaattttcttaacgtctgaagcttcctcagtttgggagttctatgccatt

SEQ ID NO: 109360 - DNA, 351 bp, Arabidopsis thaliana columbia
  unsure (1)..(351): unsure at all n locations
gcgaccggccggaatgccgggtgaccgagcgtcgtgttttacatggatgtactgttgaggatgataccttaggatggtcgacactggtggtggtgtgggaaaagctgntggtgtgtggcactgacacaaaacaccaaattctttggaaggatgggggaaacccacaggttctagaagctactgataggaatgtttatcttagcagacaaactctaaacctgccaggctacctgcaaaagcaagcttaatgtgatgattcaaagtctccagaagatcttaaagcaggattgactatgctggataggggaaactcacagacttactcctacacatctgctgtaagaccacgtc

SEQ ID NO: 109361 - DNA, 459 bp, Arabidopsis thaliana columbia
  unsure (1)..(459): unsure at all n locations
aattctcttttccctttnataactttttatcctttcnananacacnccctcccatggcccaagttctcttttaaatataggagggcccccctctcctcctctctctttctcctaccttccttatctcctctcccctcttctttccctttctcttttttcttatttttctcttactccttcattcatctattatccttcttttctttctcttctttttcccacatctccattttacctccatctttcatactcccttcctctttattctccctcccacctttttctttttctctatctgtattagccattcattccttccttttccttcttccccctattcttctccttcttctttctctccctcccccttncttttcttcccccccttcccctttcctcttattctcttcctcttctccttcctacccccttatatattatctttctctccttactttt

SEQ ID NO: 109362 - DNA, 357 bp, Arabidopsis thaliana columbia
  unsure (1)..(357): unsure at all n locations
gcgtccggtatatatgcatcctgatatttatgtggtttttctttcatatgnagatcactatgtataaaacatttttttactgggagccgtcttcatatagttcttcactagcttctttgataaagcaaagtcctatttagagatattactaaaaagatgcttggccctccattaacggtccttgatccaaatgcatactgtgtgaccaatggctggcgctcctaattgtatcaaactcatacgccagttttctcatattttcaccactcataactttacagttctactcccataatcgacaactgttgtggtgggggggccattcccttttatcctttacttattctctaatacctt

SEQ ID NO: 109363 - DNA, 494 bp, Arabidopsis thaliana columbia
gcgctttcgttctctatttgggtccgcacattgctttgttcactctaaaagcaacgctatgtggtcgaggtgatctaaaatctgcaccatatgatacaatacagttgaaaagggttccttcatggcttgataaatcttgttcggaattcggtcctcctttaatgatatcagctgctggatcgcgtgtgcctcttaccagcatattgccacaagtccagttggaggcaatcttatggggtattgagacggctcttggggagcttcctccatatttcatctcaagggcagctagtatatctgggagcacagtggatggaatggaagaattagatggttcctccactgaagatagcggatttatggcaactcacctgaaccgtgttaagcgttggttattaacccattcacagcacttgaacttcttcactgtctaggttcttgcttcggttccaaatcctttgtttgacctcgctggaataatgtgtggacaattt

SEQ ID NO: 109364 - DNA, 274 bp, Arabidopsis thaliana columbia
gccgaattcggtcgaccgactccaaaaagagataaaaatggagagctgaaaatcgctaaagagtggcaaacacccatggttcacttggctgatgaggcaaatacaaactttatcgatcgatggttgtcagaagagagacagtaacggagacggtactatgacattcctacacgcttatccataaagagcctttctgctgttggctatcgggatcaagataagagctgtggcaatcggctgcaatgaatgagctgataatttgcttttgctgtag

SEQ ID NO: 109365 - DNA, 486 bp, Arabidopsis thaliana columbia
  unsure (1)..(486): unsure at all n locations
ggaggggatccatctctttgggcagatcttcttaagtttttcggtgaaattgnaaaggacgtgcaccaaataagtgaaggaggttctcacttatattgaacgggatgatattttacctcctatcattgttcttcagaccctggcaaagaatccatgcctcacactttctgtcatcaaagactacatagctcggaaacttgagcaagagtcaaaaataattgaagaggaccggcgagctgtagagaagtatcatgaaacgactaaaaacatgagaaaagagattgaagatctcaagaccaatgccagaatatttcaacttagcaagtgtactgcttgcactttcacattggatatcccagctgtccatttcatgtgtatgcattcattccatcaacgctgcctcggtgacaacgaaaaagaatgccccgagtgtgctcccgagtacagatctgtgatggaaatgaaaagaagttggagcagaactcg

SEQ ID NO: 109366 - DNA, 420 bp, Arabidopsis thaliana columbia
  unsure (1)..(420): unsure at all n locations
cggaannnccgggnagacggacgcgtgcggtcaaagtttactctgcccttccattgaaacccagcttttccttccccaattctatcaaggggttcagttccatggaggaggaacttggtattactttccctggaaaggccgttggagtacaattcggtggctctgctgctgctgctccagctgttgaagctgaagcacctgcagctgcagcttatgatgatgatgtcatggatctctttggagaccagaccttactatatatgaatgctgcataggaaaaggatgctgctttaatagacacctataaactctaatatactttttagctttctgggctggtgggttgttattccttcttattttttaacctctctctatttatccttttataacctttttcgttgtttctttaattccttt

SEQ ID NO: 109367 - DNA, 246 bp, Arabidopsis thaliana columbia
  unsure (1)..(246): unsure at all n locations
agctctgtcttagctcttccttctttcaccatttattacnacaatgtattaaactgaatacagatcttatacaaccgggcgggccctacgtttctcaataataaattcattctcaatttaaagtcagaactcattatcccatcataatctaatcaactcaccatcaaaatttcactttccaaattaataattcgtgagctttacaatcaaatattttctcacattgatcatttcccttcttgtcca

SEQ ID NO: 109368 - DNA, 472 bp, Arabidopsis thaliana columbia
  unsure (1)..(472): unsure at all n locations
gcggcgagctanagactctctaatagagagaaagagagagaaacacaaacacgcacacataacgagtgatggtanagagagatagagatctggaaggtnacgtcgtatgagattatggcggcggttaggagaagagaacgagatgtggttgaagagaatggagttacgacgacgacggtgaaacgaatgaagatggaggaggaagtggatttagtggaatctaggataattctgtctccgtgtgtacaggcgacgaatcgcggtggaattgtggcgagaaattcaacatgagcgtctgataccaagtgtgttatagtacgacggcnaaattctcctccggttgaagaacagtgtcaaatcgaaaaagaaaattcggcggtttcgtgttgttctacattggaagagaaatcgaaacggagaatcgaatttgtagatcttgaggaaaataacggtgacgatcgtgaaacaaaaa

SEQ ID NO: 109369 - DNA, 487 bp, Arabidopsis thaliana columbia
gggccgaccgacgcgtccggctgcactcgtcgttacagtcttatcaaaagattttgatgttctcaatcttaagaggacccgtagctggaatggaggggagagacaatttgcaagaagagcagccataatgggtggtggcgattttacagttcctgtacaaagggttactgattttctgcaaaacaagctatctgaaacacctttacctccatcaagctatagattaggagtgaagtctgcaaatctgcatgaactgtttcctgctcatatcacagaggctctgcgagagtctatctctatgtttgaaaaggagttaccgggattcatctcagaggaagcactcctccacggcgtaaagacaagaacaagctcccctgttcggatacctcgtagcaatgagacgtacgagagtacgagcttaaaaggtctatacccagttggtgaaggagctggttatgctggtggaattagaagtgctgcagtggat

SEQ ID NO: 109370 - DNA, 262 bp, Arabidopsis thaliana columbia
cgcgtaccgggtatcttccactttgccgctctttattaaatttcttcgccgtagtctctctaatcttggtgcttaagctgttttaacggagagatcgggagattgcaccgcatcctgttcctcgtttctgagcgtattcgttagaatgcgtgaattctggaagcaaagagtcatctatggtaatattccaaagcttgcaatggctgatgctgatatcattcatacaactttgggttctcgttctatgttgaaaatgcttatt

SEQ ID NO: 109371 - DNA, 447 bp, Arabidopsis thaliana columbia
  unsure (1)..(447): unsure at all n locations
ttctcatnccaatttctctccgagcgtctggcgtactccgatcaatgctggaaagttttcttaacacctcatcgaccatgatcgagtttccatncgatctaatcaatcaatcatcagatttgatcttctcaagaagatgagcttgaagggtacgatcgtattactagggctcttatggagcttccaggctacgttagggattagattcgtgatagaccgtgaagaatgtttctcccacaaggctgaatatgaaggtgatacgcttcatgtctctttcgtcgtcatcaagtctgactctcaatggcattttaacgaggatggtgtagatcttgtgatacatggcccaacaggcgaacaaattcatgacttcagggagcagataagcgcaaagcatgattttagtgtccaaaaaaaaggggtttacagattctgtttcacaaacaagtc

SEQ ID NO: 109372 - DNA, 356 bp, Arabidopsis thaliana columbia
  unsure (1)..(356): unsure at all n locations
tttaaatgggcaaagtggcttctnaattacaaaataaaccaaacaaaggaaacaacatttgacaaacaaaacaacaatttctccatattaaaccgcaacaacacgagtttctgttattgctaaaagtgaatctccctagtcacgtaacattgttgctaccagatgattcctccaacaaaccaccacctttctttacagtcacatacttttcaaaactcggttccataagatcggctttcttcaccgtcaatgtgaatctaaaccggctcgaatcagacctcaaacaagttctgttcgtcatagagttaagatcagccactgcttcaacaattgaacaagctttactaacacacaat

SEQ ID NO: 109373 - DNA, 324 bp, Arabidopsis thaliana columbia
gatctcagttccttacagaagaatctccgactcgtttctttgccggcattctcagatttccggatactacccatgaacagtgatgggttcatcggaaaggtacttcttcgtatttgtaatattcgatgaaatatgaactgtgtttaccattgacgtcttctctctgatccataattggcttttaagttgcacacatttgtttattattggtagatctggtattatctgcatagattaagatcatcaatttaatctgctgctcgtagtgtgtcttgatcttgatgaatctttcacatgcattgcttattatgtacatgagctggg

SEQ ID NO: 109374 - DNA, 406 bp, Arabidopsis thaliana columbia
ctccgatcgaatcgccgacggagaaatgaccaagttcaggaagctcggccgcccagcaggtcaccgtatgtccatgctcaggactatggtttctcaattggtgcaacacgagcgaattgagaccactgttacaaaggctaaagaagttcgtcgtcttgctgataatatgattcaactcggaaaagagggttcactagctgcagcaagaagagctgctgggtttgttagaggagatgatgtacttcacaagatttttacagaattggctcatcgatacaaagatagagctggtggatacacaagaatgcttcgtactcgcattcgtgttggtgatgctgccccaatggcctatatcgagtttatcgatagagagaacgagctaaggcaatcaaaaccagctactcct

SEQ ID NO: 109375 - DNA, 293 bp, Arabidopsis thaliana columbia
acgtactcgtgcttgctatatcaaagagacgggtttatgtaaaagggtgatccataatgtatgaaaaagcacacacaacaagcttttcttttttttttaatttctaaaactccattgtcgggcgggcgttttaagtactgtggccagttctgtttatgaagaacgtttgatcccttagtccttagcgcacggatgaaaatctgaatggtgaaggcggggctctccgccgtggttgataatacgaggccttcgaggtgcaaacggggaatcaagctgaaactcacctttgagtg

SEQ ID NO: 109376 - DNA, 426 bp, Arabidopsis thaliana columbia
cgccatttggtttctcttgttggatactgcattgcggattcagagagattgcttatctatgaatatgttcctaaccaaacattggaacatcatttgcatgggaagggaaggccagtacttgaatgggctaggagagtcagaattgctataggttctgccaaaggtttggcgtatttacacgaagactgtcacccaaaaatcattcacagggacataaagtccgctaacatcttgctggacgatgagtttgaagctcaggttgctgactttggacttgccaaactcaatgattcaacacaaactcatgtatcaactcgcgttatgggaaccttcgggtacttggcaccagaatatgcacaaagtggaaagctgactgatagatcagatgttttctcgtttggggttgttctcttagagcttataaca

SEQ ID NO: 109377 - DNA, 434 bp, Arabidopsis thaliana columbia
tgacgacggcgcaatttctccacagagcgacgctactgaagaagccacctcctcctccatggaatgtgaactcaagctttctcacatctacctcctattcgatacctagaccttcttctctccgccgctctttgcccttgtctatcaatggcgacgcgacacagcccacctctcttctccaccaccaccggtttctcagttcattgacacggcggctcagtctttccggttcgtgtcctctacggcttcttcaggaggatggagattggagcaaagaccatttctgggccgttattcgttttctccgtcagtcctcaagactccacgagattcttcctgtttttgatacgtggaagaatcttgagccttcgcgaataagtgagaacaattacgaaaggattataaggtttttatgtgaggaaaaatcgatgagg

SEQ ID NO: 109378 - DNA, 428 bp, Arabidopsis thaliana columbia
aataccgtttgccagatgattatggggaggagttgttcagaggaaaacggtgaagcagagagagtcagaggcttggtgaccaagacagatgccttgacgaagaagtttatcttggcaggcatcttgcggaaaccgcttcagaagattgggatctcactgttcaaaaaggagttaatggatgcttcctgcaagttcaacgaggtgttggagaagattcttgtagaatataaagagaaagttgaagagcatcatcaaggtactgacatgatggataagctcttagaagtttatggagacgaaaaagcagagtataagatcactagagaccatatcaagtccttgtttgtggatcttttctttgcaggcactgacacctggacgcacgctatacaatggattatggccgagatcattaacaactcgtacat

SEQ ID NO: 109379 - DNA, 373 bp, Arabidopsis thaliana columbia
gatttcttccccaatcttcttcttcatatccttgaaggagagagtatagagaatccgatccaaaggccctaaaccccatttcccgcggattttctcccaagctgatacggagatcaaatgggagatccgttggagaggttgggttctcaggcatcaatggctactgagtctgtcatgaaggaggacttgtgtttagagatcgatcctcccttaactgaatccgttgccaccgctgaagattggcgtcgtgctctcggtaaggttgttcccgccgtcgttgtactccgcacaacggcttgtcgcgcctttgataccgagtcccccggtgctagctatgctactggttttatcgttgataagcgacgtgggatca

SEQ ID NO: 109380 - DNA, 422 bp, Arabidopsis thaliana columbia
cttcttctcatttctcaccaactccctccaaacccaacaaaagtgtttatattagcaaagccgccaaagtgtaaacgaaagtttataaatttcatttctgtgatcttacgtaattggaggaagatcaaaattttcaatccccattcttcgattgcttcaattgaagtttctccgatggcgcaagttagcagaatctgcaatggtgtgcagaacccatctcttatctccaatctctcgaaatccagtcaacgcaaatctcccttatcggtttctctgaagacgcagcagcatccacgagcttatccgatttcgtcgtcgtggggattgaagaagagtgggatgacgttaattggctctgagcttcgtcctcttaaagtcatgtcttctgtttccacggcggagaaagcgtcggagattgtact

SEQ ID NO: 109381 - DNA, 431 bp, Arabidopsis thaliana columbia
gtcgccgccgccgccgccgcaagtcttgtcggataagccttaaatggagacgcagaaaactcaagctgaaaacccgccaaaaccggccacgtcttcatgtcgaaagaagacaaaggatgatgccaatttcctagaagacgtcaaggatcacatcgatgatttcattaatgcttccatggatgatcacaagaactgtttcaacaaaaccatcaagaagatgtttgggttgtcaaaggctgttgcggataagcagcaaagtgaggctaaaggaggagtcgagagttatttgcctcttcagacaacagtctcagattagagaaactgatgatagaatcaagctaacaagatcttgtttcggtttactttttgttggtttgtttcggttaccattgtttagggagatatgcccatttataacagtaataaagatg

SEQ ID NO: 109382 - DNA, 230 bp, Arabidopsis thaliana columbia
gcgccgccgacccgggcccacgcgtcgtttagggcttggccactttctccaaaacctttttaaactgttcgaaattaagcggtgttcctttaggtttgttattgtcaggacccaacttaactatagacgtcctaaaaaggggttgtatcaccatatgtcaacatctaagagtacagcttttgtctcgcaaccgcattaacatgaactgagggcttcactactccaccttt

SEQ ID NO: 109383 - DNA, 461 bp, Arabidopsis thaliana columbia
  unsure (1)..(461): unsure at all n locations
gaaaacccgggccggccgcacgcgtacgcaagtcatcagaacctagtcttgagtattggttcaagtgcattgatttgnatccaggtgggggtttgacgcggaacgagctgcaattcttttacgaggagcagctacatagaatggaatgcatggcgcaagaggcggtgttgtttgaggatattttgtgccaattattcgacatggtcaaaccagaggacgaagggttcatttgtctaaatgatttgaagggttctaaactttctggaaatgtcttcaacatactttttaacctcaacaagtttatggcgtttgaaacgcgtgatcccttgctcatgcgccaggagcgcgcaaatccgacatggacagagtgggatcgttttgctcatagagaatatattaagctatcaatggaagaagatgtcgaagatgcttctaatggaagtgctgaagcatgggacgac

SEQ ID NO: 109384 - DNA, 416 bp, Arabidopsis thaliana columbia
ctctaaatctctccgatgatgctcggtggaaagtcctccgccggaggccgtacaagccttggagtctccgtcgctggcgacggaggaaccggtaaatccagcctgatctctgccgtcgcctccgagactttcccggataatgtccctcgcgtccttcctccgattactctccctgccgacgctttccctgactatatacctatcaccatcgtcgatactccctcaagtattgacaatcggattaagctcattgaagaattcaggaaggctgatgtggtccttctcacttatgcttgtgatcagccttcaactcttgatcgcttgagttcttattggctccctgagctccggcgtttagagatcaaagcacctgtgattgtggtgggctgcaagcttgatttacgtgatgaacgatc

SEQ ID NO: 109385 - DNA, 471 bp, Arabidopsis thaliana columbia
ctccgcggtgatgtcaaagaattgttgcttctggatgtcacacctctatcgctcggtattgaaacacttggtggtgtctttacgagactgatcacccgaaatacaaccatccccacaaagaagagtcaggtgttctcaactgcagccgataatcagactcaagttgggatcagggtgcttcaaggtgagcgtgaaatggcaacagacaacaagctcttgggagaatttgatctagttggcattccaccatctccaagaggagtccctcagatcgaagtgacatttgacattgatgccaatggcattgtcactgtttccgccaaggacaagacgactggtaaagtacaacagatcacaatccgatcctctggtgggctctcagaggatgatatccagaagatggtgagagaagcagagttgcatgctcagaaagacaaagaaagaaaagaattgatccgcaccaagaacaca

SEQ ID NO: 109386 - DNA, 341 bp, Arabidopsis thaliana columbia
aaattcggaaaaaagtctcaatctttctttctgggtttctactttatcaaacgaaatcaactcaagcaatgtttcactaatatatctgcttccgtgaattctgaataaaaagatcatgaagctcacaagcttgagcaagaatgctaattccacagcaacagcagtaactgtatcttcaatacagaaactcccgtttctgtctctgtctgaaactttgccttgtccgaagagttcgagaaaacccacgtttcttcctttaagatgtagacggagaccaaagttggatttgctcttgggaaaatttagagttcgtgcatcagatgctggtgttggaactggga

SEQ ID NO: 109387 - DNA, 343 bp, Arabidopsis thaliana columbia
ggagatttctctgaggttttaatctgcggttgatcaggctcagccgccgcgtgttttggtttctccggtggtggtaataataacaacgttcaaggaaatagctctgggactcgagtatcatcttcttccgttggagctagtggcaacgagacagatgagtatgactgtgaaagcgaggaaggaggagaagctggagttgatgaaactccctcttccaagtcaggtccttcttcttgtagttcatcttaaaaatgcagagctggtgaagttcataatcttctctgagaagaggggggggaagttgaatttaatgaaaaaattgaaagcctttacaaaagtttta

SEQ ID NO: 109388 - DNA, 459 bp, Arabidopsis thaliana columbia
gttggtgctttgttttttgagctagggattgtcggaacgatggagagtgatttgattgatttgttcgagggagctaagaaggcagccgatgcggcggctcttgacggtgttacctcttcaggtcctgaggtttctcaatgtatcgatgcccttaaacagctcaagaagtttcctgtcacatacgataccctcgttgcgactcaggtgggaaagaagctgaggtctcttgcaaaacatcctgttgaagatatcaaaagcgtagctactgatctgcttgagatatggaagaaagttgtcattgaagagacagccaaagctaagaaaaccgaaggcactaacggttgtaaagaggctaaggtgaataagatggatggtggagaagccttcaaatcctgctcctgttaaagttcagaaacttcagaggggtgattcggctaagagtatcaaggttgagagaaa

SEQ ID NO: 109389 - DNA, 270 bp, Arabidopsis thaliana columbia
gcgaacgaatatcggctgccactagaaaaactctagcttctcatctcctcatcgcaggcgcactgctggcaaccaaggccacggatcaggcggacacccgcgctacagaggctgctggtgccatcaaccttactgcgatccagaaaaaagggggccaattcactactatgagccatactataaacatcaactaagtcggttaggaagacaacattcaagagagtcgtgagtccgagagttgacggggttcaaccaacagacatgctttta

SEQ ID NO: 109390 - DNA, 465 bp, Arabidopsis thaliana columbia
ctcttttagagccttgcttcgtcctcgtaccggcattctctacgaggctactactgttccttccaatttgactgggatcaaactcgctgctatgagactcagaagcggaagctttagaaaacgtggagtcactccttttaatgagttctcaattcccagcggcgttatcgtcaagccgtatgtgacaaggcttgttttggtttatcaaaacctagctaatttctctcacttgtattaccctttgtctggttatgattatgtcgctcctgtcttgggtcttctcgcttacgatgctaagaatctctctgcgcttaatttgcctcagcttgatttaagggtgtctaatgatcctatcagaatcgatttctctgatctggaacgaatcccgcaggggtctagtgctaagtgtgttagattcgattctaaaggtgaagcgagtttcagcgattcgattcagcctggaaa

SEQ ID NO: 109391 - DNA, 478 bp, Arabidopsis thaliana columbia
ctcaacctcatcaaatctctttacatgaatatggttctgtaaccggacaacatctcaaaacttgttctgttttttttttttcatttcttagacagaaaaatggttgcagcattctcttacactgcctgcaccaagctttctctattacatccttctatggttgctcaaatccgaccaagaacaacacaaaaggcgttcgtggtgacaaatccggaacaagacagtactcttgaagtacaagaaacagagacactcaaagaagagcaatcaacagagaagatgaagaagcagccaacaccattgagaccagtggagaaacagctgaacgtgaagagcaagggtatgggcgattttggtggtcagtggctaagcagtgtcacacgtcacgttaggatctacgctgcttatattgatccagagacttgtgagtttgaccagtcacaaatggataaactcactttgattcttgatcctactg

SEQ ID NO: 109392 - DNA, 366 bp, Arabidopsis thaliana columbia
catgcggctatgttgaactctcagtatatgttgttgtgttcagcaccggacctatcctgtgggtgggaaagatcctggaacctgtctgggattccacggagtaccttaagtacatctttgtggcgaactgccttacgcatctgtgtgttatcgttacactacatagccttatactacataacgaggctgaaagttgacctatatatgcccttagctggtattcatggtgtattgtgaggccttcttgtttggataaagcagataatacctgtccaggacatattgctggtcaagataaatgcagagtggatgccctcaattatgctaattatgacaatagcctcaagctacatcacactagattca

SEQ ID NO: 109393 - DNA, 470 bp, Arabidopsis thaliana columbia
  unsure (1)..(470): unsure at all n locations
acacctttgaagaagttatctgaaggagattctttttttgaagttgctattaatctaaatctggagagttctgtagcagctctcaattttgttttgaaggacgaagaaactggggcgtggtatcagcacaaagggagagactttaaggttcctcttgtagacgatgttcctgataatggaaatttgatcggagctaagaaaggatttggtgcccttgggcagctttcaaacatccctctcaaacaagataagtccagtgcagagactgattctattgaagaaagaaaaggtcttcaagagttttacgaggagatgccaataagtaaacgtgttgccgatgataactcagtcagtgtcactgcaaggaaatgccctgaaacatctaagaacattgtattaaattgaaaccgatttaaccgngtgacgttactgtccactggggagtttgcaaaaacggcactaagaaatgg

SEQ ID NO: 109394 - DNA, 425 bp, Arabidopsis thaliana columbia
gttttatgtctcttaccggttcttcctcccgagttgagacccatcattcagatagaagggggtaaactaatgagttcagatattaatgaactctatagaagagttatctatcggaacaatactcttaccgatctattaacaacaagtagatctacaccgggggaattagtaatgtgtcaggaaaaattggtacaagaagccgtggatacacttcttgataatggaatccggggacaacccatgagggatggtcataataaggtttacaagtcattttcagatgtaattgaaggcaaagagggaagatttcgcgagactctgcttgggaaacgggtcgattattcggggcgctcggtgattgtcggtggaccttcactttcattacatcgttgtggattgccttgcgaaatagcaatagagctttt

SEQ ID NO: 109395 - DNA, 467 bp, Arabidopsis thaliana columbia
gcgaagtgattttgtaaggagaagaaaagggtaaaaatatttggtaacttttatatggtaagaagagaagggaagagcaaacctgggaaaatcaggggagaatttgctggagggtttactggattgtatccatgacatcactgcggctttggcttttgctaggatgactgattctgcttacagagtagacaccatttctagactcgcccaatggcgaatccacaatctttcttcctccacttaccgcaagtccgatcctttcaagatgggtctttggaattggcacttgtctgtggagaaaagcaagatgctattaaatgttaagttgtatccagaggtatcaaaccttaccagagaaaatccaccggttgctttctttgctctccgtgttggctcttctactggtgagagaaaggctctatctcatccagaagtaatagatagcggttaaaacaaactaagatttt

SEQ ID NO: 109396 - DNA, 456 bp, Arabidopsis thaliana columbia
cgaaatcacgaccgcattagagaagaaagagagagagagagcttttcttcttcttcttccgctcactagatctgctccctctcgcagtctcctgggttttggcaaattgcttttgattcttctcgggtggcagctatggtttcctccaccaaactcaaatccgttgatttctacaggaaaattccgagagatttgacggaggcatctctatcaggcgctgggttatcaattgtagctgctctctttatgatgtttttgtttggaatggagctgagtagttatttggaagttaacactaccacagctgttatagttgacaagagcagtgatggtgacttcttacgcattgatttcaacattagttttcctgctctttcctgtgaatttgcatccgtggatgtgagcgatgtttggtaacgaattggttgaatttatcaaaaacagttcgtaagtttc

SEQ ID NO: 109397 - DNA, 455 bp, Arabidopsis thaliana columbia
caaaaatcgtgtcttttgcgtgttctcgagtcgaattgtatgatttgattcttaatttttgtttgatagtaacagtctaaagaagcaatggagctttgttcttcatctccatcttcttctctccttcgcatttgttcatcttcagcaccagaaatctcattttcatcttcaatttctcagttcccatctaaaacccaatcgattctcacaaaatccagattccaaaatctccgaatttgcgcttccgtgacggcggagactcaaggtcttccacgagacagccctcaacgtctcctcaaagagctagcacagcgtaaaacagcgacaggaccgaagaaaaaggttcctcctaaacgattcatcttaaggccccccattagacgataagaaattagctgagagattcctcaatagtccacaattgtctctgaagtcgtttcctttacttagctctt

SEQ ID NO: 109398 - DNA, 380 bp, Arabidopsis thaliana columbia
gtggttgaacatgttgatcacgcttgccgttctgcacaacactgggaaatcagtactagcacacactgacacgtacgattatttccatatttactagagtatcggttgaaggaagcccaagaaaagtgggggcgttttcgggatatgggagaaacagggggtggaactttgacccgaaatgtcctttgatgaatctgcaggtgaaaggtgtttagagaaagcggtcgctgagagtccgctttccaaagctgcagagccaccctgcttaggctaactcgaagccatttagtctaagatgcttcagatgctcagccgtctcagagttaggaagaacttaggagtttttatgctttggtcagaaaaataatattttatttctg

SEQ ID NO: 109399 - DNA, 411 bp, Arabidopsis thaliana columbia
cgcaatcttcgctcttctctttgctctctctctctcaacgcggttcagatccgagtttgggagatgcaagctccctgaaaaaagccctttactctcgcttaccaactttgctccagcatggcaggatctgcaccagaaggcacacagtttgatgcacgtcagtttgaccagaaactcaatgaagtacttgagggacaagatgagttctttacatcctatgatgatgttcatgagaagcttgatgccaggggtctttaagagtaaccttcttagggggtatttatgccttataggttttatagaaatctatttcttttatatcaatcacattgagttaatttcggttctctatcttatttattgatttttttttttttagtttataatcattggctcaatttactttattct

SEQ ID NO: 109400 - DNA, 472 bp, Arabidopsis thaliana columbia
taattttctaagcaaaatatggcgggagaagatagccttgaagctcaacgaggcgacgaatatgagggagtcgagtcctctcttgaaggtgaacgagaatgacggcaagatctgctcgaaaagagatgccaaggcggcgcctcttgtgcctccttccgcggcggaggaatacggctggactgcggatggattgcctgtgagccatggtagcgtgattggcgagcctatcaggataatccaatgaatttctggactttttacctttttggtcataattgatgattctttcaacattcacttattttatatttgtcttttttttaaatatattaattgttatatattaatgatctaattttattttttagttattatttttttttaatttttttttatatttaacttttcttttattttttttataatcatcttatttttttttttttttgttttatctattcttttttttttt

SEQ ID NO: 109401 - DNA, 381 bp, Arabidopsis thaliana columbia
gtagaagaagatgaaaaatccaattccttttatttgtgttttaggtcaacattccaaagttggttctttcccaatgtaaaactcgagcatttccttccactcatgcccttagacctcgccggatattgtagctgaaggcatgcgtaacatttgcattcatgaccaagttgacgaatacgcatgtgagccttgcacattttgttatatgtgtgacttgctccatgctgccgtaaaaggtgtcacatggttttcactcagatcatcctcttgagttttctctattccaatatgatcgaaaacctggctacattggctgctcttgttgtggtaacatgtcttcttgctcattctattgatggaaagaatgtgagatctatcctt

SEQ ID NO: 109402 - DNA, 340 bp, Arabidopsis thaliana columbia
cccacgcgtccgttttcgtttttatcttttccttgattctttcttctattggctgcgagatcaacgccgagtctttcttcaggtatttcggtgatacaatggttctttgaggtctaaacagttgttcaagatcagtacgccctgattgctcaaagagatgcgctgcgggtcatgcattcaagagttttcaggggcgatcacatgggttagctggctggcttagtttgtgaggaagctggggagaatgaggcttccaagcaaagtagaagcgagaagaaaagccagatcgggtatgggatccacagattgattccggacactggagttaccagagtgacta

SEQ ID NO: 109403 - DNA, 387 bp, Arabidopsis thaliana columbia
tttacgccacgaggccgcgtccgggttccaggtcgcgcccgcgtccggggaaaaatcagaaaaatgggaaccctaggtctagcgattcacactgtgggtaatcggattcgtggaactgcccaagcccaagctcgcgttggttctcttcttcaaggaagccaccacatcgagaaacatctgtcgaggcatcggacgttgattactgtggctccgaacgcttctgtgattgctgatgtgcagagcaataaaggctcgctcattacgtatgcaagtgcgtctcgtgtatcgcagtatcctcgtgcaatgggaatgggacaggtccggagatttatcggagatgtttctcacatgcctgaaatggaagactctgacgttctgaatgcattc

SEQ ID NO: 109404 - DNA, 436 bp, Arabidopsis thaliana columbia
gtcatttcatcctaccaaaaggaaaagttctgttgatcacacatcgaagagtgatattgctacaacaaccctccaacataatgggccaaagaaagtttattccggcaaaagatgcgtgttctatacagtgggatattctatggaatgatctggtaaccatggaactgagtgacgggaaaaaagacccacctaactctccaccttcgcggcttattctctatctgaaagcaaagccacatgacccgaaggaacaattccgtgttgtcaaatgcattcccaacagcaagcaggcctttgatgtttactcagctatcgatcaagccattaacttgtatgggcagaatgctttaaagggaatggtgaaaaacaaagtgacaagaccatattccccaatttctgagagttcttgggctgaaggagcttctcaacaaatgcc

SEQ ID NO: 109405 - DNA, 461 bp, Arabidopsis thaliana columbia
ctctttcacaaaccccccaacctccaacaagaagacctctctttcataaaaccctcacacgtgtgactgattcatcaccatgagctcatccccggccgtgaaaggcctaaccgatgaagagcagaaaaccctcgaaccggttatcaaaacgtaccaccagttcgaaccagacccaaccacgtgcacttctctcataacccaacgcatccacgctccggcctccgtggtttggcctcttatccgccgcttcgacaaccccgaacgctacaaacactttgtaaaaaggtgccgtctcatctccggtgatggtgacgtcggaagcgtcagagaagtgaccgtaatctccggcctcccagcctcaaccagtaccgagcggcttgagttcgtcgatgacgaccaccgtgttctaagcttcagggtcgtcggcggagagcaccgactcaagaactacaaatcagtga

SEQ ID NO: 109406 - DNA, 408 bp, Arabidopsis thaliana columbia
attaacgttaacgttgaggcagaggaagaagaaggcggtgacggtggtagctcaaccaacgtggaggtttctcgatctggtaaccaaccggattgtgaagctatgagtttctccaatcagatggaaatcggcgttcgcaatacatattaccagtttctagagtcgaattcagattctggatcggattctatgtatgcagaacctgaattcatcgatttcttcgatcgagagtcgtacgaggtcgacacggtccgtgaggtttgtgtaagttcgaatcagagggttagtactccaggttatttcaatatttgggatcaggatgtagatttagggcttggaatcgggttaggttcaaggtcgggttcgggtcagttacctggtgattcaggtggggttggggtcgaagtt

SEQ ID NO: 109407 - DNA, 452 bp, Arabidopsis thaliana columbia
cttaaggatctctggtttctctttctctcctctgtcttatcttctccaaagttacgctttttttcaatgaaaacattttcttgattcctgatttcaaatttcacaatctggatttcgtgtttcgaattcactttgaagaaaaagtttctcaatttcgcctgaaaacccacatgggattggaactaaacactagactgacaagaagaagaagagtaatcatcatcgagtgtttattacgattatgtccttaacgaaatcttcagaatcagttttcactgaagaagaagaagaagattcctttagcggtcgatacacgttatggatcaaagaagcattagaggagcttccacacaatttcacaatcaccgacccgtttatttcgggtcacccgattgttttcgcgagcttagggtttttgaaaatgactggctattcacgaggagaagtgatcg

SEQ ID NO: 109408 - DNA, 455 bp, Arabidopsis thaliana columbia
catagttcttcctcaaattgctcatacctttgcttctctttctttctttattcaacctcttatttcttcttcagcaccaacgtgtatctgcagtaaacacatatccatcgatcgatctcctcaaaaagttattgttttcttgaaggatttttcttgttcttgatcaagcatacatatatatagatggtggaagaaggcggcgtagttgtgaatcaaggaggagatcaggaggtggtggatttgcctccggggtttcggtttcaccctactgatgaagagataataactcactacctcaaagagaaggtcttcaacatccgatttaccgcggcagcgattggtcaagccgacctcaacaagaacgagccatgggatctaccaaagattgcaaagatgggggagaaggagttttactttttctgccagagggatcggaagtatccgaccgggatgag

SEQ ID NO: 109409 - DNA, 406 bp, Arabidopsis thaliana columbia
gtatttttcatgggcggaatatgatattatggctccagtgcaaccaaaaacagagaaagcggttgctgctgcttttatttccaattgcgccgctcggaatttccgcctgcaagctcttgaagccttaatgaagacgaatgttaagattgattcttatggtggttgtcaccggaatcgggatgggagtgtggagaaggttgaagctcttaagcactacaaattcagtctagcttttgagaacaccaacgaggaggattatgtcacagagaagttcttccaatctctagtcgctggatctgtccctgtggttgttggagctccaaatatagaagaatttgcaccttctcctgactcattccttcacattaagcagatggatgatggcaaggcagttgcaaaagaaatg

SEQ ID NO: 109410 - DNA, 457 bp, Arabidopsis thaliana columbia
gtctctgcaaacaaaggaagaagaatcaagatggctctggaaatctgtgtgaaagctgctggtggtgctcctgatcatctcggcgactgtccgttcagccaacgggctcttctcacactcgaggagaagagtcttacctacaaaatccatctgattaacctctctgacaaaccccagtggttcttggacattagtcctcaagggaaaggaccagtgcttaagatcgacgacaagtgggtgactggttccgacgtcatcgttgggatactcgaggaggagtatcccgatccaccactcaagacctccgctggatttgcctcttgtggatcccacatttttgggtacctttggggacattcttggaaagccaaaacctcaatggaccgatctgaacattccccggtttgttgagctagaaactttggaaaaccatctttagaggtacgatgggcccttt

SEQ ID NO: 109411 - DNA, 447 bp, Arabidopsis thaliana columbia
ggggtttctatccagcgggtgatgatggcgattataacatggttggggaaggtccaggtgaagggtttaacataaatgttccatgggatcaaggacgatgtggagatgcagattatcttgctgcatgggaccatatcttgattcctgtggcgagggaatttaacccggatgttatttttctttcagctggatttgatgcagctattaatgatccgctagggggttgttgtgtgaccccatatggatattcagttatgttgaagaagctgatggagtttgcacaaggaaagattgtgctggcgttagagggaagggacaatttttgactcaattgcaaaggcttcacttgcatgtgtccaagttttgcttgaaaacaaacaaattcaaagaccttcggaagcatacccattcgaggcgacatggcgtgtcattcaagcggtgcgcaag

SEQ ID NO: 109412 - DNA, 437 bp, Arabidopsis thaliana columbia
gtttggcacttccctcggctaatactaatgcttatcgtcttgtcaacagtgaaggagatagattgtctggattgattgtggatgtgtttggagatatagctgtggtagcatcctctgctgcttggcttgaaaagtacaggattgaagtggagagttgcttaagatcaattgacggaattaatcatataaactggagaccttctcttgatgttcttaaagaagatggttttgacatctcaagtctgaaacagacacaatcatctactctcccacagagatcaatggtacggtgtgtggtgcccttaatcaggttgtggaaaatgggatctcatacgcaattttgctagagggacagaagacaggtgtctacacggatcagcgcgaaaaccgtcacttcatatcaaccatctctgctggaaaagagttcttgatctttg

SEQ ID NO: 109413 - DNA, 441 bp, Arabidopsis thaliana columbia
cccacccttcacttcattctctagggtttaaaaaagacaaaagctttttgtctaatgaaaaaggaaattcctcggttccactccagggtaatcatggcatctcccgcgatctcgattgtttcttattatcggcattcatgttatattagctagaatcgtgttttgtacctccgatctgattcacagattcagtatgcgaaattcattattttgaggatttgatcgtcttatcaatgatttaatctatgtgtgaatattggtgaatcacgggcaatttcgcatcacgccaaaagaattgtttctaacagatgcgaaaaagattgaatctgctttcgcaatgctattattcaaattagctgagttcttgtcttgataagatggattggttcttgatttaaaatgcatggcccaatcttaccctggctttgcccaaattaaata

SEQ ID NO: 109414 - DNA, 292 bp, Arabidopsis thaliana columbia
aagaagaagagaaacaacaagaagttgttttggcttcctctatgctctcctccgccgctggggttacatccccggctcaagccaccatggtctctccattcaccggcttgaattcatccgctgcattccctgtcacccgcatgaccaacatggacatcacttccatcgcaagcaactggggaagagttagctgcatgaaggtgtggccaccaattgaaaagaagaagtttgagactctatcttacctccctgaccttagtgacattttattggctaaagcagttgactacct

SEQ ID NO: 109415 - DNA, 228 bp, Arabidopsis thaliana columbia
ggagaagaagatgaagaaaccaattcctaaaattagggcttttggtcagcgatcgattgcttgttccttcctgaatctcagctcgattcctgtcgataatacttcggaaaatccgccggagaaagtggagaatcgcagcaagctgaacaaatcagtgctgtttaagccaaacaactttgaggagcggctaagaccatttacttctttgggtagctctaaagatccgac

SEQ ID NO: 109416 - DNA, 408 bp, Arabidopsis thaliana columbia
aaaaaacagagtagagattgataaaaatttaatgagtagctccgattctcctcagcttcacaatatcttcgtctatggtagctttcaagagcctgacatcatccatgtcatgcttaatcgtattcctgagattgtctctgcaacacttcctggctttaagagatttaggcttaaaggacgtttgtatccatgtattatcccctctgagaatggagaagttcatggcaaggtactaatgggtttgactattgatgaacttgggaatgtagattgggttgtaggatacgtatatgatgagtgtttttttggctttttataataatgccatttttttgtaattttatttgtgtttccatatttttcgtctcttcttgtattctttctttttttttttcgtatatttgtttt

SEQ ID NO: 109417 - DNA, 427 bp, Arabidopsis thaliana columbia
cggacgcgtgggcggacgcgtgggcggtcgcgtgggcggacgcgtgggcggacgcgtgggcggacgcgtggggacataaggactggtcaccaactccaggtctatcagccacatggtgatggtgagaacggacctgtcacctccattgcattctctgtgtcagggagacttcttttcgctggctatgcgagcaacaacacttgctacgtttgggataccctcttgggagaggttgtattggatttgggattacagcaggattcacacaggaatagaataagctgtttggggttgtcagcagatggaagtgccttgtgtacaggaagttgggattcaaatctaaagatatgggcgtttggaggacacaggagagtgatttgaagaagatttaaacgaagtaggagtcacgtcttcagttgttggttaa

SEQ ID NO: 109418 - DNA, 431 bp, Arabidopsis thaliana columbia
acgctagccgacttatcctggtttgagtgatacttacacgaaaattaaagccctctgcctcaacttggtattggcagggagcgagacggccattgtggttctggtttgggcggtatccttgctcttgaacaacccgcatgtcttgaggaaagctcaggaggagctggacagcaaaattggaaaggagagagttgtggaagagttagacatcaaagatttggtttacctccaagccattgtcaaggagacatttcgtctatacccaccagtccctctcgttgcttacagagctgtggtggaagatttcgacattgcattttgcaaatgtcatgtacctgcagggacacaattgatggtgagtgcatggaagattcacagggatccaaatgtttggtcgaaccccgaacagttcgagccagagagattcttga

SEQ ID NO: 109419 - DNA, 421 bp, Arabidopsis thaliana columbia
cgcagcttaagctaaaacccctcagagagaacaatgatttaaatcgagagctttgatgatttcgtcaaagtacatggaatacttttggcggcttcaggtttgccgccgaagctttacccacgcctcttcgagaaacttgcttacgatacttttgatggcggcgattacttccaaatcgaatcctgcgaggatgatcagcgacggaagcttctcctcactgccgaatctatgcctaaagattctgacgtcttccttgtcgatcacgcctggacttttcgtcttcccgatgcctataagcagcttaaggaaattcctggattggctgagaggatggcttctttgatgagtgttgatattgatgtggatgctggagaagaagaagtggcaaaagaactttctgttgatcagataattgacaatg

SEQ ID NO: 109420 - DNA, 433 bp, Arabidopsis thaliana columbia
cttttgctctaattatcttccactctctcacggtcttctctagtgttctgtcccactcagatcgagtcacccgtttacccggtcaaccccgggtcggatttcagcaatactccggttatgtcactgtcgacgacaagaaacagagagctctgttttactacttcgccgaggcagaaaccaatccatcctctaaacctctcgtcctctggctcaatggaggacctggatgttcatctttgggcgttggggcattctcagaaaacggaccatttagaccaaaaggaccaatcttggtcaagaatcagcatagctggaaccaagaggctaatatgttgtatctagagacacctgttggagttggattctcttattcaactcaaagctcccattatgagggtgttaatgataagatcactgtaagagacatccttgt

SEQ ID NO: 109421 - DNA, 418 bp, Arabidopsis thaliana columbia
  unsure (1)..(418): unsure at all n locations
caaaacttctctgaaaggtggataaatggtgtcgtcgtctctgagactcccttcactcacttcgcttctatttcccgccaccactcggtatccagccactctccggcgaaccgtatgtctacggaacagacctctttccggattcgcgacggcgccgagtggtactgcttcgccggagactaagtcgtcggaggttgaccggcttaggtcagaccgagccgttacgcctcgctcacaggactttaatgcttggtatcttgatgttatagctagtgctgaactcgcggattatggtccggntcgtggtactatggtcattcgtccttatggttacgcgatctgggaagcgattcatgattatttgaatgtgaagttcaaggagactgggcatagcaacatgtacttcccacagtttata

SEQ ID NO: 109422 - DNA, 418 bp, Arabidopsis thaliana columbia
cttcaaaagaccaaaactagtggaacccatataccgtaccatgggggcacgctcttgtgttattgccataacagaacccatcatccttctgatttgtttaccttaagccacaacttaaaccctaaacctccatatttcaaacccttttctctcctacatgtatcactgcttcacttccacttttcatcaacctcacgttcccaagccctaactatatgtatatataaataactctatatttgattcattaatttagggacaccaaatctattcaacctaaaagccttcttttcccctatattgaccaactgtttagcgaatcagaagaggaatggatgaggtttttcgttcttatacaccgcaatttctatcaagtgatcatcagcactattaccattaaaacgctggacgaccaaaa

SEQ ID NO: 109423 - DNA, 354 bp, Arabidopsis thaliana columbia
cacgcccgtccgaagttgtagtcactaaaaaaacgaaaataacacgaaaaagttattattggtccgcgctcaacaatggcatctctacgctcccctcgctttctgccggaaagggctgagaactctttcccctgcggcatcatgaagtcacttggaaagcggcccgtgtgacacatgaggaagactgttgccaagccaaagggtctcatcaggcagccgcatggtaccggatccgaccgagtcaagttacttgggtcccattctcttggcgagtcactccagctaccttagccggagagtttccctgtgagactaccggattgggacaacacgctggttctataccgcttgacc

SEQ ID NO: 109424 - DNA, 420 bp, Arabidopsis thaliana columbia
gatttatgaagaatctcgtttcaaaccttttatttttctcctcttattcttcttcgagagttccgcgatgtagtaacagacctaaaccaattctcaatcctctctacaatttacttccccagtctcaaaaccctagtaaaatcgtggatgttatctgttcaacactcaaccacagtgattattccgtcttgttacctaaccttcgcgacgaggtgaaatcgctgattcctcatttgggttatcctgaaatctcgagggttttgcttaggtttcagtctgatgcttctctagctattacgggcgtttaaatgggtttaatttgatttggggaagaggcctaatgttggtaactactgtttgttgcttcacaatcttgggtcttctaagaagtttcctttagctatgcaatttctctgtgaa

SEQ ID NO: 109425 - DNA, 419 bp, Arabidopsis thaliana columbia
agatggcttccatggatcacaatcattttctttttcctctcctcttcatcatcatcatctcttccttgcacgttttgcgtgcttcgaccacaccttcacactcacacaaactaaaatccgccactaccattagaaaaatcaaccgtagaggaccttacattggccttgtgacggtctttgagaccgaagaagatgcttttctcggcagtgttgatttcagactcgatcctacgcatcctttcctcgatctctctggaagacgttttcgtatagggaagattcatggaaagaaggttgtgtatgtcagatgtgggataggaatggtgaacgcagcagcagcaacacaacaaatgatagatgtgttcagtgtgaaagggattgtgcattttgggattgctggaaatataaacaactcgatg

SEQ ID NO: 109426 - DNA, 394 bp, Arabidopsis thaliana columbia
tttcttctccggagaatctgaaatcgaacaatttagtgtctttttctcagacattgtttacttctgagaaagcttaggtctttagactctcattacatgtcggaagtttcagctccggcttctttttcaggttgtgtattgtggagataaatctttggaaacaaagatgagggtgatgaagaacaaacacaacaagaaagcaacgtttttgcgttgttcaccgtttggtttagtatctacagttgtgggatgtgttttcatgattcatttaaccatgttatatagcagaagttatagtgtagatcttgatctttcacctcagttacttatccatcatccgattgtccgtgagctcgaacgcgttgaagaagagaatatccatatgccgccttct

SEQ ID NO: 109427 - DNA, 302 bp, Arabidopsis thaliana columbia
  unsure (1)..(302): unsure at all n locations
gaagatccagaaattgaagattgtcagattngtttcaaatcagatactaacataatgatttagtgtgattattgtttaggtgggtgttcatttaaaatgctttaaaccatcatttaaggaagtttccttattgtgatcgtatctctcatttctgttatggataaaattttttttctttctcaaccttttattttctctttctttcctctagtctcactctctttctcttttttccattttcctttcttcctttatatatcctttcttctctaatatatttatttttcttttcttatttttcc

SEQ ID NO: 109428 - DNA, 298 bp, Arabidopsis thaliana columbia
gaccacgcgtccggcgattccatcaccacaacgccggacgacaatttgttttgatctgatcgccggaagtaagagggaggagaccaataggacaggtccaaagtctaataatgtctacctcatgcttactgtcaagctttaccgccttctggtaaggagaactaattttaagttcaatggccttatattgaagaggctgtccatgagcaaacacaacaaagcttgtgaaactctatctaggcccgaagagaatatgactggcaaagaagataattttgccagttggcttaaaactata

SEQ ID NO: 109429 - DNA, 372 bp, Arabidopsis thaliana columbia
gagccacgcgtccgcgtctcctgaagcttacgcacaagatgaagattttttgaaaatctggaaggagatgagtgctgttggtgaaagaatgtgttggagaagtgccgttaaaagaaaccaaactgtggtttggcagaaaccgttgagtaatgactgttacttggagagagagcccgggacacagcctcctctctgtcgctcagatgctgatcctgatgcggttgcgggtgtttcaatggaagcttgcatcactccttactccaagcatgaccataaaaccaagggaagtgggttagctccttggccagctaggttgggtgtttttctccccgacttgcggattttggttattcaaccgacatgttttgagaa

SEQ ID NO: 109430 - DNA, 375 bp, Arabidopsis thaliana columbia
gaaaaactcaaatgcaaagccatcagaatcgtttcaggctgagcttgattctacggtcgagagtcatcccttccttctcttcagccactctccctcttcgtcgtcctcgctgctgttcctcttccgatctacttttccggtctactctccggcagaaacaacaagccgctttcagttatgagactcaactccaacttagcttcttcaatggtggaatcgaatatttcttgtaccactttcaatatcttggctccgatttataaacgcgttgatcaaaagaatcatagcactcgagagagcgatttccgcacgctttggttagctcgtaaccagaggattttagatttgttactccatcaacgctcttcagttatt

SEQ ID NO: 109431 - DNA, 394 bp, Arabidopsis thaliana columbia
aaagaaagtagaaaaaaagagaaatagatatttccccattaatcttgtaaaattttcctttgcataatcctccgatcttttagtaaaaatttgataaaaacgaacagagagatgatgactcttaacacgctaacctgatccgaaattttctttcttttttgtttttcatcacagaaaaaaagaggattgattctttgatctcaaacaaaaactcttactttggtcactgtgatttttgattccatttattcttctttttgaagcgaatctgagttttgttttcatgtccgcgaggatttcatttctgaaaaatcccgatccgtgcaatcactttattgattataagcttagatatggtactgatggttacaaatctttcaataacttggttaga

SEQ ID NO: 109432 - DNA, 404 bp, Arabidopsis thaliana columbia
gagcttttctccctccgcaatgaaaccacgcatcttccgtgtctacatctataccatgctcattgtatcgtaccttggctgagtgcccgtaactcctgcccactctgccgttatgagctcccgacagatgataaagattacgaggagggaaagcggaatgtgctggatgtgagcgaggatagctcctcctctgatgatggtacagaatcgggggaagaggaatatgtagagagaggtgagagcgagtctggtgtgagcagagtcagcagaggaagatggctgtttctggctgctgcaccagttgtgagtctggtgggcgttgggttggcaatgtggctaagcagcccacacaggaggggtatagcaatctctcatagccaaagggtgaaacagaccagaagatg

SEQ ID NO: 109433 - DNA, 165 bp, Arabidopsis thaliana columbia
cttacaacaattcaatgggagacccatttgttttagttgttactggtaccaacaaagggatggtttttgatgatagaaggcagctatctaacaatgggatttactgtggttttaactgtgagagatgaatacaaggatattgctggtgatcaaaagctccagact

SEQ ID NO: 109434 - DNA, 436 bp, Arabidopsis thaliana columbia
atttcaccaggagcaagagaaagatgagcgagacgagaccagtgccgaggagagagagtccatggggtttaccggaaggtcaccgtgagcccaaagctcaccgctgcaacgatcgtgttgaagacgttatccaggcgttattcgagggaaacccattcaagacagttccaggacctttcaaactcttctaccgatgtatgcgctctaagccaggagaggagccaacagagccattcaaatacctcgacctggaacctccaaagagagaagttaaacttgaagaagcaaagcttgagtaaagtgatattcactcccttttttattcctgcatactttttagctgagcgtgtaagcgccatcactgtgattttaagtttaccttcaatatgtggtaacaacatttttattttcttttaataaaattgatactcggagt

SEQ ID NO: 109435 - DNA, 421 bp, Arabidopsis thaliana columbia
gcgaaagaaggccgatcagagccagcaatggctattatcaaaccgacaagcatcgctgcttcatagcacgaagaagaaaggaccgactcggataagcataaccaacatcgtcatttacactttggctgtgcttttgcttgtctttgttctcttctctgcttacagacgttggactcacaggttcctcactttctctttatcaaattgtgattttttcttttattccaaaggttaacatctgttagttttttggttgtgaatatttcttcagatctgagatcccaacgcacaatggtagatcagttcttgaggatgcaaccttccctggaatgaagaatgttgatcttccccggtttggtgtgagttttaatctcacatatgtttttttttcaggttggggtttccttttctttggttccta

SEQ ID NO: 109436 - DNA, 319 bp, Arabidopsis thaliana columbia
cccactcgttcggacaaacacctctgtgtttcactcccgccctttttcgaattcttctgttagggtttctttttctttctgagatggcggagtcgcaggccaagagtcccggaggctgtggaagccatgagagtggtggagatcaaagtcccaggtcgttacatgttcgtgagcaagataggtttcttccgattgctaacataagccgtatcatgaaaagaggtcttcctgctaatgggaaaatcgctaaagatgctaaggagattgtgcaggaatgtgtctctgaattcatcaatttcgtcaccagcgaagcgagtga

SEQ ID NO: 109437 - DNA, 422 bp, Arabidopsis thaliana columbia
aaagatttgtctatatttctgctgcggatttcggattattcaactacttgttgagaggatactatgagggaaagcgagctgctgagaccgagctgctcacaagatttgcatatggaggtataatcttgcgacctggttttatatatggaactcgcagtgttgggagcatgaagatcccgttaggagtatttggttcacccatggagatggttcttcaacaagcaaaacctctgaaccagctttcattagtcggacctttgttcacaccttcggtgaatgttgaatcggttgcaaaagtcgcagttagagcagccacagatccagtgttccctcccgggattgtggatgtccatggaatacaacgttacagccaacataaatcgagataagtccgttttgaaaagcttaagtatgctcaatgt

SEQ ID NO: 109438 - DNA, 415 bp, Arabidopsis thaliana columbia
aatatggctagaggggtggaggatgattatcatcatgatgaagctcgtgctgaagaatctttcattactgcgcatccgtcacttgacgagtcagccatacatgttctttgtggtttgggggacggtgatcacgaggaacctgtttacgattcgagtcctccctcaggcagtagattcccatcattttcttccgaatcgtctgattacaaaccagatctacctgaaaagaatggggaagaaatagaagaaaatgaagagaaagaacgtgaagtttattctgaaagtataggtcctgaggaaattcattctacttctaatgagactgaaacaaggacaagcgaagtaggagagaatagcatgcatgttacaggagaggcaagccttgttatgagggagcattcgacaccactggaag

SEQ ID NO: 109439 - DNA, 310 bp, Arabidopsis thaliana columbia
gggagctgatattgaagtggaagacgagagagggttaacggcgttggaactagcgagggagattctgaagacgacgccgaaggggaatccgatgcagttcgggaggagaattgggttagagaaagtgatcaatgtcctggaaggacaagtgttcgagtacgccgaggtggatgagatcgtagagaaacgagggaaaggcaaagacgttgaatatctggtcagatggaaggacggtggaaattgcgagtgggtgaaaggtgtacacgtggcggaagatgtggctaaggactacgaggatgggctggagtac

SEQ ID NO: 109440 - DNA, 286 bp, Arabidopsis thaliana columbia
gttagactatcagaaattatcaagagattctttcataaatttggatcgatgggtttgggaaacatttattgaagaccaatggaagtcttctctataagtatacctatatacctcgaatataaaggggtgtccagaaaagggagaaggggtttaaaaagtctaaagttcctgttttatgggataaagctcatgatcgtaatgctaagcggtttttgaatttgattggggaattggaggggttatgggtgaaactggcgcagtattctatttactggtgctgatgttt

SEQ ID NO: 109441 - DNA, 421 bp, Arabidopsis thaliana columbia
gtgattatggacaagttgatgaccatgtcgaatacattgcggataataatgacaagacaattgtcgccggcaatgggaccgatgactctgccgccactgatcttgtggatggagaggaacaaaagaagaaggaaccttttgcagtgcctactgctggagctttctatatgcatgatgacagatttcaggaattggatgccgcctctaataggcgaatgcgtggtggtaggaggctctggcaatccagagatgaaagaaagtggggacatgacaaattcgaggaaatgaatacacagaaacagcaatatgataggaggacttcgagaggccgaggcagaggtcgtggtcagggtaggggtcaggaccgtggacagtctcgggggaacaattctaaagaatttactggcaatggacaccaaaa

SEQ ID NO: 109442 - DNA, 399 bp, Arabidopsis thaliana columbia
aagatctggtcgtcgctcacaggagaaacgtaatggaaatcaaagagaccaagcaagaaccagcagcagcagctgagcaaaagaccgttccgttgatcgaagatgagatcgagaggagcaaagtcgggatcatgagaaactatgtgttgcagaggtgactcacatactaaggatgaggataggctgatgatccagaggtaaatgtgagcgcgggaccgtggacattgcaaaggctctaacgatgtttctaaattacctgacttggaagagaagcatgctcccaaaggggcacataccagaagcagagattgcaaatgatctatcgcataacaagatgtgtatgcaaggtcatgacaagatgggtcgacctatcgttgttgccattgtgaacagacataa

SEQ ID NO: 109443 - DNA, 412 bp, Arabidopsis thaliana columbia
tcgagatgaagtagcagggacaacatgatgaagaacaaacagaccaagcaagacccaacaacaaaagatgtccagacgaccatacctctgataccatatgatgtgcgagaggagcaggcaaccacatcacacacgctgtcatctaccgacaagacggcagtgtctgggctcagagctcagctttccctcagttgaagcctgcagagatagcacgaatcaacaaagactgtgaagaagccggacatcttgcaccagcctggctatagattgatgctgagaagtacatacatgcccaaggcgaggatggagcactgattctagggtaacaagaacctggtggagtgacttatcaggagactactcaagctctaggctttggtatctatgatgaaccgatgaccggagggcaatg

SEQ ID NO: 109444 - DNA, 383 bp, Arabidopsis thaliana columbia
ggacgaccgacgcggccgaccattgctacttctgcttctacttctctccaagcacgttctaatcaactggtgattggggctaaacgagttaaaagctttagctatggaagcagaaacaatctttcttttaatcttcgccagcttcctacccgcttgactgtttactgcgctgcaaaacctgagacagtggacacggtgtgtgcagctgtcagaaagcaactctcactcaaagaggctgacgaaattaccgctgccaccaaatttgctgcactaggtgctgattcccttgatacagtggagatagttatggtattagaggaagagatagggataaggattgcgtcaaacatagcacaaattatacccacagctgagcaagcagc

SEQ ID NO: 109445 - DNA, 414 bp, Arabidopsis thaliana columbia
cagcaaaggctttggttaccgagctcaagaaattgtctaaggaggttgaagacagtgaacttgcagatgttgcagctgatagtgcggttaacaacgactaaattggaaatatgattgctgaagcaatgagcaaagtggtcaagaaaggtgtggtgacccttgaggaggataaaagagcagggaacagcctttaactacaaaagagaatgcttttagaccgtgattatataattcattacttagggacgtacttcgagagactggactggtacctcaagtaaatctatctatggatcgatgacaagagactaaaactttatcaagaaacatacaggaccaggtattatgtctatggctaacgctggtgcgaacacgaatggatctcagttttttatttgtactgagaagactttg

SEQ ID NO: 109446 - DNA, 412 bp, Arabidopsis thaliana columbia
gaaattatacactccactagtagtggactagttaattttatcagcatctatctactcgagagaagaaaatggcagatgaagtagtagtgatctctaagagcattgttcgaccagagagctacaacgaggaatcggatcgggttaagatccatctcactccatgggatctcttctttcttcgatccgaatacccacaaagaggtcttctctttcctcaacccgacccggaaacccatataatctctcagttgaaatcatctctctctgtcgctttgaagatcttctacccattcgctggtcgtcttgtcaaggtctataactaatattcttgaacggcgtcgtattacgtcgattgtgatggctcaggtgttaaattcatccacgcttagttaaatccgtttcggatagtgat

SEQ ID NO: 109447 - DNA, 422 bp, Arabidopsis thaliana columbia
gtcgttgtaagctgctaacgtttgttgatcttagccgtaatgagctctcaggtgatattcctaatgaactcacaggtatgaagatcttgaattacttgaatctttcaagaaaccatctcgttggttccatacctgtgacgatagcatcaatgcagagtttgacatcggttgatttctcttacaacaatctctccggtttagttcccagcactggacagtttagttacttcaattacacatcgtttgtgggtaactctcatctttgtggtccgtatttgggtccttgcggcaaaggaactcaccagtctcatgtcaaacctttatctgctactacgaaactgttactcgtccttggattgctcttttgttcgatggtgtttgctatagtggccataatcaaagctcggtccttgcgaaatgcg

SEQ ID NO: 109448 - DNA, 275 bp, Arabidopsis thaliana columbia
gccacgcgggcggtagacttagattgcgagctgccgctctagaggattcatgctgacgtacgcgagcatgcgacatcgtcactcaaatatagcgcgacgtaaatacagactagctggccggcgatgaacaacaccatagacgtggcaaaaccctggggtcgcccaactgaatcgctacgtaactcatccagcttatgccagttggtggaggacccaacaggccaggaccgatcgacgttgcgaacagttgtacaacctgaataggctaaagggac

SEQ ID NO: 109449 - DNA, 421 bp, Arabidopsis thaliana columbia
cggacgcgtgggtgggattcaagtaagagttttcgatgaagacccgggtccatttcagcatgtgatggatcagatttcatcttgtactcaaaaagagaaacttctacctgaagtagacacactagtggagagatctcgccatgttaatacccaaacacaaagccgtgcttgtcacatctttgaacgcgggttacgcggagaacttaaagagtatgtattgggaatatccgacatcaactggagaaatcatcggtgttcatcagccgagccaagaaggttatcagcagaccgaaaaaaagatgcataatggcaaagctcttgcggaaatgtatcttttgagtttgacagataatcttgtgacaagtgcttggtctacatttggatatgtagctcaaggtcttggaggtttaaagccttggat

SEQ ID NO: 109450 - DNA, 423 bp, Arabidopsis thaliana columbia
cttctcttccacaacgaagtttggttcatcaccggcgaatcctttctccgacgtcataatgccgtttaagacggtgatagaagtggagcctccgagtctgttacggtacttgatcggatcggcggtgatgatgatcggtgttgtattaccggttggttacatgatgtttcgcaacaaacgcgtccccttctcatcttcgtactctaaacagacgtggggaatccatggttgatagatgatcaaaaattatagttgctcctcttcgttaaagcttgtttaggctaaaaattggaaggaacaaagttttgatatagggggccagaggctgtggttgatttcaacactaaattgagaaggatgatgacatattgatgatttggacgactgtaaatatatgggggaatttttgtttttacatggctt

SEQ ID NO: 109451 - DNA, 426 bp, Arabidopsis thaliana columbia
cagaccatccatggtgtggttgttaccagaaccttgactcttgtttatccttctacctttacgtccagacacaaagctctgaaccagatgacaagtagcagtaacagcggcttgcgacggttcctgttcactccgcctcagcggctaagccaaggtatctgttactggggagcagagctaagcaacaatgtgtcatggacttacaaaacgaaaatggttgttcgatccaaggccggagcagtgcctctgatgaagcatggcgaccggtttctctcctctctctcgtctccagccttagctggtgatccgtcagcgataaaccgacacattaagaagtttgtggctgcttcacccaaatcagttgctctcaatgtcctctctcatctcctctctgatcaaacttcccatcctcatctctccttcttt

SEQ ID NO: 109452 - DNA, 257 bp, Arabidopsis thaliana columbia
  unsure (1)..(257): unsure at all n locations
ctggatttgagggtgacaacatgattgagaggtccaccaaccttgactggtacaagggaccaactctgcttgaggctctngaccagatcaactagagccaagaggacaagatgactggcacagagagaggaagcattagagcaactgtgcttatcgagaccctgccggctgtcttgcagatgaatgagatactctatgaactacgtgatcactcagtcggnttaaactgtggaagatgggattatatctacagctat

SEQ ID NO: 109453 - DNA, 335 bp, Arabidopsis thaliana columbia
gaaagggtcttgccagtttagggcatccttgtgggtgagagagcgattgagagatttcaaaaggaggaagaggaagatacgagtgtgagagagatttagagggagagaagaaagagagattctttttgagtgtgttagggtttcatttcctctgcagatctacatttatctcttctcatggaacggaagcttgtggttttgggaatcccgtgggatattgattccgatgggcttaaggattacatgtcaaaatttggagacttggaggattgtattgtcatgaaggatcgatcaactggaagatctcgtggatttggatatgtcacttttgcttt

SEQ ID NO: 109454 - DNA, 301 bp, Arabidopsis thaliana columbia
gttggaggctccgagttatctggtgtcaagggacttaccatcttcatgtgaggaagagagcaagtggatatacaatgcacactgtgtgcttcagctctccctaaggaagcgtttgttggatgatactgatgtagaaggaagttccgctaagaaaatgttacgggttgatcatggaagcagaggtgaatctgacaagattacagatagtcttcagcttgctaaaacctatcagagctctaaccagagtcaacaaggtggtggtggtgatcaacagagttcaccagttactcggcttgaccaa

SEQ ID NO: 109455 - DNA, 411 bp, Arabidopsis thaliana columbia
aaatgggtcaaggtaaggtaagagcggtaaagaacgataaaatgaaagttgtcaaggaaaaaaagccagctgagatagtgtctcctttgttttctgcaaaatcctttgaggagcttggcctcccggattccttgttagacagtttggaaagagaaggtttctctgtcccaacagatgtccaatcagcagctgtcccggcaataatcaaaggtcacgatgcagtgattcagtcttacacaggatctggcaaaacattagcttatctgcttccaatattgtccgaaattggtcctctagcagaaaaatctagaagttcgcacagtgaaaatgataagaagactgagattcaggcaatgatcgtggctccatcaagagaactccgtatgcagatagtaagagaggtagagaaac

SEQ ID NO: 109456 - DNA, 311 bp, Arabidopsis thaliana columbia
cttggattctttgattcgctgcagcctctattgatggaaagtctgtttgctgagggatttagtctaagtttggaagacttatccatgtctagggcagacatggatgtaattcacaacctaataatccgagagatttcacctatggtgtctcgcttgagattatcatatagagatgaattgcagctagagaacagcatccacaaagtgaaggaagtggctgctaactttatgctgaagtcatattccattcggaacttgattgatatcaagagtaactcagcaatcaccaagcttgtgcagcagacaggctt

SEQ ID NO: 109457 - DNA, 353 bp, Arabidopsis thaliana columbia
  unsure (1)..(353): unsure at all n locations
aaaaaagcttcctttttgggacgaagtttcttagagaatttgtgattccgattcttagggttttcaccaagcgttccttcgcgacgagctctcaatttttgagtctcgttggcggcgcaatcatcatagactttgggggatcgcttgtaatgagacgaatttcaaagtttggtatcttttacttgcctgaattgaccaattcgacttttatatagagacgtctattagggttttgtgttgctaaggaggtgggattattgtgtactagagggttcttttagcttctangaacatgtctggtggaactccagttggtggtggtggtaacatagggcaaagacatagccaaggtt

SEQ ID NO: 109458 - DNA, 324 bp, Arabidopsis thaliana columbia
cggacgcgtgggcgagattgtcgtgcattctaaggctacactgaaaacacgtctcctctttcacttcattgttgacattatctctgttctccccattcctcaggtggtggttctcactctcataccactgtctgcgtcgctggtgtcagagagaatactgaaatggattatacttagtcaatatgtaccaagaatcattcgtatgtatccgctttataaagaagtgacaagagcctttggtacggtagcagaatcaaagtgggctggagctgctttaaacttattcctttacatgctgcacagttatgtgtttggggctttttg

SEQ ID NO: 109459 - DNA, 327 bp, Arabidopsis thaliana columbia
  unsure (1)..(327): unsure at all n locations
gcgtnnccggcgtcctgggtcggattgtcggaacggagcnaatctcgtgttcgctcgatcaggattcggaggcgtgtgacacgagcgcgggattactggtctgacggcgctaanngcccgggcttttttgatacccgcttgggtggagacccgtcgctttgccgtgaatctgtngtgtctgctagctacgccgcccttaacgagcgtggccttcggcatttcagctgtgcatcctgggctgtctggccctgtgtggctttccccaaattcgacccgttcttgtgaacaacggactcaaggaagttctgtacatgggtgttgcgagtc

SEQ ID NO: 109460 - DNA, 144 bp, Arabidopsis thaliana columbia
ctaagattgatcgtagaagcccgaggcatgttgtatcgctcagcagagtataaaacaggttgagatgcatgggaagagtcatccggcgataaactcaactcaagttcttgagctatcatggactggagttcaaatgataacaat

SEQ ID NO: 109461 - DNA, 206 bp, Arabidopsis thaliana columbia
gtaaaactggtggtcttggtgatgttctcggtggtctacctccagctcttgctgctagaggccaccgtgtgatgacaatttgtcctcggtatgaccaatataaagatgcttgggacacttgtgttgtggttcagatcaaagttggggataaagttgagaatgttcgtttcttccattgctacaaacgaggagttgatcgtgtcttt

SEQ ID NO: 109462 - DNA, 350 bp, Arabidopsis thaliana columbia
  unsure (1)..(350): unsure at all n locations
ctttagacactcgccgtctccattttctctctctccgtagaaaaccaatcccattcgtcaaatctccggtggtctccggcgcagcttccgggtcgggtcaatactttgtggatcttcgtatcggacaaccgcctcaatcgttacttctgatcgccgacacaggaagcgatctcgtttgggttaaatgttcagcttgccggaactgttctcatcattctccggccaccgtcttcttccctcgccactcctcaacattctctcctcgccattgctacgacccggnttgtcgttagtacctaaacccgatcgagctccgatatgaaccatacccgatccatccacggtcatac

SEQ ID NO: 109463 - DNA, 153 bp, Arabidopsis thaliana columbia
caagaacgaaagttggggatatgtgataaaagttccttttttgaagtacttactaattgagagagttaagatgtcctgagttgtgtctgaataccccagagtttgttgaggcaaatatcgctgaagtttcatctataacctattgagaagttt

SEQ ID NO: 109464 - DNA, 126 bp, Arabidopsis thaliana columbia
cggacgcgtgggatgcttgggggctcgtttagagaaacaggcttccacggaagtgaccatttgggctagattgacccatgcaaatgttataaagtgtgttggagcgtgcaacgatacgtctggata

SEQ ID NO: 109465 - DNA, 234 bp, Arabidopsis thaliana columbia
  unsure (1)..(234): unsure at all n locations
gcgtccggagggctcttgaggtgatctcanntgggtagatgggctantgtttgtggagccttttggggttgcatttaacccgctgaaggttcattcataaaggtgggtccccgtgtggacccttcaaagatactcagtcttggttcaaagctcggtttcacaaatacttttctcgtaaggcggttttggactatcttaggcaaacccaaactctattccatgctcagagcattt

SEQ ID NO: 109466 - DNA, 453 bp, Arabidopsis thaliana columbia
actgactatgaaagcggccagttgcacccaaaggatttgaaggacgctctgtcaaaagcgttgaataagatactgcaacctgttcgtgatcatttcaaaaccaacagccgcgccaagaatctgctcaaacaggtcaagggttacaaagtcaccagagtcataccaacagcttcatctacaaaggaggaggatctttccatcaacacatcagcatcttcttcggccgccggattacagatgagcgaggaggccgagatgaaatacaagattgtgaggagtattggtgaggaatgcatacaagaggatgagctgaagaatcttctagccaagaagcctgctcctatctggtacgatggttttgaaccatcaggaaggatgcacatcgcccagggagttatgaagggcaacaatgtgaacaaattgactttagctggttgtcaagtgaaaatttgg

SEQ ID NO: 109467 - DNA, 451 bp, Arabidopsis thaliana columbia
ctcatactcgtcgatgacatctccaagctcttctccactcacatccctaccgacgtcgttttagccgcgcctgagtactgcaacgcaaacttcacgacttactttactccgacgttttggtcaaacccttctctctccatcacactatccctcaaccgccgtgctacaccgtgttacttcaacaccggagtgatggtcatcgagttaaagaaatggcgagaaggagattacacgaggaagatcatagagtggatggagttacaaaaacggataagaatctacgagttaggctctttaccaccgtttttacttgtcttcgccggaaacatagctccggtagatcaccggtggaaccaacacggtttaggaggagataattttagaggactgtgtcgagatttgcatccaggtccagtgagtttgttgcattggagtgggaaagggaagccat

SEQ ID NO: 109468 - DNA, 395 bp, Arabidopsis thaliana columbia
cttttgctcagtgacgtctcaagcaatgatttgtgtggaacaatcccaacaaacggaccctttgctcacattcctttacagaagtaagtttcttctttcacttagccaacaaagcttcttcataacgtttcctctgcattttgcattttttgtctcttgtaagtagtctttgatacagacatcaattgaatcatatgtttcgtataataaactgataaagttgcatatgagcatttgtacctaataacacaaaacaatggtgcagctttgagaacaacccgagattggagggaccggaattactcggtcttgcaagctacgacactaactgcacctgaaacaactggcaaaacctgaaaatgaagaattggggggtgaccttggaagaacccttc

SEQ ID NO: 109469 - DNA, 250 bp, Arabidopsis thaliana columbia
ccgacaccgaatgtttgagtttttgttgtggttgtgagcagaaagttgagatcaaggtggatataaactgtggaaaatgcaacagcgcaatcatggaagcagtcacagagatagaaggtaatgaacgaaaaaagactcaagaaatatgtgctcttaagtcttaacatatcatcttgaacatgagatttggtgcaggtgtgaatcatatttcattagatgaaggaaatagtatacttaccgtggtggtgac

SEQ ID NO: 109470 - DNA, 157 bp, Arabidopsis thaliana columbia
tcgatccgtcgaccacgcgtcgtagacacacactattaacaaaagatcgatttgggatcaatcgaggaagagatgacggggcgatgatagggaagccaggaagcattaggttccaacttaagtgagcccatgtgaaccgcctccaatgacccgttct

SEQ ID NO: 109471 - DNA, 125 bp, Arabidopsis thaliana columbia
gtgtgagcatgcctttcttattcccgaaagacggcgaactataccggagcttttttaagccagtggaaacgtgtctcaaaatcctaaaatatttcttcatccttatcaatatattgacatgttaa

SEQ ID NO: 109472 - DNA, 461 bp, Arabidopsis thaliana columbia
attttatcggcgagctccactgtgagagctgccttagatacacaacctagacttccctacaaccctaatgcgccgcgaaaagttaagaaaatccctaacggtaattcattcttaccgccgccgtcacctgcaccgtctccaggaatcagcatctccgtcgccgatttgctcaagcgtccttcaagtaaagagataactgttgacgttgatgatacttatatgggatatgagacatggtctccaagtccaccaaagttggagaaaccaagatcagtcttcaatcctgcttctttagcctttataggcgattccatttatgagctatatgctcgtaggcattttcttttccctccgcttagtattgaagattataacgatcgtgttagagctgtggtgcgctgtgaagctcagtatgctttgctgaataaacttgttgatgatgactttctaacaaaggaagt

SEQ ID NO: 109473 - DNA, 449 bp, Arabidopsis thaliana columbia
cctgaatacacttttctcatatatgcatctcccgtaggagattaccataaggtaagctcaggcttgaacctcaaagttgatcataagtatcaccgagcccattcaggtggaacggggggtgtcaagagctgcacaaactattctccagttgtgaaatcgttactcgaagcaaagtcagcgggtttctctgatgtcctgttcctggatgcagcaactggtagaaacatcgaagagcttactgcttgtaacatcttcattgtcaagggaaacattgtatccaccccaccaacttcaggaaccattttacctggagtcacgaggaaaagcataagtgagctggctcatgatattggctaccaggtcgaagaacgcgatgtatttgtggatgagctactagaggcatgagaagttttctgtacagggactgcagtggtcgttaatgtctgttg

SEQ ID NO: 109474 - DNA, 229 bp, Arabidopsis thaliana columbia
actgaatacacttttctcatatatgcatctttttttggagattaccataaggtaagctcaggcttgaacctcaaagttgatcagtgagtatcaccgagcccattcaggtggaacggtgggcgttaagagctgcacaaactattccctagttgtgatattgttactcttagcaaagttcagcgcttttcttatgatgtaccctgctattttgaatcttcttacttcggta

SEQ ID NO: 109475 - DNA, 228 bp, Arabidopsis thaliana columbia
cactgaggtaagttgttgagatgcaccacgagtctcttttgaggcacttccgtgacaagtggattaatgtaagaatgtgctgtaaggatcttagagaggatacgttgctttaactccaagatgatccaactaagggtgccgccaacttcaccttccaggtcattattatgaaacacccttggcagattggtaaaggttaccccccagttcttgattggcacaaccttt

SEQ ID NO: 109476 - DNA, 357 bp, Arabidopsis thaliana columbia
cgttgagaaaaaaaaaaaagtaagaacgagagagttaaagccatgtctgcgaaaacaatcctatcatcagtagttttggtggttctcgtcgccgcatcagcagcggctaatatcggattcgatgagtcaaacccgatccgaatggtctccgatggtctccgggaggtagaagaatctgtttcccagatcttaggtcattctcgtcacgttctttctttcgctcgcttcacttaccgatatggttaaaagtatcagaacgtgttcggagttgttgctcctattcttctttcttatggtgttttctttttttgtcatatcctccatttttaaatatttttttttttttttttatttttt

SEQ ID NO: 109477 - DNA, 443 bp, Arabidopsis thaliana columbia
  unsure (1)..(443): unsure at all n locations
aaagcatctctatttttgttttcttcattcacaccaaaacaaganatcaaatttggtttgattgattgatacaaaagacttcttcagatatttacttcttcatttggagaagccgattaactgaaatgtcgatctccggcgcttgtgatgaagctgggactccacttctcgctgtcaccgtcgactacaggaacaaacccgccgtcaaatcttcctccggtggctggagatccgccggattcatcatcggtggtgaggttgctgagcgatttgcttactatgggatatcgtcgaatctgataacgtatttgaccggaccactgggacaatcgacggcggctgcggcggctaacgtgaacgcttggtctggaacggcgtcgttgcttcctctccttggtgcttttgtcgctgactcgtttctaggtcggttccggacaattctt

SEQ ID NO: 109478 - DNA, 418 bp, Arabidopsis thaliana columbia
cactttttgtttttgttaacactcacgtgaaagcttcgttcttcttcaaaccttttgaacaatttctccgatgccggtaaatcaccggtttacgtttagctaccggttactcttcctcatcttccttttgagtttcgaaacggcacagcgtttggtcaccggtgacccaaacgacgaagcatgcttgacgaatctccgtcagagtttagaagatccagctaataatctccgtaactggacaaaatccttcttcataaatccttgctccggcttctcttcttatcttcatggagtcatttgcaacaatggcagaatttacaaactctccttaacaaatctctctctccgtggctcaatctcttcgtttctctctaattgcacaaatctccaatccctagatctatcttccaaccagatc

SEQ ID NO: 109479 - DNA, 204 bp, Arabidopsis thaliana columbia
agcgaagaagttgttaaagaaagcgatgcacccatattctctgtgaaacctcaagttgctaagaaggctgccacagacttaaagtcgtagctttcaatgaataagatgctgccttctgacggaaatggcatccagctgcactattgacaaagctgggacttcacttatcgctgtcaccggccgctgcctaatacacctgccgct

SEQ ID NO: 109480 - DNA, 384 bp, Arabidopsis thaliana columbia
gagagaatcacgagggagaaggtgaatgcaacaatcgtcaacggtgcaattctgtcgaccgatgttgtcatgacagcccttgatctggatacaagtggctactatttcgagcagaggatgactatctgcacttacagtgcctgctgcgaggacgttactaatactgctctgaagaaaggatgagatcatcctgctgatgttgccacccaatacaagtacaagagtgctttgtttgatgtttaatttttcactgattctagtgttttttcttcggttacactttccttgttcttttcttttattatatgttattgtctcttattttgctcttatttatttcttctcctatcttttatatgcaattttttcaacttttctttatat

SEQ ID NO: 109481 - DNA, 372 bp, Arabidopsis thaliana columbia
ggaagaaagtgtaaagacggagccttttacggcgaatggtaggaagacagagccaccatgaccggagctgtagccactcgagactcggtggaacccagcgaagacatactcatatgcgtcgatgttgatgcggaatcgacggtggagatgaagaccactggaactaacggtaagcctttgaacaggctcgagtgcctcaagctagccattactcgctttatccacgacaagctctccagaaattccgatcatcgctttgctttcgctaccctctcccagtcagccgcttggcttaaaaaggaattctccaacgatgctaaatctgctgctgcttctttaagagaaatgtcagctactagattctttggtcca

SEQ ID NO: 109482 - DNA, 295 bp, Arabidopsis thaliana columbia
aaattatataccctctatctaaagaagaagcagagaaatgggcagcaaagttgtacaccagtggagagagctcaacagaagctggaagcattctggattctcatttgaaaaccattctggagaatgttcggttagtttatctcttggaaagagacgtaggtggttgggatgctactaccaattgggaagacatattatctcttggagagcaacagagattaggcatggcacgtttattctttcacaggccgaagtttggagtccttgatgaatgcacaaatgcgacgagtgttga

SEQ ID NO: 109483 - DNA, 240 bp, Arabidopsis thaliana columbia
cacaaagtctcatttctcgttaatttccattttcgttatctctctctctcgccgatcaaaccctaggtgtatcaattcgttcagattcccggcggttggtctcactgtcatgtaggtttgattcatcttctcttctggatcttgagtgactaagagagatgagatcttgtgtttttttagagagatattttctttttttggttttccttttcttttttgtagactatttgtttttttttt

SEQ ID NO: 109484 - DNA, 244 bp, Arabidopsis thaliana columbia
tcttgaactggatccagtcaattaccaggaagaatgacttcaagttagaaagctttgcatcattggtggatggaaaggggatatggttcttgcttgactactattttcgtcaagaagtttgctgtcgatgtctacacagagaggatcctggtggtcatgaaggccctcaatcagtaatgtccaataccgattaccatgatgcagttcaaaattttattctgtcgtataagttgtcagcactttt

SEQ ID NO: 109485 - DNA, 229 bp, Arabidopsis thaliana columbia
gcctccaggtacggatctcgcaattccagccacgccgtccgatggaaattacggagccacccactttcatggggtttacactctaagttttttaaaccgcaaaggcacaacgaatgcttgaaataggggggggcccttattaccccttctcactatttttaaagcacttaacccgcactttaaccggggcagacaccttcattctttattggtcgctcgctggtctccc

SEQ ID NO: 109486 - DNA, 215 bp, Arabidopsis thaliana columbia
gaatttggggccttctattcccaaaaaattctttttaaccaaagggttcctgccttgattgcggctcaaaaaccaccccctggaaaccctatttttcccggggggggggttcccccggggaacccccctttaagggacctttgcttttgctggggggggcccaaaaaccacaccggtttctttgtggggccgggatggcccccctttttaaatat

SEQ ID NO: 109487 - DNA, 300 bp, Arabidopsis thaliana columbia
  unsure (1)..(300): unsure at all n locations
ctctattcgtcgtcgacctattttcctcagccatggccgtcgggaaaaacaagagaatctctaagggtaggaagggaggaaagaagaaggctgttnatcctttctccaagaaagatcggtatgatgttaaggctccttcaatcttcactcacacgactgttgtatagacacttgtttccagaacttagtgttccatatttgcctcagaaggcttgaaacacagagttcttcgatttttctattttcatgttttctactcctatacattggtttactcttttcttgtattgtcttctcttt

SEQ ID NO: 109488 - DNA, 289 bp, Arabidopsis thaliana columbia
cacaaatcaaggagaaaacttccacaaattgtctctctttctttcctacacaccaatttgttttgtgattctttcgattgcattcttctttttcgaattcccgatcactggattttcccgtttaaccggaaaatccagtggattagattttacccagtgttatctttttggattggattcgatgactgttacggaggacgaaaaaccggttcttgagctgctggtgagagttgtagacgacgatgagaaagggccttatgtgaaattgagtgaggtttttgagaacggt

SEQ ID NO: 109489 - DNA, 199 bp, Arabidopsis thaliana columbia
acttttgatgggtcttggacgcaaagcaaaccaggtgtacatcattgactatgggcttgccaagaagtatagagatcttcaaacacacaagcatattccatacagggaaaacaagaaccttactggaacagctcgatatgcaagggttaacacccatcttggaattgagcaaagtagaaaggatgatctggaatctcta

SEQ ID NO: 109490 - DNA, 164 bp, Arabidopsis thaliana columbia
gtatcgcatctgtcaagtttgtgtatgacaagaacaaccagttggtactaggagaagagcatggaaagcatactttgcttggatacgaagagttcgagttggactatccgagtgaatacatcacagcggtagagggttattatgataaagtgtttggtagtgaa

SEQ ID NO: 109491 - DNA, 323 bp, Arabidopsis thaliana columbia
cttgtagagatttggtagatattaatactgttgagagccagtctcaggctgccggaaaaagcaagagcaatgatctcatgtcaatggaaatcgatgaaggtgtcttaacatctgtcactatatcttccgagccattgtattgtggcctaagtgttctttccaatgttattgtggaaacccctacagaaatctcacgaaagggctcaggagatcaaggtgctacaatgcctaaatttagttcaaagaatcaagatggagtgatgcaagctgcaaacagaaccagaaattcttgccttggacctgaaagtgcacctttcaggttc

SEQ ID NO: 109492 - DNA, 415 bp, Arabidopsis thaliana columbia
cgctttgtcgtcggaggcggcttcgatcgctcctgagatccgaagaaatgatgataacgtttctctaactgtcatcaaagctaaaatcgcttgtcatccttcgtatcctcgcttacttcaagcttacatcgattgccaaaaggtcggagcaccaccggagatagcgtgtttactagaggagattcaacgggagagtgatgtttataagcaagaggttgttccttcttcttgctttggagctgatcctgagcttgatgaatttatggaaacgctccttggatatattagtgaaatacaaatcggatctagcaagaccgtttgacgaggcaacgtgtttcttgaacaagattgggatgcagcttcggaacctatgtactggtgtcgagtctgccatgggagtttctgaggatggtgt

SEQ ID NO: 109493 - DNA, 374 bp, Arabidopsis thaliana columbia
cttttattatgatcaagcctgacggcgtccagagaggactcatcggtgaaggcatctgcaggttcgagaagacaggatccgtgatgaaggcctggtcgttgatcgttagagaaatgacccaagatctttgtcgctggacataggggattggttggatctgccttcagtggactcgttgactaccttggtttcacccctgtggttcttctgacccgtgcagagcttgatctcactagccaatcagatgttgaatctttctttgctacagagaaaccagtttatgtcatcctagctgctggtaaagttctgtgtagtcattcgaacgacccttacccactgttattcctttgggtcaatgtccaaatccagaccaa

SEQ ID NO: 109494 - DNA, 103 bp, Arabidopsis thaliana columbia
ctgaaatcattttgaagcagaaatcgatttccaaaatggctcttgttcaatccagaacttttccacacctcaacactccgttatcgcccattctatcctccct

SEQ ID NO: 109495 - DNA, 193 bp, Arabidopsis thaliana columbia
gacccagtggcaacttaattggggaacctttaggcttttgcggaatttaggcccgattttttgtggaagaaaaaaaattcaccttggtggaatctttcggattttcgggggatcatcaaaccttcttaaccaggttaaagactttgaagtatgggcgggatttccgggttttagttccctaggcccaaaaggc

SEQ ID NO: 109496 - DNA, 451 bp, Arabidopsis thaliana columbia
atttcccgcggcttcatagagatgattaaatccatatagcaatttcaaaaccacaactacatcagtgtctcagtaaaattcaactattcataaaaccattgaaaatggttaccctagatgtgtcaaaggtaaacaacacttgccaaaataaacttgggctttactagtagagatattcaacacatggaaacagatatcagacattagcaattaatattcgttgagtgtgatactctgagattcaaacttgggctcaaatttctgatcttacaaactagtttggatattatggacaaagagtgacatttgtcagagacatatagaaactatcatacggaactatgaagagagacaagaatgacccacagatattaatgatgagcatatgatgcatatatacatgattcattatcattattcactttgttttgcaaaaatcttttggtacatt

SEQ ID NO: 109497 - DNA, 199 bp, Arabidopsis thaliana columbia
  unsure (1)..(199): unsure at all n locations
gggggatgttgacgctgctgcggttccttgtggttttggacgagcaattggtaacaagggtgctgtaggtgtgcgactcagaatgtattatcnaatactgtgctttgttaattgtcattttgctgcacatctagaagctgttaatcggcgaaatgctgacttcgaccatgtttatcgaacaatgaccttcttacgggag

SEQ ID NO: 109498 - DNA, 345 bp, Arabidopsis thaliana columbia
ggatttgcttttacgaacagagagcgagccagatagagtgagtaagagagaatgacgagcgtgagtgggtgtggttcaactagatcaataacttaccgctgtgcttttttaccaaaccaattttaacaacgacacttttttgtcaaaccttactcttcctcctctatctactccgctcttgtaagtcatttaagttcttctgatccacctcaagagaacaatctatggtctatttggtcacactatctaatgttatcttcttatagtttattttttttttattttataatcattgatttattatttcttatatttgttatacgttttattattctatttttctta

SEQ ID NO: 109499 - DNA, 390 bp, Arabidopsis thaliana columbia
ccaacatcttgttagacggtgaaatgtgcgcaagaattgcggatttcggattggtaagctcgaatgaaagggattcaagcaatagtgatagagaaggtgatgtgtatgactttggtattgttctacttgagatactaagcgggcgaaaagctatcgatagagagtctgatcctgcggggattgcggaatgggcggttcctttgatcaggaaaggaaaagcagcggcgataatcgataggaacatttgtttgccaagaaatgtatagccttttgcttaaattggctgagttagctgagcttgctgtgagggaaaattcgaatgaacgaccaaatatcagaaatattctgtgttttcttgatcttatcggtaagtcttgccttactttttaa

SEQ ID NO: 109500 - DNA, 140 bp, Arabidopsis thaliana columbia
cgcttctgctaagctattctaagagaagccagactagcataaaacccttaatttaaagcattcggtttccttttggggaaaccaagtattttgggttcctggatcccggggtggaaataccaggtggtgggggggggaaa

SEQ ID NO: 109501 - DNA, 176 bp, Arabidopsis thaliana columbia
cccgccacgctccccgccagttggggagcgtgtgtttgttccacccgccggcttttgagggtgtcccccggtgggaaggattctaggggctactcggcccttctccttgaaaaacacggccaaaggatgtgtcgggggagaaggaggttgccaaaaggagggttccctttgttttt

SEQ ID NO: 109502 - DNA, 425 bp, Arabidopsis thaliana columbia
aacaaatcttaaacgttttactttgtgctgcactactcaacctcaatggccgcctcaacaatggctctctcctcccctgccttcgccggtaaggccgtcaagctttcccccgcggcatctgaagtccttggaagcggccgtgtgacaatgaggaagactgttgccaagccaaagggcccatcaggcagcccatggtacggatctgaccgtgtcaagtacttgggtccattctctggcgaatcaccgagctaccttaccggagagttccccggagactacggatgggacaccgccggactttcagctgaccccgagacattcgcaaggaaccgtgaaccagaagttatccacagcaggtgggccatgctcggagccctaggctgcgtcttccctgagcttttggctagaaacggaagcaagttcgg

SEQ ID NO: 109503 - DNA, 203 bp, Arabidopsis thaliana columbia
ctctgctcgagattttagtaggaggcaagctcgattgcttgcaattagatccatggatgaagaagaactcacactttctcgcgcgtttttagctcaaggagatttttgaagaagtggtcgttttcgaattgtcaacttcagaagaagaatcaactttgggttttttttttaccttgtctgtatagctttgaaggaggcgcttt

SEQ ID NO: 109504 - DNA, 412 bp, Arabidopsis thaliana columbia
atcgtacggaagatgatgtcgttaacggacggcaatttcgtgataacggacgtcaacggaaacctgctgttcaaggtgaaggaaccggtgtttggtctccacgacaagagggtcttgctggatggttctggtactccggtcgttactttgagagaaaagatggtgagcatgcatgacaggtggcatgtgtttagaggtgggagtactgatagaagtgttctgttgcacacggtgaataggatggtcaacgttaccactcgacgctactaatatctttatcttcagatcctgatcagttgaagaacgcttgagaagatatcaaagagcttctcagcaccaaattctgccattcgattttggttagattatggtgtcatgatgctggctcgttttacaagtacatttttgaatg

SEQ ID NO: 109505 - DNA, 239 bp, Arabidopsis thaliana columbia
cattccgatccataattctagatgtcgaggtttttaactgagacctgtcaaataagctaaagcttcttctaagagcttcaaggaaagcattgcattgttgtggtcttgtttgtgtccacagaaggcaggaactacgtgaggctccggatcccaagaacatggggtggccactggggtcacagatgtcactgcgctgtccgtcttcacggccaagagcctgtatgcttttatcgcggagg

SEQ ID NO: 109506 - DNA, 149 bp, Arabidopsis thaliana columbia
ttttggttcattaccaatttttaacgggacccttaaccttaaccggtcgtgcttttttccttttaaacctggatacccaattcccaaaacctaaactttccagggccagagccgccacactggtactccaatccaagggggatgattcc

SEQ ID NO: 109507 - DNA, 107 bp, Arabidopsis thaliana columbia
cgcaaaattacgccattggtagcacggtataaatttaatagcaatgtgaaatttttatgtgctacattggactatgatgcaacattctcacctctgtgttattttca

SEQ ID NO: 109508 - DNA, 123 bp, Arabidopsis thaliana columbia
aaagatgccaaaagacaaagtttgttagatgcaatggttcgtgagtttgaagccgttaccgagggtgtgtaaacaactggaagatgatgggcgataccaaagctgaaggaaacaacaattttg

SEQ ID NO: 109509 - DNA, 107 bp, Arabidopsis thaliana columbia
aacaaatccgatctattcattgaccatttagtgtccaggctccattctgttcataaacctcgatacctcgtaggaagagagcttactacacttgagattcgagattc

SEQ ID NO: 109510 - DNA, 373 bp, Arabidopsis thaliana columbia
caagaatttgcaaaccagtgttttgggaacaaatctgattatggaaaaggcaggcagatgcccgtccactatggctctaacaagctcaattattttaccgtttctgcaaccattgctacgcagttaccaaacgcggttggtgctgcttattccttaaagatggacaagaaggatgcatgtgcggtcacatattttggcgatggtggcacgagtgagggagatttccatgctgctttgaatattgcagcagttatggaagctcctgttttatttatttgccggaacaatggatgggccatcagtactcccacctcagatcagttccgaagtgatggtgtagtggtcaaagtctcggcttatggaattttatgtt

SEQ ID NO: 109511 - DNA, 233 bp, Arabidopsis thaliana columbia
gccttaccaacaagtattctgagggactgcctggtaaaagatattatggtggcaatgagtacattgatcagttggagacgctttgccagaaccgggctttggcagccttccgcttagattctacgaaatggggggttaatgttcagccgttatctggttcacctgcaaactttgctgtctacactgcgatacttagccctcatgatcggatcatgggtttggaattaccttac

SEQ ID NO: 109512 - DNA, 263 bp, Arabidopsis thaliana columbia
  unsure (1)..(263): unsure at all n locations
aaactnctctctgaatctcagtgaattctcaaataatgagagggatggtgagttcttaccacggggaatctttatagaggctgatggggtcatactaaaaggtttgctttgttgtcatcacatgatacattaaacatcgttttttcttttcttttactctttacttaaccaatttacccttaataaccttcttttattttaatcccaaaccttcctcaaattccttttattctctcctttttcttcatttaactactccttca

SEQ ID NO: 109513 - DNA, 313 bp, Arabidopsis thaliana columbia
gcagaagcaaatgctcttttgaagttgcaagataatattccagggagaccatttgcagctcggtccaaggctccgccattaccatttctcctttcatcgcttctgcaatcaagaccacaacctaagcttcctgaacagcagtatggtgatgaagaagatgaagatgatttagaagaatcatcagattcagacgaagaatcagagtatgatcagcttcctccgtttaagagtttgactaaagctcagatggctacgcttagtaaatctcagaagaagcagtatctcgatgaaatggagtaccgagagaaacttt

SEQ ID NO: 109514 - DNA, 391 bp, Arabidopsis thaliana columbia
  unsure (1)..(391): unsure at all n locations
cggactctttcacggcgtcaatgtctgagaacgtagtcaacaacatcatggagaccaagatttgtgcagacgccatcgtgtctggattacagaagaagaaagttcatcttttttactgcttagagagcgaagaacttgctcgcaacatcggcgctgtatctgatcacatcaatcttcaattcattaactggaggaggagtggattaccaatctccaccaccaccaatcgttctttgtttaccaacaccaccatactactcaacttaccctaagggtgactacaaatcttcttcaccaccatactactcaccttcccctaaggnnnnnccctacttttttcccttaccttttgtttacggtttttctccaacttcattattatttttctttt

SEQ ID NO: 109515 - DNA, 150 bp, Arabidopsis thaliana columbia
ggtttgcttgttactgttgatggacctcatggtaagcatgttgaagaagtattagagtatgtccgatatggcttgtggagcatagcacttgctgatgaattttatattgagcttactgtcaagctttaacactttctggtaaggagaact

SEQ ID NO: 109516 - DNA, 286 bp, Arabidopsis thaliana columbia
ggaagggataaacaagatcagaacaaacaaactggtttcattgtctgaacaagagcttgtggattgtgacactgaagagaatcaaggttgtgcaggaggtctcatggaacctgcgtttgaatttataaagaacaatggtggcatcaaaaccgaagagacttatccttacgattccagtgacgttcaattctgtagagctaatagtattggtggagaaactgtaaccatcgatggacacgaacacgtccttgaaatggatgaggaggaccttttaaaagttgttgtt

SEQ ID NO: 109517 - DNA, 452 bp, Arabidopsis thaliana columbia
agctattccatcgccactaaatggaaaagtaatactaatagaagactgtgtagagacgagtggttcctttgtacttcaccagctaatgaaacgtgttctctcctctaactcctccgacgcacttatctttctcgcttttgctcgccctttctctcattatgatcgaatcttgcgtaaactgggatgtaatttagctacccataagtcgaataatcgattggtgttctttgacatgctcatggttaagtgttcagatggggatcaaatggaagacaatgtgagtgcagttgcgaaactatttcgggagatacaagaaaccgttcgaaagctacagagtgtaacaagtggtaacataactgttatggtggatgacatgtctctgctggaaattgctactaccggcaggaactcagatcacgtattggacttcttgcattattgccacacataag

SEQ ID NO: 109518 - DNA, 397 bp, Arabidopsis thaliana columbia
taccgtactgaatgcccgaatcaacccatccgttcgtataaatgcaaaaaaagtcagaaatattacaattgtttgaaactaccctcagtatacccacagggtgttataacttacattgagggtgttatatttgaaactctacaccatttcattggtaaaaatatgtcttctttaatcatcaatcattccataaagttgaaacatgtttatcaatttactgcaggatcaccatgcttttgcagatcgctgtttcttcaacagtacccacccttcgtctcgaacggagagtagatatttttaatgccacttcttcattatttctctgtacatagaatttcaaaatgtggtactggcaatgttacaatgcttaatgttatttcaacaacgagcacaaaac

SEQ ID NO: 109519 - DNA, 368 bp, Arabidopsis thaliana columbia
  unsure (1)..(368): unsure at all n locations
gcacttcgcaaaatcagagcgacaaaaaaaaataaaaaccaatcctttcgattccaaattttttgttactcactcgcacgagttttatttggtcgttagttatctctttcgttgaataacggttttaatttaaaccgttactttttatcaatggcgacttcgtcaccgtctctgagtaacaatggtctttcctccgtcgtcacgcctcccaaaactctccgtggtctcaataagcctaagtgtattcaatgcggcaatgtagctcgctccaggtgccctttttaatcttgtaaggggntgttgttcaagagcagagaatccctgcccgattcacgttcttaaagtagctttatcgcttgttgagaaga

SEQ ID NO: 109520 - DNA, 399 bp, Arabidopsis thaliana columbia
tcgagccacgcgtacgaatatagagagcgaggaggggattggtgaacatttttttttacagatatctctgcaaaaacggggaataggagaaccaaaaggttggtggtgtcaaaattcacgagtgttagggagctgaattgatggggaaaaaatggggataatatgggcgaaaaaagaataagattttatttggaaagagaagataaaggggttatacgagatgtttcctattgaaagagagatgggtgttgaaagccaaattttttgttgttggaagaggattttttttcaaaactatagtgttagttttaaaaatggttgtttttttttgttaaccttgtgtgttgtgctataaaattatttccagtaatatttttcatgaaatatattctttctatt

SEQ ID NO: 109521 - DNA, 420 bp, Arabidopsis thaliana columbia
agtcaatttgctacaacttagaaaatggcggcggctacttcatccatcgctccttctctttcatgcccatctccttcttcttcatccaaaaccctttggtcttccaaagccagaaccttggctctacccaatatcggtttcctctcgtcttcttccaagtctctgaggtcgcttactgccaccgtcgctggaaatggcgccactggatcctcccttgccgctcgcatggtttctccgtctgcgggtcaaagcccttgtttctctcgattttgagacatctgtcttcaaaaaggagaaaggttcttttgctggattaccaagagttccttgtgagagggtggaagaaaacttttttctaagcattaattcccatatggtttttaaagggggaattatccaattttggttttgcatgcctct

SEQ ID NO: 109522 - DNA, 380 bp, Arabidopsis thaliana columbia
tcgaaccaaactaaatgaatacatacaaaaaatatattttaatatgtaaaaattaattatccgattccaaagttattgcaactaaagattcaagaaattccattcttacaggtaaatgctcaacacccacgtaagcttaaaaagtttatcatgattaagtgctttctgggtcgtctcataccttataaattcgtccttaatctcaacaattatatcgagatttttcaaatacaaaggatttacttgttactaatggagtctaccctctacttttcattagatcctgtattcactccgatagtatcataaatcgagtcgatgcagagaaaatgaatgcatttacatactattactattaataattatttctttttttttct

SEQ ID NO: 109523 - DNA, 248 bp, Arabidopsis thaliana columbia
tacaagctcagccgcgaggcttttgagtgggtcattggtgagattgaatcaaggtttttacaatcgctagtggccccaggggaaatgatcggttgtgttgctgctcaatcaattggagaacctgctacgcagatgactctgaatacctttcattatgctggtgtcagtgcaaagaacgctacgctcggagttcccaggttgcgtgaaattattaatgtttcttagatgttcataactccattccttat

SEQ ID NO: 109524 - DNA, 359 bp, Arabidopsis thaliana columbia
gccacctaccgccgctgtagccgcctccgtaggttctgtttccggcgccttgactcctaagaaatccacttatggatacgttagaagttctagcaataggcagagatcaagcactgatcctgttcttaaacccaatcagcttctagacaaggagctaaaggtcgaaggtgcggagacaaagcggttcgtgctggttcatggaggagggtttgtatgcattttgtaattatttttttaactgattcttctttaatcttatcatctttattcagaatttaaaaattattccatccagtctataattattactattactctccttacatacattatcttctgattatattcaatatttactc

SEQ ID NO: 109525 - DNA, 360 bp, Arabidopsis thaliana columbia
gtcatagtcggagtctctgatgttatcagcaatggatacgactcgtggggaccggttttcggaagactgttctttggactttgggtcatcattcatctttacccgttccttaaaggtttgcttgggaaacaagatagaatgccaaccattatagttgtctggtccatccttctggcctcgattcttacacttctttgtgtccgttttaaatcagttttttcttaaaggtattttttttttattttaattatttgtattaatatacatttttcttattatcattctctttttttatctatttctttttattttttatgttttggtcgttatacttcttatttcatttattttattactttt

SEQ ID NO: 109526 - DNA, 343 bp, Arabidopsis thaliana columbia
gccgcttcttcttcttcctcactgtagctcgtcgtcgctacaccatctagaagacccttaaccatggctgtcgggaagaacaagaggatttcaaagggtaggaaaggaggaaagaagaaggctgttgatcccttctccaagaaggattggtatgacgtgaaggctcctggttctttcacgaacaggaatgttgggaagactcttgcttccaggactcatggtaccaagactgtctctgagggactgaaacacatggtgtttgaggtttcctcattcatgttcttaaatataaattatctaaattttaataatttatgtatattttatttttatctttatcctt

SEQ ID NO: 109527 - DNA, 305 bp, Arabidopsis thaliana columbia
cgataatggcggcgtcaacgaactcattcctcatcggaaaccaaacccaaatcccttctttgaaacccaaatcaatatcccaatcctttatccacttcactaaacccaacaccatcaacctcaccacccgaaccaaatccgtttcaatccgatgcgcttccgcttcaaccaccgtcggatccgagcagcgagtcatcaatttcgccgcaggtccagccgcattaccggaaaacgtcctcctcaaagctcaatcagatctctataactggcgtggatctggtatgagtgttatggagatgagtcat

SEQ ID NO: 109528 - DNA, 204 bp, Arabidopsis thaliana columbia
  unsure (1)..(204): unsure at all n locations
attgaagatctccttacctctctctttctctcgctacttatatttatttccctaaatccttggagctaggagacatcgtgccgttttcttatttgaaagacaagagggagatagatggaggtgaaggntagaagagatgtgtttgatatattattaatgttataattattaaagtgtttgattttattatattttatattatta

SEQ ID NO: 109529 - DNA, 415 bp, Arabidopsis thaliana columbia
gtgcctaggctggaaggtgaagtggtttatggagtaagtccagtgttggctgcactctctgttgggagacgagagttctatgctctctatgttcaagaaggtttagatttgagcagtaacaataggaagaagaaagacaagaaaggcttcgagagagttttgaaaatctctgaaaaacttgggttaaacatcaagaaacttcgaagcatgatcttaacatggtcgctgataacagaccacatcaaggattggtgcttgatgcttctccattagaattggtgaaagtgaaagaactagatccgatttcatcagaggaagagaaatattctctctgggtagcttttgatgaggtcactgatccacatcacttagtctcgatcataacatcttgcttacttttttggatcctcgttgt

SEQ ID NO: 109530 - DNA, 353 bp, Arabidopsis thaliana columbia
cgaaagccaccatcaccaccaacaacaacagctctatcaccttcaccaacagcaacagcaacagcagcagcagcaacgactcacttctccttacttccaccaccaactacagcaccatcaccaccttccaaccaccgtagcaaccaccgcttctaccggaaacgccgttccatcttccaacaatgggcttttccctccgcaggctcagccacaggaccagcctaatgatgggtcatcttctctcgcggtgtaccctcattcaggtccgtcctcggctgtgacggcgccgatggagccggtaaagaggaagaggggtcgaccaagaaagtatgtgacgccggaacaaggcctaa

SEQ ID NO: 109531 - DNA, 292 bp, Arabidopsis thaliana columbia
  unsure (1)..(292): unsure at all n locations
cacaaaacagaagcatgaagatgaataacaacgacggccaacataataaaacggtgacatttcctcgaaaaagcatcgtgaaggctactgttttcatcgtcgntctattcatttcagctgctatcttagacttactgggctatctcgatttcaatgcttttgcaggtttaaagctaacaacaaagacaaaagaaccaaatccttacggatgcgacttcgtacagaaccaatcaagtcaaacttctatctcacaaaaccgcaaatcgagattaaaccccaacaacagttcaaa

SEQ ID NO: 109532 - DNA, 468 bp, Arabidopsis thaliana columbia
gaaataaatgagaaagtcgacttcacatggaagaagcttttgcaaaagaagactgatgagatactaagactgaataatatctacaagcggttattggcaaatgctgcggtgaaattgtatgaaggtgaaggaagagtagttggttccaacgaagtggaggtgagacaaattagatggcatacaaataagttattaccgcaagcacatattgattgccactggcagtcgggcgcaaaagcctaatattcctggacatgagctggctatttcatttgattgaacttttgagcttgtaagaattccccaagcgtgctatattgcttggatgaatggattattttctgccatgtttaactcatatttgttctttactagttgtttatttttactattctttttttttcgtgtctatttttattttagatgcttatatttctttatatttcattttttatcaaaatatattta

SEQ ID NO: 109533 - DNA, 368 bp, Arabidopsis thaliana columbia
gacgatagctcggattccgggatgtacagtggagactactctgtccaagactcccggaaaggatccaacggagcttcctctgagttcacaaggaatgaaaccgagaaccgaaacttcaataaccggcgctactgatccaaaaataggtcaacttatacctaatcatccctcatgcttgagctctttgtacagcattaatgctctctttgaattttttgtgtgaagatacgtttcttgctagccgctacctttagttttgctccataattcccatttgcctcaaaagacttattataggtgagaacagagaaaagcaaccaaaaaagaaaaagaactcataaaagtttttaaagagggatttgaatctt

SEQ ID NO: 109534 - DNA, 259 bp, Arabidopsis thaliana columbia
ggacctcgccggagaaacaaacattcttatctccaccgtcgcttcttcttcttcctgttcttcctccgtgtcgtcaatcgacacaagcctcgattgcgattcgccacgtggcggagatgtagaccacgaattgctccacacggcggtttcggtttcttcgtcggtgtcggtttcttcgtcttcttctgcttcaatccagagagttcttgagcttaatccgatcggaggattgcgattcgaggctgtttgctgctaaaga

SEQ ID NO: 109535 - DNA, 285 bp, Arabidopsis thaliana columbia
  unsure (1)..(285): unsure at all n locations
gttaatcaaagggtttcttgtgaacagaacaatatatgtcttgctctatgttgatcgtttggatgtgtatagagtcgatgagctagataagcaagttgttatagcaatcacccaaacctttgtaaaagagatatnnagcaaaaccttgcttgttctgactcatgctcaattttcccctcccgatgaactttcctacaaaactttttcctacaagagatcagatttttttctcaaaactatccgtactggttcttaaaatcgataacaatatcttgaggattcttc

SEQ ID NO: 109536 - DNA, 158 bp, Arabidopsis thaliana columbia
  unsure (1)..(158): unsure at all n locations
accggttacatttgcttcgtacgagatttgaaggnctttactctcactcggnatgcttccaagtagaagacgacacgtgagtgcactgacacaggtgatgcgaaattattggcgccttttggcgggataatctttagcaggacagttgtttctgtcat

SEQ ID NO: 109537 - DNA, 118 bp, Arabidopsis thaliana columbia
  unsure (1)..(118): unsure at all n locations
gctatcgctgcaactgctgttcctgcgctagtgatggctcgtggncacaagatcgagaatgttggggagaggcctcttgaagtgaggggggcccccaaagccgtagtgaaaaccccaa

SEQ ID NO: 109538 - DNA, 159 bp, Arabidopsis thaliana columbia
aatcccggtcgacgccacgcgtccgcaaaatcctaatcgatcaaatgaaactttcttcattttcctcgtaaaatcatacttaatgcgaggcagatttcaactccagatcatgtttcaaagtagttgttgaagaatgtttagtgaagatgtatttattaa

SEQ ID NO: 109539 - DNA, 130 bp, Arabidopsis thaliana columbia
cgaagttccgttcgactctcttctcgagctatattttctaccgatacaatgattatctcagagggtttccacaaagaaatgtgcaggttcctcttcaaagaatgtatttgcttttctaataaatattttt

SEQ ID NO: 109540 - DNA, 129 bp, Arabidopsis thaliana columbia
  unsure (1)..(129): unsure at all n locations
gaaagaaacagattccttcttttaaagtctcttacggatcttcaccttattactacttacatcatgttctacctgttcttattaaacactcggtcgntgaactagttgtcccgcacggtggatgcttac

SEQ ID NO: 109541 - DNA, 118 bp, Arabidopsis thaliana columbia
aaagactccatgtcgagcatgtccatgtcggccttctcagctccagcttttccaccggaccagggttgatctacggaccagctgtggtacgtccattgcagcttctgcgacactgacc

SEQ ID NO: 109542 - DNA, 410 bp, Arabidopsis thaliana columbia
  unsure (1)..(410): unsure at all n locations
atgacataccatctttcatggatcttcattatacttcatgagattcctaaagcaccacccggtaagcgtcctccagagaaaaggcagagagtcccatccgcatataaccgattcatcaaggaggagatccaacgtatnnnagctggtaatcctgatataagccacagagaagcctttagtgctgctgccaagaattgggcccacttcccccacatacacttcgggctcgtgccagacaatcaacccgtgaagaaaaccaacatgccccaacaggagggagaggataacatggtgatgaaagaagggctttacgcttctgcagctgcttacgttcctgtgacttcttattactaggatttacttactctactttacttttttaaagttcaaattttcaattctctttattt

SEQ ID NO: 109543 - DNA, 193 bp, Arabidopsis thaliana columbia
  unsure (1)..(193): unsure at all n locations
gtcgtctttcatcaactctctgcctcacgtttctgattttggccacagttgcatttggtgtacggcctaaaaagtccattaatgggccatttgggaggaactacttccccacttgggcttttgatcacattaagtatctcnncggtggatctgaagtgcatcttgtcctcgacatgtacactggcactggctt

SEQ ID NO: 109544 - DNA, 265 bp, Arabidopsis thaliana columbia
  unsure (1)..(265): unsure at all n locations
cacgaattgctaatccaaggatacgtaatcatgtgttcgtactcaatagcaagtgctatatctggcatatcacctctaattcgtttcgttaaaccttattccaccggtttttctttcatcacttgcgcttgcaannntacccggaggccaaagagatttgatcagctttgtgtgttttccatggcgtcggaagcgagggaatcacctgcattcaatcctggcttgtcatccgaattgagatgaggctacataaggatacatcttg

SEQ ID NO: 109545 - DNA, 378 bp, Arabidopsis thaliana columbia
  unsure (1)..(378): unsure at all n locations
cacattctctctaaactctcttcactgttactcgacaatggctactacttctaactcgggactgttcctaagttctgactcactgattcatcatcatcatcatcaacctctccatctatcttcctccagatctcnnnctgtttctctcccacccaacaagcgatccaattctctcacgcttcgttgttcaacaaatggcgatagcacctcaaccgaaaaggaaacaccaatcgaactcaaattcccagcatttccaacggtaatggacattaaccaaatcagagagatattgcctcacaggtttccgtttctgctggtagatagagtgatagagcatactcctggtgtttcagcatgagctattaaaaattgtcacca

SEQ ID NO: 109546 - DNA, 175 bp, Arabidopsis thaliana columbia
  unsure (1)..(175): unsure at all n locations
gagagagcagcacaagagagcatagaaggaccgattggggattagttagcgtgaaaggagatcctagtagcagctatggatagagaatggggttccaagcctggttgtggcggcgccgcctccggccaaccccccgnnnccgatcgccgtgtgcgtnttcgttagtttgtttttg

SEQ ID NO: 109547 - DNA, 211 bp, Arabidopsis thaliana columbia
  unsure (1)..(211): unsure at all n locations
gcgtccgatttttttctttctaggttgcagagttaaaggagaaggttttcaattagggttttgtagagaggggggggagccgaagtttgggagtaccgtttaagcttcttcacgaggccttaggttcatatcgtgacggtgtagcttnnnagcggcgagctttacagaggaagtatgtttgtcttttaagccaacttgatactgtcttttt

SEQ ID NO: 109548 - DNA, 219 bp, Arabidopsis thaliana columbia
  unsure (1)..(219): unsure at all n locations
gaaatctagatacaacgatggtatctcctagaagatcagcttttgctaaggtcgatcactccatcgctgggtcatgaatatggagatgtgtgccgtcaaaatggcgatctgagtgggaagggcgctcctataggtactctnnccgccggggcggctgggggagtcctagctggtagggttgctgatggaactacaattaggggcagacttatgtgtcat

SEQ ID NO: 109549 - DNA, 123 bp, Arabidopsis thaliana columbia
gtttgttgatgacccttctctacacaccttgaatcgcatacgactcgagatcaccgattccatgaagcttcttcttcagctcaggcgtaaaatgctgatatgcgaagaaattagggcgagagg

SEQ ID NO: 109550 - DNA, 124 bp, Arabidopsis thaliana columbia
cgaattttgtgagtttcttcgagagttgaagatatatagactctagaatatggccaacgatacgggcacggatgacttagaagagcgttctcgataaatccttggattatttcaaggatattaa

SEQ ID NO: 109551 - DNA, 255 bp, Arabidopsis thaliana columbia
  unsure (1)..(255): unsure at all n locations
tcggtcccttaagggtttttaagttcaaaactttctttgaattttcggtttccttccgtaccgttagttttttattggttaagttggaaaatggcatttttaagccgccaaattcaagttcttggcggaattggattgnnggggggtttttctttcaagagaaaacttaatggtaaaggggggacctttattccgaggaggggcttttttggtacaagaacccgtccttttttcacacacacatttggttttctt

SEQ ID NO: 109552 - DNA, 298 bp, Arabidopsis thaliana columbia
gagatcggaaacgacaaacctaattttcccgaagtatcgagaccattatgtggaggagaatcgggggatcgcatcttaaatccatctgcgccgtcgggtcctgcgcggctccgtcgtgcaggcacgccgtcgtagagggggggggggctttctctctcgactcgtgcatcctccattcccgcatattcctccatattctctcgtttaatcggctccgctgcagcggatactgctgtgaagaagcgtgttgtagatgttttttcctttttgcatacttgtctatttgtatagtatgatc

SEQ ID NO: 109553 - DNA, 282 bp, Arabidopsis thaliana columbia
  unsure (1)..(282): unsure at all n locations
ctccaactagtcaatcggaattccaaatctctagacggagattctgatgccggaatgccatcaggttccgaggtaattttctctttgcctgtttgttgacatagacacacgcacgcttataggaaacgaaattgcgatcnnncctcgaatgctacatccatcgctcttctctgttttatcgatcaaatcggaactaactgataggatagttaggctgatatgggagtcaaatcggtgaggttctctatctggttcctttacgattgtactgatctagtgttt

SEQ ID NO: 109554 - DNA, 287 bp, Arabidopsis thaliana columbia
  unsure (1)..(287): unsure at all n locations
cctgatattactccgtctaactcggagaggttcaccattgattcaagcactattgattctgagacactcactgggtcttttcgaaacgatatcgttgatgatccttctttcttgaatagacacaacagtaaaggttnnncggaaactacgtttaaggcaatctcaggtgcttcggttagtgccaatgtttccacggctaggactgggaatcaaatggcattgtgttcaagtgacgttttggagcctgctgcttcatttgagagcacttactcgattgcttctattcc

SEQ ID NO: 109555 - DNA, 321 bp, Arabidopsis thaliana columbia
  unsure (1)..(321): unsure at all n locations
actatttatgcttctttaggagaagagtctttgatttactcactcaatgagactcgagtgtcagccttaatatgtgactcaaaacaacttaagaagttgtctgcgatacaatcaagcttgaaaactgtgccctctnnnccctacattgaagaaaatggagtattattttatttattgtaattattattggatattaaattatatagtttatttttttattatatttaattaaatgttttttattatttatttgttttttttaaatttttgtttatatatatttatatttttttattcaataatttttataattttttttta

SEQ ID NO: 109556 - DNA, 115 bp, Arabidopsis thaliana columbia
caacccctttctttagagaggatcgccgtttattgtttttccggaggcaatatgttctcactttggggtgtgtacattgtaggggggcatatcaaaggtatgacttcggcgaagg

SEQ ID NO: 109557 - DNA, 247 bp, Arabidopsis thaliana columbia
  unsure (1)..(247): unsure at all n locations
gttagatagctttctgaacaaaaggagagaatttttggatatagatagaatccgccatttaagagcccttccctttgacctggtgagtgttgacaacctgaaaagaaacaaaaaaagaagaagaccgctttattttgtgaacaccacctatgncttattgctttcttttctttttcgacgacttcttttacacatacaaaaggtgcattgattttgaagccttaaagtttttgtttttaattcttaa

SEQ ID NO: 109558 - DNA, 133 bp, Arabidopsis thaliana columbia
cggacgcgtgggtgaatggagatatcagagtgatttcgagctcgattagctgttctctcagggcatttattttatgtgaagcaggattctccagctatctagctatgtagcacgttttcgtattctatttttt

SEQ ID NO: 109559 - DNA, 376 bp, Arabidopsis thaliana columbia
gagaagaagcaggagagtatcattccaaagattttgaatgggaatttctcaagaacatcgtcgagaacgatccttctctctcccaccatctccaccaccaccaccaaaatctctccaaatatttaccagattcgcagccatggcaagattttcactcccgtcactcctccggaaaattcttcaaggaaagaaggtatctgttgaaggaatttcctgaattagtttcttgtggagagaactcaaaacttttggaaattggttgtggtaatggcagtaccgtgcttccgattttacgtggaagcaagaacattactgtgtatgcctgtgattgtagcattgacacctcttgttaggacttatagagaacattgtatcg

SEQ ID NO: 109560 - DNA, 217 bp, Arabidopsis thaliana columbia
  unsure (1)..(217): unsure at all n locations
cgacgatgcaattaactcttgaattcgggggtgggttagagctgctctgtgattctgaaaagattcataaagtaaacgttganttgcccaatggagctgactctgatgattttaccatgaagcatttgctttcatgggttcgtacaaatctgatcaaagagagacctgagatgttcatgaaaggagatactgtgagacctgtggttcttgtgcagtt

SEQ ID NO: 109561 - DNA, 143 bp, Arabidopsis thaliana columbia
  unsure (1)..(143): unsure at all n locations
cccacaatggctatagctatggcgatcactctaatcctatctcngcacaacaaaccaacctcgtggtttttttcttcantcctgagtggccttcctccataattctcttcactccttatcaaatcatcatcaaaaaccatatt

SEQ ID NO: 109562 - DNA, 263 bp, Arabidopsis thaliana columbia
ctcatttactgttctgtttcactttctctctctctgtatactctctaaatgatggcaaaaaactgtaatttagtcagtgtgctatgtgtatttttggtattgaccctctttaacaaacccatcaccgtcgccgggcagaatattccggcggtggtcttgttcaccttttgttgtctccaactcttactcctttattcatacactcattttcctcaatactttacttcttcaaacacttccggacttatcggacttatcttctt

SEQ ID NO: 109563 - DNA, 289 bp, Arabidopsis thaliana columbia
ctttgaacttgtgattgatgatcatttgaagagtgggaaaatcgaagatcactcagacatcatcagtgtcatgttggataggatcaacaaacccaccgaagttggttcttataaagtcaccgatgatcatcttaaaggacttatgtcggatgtgttttcggttgtagagaactctggtttcattacttcgattttgactatgtcagtattttattagttattctcttgtgtattttttctttcataatagtctattttatctttttttctttactttttttattctctt

SEQ ID NO: 109564 - DNA, 238 bp, Arabidopsis thaliana columbia
ggcagattcccacatttgcaaacatgacgactcatattttcaagaagagaaagtttgtagcggacggtgtgttctacgctgaattgaatgaggttcttacaagagagctagcataggatggttactttggtgttgatgtttttattatttaaatttatatttttttaacatccttattatttttatttcattcatttttttcttttttattacatttattttttttttatccttattt

SEQ ID NO: 109565 - DNA, 219 bp, Arabidopsis thaliana columbia
  unsure (1)..(219): unsure at all n locations
gtttcatgtttacttccatggcacgtcttactctgtttctgtcttttctttctctagctttaggctctgttgaaaactgncgtgttttaagttctgcgtctgaagataacaactcctccatcttggtctccgatggagtccaagacagatccagcaacgactttctcagtcttaatccgccaaatctttccgagagtgcttgcgttcatgtctacggtt

SEQ ID NO: 109566 - DNA, 220 bp, Arabidopsis thaliana columbia
actctacactgcttcgtctcttagctcgacatttatctccttaaaatggcgtcggagaagaagctctcgaaccccaggagggacattaaggttcagaaacttgttctcaacatttccgttggtgagagtggtgatcgtctcactctttcctccttgtagttggattagtttcatcttccttctcttcttgacttttctttctatatatttttattttttt

SEQ ID NO: 109567 - DNA, 209 bp, Arabidopsis thaliana columbia
ccatcttccaacattttactcagcagctttatatggtgattccaccagcagtgagaccaccacgtctcttcgactgactaaggccttacgtgctgaaaatgcatttcacaaacaagcttgttcacgcacaagtcattcactcactaacaggcatagtggtttgctcatcgagctttcaagagtaagcattgtgagatacaatgtacatc

SEQ ID NO: 109568 - DNA, 367 bp, Arabidopsis thaliana columbia
  unsure (1)..(367): unsure at all n locations
aataaagcgaatgggagacgcgtctacaccaactctatccttctacacttcagcgaaggtatactacacaggatcagacgctncaccatagcgggtacagttcctcaccagcaccttactactttcattctactaaggtttactacaagttccccacctccaccatacgtgtacagatccccaccttcaccatactactgtctttatcctaaggtttactacaagttcccaccttcaccatacgtttacagttcctcacctccaccatactacttttcttttccaaaggtttactacatgtctccaccaccaccatacgtttacaacttttccactcaacaccatatcttctttacttcttctaagg

SEQ ID NO: 109569 - DNA, 212 bp, Arabidopsis thaliana columbia
gataaagtgtatgggagaagcggtgatcccaactctgtctctttacaatttagtggatctatggctccagaaaagttcagaccaccaacggtttgctgcattggtaggttcttctgcaaaggattttacgatggtttttgtctatgctcggaagctaccagatgtcatcatgttaaggactttaatgactcatgttgctgtataagaagata

SEQ ID NO: 109570 - DNA, 249 bp, Arabidopsis thaliana columbia
  unsure (1)..(249): unsure at all n locations
gttcgtcgtctctctcgccggacttgttcattcttatttcgtctctctctctctcgtactcttcttcaattttgtcctccgnagagagatcttgagatggcgtcgaggaactccgttgccgtaatcgctttattcgctttcgttatcgccgtcatctttccattcgccggcgctcaattcttatctcctgctcctttccccactagcgacggaacatcttattgatcaaggaatctcgtatttgctaat

SEQ ID NO: 109571 - DNA, 131 bp, Arabidopsis thaliana columbia
gtcatgagagctttattgagtcactttctaatatgtccctaacagtattcttagtggcatgaattcaattcctaattgtagcagcagcagtagcagtggaagtggtggctcttgctctggtaatataacag

SEQ ID NO: 109572 - DNA, 239 bp, Arabidopsis thaliana columbia
accgatcttcgtcagaagtacaatgtcagattcatgccgatccgtaaagacgacgaggttcagatcgttcggggtactaacaagggacgtgaaggcaaagttgttcatgtttaccgtcgtaaatgggtgatttacattgagtgtaatacgtgggtgaattgtttttgttatcattctttgtaactttgttattttactcttcttattagttttatttttttaaattttttctttttttt

SEQ ID NO: 109573 - DNA, 435 bp, Arabidopsis thaliana columbia
cgtccgacccataccatactattattcttaaccaaatacttttttttcatccccaacacctccatacgtgtgcggttctccaccacaaccctgcggcttaaaaatcccaccctcaccataatccattcatcttacaccagtcgttacactgacacaccttcaccataccttaatatcttaccacacaccaccaacctactctgcttgttcaaagatatacatcccgtggtcaccaccaccctatgtttacagatccccacctacacccaactacttctcttcttccaatgtccactacaaatcttccccaccacaatatgtctactagcttatcacccacaccatactactctccttctcctataaatactctacaatttctccccaccaccatatgtttactattatcccacatcttctaaacttcaactattt

SEQ ID NO: 109574 - DNA, 163 bp, Arabidopsis thaliana columbia
aatccgtacacgtacgacagatcctgaccgttgtatctacttaccttgggaaaaaagtttccattgccgcgttttttttacagtacgaggagcggatctctcaaaccttttcttctttaatatcaataacttttaccatcatactttaaaatattctttactt

SEQ ID NO: 109575 - DNA, 174 bp, Arabidopsis thaliana columbia
cacattcacattcttctttcttctcaaataaataaataaaaaacacttgttcatttacatcagaatgatcactgcaggtgtacggcggacctcatattcacataccaacctatacatccgtcttctccaatgatgtgcttactcattctcctctatacgcctcgcattttattt

SEQ ID NO: 109576 - DNA, 218 bp, Arabidopsis thaliana columbia
gccagtagtcatatgcttgtctcaaagagaaacctattcatggcgacgttggctcaacaattgtcgccgttgagatggtccccacgggtgttcttcttctaggttatcgaggagagcttcgaagaactttccccagaacaaatctgcctctgtttctccgactattgtcgccgcggttgcaatgtctagcggtcaaacaaaggagcgtcttgagctga

SEQ ID NO: 109577 - DNA, 176 bp, Arabidopsis thaliana columbia
  unsure (1)..(176): unsure at all n locations
gtcaactccacatagatctcctcatggctccaatctctgtcggcgatgtcttaccanacaagactatctccttcttcgaggagaaggatcaacttcataccccctcctttcactctctcgccatccttaaaaaagtcattctcttttatgttcctagatctttcactcccactttc

SEQ ID NO: 109578 - DNA, 338 bp, Arabidopsis thaliana columbia
gaaacacactatctctctctctctctcaatacatttttcctcacttctgatcagtgtgatcacgtagagtgccttgaaggagaggaaagaaacaaaaagaaataaaaatgggataccttctagaagaaaccttaagctctaactctaaaaccccaattgttatcgatgatgataacgagttgggtttgatggccgtgagactagccaatgctgctgcctttccgatggttcttaaagccgtcctcgagctcggtgtcttatacactctatattcatatgcctttttcattgatcttttttatttttaccattttgtggtaggggttgttatcttctca

SEQ ID NO: 109579 - DNA, 251 bp, Arabidopsis thaliana columbia
attcattctacacactcaatgttacctcctcgttttctgagatctttttccccagattctctacgaagcgctctccccggtgagaagaagaatctctcacaaaattcctctttctctctctctctctgattccccattattagtttctgtgttaaaattgaattgcgacataactctgccaaagtgataagccccgattcacactaattccgagagatttttctgtcttactgttcataacgggtcaagac

SEQ ID NO: 109580 - DNA, 141 bp, Arabidopsis thaliana columbia
atttcttggggtgttgtccaagctgcttttatattttgaagggatattgccctctctctggggggaagatccattcgccaggggtgtataccattctctataactttcgatcatcttttatttcattttcaactcactcat

SEQ ID NO: 109581 - DNA, 188 bp, Arabidopsis thaliana columbia
gagaagctgaagagcttacaacatgagctcgagttttctcagagagacgctgatacctacatagacaagctcaacgcagagaagagagaagtcttgaagttgcaggagagattggcaatggtgaaaacatcaggaagcttgtgaaggatggtttcattattatgaagtcatccatgatttactctcgt

SEQ ID NO: 109582 - DNA, 199 bp, Arabidopsis thaliana columbia
gttgattggctaaccgacaaaatgagaagtcttttccacactgtttcagctacacacggacagatggaccatatcacatgaggcagcatcattctctaattccgctctgtgtctttccgtgttctcataaccactgaccttcttgtttgtggtatggattgttcattattttttttttgtcatatatttttatcttatt

SEQ ID NO: 109583 - DNA, 381 bp, Arabidopsis thaliana columbia
cttggaaattcttgtcagataaggaaaagagagcttcttatgatcgtaggaaaagtttgcactggaggtatcagaaggtctcaggggcatcttctaataacgggttctgcaatttcgccaagactactttcactacaaatgcaaggacgacgaccccgagaaacaatccgccggtccaaaagaccaatccgccagcccagaagaccaatccccctgcccagaagaccaatccgccagcccagaagaacaatcctccgacccaaaagaacaatccgcaaaagccaggtgtttctacacagaaaacaggacttactgattatcacacaccaacaccaaacttatttacctgatttgggtcatcagaccaatcaaagtcgtatt

SEQ ID NO: 109584 - DNA, 303 bp, Arabidopsis thaliana columbia
  unsure (1)..(303): unsure at all n locations
caggacctggtcacatcccaacattctcttgtactgtggagcttgctggaatgagttttaatncggaatcagcaaagactaagaggcaagctcagaagaatgcagccattgcagcttggttctccttgagaaaaatgccaagattggacccattgagaggggaagagaaggtacaagagataagttcatgagtcctcttaagattttgacccaaagaagtgtaaagaagagaaccaaaccattcatgatgtacaactgtcttcattactatctttcaatacacatcatcaatctcatcaacca

SEQ ID NO: 109585 - DNA, 166 bp, Arabidopsis thaliana columbia
cggacgcgtgggaccaaatggtggaaaatccctatccattgcctgtcggggaggaatatgcatgggggctgcttcatatccgggtaacatggcattggttagatctggtggttccgcattgaggggaagtctctctcgaggatctggaactcggtggagtttgggg

SEQ ID NO: 109586 - DNA, 450 bp, Arabidopsis thaliana columbia
cgaacccgtgcataccttttaatttctgttgaatttctcattgtctttggtatggtcctaatctcaatacgtctctggttctcatccatctctccagggatctgaaatttcttcctctgcatgtgctctcgtggtttcttccttgataattccttgctcattccctgcatgtgactcccgatcatcgtcttcctcttccaagttacgaatcaaaatcatagccgagattcagatttcatagacaatggcgactaaggcggcttcgtcttccagcctccccaaatctggagccatttccaaaggctacaatttcgcttcgacttgggaacagagcgcttctttgacagagcagcaacaagcagctattgtttctttatcccacgcagtcgcttgaccggcattttctggcaatcttggcatgagcatgttcacaagcctgagaatggcttg

SEQ ID NO: 109587 - DNA, 140 bp, Arabidopsis thaliana columbia
taccgtccttattccctttcgagccacgcgtccgttcatatctctcgcttttctcttcatcactttttttttatctgagttcatcattcaacagacgacatatttctataggaatagggggcatctattttttacattct

SEQ ID NO: 109588 - DNA, 218 bp, Arabidopsis thaliana columbia
cacgcgtccggacctgcttccttgtttcttagactttcgctcatctttaaaccgagagtttatgacaccataatacgaatacttttaataatgatgaaggggacccattatatttctccattattatttacttctatttacttctataaatctcaattataattaccttctcataaacacttattacattatattctattacatattatcttttttac

SEQ ID NO: 109589 - DNA, 307 bp, Arabidopsis thaliana columbia
  unsure (1)..(307): unsure at all n locations
cagaggatagagagatagcgaggctaatggatcattgactcactgagtcagattttacccagtcattgcctccattgagaggctgggttctcanattctacgcttcactgtctcttctccatgtgcgtctcctcctcctccggttcttcagatcttgctttccggtgacggttttaatcttcttctctctggtaacacgtataaagcatgggttacctgacgtgtacatgttactgttaggctatagactcctcttttttaccttttttcttttctagcctttctttagcttcttctttctcttttc

SEQ ID NO: 109590 - DNA, 201 bp, Arabidopsis thaliana columbia
  unsure (1)..(201): unsure at all n locations
cgttgcttccatcgttcgtccgccttacccctacttcaagtttacaatcatacaaattggantgggcaacattggcaatgtgcctcttgttttacttgcggctctttgtagggacacttccaacccttttggtgactccgaaaaatgtagcattgatggcactgcttatatctcctttggtcaatgggttggtgccatcat

SEQ ID NO: 109591 - DNA, 129 bp, Arabidopsis thaliana columbia
gatcgattcgtggtttgtaacacgcaaaaccagtttcttcatcagaaccgctcttatccacgtctgtaactttatctccggtgttgccagatgtttctcttacaagattatattcttttacccacattt

SEQ ID NO: 109592 - DNA, 147 bp, Arabidopsis thaliana columbia
tcctatttcccgttcgaccacgcgtccgaacctgtcctttttctctttcaattgcgtttgatagtatgtggcggggaatttccgttatcgatgaattctacctggttgagcgtgcagttttcatatgcttgtttcaataattaaacc

SEQ ID NO: 109593 - DNA, 383 bp, Arabidopsis thaliana columbia
gaattcccggtcgagccagcgcgttacaaaacccaaaccctcattccaaaaaatgatttttttttctcaaaacctctcctttctcctgcacgtccttctagactacgagggcgcctcctatacttaccactatacccctcctaaaccatcaccaacacctcacaaatcaccaaaacattcagtctaaccacctaaatctcctttcctcaaaccacctaaaccacctcctctacaaccacctactccaaaacctaccaccctcaaaccccatccttaatcaccaacccccaaacctcatccctaaccaccaaccctctaacctcaccctaaatcacccaccactaaagccaccccaccctaaaacaccctaccaaactctccac

SEQ ID NO: 109594 - DNA, 182 bp, Arabidopsis thaliana columbia
ccactaccagaaacactaagcgctattgtcttattctattgctttggctcttcattacatcgtgggactgcacattccttcatgcgacaaatcactgattacctcaaaacaaatcttcagcagaaggtaagagcacaaccacttcaacaacctgaacgctggacattactttcacgaaaata

SEQ ID NO: 109595 - DNA, 159 bp, Arabidopsis thaliana columbia
atttatcatatcaaaggaagaaactttaaaatgtcaaccgattctgatgatggtttcccgttcgtcattactactactttgggttgctttcatttttttctctttctctctactctcatattcattttatctaccttactcataccctattactttctt

SEQ ID NO: 109596 - DNA, 477 bp, Arabidopsis thaliana columbia
  unsure (1)..(477): unsure at all n locations
acggaattccagggncgggcagcggtgcgtttaaatcgatcacaatctactcacttttgaaggttgattcaaaaggagggaaaggagtcaaccagattgtacgattgatccggtcagtaggccttgaccaanattcatgttgcagtaggcggaatgggaattcaatacattcagttcgattacgttaagagcggacaaaccgaacaaatttctctttgtggtatcaaaggcaataccatttctactgattctgtttgtgatttaccatcctgaggatcatatattttctatttaaatattttataatcctgattgttcttttctaattttctttatctttttttctaccgatataatttaatatttttatttctatctcttctctttttcacattctcttttaacttttactttatatgtatttttattcatatacttttctctcttatttttttatcttcttttttctttttatta

SEQ ID NO: 109597 - DNA, 179 bp, Arabidopsis thaliana columbia
agagaatacagttggagactaccgattgtggagttatttttcacggttctccacctatcaagagattgacgacattaggcaccacgttacagttcagacaaagacacgggtttaccaacttgccgtgtatgccagtgtgcaaaatctgatataagagggggtgctgctttaggtttttt

SEQ ID NO: 109598 - DNA, 121 bp, Arabidopsis thaliana columbia
gcggaatattcttcagaatatctgatccgatatcattttctttaagttcgcttgaattccctctgagcaatggcttttttcttgcgcagcgtcaatccaaacaaaatttcttataattcac

SEQ ID NO: 109599 - DNA, 171 bp, Arabidopsis thaliana columbia
atttttccaagatgaagtcaattggaagggtgtttcaacgcggattcactacttgggtgcgcggctcagagatatttcgggctcggttcatctatgccttcatgatctgaggttagaaggagaagtgaacattattcatatcttcttttattggggggtttaaatgttttt

SEQ ID NO: 109600 - DNA, 237 bp, Arabidopsis thaliana columbia
cttattttcccccaccttcaccattttgattctttactggaccgtagagaggtactaggaggtggccattcacaagcatgagaggcgatttctcactccgaaagcttcaattaatggcagcggaatcacaaacggagctgcagcggaaaccacctctaaacctagtcgcaaagggaggaagaagaagcaaacatcgacggtaattgagaaagataacaccgagactgttcctgaatt

SEQ ID NO: 109601 - DNA, 128 bp, Arabidopsis thaliana columbia
taactaatgatcttgcagagatacgtagtactctttttgctcttcaccattcggacacactggggcggtactaattgggccaggggacacttttgaatctgtcgcttgcaatttctacactacaacct

SEQ ID NO: 109602 - DNA, 210 bp, Arabidopsis thaliana columbia
gaaaagaaatggattgaagaaaccccatcttcttctttaccattcagaatcatcaaaggatcgagccctggccaccggcgtgcttcaaacggtttgagctcaatcttctcggattcttcaaaatcacagtggcagaaacaaaatggtgagaaaagcggcaagaacgttgctcatgctggagtttctgttggatctgtcgacctgtaagag

SEQ ID NO: 109603 - DNA, 124 bp, Arabidopsis thaliana columbia
gctcgaaattcaaaaaatgtctcgtcttctccaaactccctttttaccttcaggttccctccccacgaaagcgctatcttacgcgtactgctttgcttttaaatcccataatcattccaattca

SEQ ID NO: 109604 - DNA, 149 bp, Arabidopsis thaliana columbia
gcgcacacacccactcatggcgtctcggagagtcttatcattttttctccgttcatcttcctccaggtctggcgccaaattagggaacgcggaagcccacacttccttctccttcacccgtgcgacactcacctccatgtaactacctc

SEQ ID NO: 109605 - DNA, 297 bp, Arabidopsis thaliana columbia
cttcttcttcttctgtaacctcgtcttcttcagcttatactcatagctataccaaagaaaacctcttaaaacccttcttctctcgatccatcgatcagcaacaattcacttctaatcgatcaagagctttccgatctcgtcgatcccaattaacatggctttcaacggcgcttctccgagaattgttgatgctactgagaacagcttggataagatcaagcgacaattggcatctggctctggtcggaacttgctacaaggacctcttttcaagcgatctgaaactttgtgaaaatg

SEQ ID NO: 109606 - DNA, 253 bp, Arabidopsis thaliana columbia
cggacgcgtgggctgaaatcgtggtaattggtgatggagaaagacgataacagtgacaaggtttgtctttcagtgaaggagaaatatacgtcagagcagcctgaggaaatggtgacaaatctgaaggcatctgtaagagaattgagtgtgaaagtgaaagaacagaatcagagaaaatgtgatgctaaggataagttgcagcagctgcgagaaagaataagcatggaagttgttgatgttctattttacttat

SEQ ID NO: 109607 - DNA, 404 bp, Arabidopsis thaliana columbia
gagagatgatcggacggcgattgttcggcgccgacgccgatcataaagctgacgagtttcgatcaatggtgacggaaatgatggctctcgccggagtattcaacatcggagacttcgtgccgtcacttgattggttagatttacaaggcgtcgctggtaaaatgaaacggcttcacaagagattcgacgcttttctatcgtcgattttgaaagagcacgaaatgaacggtcaagatcaaaagcatacagatatgcttagcactttaatctcccttaaaggaactgatcttgacggtgacggaggaagcttaacggatactgagattaaagccttgctattggtcagttttttgacaattaatttccttaaaaatcgtatattatgaaagttagatttgtttttt

SEQ ID NO: 109608 - DNA, 176 bp, Arabidopsis thaliana columbia
gctttctcgatggcagattcaaagaatccacggatctctctcattctacgggtctggtttccgagttacagacggagatttccgaattggatcagagattggccggattaaatcgtcagctcgagtcaggtttcgctgcttacgcttcgtttttcgatcgtttaatgttttttttt

SEQ ID NO: 109609 - DNA, 318 bp, Arabidopsis thaliana columbia
acagttctctctttttgtcgacagtcttcttcttcttcttcttcttcgattggatctggaactgaactcaaattgggaagaattttgacatggaggaggaccggtgttcgatcaaggatgatgcatctcaattgattggttacaccccataggtatatctgaacaacattgtggatgtttgttgtagctatctatgtttatttatttttttattatgtacctcttgttttgacttaatttgaccattatttagaatctacatgtctgtttaatattaatcttttatattctaattatcccattatctatctatttatt

SEQ ID NO: 109610 - DNA, 187 bp, Arabidopsis thaliana columbia
gtcaaatggagcctgcttccattgcgcagatacatcttgatattggcaatgcctctgaatccatcatcttcagatcatcatgctcaaaagttgaattccttgggtaccaggcagtttacgaggatcctgaagctaaggcaatcaaaaataacgttaatgatcagagtagtgagcgtgaggatacttt

SEQ ID NO: 109611 - DNA, 398 bp, Arabidopsis thaliana columbia
ctctcactggtcttcctatgaaaatgggtagaggaattgtaaacagacttcattcgggacccgatgtgcagaaactttgctcttctgctcttgaatctcttgaaactatagcaactacacctcctgatgttgctgcattaccttcacctcgcagctccaagatgcagcaagatacagcaaccacaggatcaaccaagatcaggttcgaggatgtaaacgcgacttcacttacagtggttctcgcctctaatgaaattccctcacctccaaacatcgttcactacagtatttggcatcgtaaggtaccagaaaaagattacccggagaaatcgacttgcacattgtttattccaaacacatgatttgttgtctctggattagctccagcttttgagtac

SEQ ID NO: 109612 - DNA, 374 bp, Arabidopsis thaliana columbia
tcaaatctcatctctttattctctctctctatctcttctcctcaagaaccctaaaaatctccagaaaaaagatcccaaatttcgtatttcaacgatctgaatctctctctctttcgggtttattttgtttcccgatatggtttagaatttgtgatttaaatggaagctgacgtgtcaatttcctgataaaacccttatcgcgaaatattcctgattaccaataaaaatatgattgagtctttttttgacttgtttgaataagtatcacggttggaatcgctcacctatgtaatgttgctttgcttctcacttatattgttgggtactgtttcatttttatttcatatccctatttattgttattttatattttc

SEQ ID NO: 109613 - DNA, 427 bp, Arabidopsis thaliana columbia
cttctggtcaagctagaggctttcacagctgtaatacagaattctccagttccattgaagtcggagatcgtaccgtcaccggaatctgatttcagggctcaggttaagatgagtttaagtagagcaaaggatttgagacttccgttgatgaatttggtttgacttaaaggttcaccaattttggagcaacttcatttagaagaaaggtcttttataacattttttgataattgttgcattgttaaagtttgaactcatgtttctaccatttgtttgggatttgtattttattctttatcatctttttttgtgtttagtattttattatatgttatttttctcattctttttacctattagttgtatatatcttatgtatttttgtttgtttttctatatctattatattttatatcttctttatttt

SEQ ID NO: 109614 - DNA, 331 bp, Arabidopsis thaliana columbia
cgcaaacaacaaggcaattcgacaattgctgcactttgctgtatctgatgtcagtgatgatgttaggaggactgccgttctggcacttggatttgccttgtactctgatccagagcagactctccgtattgtatcattgctttctgagaaatacaatccacatgttctttatggtgctgattttgctgttgtatttttatataattatttatgttctaatcatataaattactcattttatttatttttttatttttatactttttatattctcttaaatattatttttaatatattatgaaatatattttttatatattcttctttttat

SEQ ID NO: 109615 - DNA, 336 bp, Arabidopsis thaliana columbia
aacaaagaaaaaagatagttgcaatgggtgtgattagaacctcaagaacgatggggttaggacagtgcatggtttatgttgtcgggctatgtgccattgcggctacagtgacatcatacccttacacatcctctcaaacttcacattacatttcttcaagccatgaacacaatattcttaattactcaccacatcctaatccatctatttacagctcttttccaccttcattatactactcttccttctccaaaggctgattacaatttttttatcatcattatacgcttacaggttcttactaccactatactactctttgtcttctataggttt

SEQ ID NO: 109616 - DNA, 340 bp, Arabidopsis thaliana columbia
atctttacgcaacatccataccaactccttccgcacaacaaattatatctgccattaaagttattctgggagaggatggttcaaatcgaggggcacaaaagctagcaagaatacgtgagaacagcaactttttccgggctgagctgcagaagatgggatttgaggtacttggagacaatgactctcaccagtcacaaccaaaaaaaagaaaacacataaacaaagattataatggcttccttaaccatggctttgtcctcccctgccttcgccggaaaggctgtgaagcctgccgcattagatgttctcggaagcggtcgtgtgaccatgaggtagattg

SEQ ID NO: 109617 - DNA, 441 bp, Arabidopsis thaliana columbia
gggggtggcgccggaggagcttcatgggatgatggtgttcacgatggcgttagaaaggtgcatgtagggcaaggccaagatggtgtgtcatctatcaacgtcgtgtatgctaaggactctcatgatgtttaatgaggtgaacacgtaaagaaaactttacttggttttgaaactgctttatgttgattcatacgactatttattttgtttatgcttgtaatctttatacatttcatttgtctatttacttttacattcatatctatcattttcctattattcatttctcgttattttctttatttattctcttctttttttatcattctattgtattttttattattattctttatttttttcgtatatattatttattttttcttttttatcttttttctatagtttattttttgattttttttacctttaattttatta

SEQ ID NO: 109618 - DNA, 217 bp, Arabidopsis thaliana columbia
gttcttcagctctccttatcgctctctaaaatccactataagaggttctatcttcttataattgggaaagtatatagcatcgagagcactttgaatgtaaaaatatatacatattataatagttatgcagtacttaaatatgcttagttaattagatttgattattatatgtatctttgttgattattattttttatgtgattattagtagttgtct

SEQ ID NO: 109619 - DNA, 365 bp, Arabidopsis thaliana columbia
gagaaatcctccacgtccaaggcggccaatgcggttaccaaatcggttccaaattctgggaagttatctgcgacgaacacggcgttgatcccaccggacgttacaacggtgattccgccgatcttcagctcgaacgtatcattgtttattacaatgaagctttaggttggttgttatcttttctagtgttgttttttattgtatttttatgtttttttgctttatgattagtttttatctttattattctcattgtattttatatttctactatatttttattattttgttatttgtatttcttctgtttgtatatttatttaatttgtttatttttatttataattatattattcagttatctc

SEQ ID NO: 109620 - DNA, 252 bp, Arabidopsis thaliana columbia
tgagatttgttgacagtctctaaccatgggtaaagagaagtttcacatcaacattgtggtcattggccacgtcgattctggaaagtcgaccaccactgggcacttgatctacaagttgggtggtattgacaagcgtgttattgagaggttttagatggaggctgctgttatgaacaagatgtcttttatgtctgtaatgggttttaacattcttttttgtttagcttattttgtaatattatcctttttttt

SEQ ID NO: 109621 - DNA, 270 bp, Arabidopsis thaliana columbia
ggttgatgtgccattgtttccgttagaccagcaaggatctctagatttgtctgcgataaacccgaaccaaacgacatctatcggagctccatctggaagctgggaaactcaatcacagagtctctacaacacatctagcctcggttttcattactaagcatgattcattgaaacatcatggttggcatcaatctatcatcaaattctgaagcatattctatttcattagctcattaaagtagttattctcgaaatttggttagtgcatta

SEQ ID NO: 109622 - DNA, 391 bp, Arabidopsis thaliana columbia
aaactaatgtcgacttctaagaccataaccttcactctcttcatagcagcactactctcgtcctgcgacgcagccacaaacgctacatcgcaaccactatttccagcgattcttatctttggcgattcaacagttgacacaggtaacaacaactaccactcacaaacaatcttcaaagccaaacatcttccttacggaatcgatctcccaaaccacaaagctagtggaagatttacaaatggcaaaatcttttccgacataatcgcaacaaaactcaacatcaaacagtttgttcctcccttcttacaaccaaatctctctgaccaagagattgtaaccggagtctgttttgcattcagccggtgcgggttacgatgaccataccagtctt

SEQ ID NO: 109623 - DNA, 154 bp, Arabidopsis thaliana columbia
  unsure (1)..(154): unsure at all n locations
gngtagaaattagggaaaaacaaaacaaataaaatctgggtgtaggggagagagagctcgtgctcgtgattttgatatctatcacttcgttatcgattttaacttccacattgttttagattcttgtattaaacacgtttctgttttacttttt

SEQ ID NO: 109624 - DNA, 229 bp, Arabidopsis thaliana columbia
ctttaaattagtaggataccctcgagtttgacgattctgtctctggaatgggtgaacaagaagcgagctatgtgtttccggagagctttaaggatttggtggatcgaacagtagctttgcagtgtgattatccgatcaggaagttgtcactaaaatgctatgttgacagggacgacgaacaacgaaaggcttgtgtgaaccgcttgatattgaatgtcttttctcgcgt

SEQ ID NO: 109625 - DNA, 253 bp, Arabidopsis thaliana columbia
acgcgtccgtgagagcaaaaaaggcttctctgtatctccattaacggctcgccgcatcaatgatgaaatgcgggtagggctaagtttgagtcgatcccaaccaaagctccgacatctccatgtacaatttccgccaaaacatcatgaagcttgtgaaggatggttttattatcaggtaaccaaccaagattcattcttagttcatatctcctataataatttaatttctttaatttaagtaattcagtttttt

SEQ ID NO: 109626 - DNA, 216 bp, Arabidopsis thaliana columbia
  unsure (1)..(216): unsure at all n locations
cggatgacccacgcgtccgatttagacaaaaaaataaatatggagctcgagacctcagtttatcgaccaaacgtcgccgtttatgattctccggatggtgtggaggatccaggtcnaatccttccaaatcccttccttgaaccagacatgagatgccctgacctttaaaaccgtatgacagagccggtctttttgctctttttgtaaaaacgcatc

SEQ ID NO: 109627 - DNA, 254 bp, Arabidopsis thaliana columbia
cttttagtttccttttatccaaaaatattaaaaagtcttagtgtttctcttaggttggttgagaatcatttcatttcaatggaatccaattgtgttcaatttctcggttacaagaccattctcatcacaggagctcctggttttcttgccaaggttttggtatttaatatacttatttttcatccaattgttagttttttatttcctttttattagtttcttttatttttttttattcaatttttgattatttc

SEQ ID NO: 109628 - DNA, 125 bp, Arabidopsis thaliana columbia
ccacgcgtccgctgaggcttacctaggagtcacaatcaagaacgctgttgtttccgatccacctcacttcaacgagtctgagtgctatgctacaaaggatgcgtggcaccaactctctctctcaa

SEQ ID NO: 109629 - DNA, 118 bp, Arabidopsis thaliana columbia
cggacgcgtgggagaagacgttatacaacgcattcaagaatttgacaaagaacattcaggttgagctggaggagtttaacataatgagagcaggtgatccatagcttaccgtgaggcc

SEQ ID NO: 109630 - DNA, 122 bp, Arabidopsis thaliana columbia
  unsure (1)..(122): unsure at all n locations
ctttcctttaattgtagttaacgaaaagatttcttctttgttcagcatcagnctatccagcaatggctgtttcggcggccataacagggtggtcaagcgcctccatacgaactccttccgca

SEQ ID NO: 109631 - DNA, 172 bp, Arabidopsis thaliana columbia
cttctatcgaaaggtaaagagtttgaagaagtttgtcacagagaaagagaagatgtctgagaaaaagggaaggaaagaggaagtgattaccatatagtactccattaaccttcacagacgccttcacatatgcacctttatgaagaaggcaccttaagccattaatgttatt

SEQ ID NO: 109632 - DNA, 255 bp, Arabidopsis thaliana columbia
gcaggccatcttaaccttacgattggtgttcttgctttgagcgaaaccctagaatcggcttaacccatttgagcagagatgctggagtagcagaggaggctttttctgttcgagagatatgcgggactcttgtctttccggccataccctttcgtggggcatcttctttccgtttagatctgtccttgagtctctattttaatcttacacggagcgtattgggttgtttttttcattactattttaagtggtttt

SEQ ID NO: 109633 - DNA, 434 bp, Arabidopsis thaliana columbia
tctctctctccctctctctcattaagaaaaaattagagaatcagagaagaaataaaaagaaagcaactcaaatctttaacctacaaaaacccagatttgttaactctctcattcttcttcttcttctcaacaacatttgatctttttgattctcaaagtattctcaaagtaaaagagaaacacactttgttgtctcaacaagcaagcaaacaaaacccatcttggtaaaatctcatttctttcccttgatattcttattattatctgttacttcttttttcttataatatgtttattttcggaaattattgattttttttatttttttatttctatttttatattcttatgcttaattttctttgtattgccttatttctttaattctctgtattttacttttattctttttatttcatttattttattttttt

SEQ ID NO: 109634 - DNA, 430 bp, Arabidopsis thaliana columbia
ctccaatctctctgcagccacagaattagtgcgatttacgaaaatctctgaaacctccgatcagttaacggcgaccgccgattttcccggtaaaaatgaacgacggagatgtatcgaggcagatccagcagatggtgagatttatccgccaagaagcggaagagaaagcaaacgagatctcggtttctgctgaagaagaattcaacattgagaaactccagcttgttgaggcggagaagtagattatctggcaagattatgagatgaatgttttgtttgctgttgttttttataattttgatttcttctttgattgtttaaacttttatatttataagttttttttattcaattctgttcttttatattattattttatatttatttcttttaattttaattttttaatgtcatttatttattttcgttt

SEQ ID NO: 109635 - DNA, 150 bp, Arabidopsis thaliana columbia
attctcttctctctcgatatcatctaaatctctctcgatctctatttcgcaaaatggctgacaagaagatgggaatcggaatcaacggtttcggaagaatcggtcgtttggttgctagagttgttcttcagagggttgatgttgagcctt

SEQ ID NO: 109636 - DNA, 285 bp, Arabidopsis thaliana columbia
ctagatggtagtagagagttcactgttaaagatggtcatttctgccctgcacttactaaggctgtgaatactatgaaatagggtgataatctcctttcttacagttaatccacaatatttttttttttaaattcttttctctattttcttctttctttttcttcgttccattctttatctaatctcttatctgattatttctataaagccttccctctatacatttacgctccttattacttcaaaactcatctcatagttttgtaataaccctaaaatcatata

SEQ ID NO: 109637 - DNA, 131 bp, Arabidopsis thaliana columbia
tccgtttcattcttccagtgtcgatgaaaccaatcggcggtggagttggatgtggcgttgcggcttgtgaagtgaatttgaacatttgttgtccatcagctttggaagttaagagagatgggaaagtggtt

SEQ ID NO: 109638 - DNA, 270 bp, Arabidopsis thaliana columbia
atatttctaagattctttttcaggaatccttattctctaccaaattggcgataattaaaatatatataagtagagagactagagacaaaggaaggggtcctcgagtttcgaagacgacccattctcttcttattttggactaaagattcttaaaatcaaactggttattaaaatactgagataacaagttataaacctacattacattctttctttctctttcaatctaaattcgctgatggaagatggaacaggtctttctctttgacg

SEQ ID NO: 109639 - DNA, 442 bp, Arabidopsis thaliana columbia
gagagctttaccatctccttcctcactgctcttcttctttctcctgataacaccactcttcctctgccaagaaaacagagtctctgcctcaatgcctccatctgagtcagaaactctcttcaagatcatggaatcaatgtcttctgatcaacaatggcgtcaatcccacccaaacccttgtgcacctggctcatcttggccaggcattgagtgcaaaaccggtccagaccacttatcacacgtctctcgactcgatttcggctctgctccaaacccctcttgtaaatcctctgcttctttcccttcttcaatcttcactcttccttttctccaatcagtcttcttcttcaactgcttcactcacttcccaaccacaatcatgttccctataaaactcatccctaactcttctctttaacaacttaacctcagatcaaaccct

SEQ ID NO: 109640 - DNA, 208 bp, Arabidopsis thaliana columbia
cccgaacaagctactcttcgtgggaccaaaggtcttgttcttccagctaacaccactcttcctatgcctagagaccagctactagggtctcaatgccttcatctgattcagaaactctctccaagatcatgcaatcaatgtctcctaatcaacattggcgaatgtcctacccaaacccttgagcacctggttcattttggccattcat

SEQ ID NO: 109641 - DNA, 306 bp, Arabidopsis thaliana columbia
agttttaagcagttcttgctggtatctacgctgtttttttttttgacaacaccgttcttaacaaggactaagacctatttctatggtgagtatggccatttactattttcatatgtaagctttatattacctattatcatttattattgtacaaaaactttcgtttttttctatcaataattaatttattatataatttatatatcaatcattttctttttcatcttaattagttaattttatactatttgttatttattaattattatataataatatattacctttaaatttatttttaattta

SEQ ID NO: 109642 - DNA, 466 bp, Arabidopsis thaliana columbia
  unsure (1)..(466): unsure at all n locations
cgttatcagtccccgccgagaatcgagaagcagcagccatggccgacgtagttcaataccgcctcgagcggatggttgacgagcttgatgatctagaacgaagagaaatcttcactcgtgctgagatagctgagatcgtgaagcagcggcgtaagtttgagtaccggctcaagcgttcaagcccactcaaagaagatttcatagcctatattgactatgaggntaagctcgatgagctccgtcagctacggaggaaatcggtggcgcgtgtgactaagaagggatagatgaattcagtatctggtttcgccggtgtggctaggattgttgggatttattgtttgtctatttttaggttttaaagttttttttcattttgtttttaatgttatctctattttctgctattctttttattatttttttaaatttttttatacttttttataccattattttttaattc

SEQ ID NO: 109643 - DNA, 146 bp, Arabidopsis thaliana columbia
tccacactggagaaagtagtgtctgctgttgaagttcttcacggcgttcagattgatgaggatgctcttgttggaaaatctactaatgctgctggttaccttgagaaagcaacacaagaggttgaaagagatcttagttcaggaca

SEQ ID NO: 109644 - DNA, 345 bp, Arabidopsis thaliana columbia
gaacaatggctaattcagcgtctgggatgcacgttagcgatgagtgcaagctcaagttcttggagttaaaagcaaagaggaactataggttcattgtgttcaaaattgatgagaaggcttagcaagttatgatagacaagcttgggaattcagattaaacttactaagtatttttcatatctatttcttgttgttgagtttttttttgcttttttaagattattattattattattatactttatttctgcttttaatttcttacaatatttattatattattatgtgtttttcttttgattattttttttttctttatttttttatatttatttttagttattt

SEQ ID NO: 109645 - DNA, 369 bp, Arabidopsis thaliana columbia
tggagagttcgaggaaagattgaagaagcttatggaggaaatcaggcaaagtgatgagataattctgtgtattgatgaagtgtacacgctcatcgtttcattattccgtttaatgttcgatctgttctttaatttttaatccgttctttttgggtttattttttttttgttttatatatttacttttttttatttgttttgttttattttttttattttttatttatttttttattactttttgtttttgttttttttatttttttttttttttcttttttattttttttttttttttatttttttttatttttagtatatgtcttttttgtcatttattttattttattttttttattttttttattt

SEQ ID NO: 109646 - DNA, 165 bp, Arabidopsis thaliana columbia
ctttcgttgagcactactactccaccttcgatgcatatcgtccagggttggtttctctataccaagaaggatccatggtgggcttcgaaggccataagatccaaggctcttagatcatcgttcctaatctcaccggcctcccttttcagcggtgtctgcacaaca

SEQ ID NO: 109647 - DNA, 206 bp, Arabidopsis thaliana columbia
gttttgaattttgaaattgctcatttccttttctctaccattccccctctctctttccaaatgcgcaaactcattcaacagcggccattgattctctctagagctgacaaatccagaatcggatctcatgagacttgaagctcgcttctcacgatgaatcagtaccacatctacgaagctattggacatggctaatgcacgactgt

SEQ ID NO: 109648 - DNA, 293 bp, Arabidopsis thaliana columbia
agcctctaggatgttctttgctaccagactctctggttgcatctcaacaggaagtttaaagtcaacgacaactatatcaaggagaagaagtttgaagactaatggtctttttatgagaacatatcttcacagctatctttatactctgatttttaagagactgatttcttattttttagatgttttttatatatttatttttttttatatcttttttttcttgtgtttttaattattttttttctctctttttttatttattttaagtcactgatttattattacattatttt

SEQ ID NO: 109649 - DNA, 426 bp, Arabidopsis thaliana columbia
ctaaactttattggagaaaccctaatcggcgacaatgggtatttctcgtgactctatccacaagaggcgtgccactggaggcaagcagaagcaatggaggaagaagcgaaagtatgagatgggaaggcagccagccaacaccaagctctcaagcaacaagacggtcagaagaataagagttcgtggtggaaatgttaagtggcgtgcgttgaggctcgatactggtaactactcgtggggaagtgaagtaactactctgaagatcagagtctttgttgaggtcttatttgccttcaaaattttgctttatttataagacttttgttatttttccttttttatagttgttgttatttctttaaaaatgttaatttttccatatttttaaaagtttcgttctttttttaaattttgttgcttttttta

SEQ ID NO: 109650 - DNA, 321 bp, Arabidopsis thaliana columbia
  unsure (1)..(321): unsure at all n locations
caaaagtggaaatacaacaaaacaatgtcgggacttagattggatggcaagatcgcaattataacaggcggagctagtgggattggagctgaagcggttaggttgnttacgtaccattgtgcttatgtgtttattgtgtacatatctttatagtttgtttatttccttgtttttttatttgtttttttctattctattattttttatgtttatttatattatatttttattttttaatttttgtattttttcttaatttttttatttttattcttattatttttttatatttatataattttatttttttttatttatatt

SEQ ID NO: 109651 - DNA, 436 bp, Arabidopsis thaliana columbia
caaaatccatggccaagaaaggtatcccagagtggctcaacagttctctctggtcctcctctcctcccatcgacgatcgccacctccgcaatcctgccgccacttccatcacccctccatctcctccgatcgtcgagcgtcctcctttttcttcctctccctccgcgatttccaccgcaccagctcctcctcttcctgttcgtcctccttccaaatctgagattaacgatttgcagaatgggagtggtaacgatggtgctggaattgaaactcccgcagtttcttctgttgaagatgtttctcgaaaagcgcaggtccgggcttgagtatcgaagaaggtgatagacttgaaggaattgaggaagatagcttcacaaggtctaccttgttgatgctggaattcgatccattgtttggaagcttctgttggatattt

SEQ ID NO: 109652 - DNA, 309 bp, Arabidopsis thaliana columbia
atgcaccagtcatctcagccgccaaggcttaccacgagcagctatcagtccctgagatcaccaatgccgtttttgagccagctagcatgatggcaaagtgtgacccgagacacggaaagtacatgggcctgttgtttgatgtaccgaggagatgttgttcccaaagatgttaatgctgctgttggcactcattaagacatataggattttttagtttttttactttttgcaaatttgttttatttttcgtaatttttataaaaaatctataactatattttataatttttgtgattttttttcattttt

SEQ ID NO: 109653 - DNA, 332 bp, Arabidopsis thaliana columbia
gttctacgccgaggaagagaagaatgatcctgaatttgcaaagaagcttgctgctcttgccgatgtttacgttaatgatgccttcggaactgctcacagagctcatgcttccactgagggagttgccaaattcttgaagccttcagttgctggttacctcatgcagaaggtacttgattaccttgtctgagctgtttcataccctaataagccttttgctgccatattagtaggttcaaagtttttatcattttattggtgtttctgagttttatcttattttcatttgaccttctctatgtcttggtttgtttaatttttattttttataa

SEQ ID NO: 109654 - DNA, 431 bp, Arabidopsis thaliana columbia
gagagattcagctgcgttgggcaaaatcccagacgaagatcagtgattagtcttttgataacttgagccatggcaactggtaaaactgtgaaagacgtctcgcctcatgacttcgtcaaggcttatgcttctcatctcaagcgatctggcaagatcgagcttcccacatggacagacattgtgaagaccggaaagttgaaggagcttgcaccatatgatcctgattggtactacatcagagctgcatctatggcaaggaaggtttacctgatgggaggacttggtgttgtgtcttttcttaaatttttgttgattgctatttttttcttctctttcttacattttttctttgttatatcttatattttcactttctttatatatttttcatattttttataatattttcctaccttttatatacttttatt

SEQ ID NO: 109655 - DNA, 104 bp, Arabidopsis thaliana columbia
  unsure (1)..(104): unsure at all n locations
caaagatggagtttcttacatttatctgcttttataattgatcaaatcaaggttgctgcttaggagncatttttccagtatgagcaagcatctaaccttgtatt

SEQ ID NO: 109656 - DNA, 462 bp, Arabidopsis thaliana columbia
gttgaagaagacgaagaagataccttcctctttatcttctccgatttctcaaccttcccgtctgcttgtcgtaaagaaatggcgccgagtagacgggatttacagcttactccggtcaccggaggttcttcttcccagatcagtgatatggaagaagatgttctcttcgtttcgtattctcatcgtatctttactctctttgcatattttactaatattcgtaatttgtaaaattatttttccttttatttcttatttttctcatgttttcttatattattttgcaacttttttttttttattctttctattttcttcatataatttttgttttttcgttttctgcttaattgtttttcttttttctacaattttcttcatttttattttcttttattttttatttcattttcttctatattttctatcttcttcttctcacattttttttcccatttttta

SEQ ID NO: 109657 - DNA, 251 bp, Arabidopsis thaliana columbia
cccacgcgtccgctaaaatctctctctgccaatctcatcttcaacctctctctaactctcgttttcgattctacaatggctgacaagaagattaggatcggaatcaacggattcggaagaattggtcgtttggttgctagagttgtttttcagttgaacgatgtttaatttttatattttttttcaaacctttttgtaatttttatttgttttacattgtactttttttgtcatttgttttatgtattttc

SEQ ID NO: 109658 - DNA, 198 bp, Arabidopsis thaliana columbia
gctgagaagagataaaaaaagccttggagaagaggttttcttcttcttcttcttcttctggttgggcttccctcctctgcggtgaacgatgtcgtatcacgcttcttcttatcttctccgtcgtcgtcttactttcgtataacctcgatctctcactcgtgtatcttcctcagctttcttccttggagatctcttttt

SEQ ID NO: 109659 - DNA, 221 bp, Arabidopsis thaliana columbia
tcaagatctagctccggtcatgaagtcgtcggaattccaataccacgaggaatacgtgagaaattcaagaggtgtagagttgttcgcatgtagatggatcccatcttcttcgtcttctcccaaagctctggtttttctctgccatggttatggaatggagtgtatcgactccatgtaagaatgctgaatcaggctggctttagctggattcgcggtttttg

SEQ ID NO: 109660 - DNA, 316 bp, Arabidopsis thaliana columbia
tctgacgcgaacgtttctctcctccgtctctcgatccctctcttgacgtctcgctgatctggggtgctaagattcaagcttgaagaccctaatttctctagccattagcatctatttcagctcaactttagattcaaggaaacaattattagctttttcaagatctttagtgttccgatacaatgtcatttttttttaaattttttctcttatcaactatttttcttattttttaatattaattttcttttttttattttcttctcttttgctaatatttctttgtttctcttttatttttttattcaatcttaat

SEQ ID NO: 109661 - DNA, 271 bp, Arabidopsis thaliana columbia
gaaaattttccctttactctcaaattccttttcgattttcctctcttaaacctccgaaagctcacatggcgtctcgaaactatcggtgggagctcttctcagcttcgttaaccctaaccttagctatgattcacctggtctaagcaaactccgaatgtgatgctcttttcgcttttttctggagttttacagttttcgtctttctttttcttctttcattattcttctttttttttgctactttttcccttttcttcatattttttacttt

SEQ ID NO: 109662 - DNA, 267 bp, Arabidopsis thaliana columbia
ggaagacctgagttcttctttgatgatggagcttatccagaacaggttgactggattggtcagaagaatcagatagacgctgctaaggctgcaggagttaagcagattgttttggttgggtcgatgggaggaacaaacattaatcaccctctcaatagtattggcattgctaacattctgttctggaagagaaaggctgagctctacttttctgtttttggtattctcataacctattattacgtgtcttaatttctttttatttta

SEQ ID NO: 109663 - DNA, 241 bp, Arabidopsis thaliana columbia
cttgattatcgtccagggattgcaacagagagaaagtaacgatgccggcgaaacagaggacagctaaggtcaacaggaatcctgatctgatcaggggagttggtaaatactcaaggtctcagatgtaccataagagaggtttgtgggctattaaggtcaaatatggatgcttttttttttgcctttactctaattctaatgttgattctcttgcgaataatgtcttctttttttctttttt

SEQ ID NO: 109664 - DNA, 398 bp, Arabidopsis thaliana columbia
gccacctttcccacaaaccacacaacaaccaatgatgggtcacagggaccagttttggtctaatacagctgagtctcccgtctcagagtatatgcgttatcttcaaagttcacttggagattcaggacccaatgctaaccaaatgcagccaggtcatgagcagcggccttatatcccaggtcatgagcaacggccatatgtgccaggtaatgagcagcagccatatatgccaggtaatgagcagcggccatatatcccaggtcatgagcagcggtcatatatgccagctcaatctcagtctcagtctcaacctcaacctcaacctcaacctcagcaacatatgatgcctggaccgcaacctcgaatgaacatgcagggccctcttcaacctaaccagt

SEQ ID NO: 109665 - DNA, 280 bp, Arabidopsis thaliana columbia
gcgtccgcggacgcgtgggtgttggtacagcatatgttttttccgaggaaaatgaaccaactaagggaaggatacttgtgtttatagttgaagaaggaagactgcagcttatcacagagaaggaaaccaagggagctgtttatttttttaatgcctaattgacttactttttgcttctttttaataattatttagttgataatattattttatctatattttttcttgtgatttttttattttgtttctatatatattattatttttatattcatttttt

SEQ ID NO: 109666 - DNA, 434 bp, Arabidopsis thaliana columbia
gcaaagcttagtaatggcttcaatgcacgaagctctgttctcttctcggcttcttcaagtcaattcttctttttccttccgttgcgctcttccaattatctcttcaccagctgcagtatcttgcgcaatcaaatcgacccagttttttaaacagcgttgtagaaccaaagtgagggacttttctctatcttcactgtcccggagagggttcgtttgcagagctgctgagtacaagtttccggatcccatacctgaattcgccgaagctgagactgagaaatttagggaccatatgttaaacaaactatcaaaaagagatctttttgaagactctgttgatgaaattgttggagtctgcactgagatcctcgagacgttcttgcgcagtgagtatggaggacctgggtcacttctggtgatacctttcattgaca

SEQ ID NO: 109667 - DNA, 419 bp, Arabidopsis thaliana columbia
agagacagagagagagagagattctgcggaggagcttcttcttcgtagggtgttcatcgttattaacgttatcgcccctacgtcagctccatctccagaaacatgggtgcaggtggaagaatgccggttcctacttcttccaagaaatcggataccgacaccacatagcgtgtgccgtgcgagaaaccgcctttctcggtgggagatctgattatagcaatcccgtcttattttttcaaacgcttaattcttcgcttttttttctaccttatatattacttcattcatttcctatatcttttatttttttattaccatataactcttgattgtatatatcatatttatttcttattttgttttgcgtttatttttttaagtcctttcggaattcttaatgtattattcttgtgtttctg

SEQ ID NO: 109668 - DNA, 418 bp, Arabidopsis thaliana columbia
acagactcagcagcttaccacattgttgctgggggctacattaggggagcccgggagccgatggccgacctgcaattatcgatctgtgatcggggtaccagcgctgatggcctggtctgcgtgcgcttaatccggacgcgctacctcttccgcgctgcgaccgacgcctgctcccgcaccagcccgggaaaatgtgaatctcaccgagcttttaagtgtagctggtccgttccacacattcctcgactaccttctctcgactggagtcattgagactttccaaaaccaagctaacaacactgaggaaggcatcacaatctttgtccctaatgatgatgctttcaaagctcatatgattcctcctttgtcaaatctcacataaggatcagcttatgcagcgtgtgtctctttcatgctt

SEQ ID NO: 109669 - DNA, 144 bp, Arabidopsis thaliana columbia
gtgaagaaccctatttcccaacaaggtgacgatttcttcagctagcttgaatgcatctggaaaaggatcgaataaaccaaatggggtgaaatatttttctttaaagatctattaatctcttattttcttaaacttttaattctc

SEQ ID NO: 109670 - DNA, 428 bp, Arabidopsis thaliana columbia
agagaacacagacgataccaactttcttcaatctcgttgccgcagtataattatctcattcctcggatatatctctccttctgcggcggcgacaagaagctacaagaataaaaagtctgttttctctcttttcaagaaaccacttacttcgaaaatggctcgttctatctctaacgttaagatcgtatctgctttcgtctctcgtgaactctccaatgctatcttccgacgtggttatgcggccacggcggcgcaagggagcgttttgagcggtgtatgaagtgtatccgttcctatcattatatttattactataaattctttataccgtttctatctttatgtaattcttactttatcaatttacacttatctgtaatatttatgttctttcttctctacattatatattgttcttttcattatat

SEQ ID NO: 109671 - DNA, 382 bp, Arabidopsis thaliana columbia
caaaaatcgaaattcacaatttctcttcttctaaatccatggagtgatgatgatgatagatagattgaatccaaacacaaaccggatccgagattaaaaacaatccggattgtttatatttactttagatcggagaaagatgccgccggcgaccggagatatcgatcgtcagatcgagcagcttatggagtgtaaagcgttatctgaaacggaggtgaagatgttgtgtgagcacgcaaagacgatttcttgtggtattatataatgttttaccgttttattgcgcgtctaccgtttagttttgtttctttttgctgattttaattttttattttatttgtttgtttggtaatggcgagaactttaatagttgttttttttt

SEQ ID NO: 109672 - DNA, 253 bp, Arabidopsis thaliana columbia
caaaaatcgaaattcacaatttctcttcttctaaatccatggagtgatgatgatgatagatagattgaatccaaacacaaaccggatccgagattaaaaacaatccggattgtttatatttactttagatcggagaaagatgccgccggcgaccggagatattgatcgtcagatcgagcatcttatggagtgtattgttttttattgattcggtggttgtatttttttttatttgtcattgttctttttttat

SEQ ID NO: 109673 - DNA, 426 bp, Arabidopsis thaliana columbia
gcgattatcacagaagaagaagaggatccaaaaaccctaaatccaccgaagaacaaacctaaagactctgactttacgaaatctgaatcaactatgaagaaccctaaaccccaatctcaaaaccctttcccattttggttctactttacagtagtcgtctcactagccacaatcatcttcatatctctctctctgttctcttctcaaaacgatccaagatcttggtttctctcactcccaccagctcttcgtcaacattactcaaatggacgaacaatcaaagtccaagtaaactcaaacgagtcaccaattgaagtctttgtagctgaatcaggttcgattcatacagagactgttgtaatcgttcatgggttaggtctaagttcgtttgcttttaaggaaatggttcaatctcttggatcaaaa

SEQ ID NO: 109674 - DNA, 406 bp, Arabidopsis thaliana columbia
gtggttaacccatgcaaggtatgagaactgcctgtcaaatgagcaaggccgagtgttagcagcaaaacttggtgtgacagatcttttctgggactgggacttgccgagaaccagagaaggattctaccggttccaaggctcggtcgcagcggccgtggtccgtggctgggcctttgcacagatcgcagacatcatctggatggaaacggcaagccctgattctcaatgaatgcacccaattcgtcgaaggtatcaagtccaagacaccggaggtcatgctcgcctacaatctttcgcctgccttcaactgtgacgcttccgtgttgacggatcatctgatgtgttgaatcattccgttaattgctttgcctcgtaattggtggccctttttatcgcctgtgtttat

SEQ ID NO: 109675 - DNA, 133 bp, Arabidopsis thaliana columbia
aaagaatctggacatatgctctctcggttgtacttttctacggacatgcaaataactggcgacctaaaattgcaaatggcggttggcatactattacatgagcatctagaattgcaacgacaactgctactac

SEQ ID NO: 109676 - DNA, 159 bp, Arabidopsis thaliana columbia
  unsure (1)..(159): unsure at all n locations
cgcgtccggctgctgatattgcctatggtcttgataagaagggtggcgagaagaatatccttgtgtttgaacttggtggggggactataaaaaacacanncttgtactattattacacaccgctcctaacactaaaagaaaattaaaaaatttttctgc

SEQ ID NO: 109677 - DNA, 160 bp, Arabidopsis thaliana columbia
tcgcttgaatccattacagagggattgtggagtggtttggacacacttcttacaacaaagggtccgatgaactatgagtgtgggcaggatctgtaatcatatccattgtatagagagatatccatctcaattcgaggtagccaaacatgtatatggctta

SEQ ID NO: 109678 - DNA, 304 bp, Arabidopsis thaliana columbia
tcgacgccacgcgtccggcgactgcgagatccatcttcttcttcttctccttcttcttcttcttcttcttcttccaacaaatgttcctatgatctctgtgtatgagcagaatctgtaatcagatccattgtagagagagatagccatttcaattcgaggtagccaaagatgtatatggcttacgggtggccgcaggtgatcccgcttctacctggatcgtgtccgtctttgcagcgagtcgtgtaccttaagctctccggccagctattgctggtcggttcttcggctcacctggagctttggg

SEQ ID NO: 109679 - DNA, 343 bp, Arabidopsis thaliana columbia
caaggcaactaggcttaggactcatggcaagccttcctctggtgattttagccatggcagtggtggtggattttcgttgaagtcgcttggtgatccgaatactgcttctcatggttttaaacctataaatttcagaatgcctgaacccaatttatctcacgatctgcattatgctgatgagcaagatcatcgattaccagaaaaccagtttattaaacacaatgttgcattttattctcaactctgtcttcaacaatgattttaatattcttgaatttatatataataaaaaaacttatgattcaaattacattcctatccatttatttgtttaaagttttta

SEQ ID NO: 109680 - DNA, 254 bp, Arabidopsis thaliana columbia
gtttctcataaagatctcaaagatattcctactacacatgggttctcttgacttgccttacgcttcatcgatcaagggaggaagcgcgacgcatctccagaatgtatgtaaacgctatgcttataccgcatcacaggatcctctggaacgagtaccatccatgttacttcgggaaagtcgggatcagggattaacacaggcttcgcaacaagtttttttgcccaatcgcgctcctgcgacatgctatggtcact

SEQ ID NO: 109681 - DNA, 273 bp, Arabidopsis thaliana columbia
agaaaactctcgtctgttaaagctttcctctgtttaccttcggagtcaatcttgattccgatgggactcgaatcgggttgtggagcgtttgggtgaagacatggagaaactaatgactgaatcacgtttgaaaccagatgttattgatttgaatcaagatttatctagggtatattgggggatgtcgactttaactgggaatgctacaaagataggagcttaataatgcaactccttaaggacaatctgaccttgtggactattcacatttta

SEQ ID NO: 109682 - DNA, 319 bp, Arabidopsis thaliana columbia
ctttgagattctccgattgcatctcaaaaaatctcagctatggctacctcctccgcttggaagctcgatgaccaccccaagctccgcaagggtaagaccatcgccgtaatcgtcttagatggttggggtgaatctgcccctgatcagtacaactgtattcacaacgctccaacttcagccatggattctcttaaacatggagctcctgatacttggactttgatcaaagcttcacggaactggtgtaggactttctagtgaagattttttttgaaacttcttgggttttttttctttcttttttttgcttatttttttt

SEQ ID NO: 109683 - DNA, 384 bp, Arabidopsis thaliana columbia
gtccgcggacgcgtgggttgcctcactgttcttcgtcatggcgaacaatccttcacagcttcttccttcagagctaatcgataggtgtatagggtctaagatttgggcgataatgaaaggagataaggccctcgttgatattctcaaagcattcagcgtctatgacaccatcgttccttaacctattacaacatccagaaagactcaacgcttgaccttgtccttcgtctccggggaggagcttacaagaggaagacgacgacctacacctagcctaagaagatcatgcacaagctcaagaaggtcaagctcggtgttctttcagtctacaacggtttatgtttcaaggtaaggttccaccgtttgtgttgaaggatttgccct

SEQ ID NO: 109684 - DNA, 311 bp, Arabidopsis thaliana columbia
catggcctcattaccattggggcctcagcctcattctcttgctccgccgctgcagcttcacgacggcgacgctttgaaacgccgggcggaattggattctgataaggaaatgactgcagctgaccttgagggatagaatggctgcgcatggcgattggaagacggacttactttaaccgattacaacatgcacattgaatcaacgcttcatcttgatctttgtctccgtggaggtgtttttaataggatgaagtatgtcctacaccaatcctaataagatctagctctatgccatgctggttaaacctcgc

SEQ ID NO: 109685 - DNA, 223 bp, Arabidopsis thaliana columbia
  unsure (1)..(223): unsure at all n locations
tcgtgttattgctcantaacagtgacatgtgtttatgtgtgttatgatttaaaagttttgtttttttttgctgatggatttgtgttttttcttatttctcgaaaatggctttcgcagctttgcggatcttcataagcctgagactgaacttgatgggaaggcttgcgctcgtgtttgccaaaacaaccttattgcttactctgagactatgttagacccagct

SEQ ID NO: 109686 - DNA, 203 bp, Arabidopsis thaliana columbia
acgcgtccgagcgatcaaaagtcttattcttgtgaatctgttatctcaattgcttcttaaacaatggcgactgttgatgatagaaatactcgaggtgatactcatactaccgtttgtcacgaagacgtttgttgatactataaaatacaataagcatattaccatctttctcatccatattccttagccgtgaacgatcaata

SEQ ID NO: 109687 - DNA, 278 bp, Arabidopsis thaliana columbia
cttaacagtggctgaaacttgagagagagagagagaggaagagagcgacactatggcgatgacacttattaacagagcaatctgtagaaccgaaaccgttggtgctttcagactctcgcttaatctcttaagaaatttctctgcggcgccggcgagtgaaaaccctagctccgattcgagtaaaccgaaacgaagaaagaagaagaacttaatcgaagttgctcagttcttacctaattggggaatcggataccatatggctaaagctcattggaatg

SEQ ID NO: 109688 - DNA, 429 bp, Arabidopsis thaliana columbia
atgagtttgacccagttggttcaaagcttgtttgggagcaagtcttaaagcctttgtatggtatgaccacagacaaaaccgttgttgaagaagaagaggctaagctagccaaagtcctcgatgtttacgaacacaggcttggtgagtccaagtatttggcttatgaccacttcactttggtcgatcttcacactatccctgtgattcaatacttacttggaactccaactaagaaactcttcgacgagcgtccacatgtgagtgtttgggttgctgacattactttaaggtctttttgttcaagaatgttttttatagggtattcttaaaactatttttttgtctcagttatatttttattctaatgttgtttgtttttttttatatgtttcaagattttttataaatatttcctgtattttacttttt

SEQ ID NO: 109689 - DNA, 407 bp, Arabidopsis thaliana columbia
ctctctctctcttatacgtatggttttgatctttttcaagatcaaacaaaaacaatggagttagagagtacgagcaatggccgacgtccgccgacaccggcagagattggccgtggggcgtacttgtacgtgtgaagatttgtcgttgcgaagtttaggtataatttctgtttctccattgttactctctagtttatttattcttatttttttttctgttttgagtcttatcttttttctttttttcattgtgctttttacttttggtttttttttttttttatgctttttatgttcttttatatatttttttgtattggatgttctatactcattttttaaattttgtccattttttactctattttatcttttgtttttttttttctttttatgtttttttatat

SEQ ID NO: 109690 - DNA, 246 bp, Arabidopsis thaliana columbia
caagaagaagagtggtgacataacaaaaccccataagctcccaagcctagagattctgttgttgatccgattcccgctctccttctgcggtagtacaatctccgtcgccggttacatcagccagggaagagttttaagagatggcatcaaagttgctacaattgaaatccaaggcatgtgaagcatcaaagattgtttccaagcatggatcaacttactacaaacagttgttggattagaacaaga

SEQ ID NO: 109691 - DNA, 211 bp, Arabidopsis thaliana columbia
gagagaatttggcagaatgtacacagtctgagatatccttcctacaatgaagatcaacgtcaagaatgcaaagaagcgcgaggacgtgagatgataaaacctacactcaatcatccgggaacattcgtttaggtggtcacatcgtcatcaaaaaccgtccctgcaaggttgatgaggtatccacttcctaaattgttatgcacgttctctc

SEQ ID NO: 109692 - DNA, 354 bp, Arabidopsis thaliana columbia
cttatataaaggctttgacagagcccgacaatggaagcgatgcaagtggtctaggaacgactgcaacaaaggttgaaggaggttggaaaattaatggacaaaagcgttggattggaaacagcacctttgcagatctgttgatcatctttgcgaggaatacaacaactaaccaaatcaacgggtaagtcagattattggctttcttagatctctcagattttgtatcttaagtgtagaggtcgttcccagaaaactgaaggtaatgaggtggctcttgatttcatcttatggtagtgctgtaaaaatgcattttcataaagaatgctaaataggttggtacgcaatttgatgttc

SEQ ID NO: 109693 - DNA, 376 bp, Arabidopsis thaliana columbia
catcaaaaaagagcgtctttataaacgcccttcgtcttctttcctggaaatctagtttctttcttccacgaaaacgagagagagcaatttcgatccacacttggaaggctgtaataccggttgctaaagaatgctgagcgccagagtgtccctaacttaccggacgcattaaccggcccctctctttctgtcgcgactgtctatctcttaaaaccaaaacccaccttaaaaaatccccctttgtctccttcgttgcccagacttcggattgggctgaagaaagtggagaatgaagcgtcgctgttgaggggaccgaaaacagtttatgagtcacaagatgtgagccgaggtgatgagagcgaatgatatgcgagcg

SEQ ID NO: 109694 - DNA, 248 bp, Arabidopsis thaliana columbia
agcagctaaaatactgtgttctttgttttttccatcgaaatcgaacaaagctaacatctttgcgttttgaaacgacggcggatgagcatattcatggagaaattgtgattgatcctgaaacatctgttaaggtggtcacatcgtcatcaaaaaccgttcctgcaaggttgttgaagtttcgacttccaaaactggtatggacggtctctctaattgaaaatttgtagctaacgttatgattactgctt

SEQ ID NO: 109695 - DNA, 353 bp, Arabidopsis thaliana columbia
gcagaaactctacgagcaatgcttaaacgctccttgtcctgttcgctacttgaccccccaagagatcgagcgtgaggcgcaacgtgagaagctaggtttgattagtaaagagaagcaacgagatatggagatccagaagaaaggaggagctgcttcaatgggagtcaccgatgagccgatgcgaattgggacgccaggtttggattacatttcgttagggatttttgaagctgaggaattgcctaagtataagcttacggaagaagatggagagagacttgcgaaggagtatagtaaagtcgtgatgagagagcatagaaaggcgtcttccatcttaaactttgctttttgaa

SEQ ID NO: 109696 - DNA, 293 bp, Arabidopsis thaliana columbia
cacggacacaaaaattgctcgcaacctttgttccattgtatgtttattgagacatggaaactctgctggcaggtgcatataaggcgtggggggggcaacgaaaatgtattaccggcatttaataacgtcctcttcttatagaatatctaactttcgaaaagagtttatggacgtaatattttttttatattccatcctaaataaattttattgccccgcttttaacaagctacgacctggtaaaacctaatacatgcactattttatttcattggttaaaacatccctttttt

SEQ ID NO: 109697 - DNA, 430 bp, Arabidopsis thaliana columbia
acgagccgtcttttgctccttcaatctctatcgatcgtatcatctgctctgcgatttcaatggcgagccgttggttgagacctgaggtgtatcctttggtcgctgctaccggagatgacgcttggatttatgcaatttctttggttggaaaagagttcatgaacgtgtatatatgttatcttaaatcaaacttagctattatagttttacttccaaacagctacgaccggatgtaaacttatacatggaggggggtattttaatgttgtagcaaatataaaatggtaagtttttttaaaagcagtttgtgtagttagtaatttttttatatacttatttttttaaaattatatttattctgatatattttattgggtatatagaaatttatctttatatattgaaatttagttgtttatatgtttatata

SEQ ID NO: 109698 - DNA, 186 bp, Arabidopsis thaliana columbia
gttaagttacatatagagtaaggaagagatggtatttaggtgtttagacgaattactgggtgcggtcatattgtgtgaggcggggggcccaacaaagaaggattaaaacaagaatgttcaatctatggataccgatacagtaaattgtcagtaaaagatatatgtatgcatataaaacctgagggt

SEQ ID NO: 109699 - DNA, 197 bp, Arabidopsis thaliana columbia
taaacacagaccctttaaatgtctatcgcatggccaagaatatttctatggagaaaggagaaaggagtgagtcaagctggtgtcaatttaccacacctatcgacggctcataaaaaaggtataactccattcgtactgttttactggacactccacaagatttagaagatgaatatggcggtttttaagcaaggatt

SEQ ID NO: 109700 - DNA, 388 bp, Arabidopsis thaliana columbia
ccgtccgattccggtcgaccagcgtcgggacgctggctgaaaacgaatcgtcgtttgaccgaaataataaccgtccgggaaagaaacggttgcacgagtgaaggaaacggtacgaaaacggagccgttaatatgcgatgacggagtgacaaaggggaagctgacgatgtgctacgaggtagacgtttacgttgacggtgggaggtgtgaaattatttttaatgttttattattgatatgtttttgtttttttttgttttttttttattttaattatttttaattttttttatttttatatttatttattattggtggggggggggggatgtttttttattttttttaatatttatatgtattatatttttttatattttttttttatt

SEQ ID NO: 109701 - DNA, 206 bp, Arabidopsis thaliana columbia
taaacaacttattaaaaataaaaaactctctcaatttcttttgaaaaaataaaaaacaaccacagttcgggattcttataaaaaccgtgagcaaaaaaactcatattaacaacttcctccaacaaaaaggcatgtgataatgatctctcctctctccaccgatcttcgtcaaaagtacaatttcagatccattccgatccgtaaag

SEQ ID NO: 109702 - DNA, 165 bp, Arabidopsis thaliana columbia
caagaatactggagattctgttagccagcaagtttcggaatgcgggattcctcagcttacgaagtggaaatcttcacttctttacgctgaaaggggagttggagatgcgaagagcgtgagtagaagatctgataatgggactggatcaaatgatccaatgctaaa

SEQ ID NO: 109703 - DNA, 142 bp, Arabidopsis thaliana columbia
atcttcttctctgcgtctttgaggcaagaaaaatagagaagatgaaagcacccaacatggagacgataacggagtctctagggaaatcgatgatgaattgttctctgaatgatcggagaagaaaggtcgtcggagatgggtt

SEQ ID NO: 109704 - DNA, 355 bp, Arabidopsis thaliana columbia
gttgagagaagagcgaccatcgagtaagatagtttcaataacaagcttctcagtgattagggggagatgagaaccctgtgggtggtctgtttttgaggctgctggttacaaatggagattggatatgttcgaacatgggaactctacctttgatggccggtatatttttttttttacttaatcttttaaacctatttttctttttttctttctaatcatttttgaccctttcttaccaataccttgaggggagcatttctaatttttggcaataaaaaccgtgaagcatctttaaaagcaggtgggggggaggaactcctgatggtttaattactaactttgagataaagtcttt

SEQ ID NO: 109705 - DNA, 261 bp, Arabidopsis thaliana columbia
caaagaaaacatttttcttaaggaaggataattaaaacagggggggatatttggggccgggggggcgcgaaaatccaaatatttcccccaattaatcttctaaaatacacccatctgttccattataacctgaatctaaaaaacatcaatttggaaaacacccttctacttttttgacttattctatggtatactacaattatattctcccaccatacagttattggtttccacccctaatatttttttttccttattcta

SEQ ID NO: 109706 - DNA, 271 bp, Arabidopsis thaliana columbia
aaatctttctcatgcgttttttactttcttgatttggcaatcctcatgagctgattttgatttcttctttatggttgccgacacgaaagaagaagctaggacacaaaacaactcaaattttgtttggtgagaaaaatcaaccaagaaaatattgattcttttggagcaaggagttggtttgattgaaggaatggtggctagtctacatgctatatacaatggatcttgtcatgtcacctttcctatgaatgatctttggcttgttatttat

SEQ ID NO: 109707 - DNA, 431 bp, Arabidopsis thaliana columbia
aagatattcaacacaaacaacctatgggttaacttgaaggccatcaaaaagcttgtggaagctgatgcacttaaaatggagatgcgtgcgcaaacccaaaggaagttgatggagacaaaggtcttcaactggaaactgcagccggtgctgcgataaggttctttgacaacgctatcggtgttaatgtacctcgctcacggttcttgccagtgaaggcaagttcagacttgctgctcgtccagtctgatctctacaccttagttgatggcttagtcactcgaaacaaagctagaactaaccccttgaacccggtggtgggggttggacctcagataaataatgtggctattttcttgggcctggttatgttcatttctatgattttctttctcctctgcctttatgtgtttggcgtattcatgtttttgctt

SEQ ID NO: 109708 - DNA, 245 bp, Arabidopsis thaliana columbia
caccaccaccatacgtctacagctcccattccctaccatactactctccttcgcctaaggtaagcgtacaaatctgcacgcaccgcgcgtgacgtctacagctccccacccccaccatactactcttcttcgcctaagggtaactacaagtctcccccaccaccatacggttacaggtcttccgccccaacataactattttgctgctcctaaggatgactacaagaataacaccccaccgtaca

SEQ ID NO: 109709 - DNA, 209 bp, Arabidopsis thaliana columbia
  unsure (1)..(209): unsure at all n locations
cccacgcgtcctaatttattgaaaacctatcgtgatttttctcattaccattatatatctgcgccaatataaaaattgcgtgcggccctnnacaacccacnaattaacnaatatcactcctctaaatcctctaatctaccatttccttcaattaccgtcccttaactaccttttctttctattactctttcctaaactaccactccctt

SEQ ID NO: 109710 - DNA, 248 bp, Arabidopsis thaliana columbia
  unsure (1)..(248): unsure at all n locations
cgaatacattggcgggtaatgtaccaccgaattttaatctcggtgatttgaggggtttaggcggcggattaaacggttgaggcggctcanctatgattgatggaggagatttcgacggttcaaaggcttacaaagacagtaaagtcttcaatatggtgactaatcattatttttacatgcttcctctttaataaactatattcattttttctttctttcatcccatatttcttatacttccaattttt

SEQ ID NO: 109711 - DNA, 411 bp, Arabidopsis thaliana columbia
caccacataatccacaataaccagctactaattgttttattgacacacaatactgaacatctctctgccgactaatacaggtagggggtgcaccctacaacaacctactacaaccctacccatcaataaaccaccattgtaatccgcttcttctagcgcccatccttcttaagaactacgaccgcctcaacgtccgtaccggtcactacactccaatcagcgccggtcactctcctctgaaacgtcctcttcaagagtatatcacgtacggtgtcatcaatctcgataaacccgcgaacccttcttctcacgaagttcgtgcttggattaagcgtatcctccgtgttgagaaaaccggtcacagtggtactcttgacccaaaagtcactggaaacctcattgtctgtattg

SEQ ID NO: 109712 - DNA, 192 bp, Arabidopsis thaliana columbia
cttggttttggcagagactctagcacggatggctttgttgttcaccctcactagaatactaagggggaatataaaacggagaacgatgccgccgacaccggagactacatgatcaagccacagagtttcactccagccatcgacactttttaatgggccatgcttcttaataaatttaacccgatcgttttc

SEQ ID NO: 109713 - DNA, 221 bp, Arabidopsis thaliana columbia
caaacctttaggaaatccaccgcaggtaaagctcccaggaagcatcttgccaccaatgcggctatgaaatcatcaccaaccactctatgagtcaagaagcctcaccgttaccgttcattaaccttcgctcttcgttagattcttaattaccattatagtacttaattttttatcctcatgctttctttcctacttctcgtttcacaaatttctcaattctt

SEQ ID NO: 109714 - DNA, 133 bp, Arabidopsis thaliana columbia
  unsure (1)..(133): unsure at all n locations
aattgatagaggaagcaccgtaaagatcaangtgaaaggttttggaccgacacaacaaggcgtgtctatttatatcagggtgggcgatacaccttaacaatctacttatgtaatacacctaatccccaaaatt

SEQ ID NO: 109715 - DNA, 299 bp, Arabidopsis thaliana columbia
acaatttttgtctctttggctatatatattcaaacattgtttgaacagaacacaaatcaacacatcgcacacatctttatgttctgtaaggtttgaaacaaagatcaatgaccgggactggattgtttgctgagattctttatataaaagtatacatatactacccttatgttttttttaaaacttattattcaaataatattttttcctttattaactcacttcatatttattctctatattatttttttattttttcctttatttttttttttttcttttttttctattcttttatt

SEQ ID NO: 109716 - DNA, 164 bp, Arabidopsis thaliana columbia
  unsure (1)..(164): unsure at all n locations
atacccggtcgaccacgcgtccgatcggagcttcatgagagatccaaagagagagattgttgatgtctcacagtcacggaaacgcttgctcggtgaacgatccacggcagcngtgtcgacagaaaaaccttacattccacagcctgtagcgcccgaagatcttt

SEQ ID NO: 109717 - DNA, 403 bp, Arabidopsis thaliana columbia
cttcagcaatcacactctctctttgttcgagtaccaacaatggcccttcaagctgcttctttggtctcctctgctttctctggtggcaaagatgcgaagttgaatgcttcttcatcatctttcaaggactcgagtctttttggtgcctccattaccgaccaaatcaaatccgaacatggatcttcctcgttaagattcaagagagaacaaagcttaaggaatctagcaaatcgagcccaaaccggtgctacttcaagccctacagtcacaaaatccgtgggcggcaacaaaacgtctgggaaaggaaatgaggcgggcccttatgcctctgttggattaatacatcagagacgaaaaagattgacctgcccatgtgccatgatatgttcatgccggttaaggg

SEQ ID NO: 109718 - DNA, 404 bp, Arabidopsis thaliana columbia
aagttctgcccttatagctgctggtggctcatatccaatccttagagtatgggatcctcgggggccaggaacatccgcgtccggtgtttcaattctcttcacactcatcatggatttccgcctgtaagtggcacaaaagctcttggtttcacttgctctccgcttcctacgacggcaaaatcatgctctgggatctcagaaccgcttggcctttgtcagtaattgatacacacaatgacaaggttttatctgctgactggtggaaaggagagagtgtagtcagccggaggaacatactctaacttgcgaatgtgttgcggaattctaatttcttaaaagaaacacaaactattcatgatccttgtaatgagacttgatgtaagttctgctgaatagagcttatt

SEQ ID NO: 109719 - DNA, 170 bp, Arabidopsis thaliana columbia
  unsure (1)..(170): unsure at all n locations
acggacgcgtggacaacagtcgaagaacttgcnttcatctacgctgatatgaaccttaaaaactgtggcattttcataactggtggtatgactacaactttcttcaaaacacttactgttgaaacagacacttactttcctactttatacaacactatacatcaaacaat

SEQ ID NO: 109720 - DNA, 242 bp, Arabidopsis thaliana columbia
ccggcaattcggagaaacaatggcggtaaaaaacacttttaaaactcactgaacttaaaaaactatgtcgaattcaataaagaatccgtttcaccaataccatcactaaatcgatcaactctactcaaagcttttcaccagactaaaacctgcctgaaacgccttatctaccccttaattacatacatttcttttatatttttcgcaccttcttctactttaacaattccaaaacctctttt

SEQ ID NO: 109721 - DNA, 231 bp, Arabidopsis thaliana columbia
gtcaccggcgctagtggcagaacaggccagattgtgtataagaagctgaaggaggggtcaaacaggtttgtagcaaagggttgtaggtggaagttctcaatgaaaaaacaaaattgtatgatattttttttttttcatcttttatttaactttttcttgtcgccttatcccttctcttttatttatatttattatttatccgtacaccacctgtttacgcttttttagatt

SEQ ID NO: 109722 - DNA, 339 bp, Arabidopsis thaliana columbia
  unsure (1)..(339): unsure at all n locations
cgcaaaatctcaacgaagctcgaaaantgattcatgatactcaaggnaagacggtgatggaagttggtggcgatggcgttgccgtgggggcactcatcaatcctcccgtcaattctctatccttcgacgtgctatacaatctcaaaagtaattacgaggtggctcttatcctgattgatcttaaaatttatttttattatcttaatccaaatgtttaatacttccttttttatttaatcatattatctttttaatctatattctaatctcttttatattaattttttttattaatcttgtttttctaatttttattattcaattttcttttctctatta

SEQ ID NO: 109723 - DNA, 441 bp, Arabidopsis thaliana columbia
aacttgtgggccatccaaatgtctcacttgagatcttcttcacaagcaaaacatttccttagggggctgcttttgggatgcctggtgttcatgttgacggcatggatgtcttgaaagccaacaaagcctctaaatattcttcttcttcaactataatagccgctaaaccacctaagccccctaccgttaaaccacctactcacaccccaaagcctcccactgtgaagcctccacctccatacattccatgccctcctccgccctatactccaaaaccttcaaccgtgaagccaccaccacctccctacgtgaagccaccaccacctcccactgtgaagccaccaccacctccttacgtgaagccaccaccaccccctaccgtgaagccaccaccaccacccacgccgtttacttcatcaccacccactctgtatactcttc

SEQ ID NO: 109724 - DNA, 158 bp, Arabidopsis thaliana columbia
gcggagaaaattgaaatggagctcagcttgagcacttcctccgcttctcctgcggttttgaggagacaagcttctcctcttgttgacaagcagcaagtgctcggcgtcagctttgctttcgtgctcaaacctggaggaggagctcttctatttccttt

SEQ ID NO: 109725 - DNA, 222 bp, Arabidopsis thaliana columbia
  unsure (1)..(222): unsure at all n locations
caaactgcgagttgatggcaccgaccaacaacttatacatctcgatagagaagcttacgctgcgattggttgaggaaggagggagtgacncanccattcaagactgcgaacaaatcacgaggtctgagttctcgccaatttatagccatcttttgcttcttaaacaaaagcaattccttttcatttatacactcacaccatttgacacagataaagcactat

SEQ ID NO: 109726 - DNA, 222 bp, Arabidopsis thaliana columbia
cgcactattgcactcgtcttcttcttcgttcttggtgtgaaccgaaactaaattctatctttttgctctacacgatgaacgagcgtctgaagggttcgtttgagcttcccagaggtcaatcttctacagaaggagatgttgaactaggggaacaccaaggaggggatcaacgatggcaagattttaccgaatggctttagtgatggtcatacagtctgatac

SEQ ID NO: 109727 - DNA, 270 bp, Arabidopsis thaliana columbia
gcagctgcaaacatggcaagaggattgaagtattcatctaaagaggctcaatgctcctaaggagtggatgcttgacaaacttgggggtgccttcactcccaaaccatcttctggacctcacaagtcgagggagtgtcttcctcttgtcctgatcatcaggaacaggtttaatttttctttgacttaccgagaacatatctctaccctttttcagacgcatatctctccttattactaaaattttttttaccatgcatatccttttctttt

SEQ ID NO: 109728 - DNA, 306 bp, Arabidopsis thaliana columbia
gaacaacaacattctcagggaaacttggaagaagagaagatgatgactatgatgatgcaaacaccgaaaaatgttgctgcaatgattccaatcccgtcgacaccagcaacagtctctgtcccaatgcacaccgcaccaacaccattcaccaacaatgcaagattgatgtctgaaaagcctgaagttgttgagtactcgtttgaggaacgaagactcgccttcatgctacagtctgaatgtcgtttggtttgatcatcaatccgttggattcaacttaagttctttaatttgtaaaactcaaattga

SEQ ID NO: 109729 - DNA, 316 bp, Arabidopsis thaliana columbia
gtatctcatttcaagaagattgaagacgaaggagaagctgagagagaacgacgaagcagattcaaaatcaactctctttcttcttcattcttttttcctgggtttttctgaatgtatcaccacgctttttccctaaaatttcactccttctctcctcactatgcgttatccctctccaatttctccacccaaagccctaatcctctcctcccgccattcgctagagtccctcatgtgaccagctctgtttgcctccgctgccggagcagcgccgctgatgtatctccggatatttacgccgttggctcctccttca

SEQ ID NO: 109730 - DNA, 288 bp, Arabidopsis thaliana columbia
tgagaaggctattcagaattggattcagtatgagggagacgtttttagattccctggtggtggaactcagttccctcaaggtgctgataagtatatcgatcagcttgcttccgtgatacctatggagaacggatctgttaggactgctttggacactgtttgtgttgtttcaagtcttttaactaacttatagttctttattgtgtttgcattcaatatcttatctatttattaatttcttttgttattgttacttatcttttttttttaaaattatttttgttaatt

SEQ ID NO: 109731 - DNA, 99 bp, Arabidopsis thaliana columbia
cttcaatcataagcccacccacttcgattaccatcttcgatcgccagagacagcgagtttcagatcaaagatgtcggcgacgcttacaggagcggcaac

SEQ ID NO: 109732 - DNA, 359 bp, Arabidopsis thaliana columbia
ctttttcataaactctctccagagaaaactataatgagcttgagagaaatgagcgaaacaaaacccaagagagattctgagtacgaaggatcaaacatcaagaggatgagactcgatgatgatgatgacgttttacgctcaccgacgagaactctttcttcttcttcctcttcttctctggcttactcggtttcagattccggaggtttctgcttcgtcgcgttatctgaagacgaattccgtcatcttatttcaagcattagcttctgtttgattcagtatctgatataaacttaattgctattttctttataattttttgattattgatgtttattgtaatttttattttactttat

SEQ ID NO: 109733 - DNA, 252 bp, Arabidopsis thaliana columbia
gtttcagatataggcagattctcacatttgcaaacatgacgactcagatcagcaagaagagaaagtttgtagcggacggtgtgttctacgctgaattgaatgaggttcttacaagagagctagcagaggatggttactctggtgttgaggttagggttacttctatgaggactgagattatgattagagctacacgtacttatattgttctcgtttagaatgtggggtttttttttctttttaattcttttt

SEQ ID NO: 109734 - DNA, 373 bp, Arabidopsis thaliana columbia
ctctctctctctgtaagattccttgctctcgcgcttttctctctctctctcgcgttcgttcttatccacgagctctgcaccgtcgcaatctccgtcttctccatttagatccaacacagagccttttctacatgaaattcggcaaagagtttcgtactcacctcgaagaaactttaccagagtggagagacaagttcctttgctataaacctttaaaaaagcttctcaaatattatccttattactccgccgattttggacccgccaattccgatcacaacgattcgcgtccagtatttgctgatactactaacatctcttccgccgccgacgacggcggtgtggttctcggcgttggccatcggtatgattt

SEQ ID NO: 109735 - DNA, 281 bp, Arabidopsis thaliana columbia
cggaaaaatcagaaaaatgggagaccctggacgatgcgattcacactgtgggtaatcggattcgtggaactgcccaagcccaagctcgcgttggttctcttctttaaggaagccaccacatcgagaaacatctgtcgaggcatcggacgttgattactgtggctcctaacgcttttgtgattgttgttgagtaaatcaataatttgttttcttaattttatattgttactattatcaattctaatatttataatatctaatatgtttatatgtttttttat

SEQ ID NO: 109736 - DNA, 121 bp, Arabidopsis thaliana columbia
cttattctgtagattataaaatagcagacttgcatagaatcataacatgtattacaaacttggttaggcagaacttgaagaagaagggtaagtgtcttaaagagctttgcagatccatggc

SEQ ID NO: 109737 - DNA, 352 bp, Arabidopsis thaliana columbia
gcgaactcttctaatgagacatgaagctgaactcaagtccaatgcctattggcttaatctattagctcacttgcaggcctcctctgttccgaggaaggaactgtcatgcattaaagaacttgtttcattgtatgaagctgcttcgatcgaggacatatacctagcttataatcaattaagagtggacgaggactctctgtactcctgtattggtattgctggggcacaggcgggtgaagagattactgttctctcagaagaggaagaaccagaagaagttttctcaggagatgttccttgtgggacgatggcttattgatgacctcttgaccattatctttttcgtcatata

SEQ ID NO: 109738 - DNA, 239 bp, Arabidopsis thaliana columbia
gtttttcaaatctgtgaactcataatatagcttttgaagaagtgcttaaagatgagcttagttctcagattcaggcaacatttagctcaaacctcatccagattatcacttctttctcgaatcggcggttaccggagttacacccaaccggtgaagattgaagatgtataataagcattacttcgttcacagtaagctctcatacgtattactatccttcttttatctgatcctaccat

SEQ ID NO: 109739 - DNA, 203 bp, Arabidopsis thaliana columbia
gttttgcttctaaaattttctggtagatctgagtccacaatcatcagaaatcaactttgtgaattgaaggccgatcactcctttgactttgttcttagggttcatcctcaaaggtgtttaatgatgctctaaaaagctatggaatatggtccttcttattttctgtttactttaaaccttagtctttaagtgttttttattta

SEQ ID NO: 109740 - DNA, 327 bp, Arabidopsis thaliana columbia
cgcgtccgtgttttcaaaccatttggagaaacctgatccttcaaaaccaagatggatgcaagattctcttattacatgggagtctaagaatgcgcaaaattacgccattggtagcaagcctttgaccgctgcattgaacgtttactcgagaggttttagaagtctgttgaagttcattaatgacttatacgcttatccggaaattatgatcatggaaaacggttttgtagtagtactatggtccttattattttgttggttttggatatcttctatttttttattgttgaatttcgttactttttaatctgttttctttatgaattt

SEQ ID NO: 109741 - DNA, 139 bp, Arabidopsis thaliana columbia
cgggttctcgggtcggatcttctaagtctagcctgtgataatggctactgtcactactcatgcctcggcctcgattttcggaccttgtacttcaaagccaagattcctcaccggttcttccggttggttgaaccgtgac

SEQ ID NO: 109742 - DNA, 185 bp, Arabidopsis thaliana columbia
cgttacgtagtcaatcaaggaggctattaatgcttttagttttcatccgaacacagagaaaagggtacatacgaaccatgaaattcatgaccaattattcttttttccaggaagcagttcgttttttgttgttttttactctgtgtgagccaatgtttcataggctgagctgaaggagaattttt

SEQ ID NO: 109743 - DNA, 127 bp, Arabidopsis thaliana columbia
gctctcttttctctccagatttcgattcccgagttctcgagagaaaaccgtaaatctcttctccgttcactcaatcaaccagagatgcgtgagattcttcacatccagtgtggtcaatgcggttacc

SEQ ID NO: 109744 - DNA, 278 bp, Arabidopsis thaliana columbia
gatggggaaagtaagcccagtgagcggagaagatagaatggtggaaagagaagaaagaaggacaggagtctcaaggtctcgacactgcgaggaccatcaataagatactgacgatattgatgatactattcttgactatgttctcttataacaagctcttatgatagtgtttgtttatggtcttttttttataattcccttcgtggagtgttttatttcttttgttaagatattctatttatacaagatttatatttaatctgtatttgattttaatt

SEQ ID NO: 109745 - DNA, 209 bp, Arabidopsis thaliana columbia
cagatctgctcgttttttcgctccatttttgggttcaccattactcagtctttccgttttaaagatgcgcatttatatgtgactgaatgtcggaggttgttcgatatttccaatttcgttcacttttttagttattatttctttttattatctttttaacttttattgtttttttattattgtttttttttattttattattttttttt

SEQ ID NO: 109746 - DNA, 256 bp, Arabidopsis thaliana columbia
cggacgcgtgggcggacgcgtgggcgaattctcttgaacaataactttgatcgttcttttgggtctcttgaattgtaaacagtggcggttgaacttaatcttgaagaattttcacttaatttggatttcagtattgtgtatttttatttttttttttattttgttttaatatttttaatctttacatacatttataatgataattattttttactttcttctaatttgtattttatatttattttatatttttatt

SEQ ID NO: 109747 - DNA, 235 bp, Arabidopsis thaliana columbia
ctctgtctctctccaatctctctgcgccacagaattgtgcgatttacgaaaatctctgaaacctccgatcgttaacggcgaccgccgattttcccggtaaaaatgaacgacggagatgtatcgaggcagatccagcagatggtgtgatttatccgccaagaagcggttgagaaagcattcgtgatcttgtgtttttgtgtaataagatttattaattgtttatctttaattatgt

SEQ ID NO: 109748 - DNA, 111 bp, Arabidopsis thaliana columbia
gatgtaacaataccaaaactaggttacaaaacttcattacaagcagcaaacatacctaatctcgacgcaattgcatcagctggtatcaacggtttaatggatccagtagaa

SEQ ID NO: 109749 - DNA, 363 bp, Arabidopsis thaliana columbia
ctttgttccccaatgattattcttcttgaagacgttatctgatgcattttggtgttttgaacggctcatgcgtcgattgcgaggaagggtgcgttttacctgtatatttgttggttttttaatctttctactttttattttttttttctctttgtttcattctgttttttttttatttttgtttttgattttttttttttttttttgttctttacttttttttttttttttatttatattttagtgatttgcttctttttttttttttttttttctttttctttctctttttttttttttattagtttgttactctatttcaatttttttcttttttttataattttttttttttttttttat

SEQ ID NO: 109750 - DNA, 281 bp, Arabidopsis thaliana columbia
atttccccaatttctcagagagactcattttcactaccaccaccaaatcgccgtcatgtgtaaacaagcttctcgtctccggtcccgatctgtcgccgccgcatcttccaaattggtgtctactcgtgccttttcaacggaactttcatcgacgcttgattccacttttgttcgggcttggaattaagtcttcatccgaattttgacttcaccgtgattattatctttttgttcttttttgtattcctttatttttttttcttcttttcttactattcttt

SEQ ID NO: 109751 - DNA, 258 bp, Arabidopsis thaliana columbia
atgcacacttgtatagttcctccactctctgataaggctagtacatcagacggtgataaattcattactaccgtggaatctatagaatcggctcaatcccaattacttgacgcggatactgaaaacactttcgcaaatacatctgtaagagaaggtggtcagattttacggtttggtgctcttagagagaaaatcaacagcgagatcatctttcacttggtgaaaatactactagtttattcactgaagctatttttt

SEQ ID NO: 109752 - DNA, 327 bp, Arabidopsis thaliana columbia
gattcttggcgaatcaccgagctaccttaccggagagttccccggagactacggatgggacaccgcggactttcagctgaccccgagacattccaaggaaccgtgaactagaagtatccacagcaggtgggccatgctcggagccctaggctgcgtcttcctgagctttatctagaactggtcaagtcggagaggtgtttgtttatgttatattatattatataatatatatttatatttttatatttatttttttatctttattttattttatgaattattatttttttttttttatagtatatgtatatgtaatttatttttttt

SEQ ID NO: 109753 - DNA, 151 bp, Arabidopsis thaliana columbia
  unsure (1)..(151): unsure at all n locations
agaagcccttaaagcttcaccgtnnctctctctcttttctttctcgngnagcccttcaattcgaatcggcgcgggtcttnnncttcttcttccctccgaatctctgttacctccaatggaagaggacgatgagttcggagatctatattcc

SEQ ID NO: 109754 - DNA, 356 bp, Arabidopsis thaliana columbia
acaagcagctaaggatcttctgaacgttattcttgttgagtatgcctacaaacagctcctcagaggatctaattgttcagtggttgcttctggtgatagaaccttctgtgttgtcttgtttgctaatctaattttatcttttatttatgatgtgttttctttatttttttttctttatttttttatttatctatttttttttttttctttttacgttttattttattttatttttttttttataattttttgttatttatttaattgtcttttctattttattttaatttttacttttttctttatttttattattttagttattttttatttttttcttttttttttattatttt

SEQ ID NO: 109755 - DNA, 146 bp, Arabidopsis thaliana columbia
cgtcccgattcctgtcgaccacgcgtccgatccagaacatggagctttataatctgactctttcttactatgaaattcggaaccttcgaaggcggtcttcaagaatctgatgggcatggcgaatccttcttcgaatttagaatgtc

SEQ ID NO: 109756 - DNA, 427 bp, Arabidopsis thaliana columbia
gagagccgaaaacgaataagaagattaattgaggagaaatcgaagatgtctatagcgttagtggagaagattcaagccaaattttgaagaagtctagtagattctgtattgtaagctactaaaatctgcgatggtgaggcatttcaatcgtcgccggaaaattcatcggagatattaaaattgaatcaagcttcgaattggtcaaccgatctattaatttgactagagaggaacgagctgtatgatatatctgcttccgaattgagtctccatggctagtggaagcagcagcatcgcaatcgttgttttgtttgttatctcgttttattcttacctattgttttttcttaattttttttctattctgattgttattttttttttttttttacttttttttattttttttttttactttcatttattt

SEQ ID NO: 109757 - DNA, 169 bp, Arabidopsis thaliana columbia
acataatgttcacggtttgactcccagtgttgcatctgcacaccatcttatgtcatatgcactagagcacaagaattctgaactcatggaagaagtaatgcaactcctgaaaacgaatgatctgcctctacaacccggtacagcagatttagtttttaggatctgtcat

SEQ ID NO: 109758 - DNA, 286 bp, Arabidopsis thaliana columbia
gatgattttgagcttttgaccgttattggcaaaggtgcctttggtgaggttagattatgtcgtttgagatctacatctgaagtttatgccatgaagaaattgaaaaaaactgagatgcttagccgtggacaggtagagcatgtcaggtcctagaggtacttacttgtagaagttgtcagccgttacattgtatagcttttttactctttttttttttgtgttagctttttttttttattaatattttattttgtatattaatatatgttttatatttttttttttt

SEQ ID NO: 109759 - DNA, 99 bp, Arabidopsis thaliana columbia
cgccggtggagctttcagcggagcttccatgaacccagccgttgctttcggaccagccgtcgtaagctggacgtggaccaaccaggggtttactgggct

SEQ ID NO: 109760 - DNA, 140 bp, Arabidopsis thaliana columbia
tcgaatcccggtcgaccacgcgtccgcccaattctctttcaaaagtcttaccaagatttacattttgatggtctcttgtttcttggcattggaggcaagttctcttttctgtggctactgctttgttttaattacttgag

SEQ ID NO: 109761 - DNA, 142 bp, Arabidopsis thaliana columbia
gtggcgaggcttgtggatagttatctcaccgaagttgctagagatcggaatttgccgttgacaaagtttcaggttttggctgaggcgtgaccggaatctgctaggactgtgacgatgactttacttagcctttatatattta

SEQ ID NO: 109762 - DNA, 346 bp, Arabidopsis thaliana columbia
ggagtagtaccaaaaagaagaagtctgcagcaaatgagaagcatagagtctcttttgaatcatcttcaagaccttcattttcgtcttctgcacgctcctctagcttctcgtctgcagaagtcagtaccacagcttctcaatttgaccagcctggtgagaatctgatcagagaacagcccaatggtggcttgatgatgccgtatgatctaatggagcccgtcataggctctattaattgtgtaattagttctagtggtgttgattatatcctttttcttatcattcttaattccattttttctttctattatctctgatgtttttttgtactttttatttttttctt

SEQ ID NO: 109763 - DNA, 201 bp, Arabidopsis thaliana columbia
gtggtgacatattactccataggatatgcacccgttgcggaacggttctttaaacagttcttgattatattcttgatccaacaaatggctgctgggatattcaggttcattgcatctacatgtagaaccatgaccatagctaataccggcggtgtccttgttctactagtggtgttcttgactggaggttttcttcttttc

SEQ ID NO: 109764 - DNA, 252 bp, Arabidopsis thaliana columbia
gccaagtgccaaaaatcatcaccaccacaggacatagtccccagacaagaagagagcccctagacataatggggactatgcctatggtgataacttggtaggtccatcagctcaacctttcaagcctcacacgggaggggacgtgaggtgggatgccattaactcaatcgcttttaaaggtcctcaaataggtttcgacaactttatgcttttgaaacttctatggtatggtgatttaggcagttgtttatt

SEQ ID NO: 109765 - DNA, 180 bp, Arabidopsis thaliana columbia
cattcttgaagattatgcgacttcattcaagaattcaacaagtgatggtaattatcaggcgatcgcaagtcttatcagccatgtctcgaacgtcctgcgatgtttaagcaacaccggtctcatattaacgcagcagagattcacaattgctagagaagtctttatctcacacggtgctat

SEQ ID NO: 109766 - DNA, 244 bp, Arabidopsis thaliana columbia
cagtaacttattcttaggtagaaccagctaggctttaccttgaaatcctatctttgttatacctacagaaacagagcgctcgtctgcggtggaacataaaccgaggatgaagcagaatgtgactacacatgctttcttagcaccggatcacaccttaaagccgttacagattcgagcgtacgcgctggagtctacgacacatacggagactacatcgggatccgaaacctagaatcatgggggg

SEQ ID NO: 109767 - DNA, 393 bp, Arabidopsis thaliana columbia
gctgcaatcagagagttttcgatagcacaagcacattctttcgattcgttgagtgttcaaatttcaagctttttacaaggggttccttaattgatctgttactgtaagatggctcactcagatcccaacagtgtcgtggctgtctagatagattaactcctttaaggtcttttttttgatcaattattgtttttattttttttatttttttattatattttttaattttattattttttttttttattatttatatatttttactatattttcttttttatttgtttttttatttttttatttttttaattcatttattttatttttttttatttttatattatttttatttttttttattaattttatattttctacatattatatttttta

SEQ ID NO: 109768 - DNA, 328 bp, Arabidopsis thaliana columbia
gggattgcggttgaagcctcgtacccggttaagtacagcccaaacccggttcgtggaaatactatcagcagtgtttgaaatcaagacgctcgataaacatttgggattcttataactgaatttaatctcgtattgttattattgtttgtatgtattgtatttcaacaacaattttataaattagttgattcatcatatggttatttaatttatttattctttatgttgatcaatttctttttttatttaagattagattttttgttagtatttttataatttttattatatttatattttataagtctttttattttgttatattttt

SEQ ID NO: 109769 - DNA, 136 bp, Arabidopsis thaliana columbia
cgtcgatccgtcgaccactcgcatgaaaggcagaaccctagtctattgctcacaaaaaggattcttggaagctcgaattaatgccatttcccactagaatggagggcacaatggatcctgctgttggatcaatgga

SEQ ID NO: 109770 - DNA, 283 bp, Arabidopsis thaliana columbia
tgttgatccaactatcttcacccaagcgatcctatttcataccaggtgtgactgcacctccaaattcgccgatgagctgattgctagcgctggttacatccgaacacctggaaaaggtattcttgcggcagatgaatcaactggtactattgggaaacgtttcgctagcatcaacgttgagaacgatgaattcaaacagacgtgctttttgtgagtctcttttttactacctaccgggaggcctttactttgtccaaaaatgtgtttattccttcttttggaa

SEQ ID NO: 109771 - DNA, 310 bp, Arabidopsis thaliana columbia
gaggacctggcgttgaatactgtgattgtgcttgagcaagaagaagagcttgatctggttattgagctgagccagaagatgaatgtgaggcctgtcattgggttaagggctaagctgaggactaagcattcgggtcatttcggatcaacttctgttgaattgggtatatttggattgactactacttatattgatcgtgtgttttaggttgctttttatctcatttcttgtttgtatttatcttttgtatcttatttttttttttttttttttgtatatatttatttttttttatattatttttttttat

SEQ ID NO: 109772 - DNA, 348 bp, Arabidopsis thaliana columbia
gaatataacctacaaattttaatatttaattactctttctaaagaataagatcgccggtttaaaacaattacctggtcatcagtttggattaaactcattaggcattcattatataattgcaccatacaagaatgtgatcaagaaatttactaatttcttgtgctattaatagtgctgaggtaggacgaccttatagttctcacctaatttgttttttacttatgtttttcttattctttgttactttattttttgtcctttatttatttttctattttatttttattcttatctttttttttatattttcttcttttttttttttttttttcttttattatattttt

SEQ ID NO: 109773 - DNA, 263 bp, Arabidopsis thaliana columbia
gaatcccggtcgaccacgcgtccgggcagattctcacatttgcaaacatgacgactcagatcagcaagaagagaaagtttgtagcggacggagtgtactacgcttaattgaatgaggattcatacagagagctaggacatgtatgttacatgctcacaaaggtgttctcacgcgtcaacctttttcccgggtcaacacctgtttccttggcttgggctccgctatcggattctttctttcggagattaacttttcaagcttta

SEQ ID NO: 109774 - DNA, 211 bp, Arabidopsis thaliana columbia
ggcgaccaaaggctgttatcactcgatcacaatatataaaggaggcaaccgaactaggtaaaaaggcaagagaactaaagaaagcagctgatggacttcatcaggaagaaagaagtggtgctaagggcaggaaatggcggaaaaatgtgaaagcagttgaaaaggagttgctccaattggaggaagatgtgaaccttttagtagagatgtt

SEQ ID NO: 109775 - DNA, 228 bp, Arabidopsis thaliana columbia
agggagagcaaaacaaagatcggagaagagatgacgattctttcttccgaaacgatggacatgcccgacagtgttaccatcaaggttcacgctaaagtgatcgaagtcgaaggaccttgcgggaagcttgtttgctgatttaagcatttcaacctcgatttccatgtttatcaaggtttcatattcttgttaataattagcttttgttttagatttttttttttttat

SEQ ID NO: 109776 - DNA, 324 bp, Arabidopsis thaliana columbia
ccgtcctctgttcttcccgtcagagtaagttggtttgtatgaaatcagcagcaaggtcagagagttagctacaacaagaggacaatcagacgttttagtgttagagctaatgtaaaggaaatagcttttgaccagcactctagagctgctttacaagctgttattgataagtttgttgatatgttttgctttctatttgctatttaattattttaaattatttattttatttttattttttttttttattattttatattttatattttattttattgatttattattatttattttttttatatattaacttttttatttttt

SEQ ID NO: 109777 - DNA, 449 bp, Arabidopsis thaliana columbia
gcgacagcccatttgtgtgaagctgtcttgtctcagaaagaacaggacaaggtctcgaaattgcctggtcagaattttaatgttagttttgctcactactctgggtttgttgctacttatgagcattttttatgagctttttttttctgataatttgtatgtctttttatttctttttcttttctccctttcatttttttcttttttataatattatttcttctttaatattttcattatttctatttttttttctttttattttttatttttttttagttatttattgttatttccttttctatcttttttattctctttttatttattttttttttatttatttgttttttttttttcttttatacgttgttatttttgttattttttttacctcgcttattttctttgtttcttcattttcttaattttttattttttcttttttt

SEQ ID NO: 109778 - DNA, 346 bp, Arabidopsis thaliana columbia
cttcctccttctttcacttagctcttcctagtgttaaaccagagtaaagcttgaaactttggactaaaagaatggcgtctttgggtgtgtcggaaatgcttggtactccccttaacttcagggcagtttcaagatcgtctgctccgttggcatcaagcccatccacgttcaagactgttgctctcttctctaagaaaaagccagctcctgctaagtccaaggctgtttctgagactagtgattagctctccaagctgaatggtccctgcagtatgtattttttgtttgtttgtcttatttatttattttagtttccattttctttatcgtttaatacatttttttt

SEQ ID NO: 109779 - DNA, 253 bp, Arabidopsis thaliana columbia
ggtgtagtgaaaatggagaagtacttggattgcgtacaggggagatccaggagtgccagatgcagatcaatcgttcgtggtatatgatggctttgtgttctatcataggggttaagtttatattttttttttttttttttatccttgctcgtgtttttttatttttttttttttcactttattattttatttttatttttttttttttttgtttatttattataattgataattttaattattctttttaaat

SEQ ID NO: 109780 - DNA, 402 bp, Arabidopsis thaliana columbia
cttctttgttcttcatctttttatcttaaattattttgtctataaaatcgagtttttttttgtctacgttggggaatttgtggaaatagtgggaaggagctgttgctgaagatggaagaactcctagcgtctgggatactttctcacacacttacaatagaggtaatttaggtaatggagatataacatccgatgggtatcacaaatacaaggaagatgttaagctgatggcagaaatgggcttagaatcattcagaatctctatctcctggtcaagacttatacctaatggaaggggtctcattaacccaaaaggtctactgatttacaagaactctattcaagaacttataagccatgtaatcgaactacatgttacactttaacactatgatctttctt

SEQ ID NO: 109781 - DNA, 356 bp, Arabidopsis thaliana columbia
acgcgttcgagtaaaatggaagagcatgcggattcgatctcgtatttcagtagatcatcagaatacaggacaggaagcaacggtgacacgccaagacgaaagataatactaaaaaccacaaatgcttatttctactgtttcacaagagaacaaggctcttttgattggttcaaaggtgttatgaacttagatgcataatctttattacgatgttttttagtttttctttctttttaataagtatatagaatagtttattaattcttattttatttttatttttatatttattttttaataattttatttttttattttattttttttattttatagtttattttactttatattat

SEQ ID NO: 109782 - DNA, 173 bp, Arabidopsis thaliana columbia
ttagagaatccataatattagactgtggaataaggatgcctgttacattgaactatacaagacagatcatttaacatactaatttccttcttcgtagcttcaaatcgttcacgagttagtatatactaagtttcttaatattacatgcatctacaatattggaatgacctgaa

SEQ ID NO: 109783 - DNA, 275 bp, Arabidopsis thaliana columbia
cggacgcgtggggtcaggcttcaattagaagaagttcttcatatctgattggttacttcttcaagagtagcaagctttacttaagggatgaagcttcaaacatgatatctaccttgattgatatgctcaagtattcagattcaactactttttggttttttttttaattttttaattataaattattttttttattttttctttctttttttttattttattttttcatatttattttttatttatatatttatttatttttttcttttaatttt

SEQ ID NO: 109784 - DNA, 196 bp, Arabidopsis thaliana columbia
cttaaaaaccatttccacgatcttcttcttcttcttccctcaaatatagcttaggattttcttaatttcctctacccaagctccatggctgctttcaatttcttcctctcttcttaattctctcaggtaggggagatttgagtagtagtagattgttagatttgtaattcagctattggtgaagaggaagggagag

SEQ ID NO: 109785 - DNA, 344 bp, Arabidopsis thaliana columbia
ctcttgactatgcacgtacccgtcttgccaatgactccaagtctgccaagaagggaggaggtgaaaggcagttcaatggtcttgttgatgtctacaagaagaccctcaagtcagatggtattgctggactttaccgtggtttcaacatctcgtgtgctggtatcattgtctaccgtggtctctactttggactgtacgactctgtgaagcctgtcctcctcactggagacctgcaggacagtatcttcgctagtttttgctcttggatggctcatcaccaatggtgctggtcttgctttttcccttttgacacttttagaaatattttgtttattacttttttt

SEQ ID NO: 109786 - DNA, 357 bp, Arabidopsis thaliana columbia
gagacacaacagacgtactattaggcttccttatgcttcctccgccgctgggttacatggggggctcagccaccatgggcggtctattcaccggcttgaattattctttgattctcgtacatcttattacttatggtctttatttcatcgtattacttgttaattgtagctgttatttttttttataattattaatttttattcttatttttatttttttttatttttttatatttttttttttatttctaattttttttttatttttatttttatggttaggggtttatttatttttatatttttcttttttttttagtcttttttttatctttattttttattttttcgtttatt

SEQ ID NO: 109787 - DNA, 454 bp, Arabidopsis thaliana columbia
ctttacagttctttcttgctaaacaacaataaagtggtatataataggttaattatgatgaaatctggggctgatttgcaatttccaccaggatttagatttcatcctacggatgaggagctagtcctcatgtatctctgtcgtaaatgcttattttattcgttctctgtttttatattatcttattttgttttacttgtttttttttttttttctttttttattgtttttttatttttattttactttttttattttgatttatttttttttcttatttcttattttttattttctttttattttgtgttattttttttttctctattttttattttctttgtttttattttttatttatttttttttttttttttttatttctattttttttattttctttttctttttattgtttatacttttttattcttttatttttttattattttta

SEQ ID NO: 109788 - DNA, 427 bp, Arabidopsis thaliana columbia
ggccaattagcatcctttaacacgttgcttcaactggaaaatgaacatatgaaggcgataatagcaaaaatagagtcccttcgtcctaatgttctgctggtagagaaaagtgcatcttcatatgcccagcaataccttctagagaaggaaatttcattggtgctcaatgtgaaaaggtcattgctgtaccgtattgcccgttgcactgttgctttttttttattttttttatatacattttgctatttactattttataatatttaattttttattattttatgctcctttattaatatttttattttaacttcttattttttaattttttatattatatctttttttcgaattttttatcttttatttaatatttttttgtcttctactattttcttatgtttttacttttttattatattttttt

SEQ ID NO: 109789 - DNA, 406 bp, Arabidopsis thaliana columbia
cggacgcgtggggttgaagattaatcggacaaaggagtttagaagagtagaaaaaacgacaagaagaaagaaacacagttgcaggagagaaagagatatggctgtccggataaacgcgatggcggttgacgttgtggcgcacgcgctggcggtaatagcggcgattattgttctggtttgtagtttcattattagaggtttattgtttttgtattgtatttttaatgtattttgtcttttaatctttatttttgtatctgatattcttctttgattttatttagtttgtttagttgtcttatcatattatagttatttattttatttatattgttttttttatttttatttatttatactttattttcatttttttatatttttatatctttatttatattatttt

SEQ ID NO: 109790 - DNA, 451 bp, Arabidopsis thaliana columbia
ctttaccaacacaaacactaagctctatcctccaatggcggcaatcaccggattctccgctctctcaaaccatatctctcctgcttcatcacttccgtcgtcgcgtttactcaattccactcagtgtctgtccagattctcaaatgtgtcttcgtttcccgcgctctctacctttcgccggagaaagatcccgttgactccggcgtgttcttcgatagtcgacggagatgaagaaattgaagcaagaggtgatgatgagaatgagattagagagacattgatgttatcagtctctcctttgcctctcctcctcgttgcttctctccctggagccgaaactgtaagatctgtgtttggacccgttgtggagattgtaaaatccctggatctacctgattggcttgttcattggggacattcagggtaccatgggagtggtctttttgctatt

SEQ ID NO: 109791 - DNA, 252 bp, Arabidopsis thaliana columbia
tcgagagatatgatccagaaatggacggacgtgttattttggcaaaagttgactgcacccaagaaggtgatctttgtcgggggggggacatacaccattacacataccttagcgttactattattgcactttctctttacgttatctgttctcacatagtcttcatattttactaatttgtacctcatcacctcattttttcttccaccattgttttttatttccttattttctttatatctatctttattt

SEQ ID NO: 109792 - DNA, 192 bp, Arabidopsis thaliana columbia
tcggattagcatacctctcactcgcatcagattttcagttgctttttctatccaaatggactgcaagaagttcatccagatggtcgaggagaagaaacgaagagttcttgagaagcaagaagctcctttgaaatgggagcagaagctagaggcggctgcgaatgccaaagcagtcactgaaactaatgtgaa

SEQ ID NO: 109793 - DNA, 311 bp, Arabidopsis thaliana columbia
caaaaaaaagaaaacacaaaaacaaagattataatggcttcctcaaccatggctttgtcctcccctgccttcgccggaaaggctgtgaagcctgccgcatcagatgtcctcggaagcggccgtgtgaccatgaggaagactgtcgccaagccaaagggtccatcaggcagcccatggtacggatctgaccgagtcaagtacttgggtccattctccggcgagcccccgagctaccttaccggtgagttccccggtgactactgatgggacaccgttggtctatacgccgacccatataccttcttcaggaa

SEQ ID NO: 109794 - DNA, 281 bp, Arabidopsis thaliana columbia
gcgtccgaacacattatgtattcccagacccagttatcgagtagcttctctcgaatatgttttctgacgccggcggaggctcaaatcgtcggcgttgggacttaactctttctatcaatatgctttcgttactcttttatgcttattgtatataattttttattcttttcttttatatcttcttatttcttcttctttcttcttttatttatatcatttccgctgattttatattaacttgtattttattatataaccatttttatatctattttatttat

SEQ ID NO: 109795 - DNA, 371 bp, Arabidopsis thaliana columbia
caaaggtattgttttgtgcccactcgtatgcctcgttgtgactataggcaactccgcggtcatactgagtcttctaccagtccacatcgtttcgactttctattcaatcgtgagtgccaaacaagtaggaccaatcttgaagatctttctatgcttatgtcttcctgctgccatcattctctggcctattgttggtattttaggaagtgttttgggaggagctttatatggtttcttctccccaattttcgccacctttgatgctgttggtgaaggcaagccttaccagtttttccaatgctttattgatgggactttgaagatatatgcatttgcagttttttctgatgtttctttattttttaaaagtt

SEQ ID NO: 109796 - DNA, 407 bp, Arabidopsis thaliana columbia
  unsure (1)..(407): unsure at all n locations
acgattcccgtcgaccccctcggagagaagaagaacctcgaactcaaaaatgagagagaagagaatcatgggacagccatcgggaggattgaatcggcaaggagatcggaaacctgatggtggagatagaagagagaagttggcttngaccacctctcgtgaggggtgagcatgtagcttttgtttcttgcttcttgttacttttattttacttcttttttttttttgtatttttttttttattttttcttattttttttattttattttctatttttttcttattcttttattttgttttttttttctttatttatttttattattttcttttctctttattttttttttatttttttatatctttatattttttttctcgttcctctcattttatctttattttt

SEQ ID NO: 109797 - DNA, 144 bp, Arabidopsis thaliana columbia
tcgtcgccacgctcgtcgggaccgtctgatagcgctagccgaactcgaaagggatccggtaaatgcggccgtacgtgcgggacggaattacttaacgcctactagctccttatatgcgtattcgtgtagcatgtggtggtattg

SEQ ID NO: 109798 - DNA, 293 bp, Arabidopsis thaliana columbia
accgaagttccgcccacgcgtccgcaccgaagctgtggattaacctattttcaccttctaaggttcttcgccgttcttatcgagccgcgaagatggatccttgccacagcctgatccacaccgatgacgttccagccacccccaaggctaacaacgacattacttacatcacaagcaacggcggaagagctaactgcatgcaggagtggcctccgattggaaagaagaagtacgagactgtctataaccttactgaccttaccgagtccgaattggctaatgatgttgactac

SEQ ID NO: 109799 - DNA, 397 bp, Arabidopsis thaliana columbia
atttctcacattttcgtagccgcaagactcctttcagattcttacttgcagctatgggtaaagagaagtttcacattaacattgtggtcattggtcatgttgattctggaaaatcgaccacaactggtcacttgatctataagcttggtggtattgacatgcgtgtcatttttagcgtcttgtatgattcttgtttttttttcttgatgttcttttattgtcttttttgtcttttccttatctcttatatcctttcattcttttccactcttttcttatatactttttttctattctttttttttttatcttttattgtctaattctttctttcattctttttctccccttttttctttttttttcctattactttttacttgtttctttcttttcc

SEQ ID NO: 109800 - DNA, 283 bp, Arabidopsis thaliana columbia
cttttcttcttcctttcatttgggttaagagaagccatggataccgagtttctccgaaccctagatcgtcagattcttttgggtgtcttcgttgctttcgtcgccgttggtgctggtgctgcttattttcttacatcctccaagaaacgcagagtgtgtttggatccagagaatttcaaggagttcatgtttgttaagagacttttgcttattcacaatgctgcctagtctcgtttttgttttttttctttcacttttgtcttttgtgtccttttttcgtttt

SEQ ID NO: 109801 - DNA, 424 bp, Arabidopsis thaliana columbia
  unsure (1)..(424): unsure at all n locations
ccggaaatcaaaaacagtaataaaagatcaactgcaagaaaatggctcttcctctcgagctcgaaagcctcactgaagccatctcagctgggatgggaatggggagtggntgagnatgcatggntnngccccccggggaaatcccaaagggaccataaaaaattgttaagaaagcaggcaaagttttttttgttgagattgtggaaggccttttttttattgccttatctctttctgttatcctctaaccttagttcttccctttcttttttttcgtttttttatcttcttatttctcatttggggtttttcattttttttatttccttttttttttaatctttttcactttttttctttttattattaatcttatttttctttttttatgtctttctttttttaatttcttttctattttttt

SEQ ID NO: 109802 - DNA, 251 bp, Arabidopsis thaliana columbia
tccgttttattcagccatctagagcttcctgcgaccataccatttctcgatccattcgtgccgaccgcgaaatcttgtcgtttgtaccaccttcttatctctctttcccaaatcttctcgtttctctctcactatctttttttgttcttttttttcctcttcttccttatcttacctttttttcctctttcttctactttttcgtttcttcttttcttctttttctcttttttttcccattcttttttttt

SEQ ID NO: 109803 - DNA, 411 bp, Arabidopsis thaliana columbia
ccaaaatcctttttctttgttttggtaaaataagtaaacccaaaatcttcccaaatcaatcaaagcgagaaagagctatgggtgcaagcaatcacgataacgatttcaattctacgacaaactggaaactcgtcgacggtacactcatagacgccatctcatttgaatcctccttcactgcaaaccccgaatctgacgacggaatcatctctgccgccgtcgatcatgtaaccaaatccccgttacttcttctccctccggttcccaacggcgagccttgtgaaattacaattacatttgcacaagaacatgaattaaggcaaatctacatccgaagtagtgcacgagtatacgaagtgtattacacgaaaaagcgacgacatgataaggaatatctgtgtactgttcgat

SEQ ID NO: 109804 - DNA, 448 bp, Arabidopsis thaliana columbia
cacaatgggggcaccaatggcctctttccttgttttagcattctcccttgcttttgtcggtcaaaccaccgcaaattactggtactcttcccctccaccaccggttaagcattactctcctcctcctgtttacaagtccccaccaccaccggttaagcactactcgcctcctccggtttacaagtctcccccaccaccggttaagtactactcccctcctccggtttacaagtctcccccaccaccggtttacaagtcttccccaccaccggttaagcactactcccctcctccggtttacaagtcctccccaccaccggttaagcactactcccctcctccggtttataagttttccccaccaccggtttaacactactcccctcctccggtttacaagtctccccctccaccggttaaccactactccccttctccggtttacaag

SEQ ID NO: 109805 - DNA, 407 bp, Arabidopsis thaliana columbia
aacttgttgatacatataagtttcgtctgccaaagtttactgtaaaatttgctatacagtttatgcggagagctattcagaaaaaagcaaagtttgatataatggaattgaacaccattaaggtggcaaaggctagttttgttccggttttatttggacatgccttagatgatgactttatccgccctcatcattcagatcgtatatatgaagcttacgtaggtgacaaaaatatcatcaaatttccgggagaccacaactccccaaggcctccattctattttgattcgatcaatatctttttccataacgttcttcaacccccagaggtggtggggccgacattttatgacccattggatgattactttgcaaatggcagttggggaactatgaatgacacaaat

SEQ ID NO: 109806 - DNA, 324 bp, Arabidopsis thaliana columbia
ctttcacccacaaaaagggttttttcttttcttcatcacattctacaccccaaagttttaatctgtttttatttgttctcttcaattaatatattgaaataccaaaaaaaccttgattgttgtaatggctgagttcaagagtaagttaaacaaaggtcacgcctttacaagcaaatgtgcttccttggtgaaggagcaacgagctcgtctctacattcttcgtcgttgtgctaccatgctttgttgctggtacatccaaggcgatgagtaaagagatgactcttctccttaattatatataaatctatatataaaatatatata

SEQ ID NO: 109807 - DNA, 320 bp, Arabidopsis thaliana columbia
cgctgttacttttaagtgtcagtcttcactcactcattcaacatcgtttcaaatttcagagcggaggtctctaaacccaaagcctgtgcacttaattgcctattcttcaaaaggcgagtttcctttaccaagcttgcaaagttatctaaactccaaacgatattgaaaacgcgtgtgctcatttctcttattctttcttcttacgccatgactaaagatgaagactttaagctcctaaagatccagacgttgtcactcagagtcaacattcactgcgagggctgtaacaagaaagtcaagaaactttttagaggatcgaa

SEQ ID NO: 109808 - DNA, 192 bp, Arabidopsis thaliana columbia
  unsure (1)..(192): unsure at all n locations
tgtatctatgagaactgggagtagattgaaaccaatgttgtgttgtctttgtatatatgtaatgatcaaatggttttggtaaagagaaagatgaagaaagaatggactgttagtgttagctgttaagtacataggacagtatgtagcatctggatcctattctcccatataattgtattgttgctacatant

SEQ ID NO: 109809 - DNA, 148 bp, Arabidopsis thaliana columbia
atttattctgacgaatttgtgatcggtggctgcaaatggcgtcttatagcctatcccatgggaaataggattaaaaagtatatgtctttgtatgtggaagttgctgattctaaacatttgccttctggttggagtattaacacacaat

SEQ ID NO: 109810 - DNA, 253 bp, Arabidopsis thaliana columbia
  unsure (1)..(253): unsure at all n locations
tcgaaaacaaagtctattccatacgaataagagcctcaggttaattttttaaaagatgggttattggaagtcgaaggttgttccagggatgaanaaattgttcgagaagagtccagcaaaaaaggaagttgttgtggaggagttgtcattattggattcttgtccattctattcttactttcttatctctcttatatattttctttacttttctttttatcttttctcttttttctatttactgtgtcttttt

SEQ ID NO: 109811 - DNA, 228 bp, Arabidopsis thaliana columbia
cagccttgtgcctgttctcagtgttgttggtgttcagaagacgaagccaacccagcatagtgtgcgaggcctcaggagccttggggtgacaccaaatatcctagcatgtcgcagcacgaaggcacttgaagaaaatgtcaagacaaaactatctgaattttgccatgtgccggaagtgaatataggaacgctctatgatgttccaaatatttggtacgttcctttgct

SEQ ID NO: 109812 - DNA, 343 bp, Arabidopsis thaliana columbia
caaagactcgagttgatatgtctagtactaaagatatgtcaactgtccaaaacgcaactccttttaacggcgttgccccatccaccaccgtgcgagttacaatcgtccaatcctccaccgtctataacgatactcctgccactatagacaaagcggagaagtatattgtggaggcggcaagcaagggagcagagctagtgttgttcccggaggggtttatcggtggctatcctcgaggttttaggttcggtttagcgtttgtctgttcttattgaatagtggtgtgatgagtttgctttatgtatctcgcttatgttattcggttttcttgttttttatctat

SEQ ID NO: 109813 - DNA, 368 bp, Arabidopsis thaliana columbia
gtattactctccttctccaaaggttgactacatttcttcaccactaccatacgtctacagctgcgggccttcaccgtactactggggggtgcgccaaaggttgactacaaatctccaccaccaccatacgtctacagctccccaccaccaccgtactactctccttcgccaaaggttgactacaaatctccaccaccaccatacgtttacagctccccaccaccaccgtactactctccttctccaaaggttgactacaagtctccaccaccaccatacgtttacagctccccaccaccaccgtactactctcctacgccaaaggttgactacaagtctccaccaccaccatacgtttacagctcccc

SEQ ID NO: 109814 - DNA, 150 bp, Arabidopsis thaliana columbia
  unsure (1)..(150): unsure at all n locations
tccgcacgcgtaatcgtagacgacgacgaaacatanttttctttagtgtttattttatttttgcgtggggtttcagtttcaaagagggccgccaattaccaaaaagtgctccaatgcatgattattacgttggagccttttacatacaga

SEQ ID NO: 109815 - DNA, 436 bp, Arabidopsis thaliana columbia
ccagacatcagcaagattcaggagattaaaaccttaaattaaaacaatacaaactccaaattcaccggaggaaataacttaaaacttgaatctgaaaagatgagctgcaatggttgccgtgttctccggaaaggttgcagcgagaattgtatcctccggccatgtattcaatggattgaaaccgccgatgctcaaggccacgccaccgtcttcgtcgctaaattcttcggccgtgctggtctcatgtcctttatcttcgcttgttcggattctcaacgtcctgctttgtttcagtcgttgctctaacaagcttgtggaagaactggcaattcagtttaccgagcaattgggatggtatggacttggaactggaatattttgtaagccggttggtttaaaaaaagttttacgttggtttttttatactttttctttt

SEQ ID NO: 109816 - DNA, 324 bp, Arabidopsis thaliana columbia
cagagttatttcgtcggatcaaaatggtgaagattgagataggaagtgtgggtgactcctttagtggagcatctcttaaggcttgctggtctgaatttatcgcaactcttctctttgtgtctgctgcctccgactcttctcttgcttatgccaagctcacatccgatgcagccttggacccacctggtcttgccgcctatctccttttttttttcctctccttcttttcctctctctttatctttatccttccttctctgtattcttaatttcccttcctttctccccttctttacctttctccttatctcttcttccaccttt

SEQ ID NO: 109817 - DNA, 398 bp, Arabidopsis thaliana columbia
aatccatccatcaccgatctctaatggcggcaccaccagcatcatcctcggcgagggaagagttcgtgtacctcgcaaagctcgcagagcaagcggaacgttacgaagaaatggttgaattcatggaaaaagtcgctgaagccgttgacaaagacgaactcaccgtcgaagaacgtaatctcctctccgtcgcttacaaaaacgtaattggcgctcgtcgtgcttcctggagaatcatctttttcattgaacaaaaagaagagagttttggtatctatttacatgtgacctcatattctatattacagaaagcttgtttcgtattcttatttttctttttttcttattccattttttttttaattttttttttttactattattatttacttattatt

SEQ ID NO: 109818 - DNA, 386 bp, Arabidopsis thaliana columbia
ctcctttcggattcaaatctcagatctagctcaaccatggcgttgctcgtcgagaagacctcgggtggccgtgaatacaagggcagagacatgtctcaagccgatttcggtcgtctcgaactcgagctcgccgaagttgagatgcctggactcatggcttgtcgtaccgaattctgacctttttagtcatttaaaggctctagaaatactctatctttttatatgatcattcaaacctcttttctcttcgattccttaactgttttcgctgcttcgaatttttatttcttcctatctattatttttttttacttgggaattgtgtacttcttatattattttttttatttttcttttaatttttttttttatcttttatcatgctt

SEQ ID NO: 109819 - DNA, 313 bp, Arabidopsis thaliana columbia
  unsure (1)..(313): unsure at all n locations
cggaccgcccgtgggcagtnnagtcatatgcctttgtctcatnaagattaagccatgcctatgtgtannagtatgaacccgaattctagactgnntgaaactgnncgaatggctcaaattaaatcagttatttagtttggtttgggatggtaactacttnnactcgganntaacctgtagtnnaattcttaganngctaatatncgtgctaactaaactctccgactttaatggnnaagggactgcctatttattanngataaaagngnntcgacgccgggcctttctgcctcgttgcttctngnnatgattc

SEQ ID NO: 109820 - DNA, 396 bp, Arabidopsis thaliana columbia
aaacattaagaaatgggtagtgatatatccagtctatattaactcaaagaaaactgtagctgagggaagaagaatcagtgtgagtaagtcatgtgagaacccgaattgcatcgagattagtgattgttgcaagcatttgaaactccctagtgccgtcgagattgacaaagcatacccgcgagatttcatgcaagtagggagagtgagggtgcaattgaaaagagaagatggtactttactcaatccagccattacttcaaggaagcatctgatgcagaaaattgcagagttggtaccaagacatccagagagagtaaagaagcaggaagctcagaaagcgaagaagcaggaacctcaggccacaacttcaacctctggaacttcttcaaagtcagg

SEQ ID NO: 109821 - DNA, 235 bp, Arabidopsis thaliana columbia
  unsure (1)..(235): unsure at all n locations
cccgtgtcctcataaccactgacctccttgctcgtggtatcgatgtgcagcaagacnctctggggatagactttgaccttcatcaaccggttaatttcatccctgcatcttattgttagcagtttagactacttagatctccagacggttacgaaccattgttgtttgcgttttgtagactgagtattagtacgaaattagataagcctgatgccttcggtgaaattgattgctc

SEQ ID NO: 109822 - DNA, 399 bp, Arabidopsis thaliana columbia
acaccagagtgtcaaaagggaatgaaactgatcttgtctttgtgcttagctgaagggtttgacacgtttcctacactgctttgtgctgatggatgttccatgattgatcgaagaatgggtgtttatgggtatcccattgagatccaagcgttgttcttcatggctttgagatctgctttgtcgatgttaaagcccgatggagatggcagagaggtcattgagaggatcgttaagcgacttcatgccttgagcttccatatgcgcaattacttctggcttgatcatcagaacctcaatgacatttacaggttcaagactgaggaatactctcacacggcggtgaacaagttcaatgtgatgcctgattttattcccgagtgggttttttgacttaatgcc

SEQ ID NO: 109823 - DNA, 303 bp, Arabidopsis thaliana columbia
atcatatttccctttacgcaaggatcgaagagacaaactctcttccattaggttgggaagtgaatgttgatctcaaactctttgtccataatgggaagctacacaaatatttgactgttacagatggcttagtgaagcgatataacaatgcgaaaaaagaatggggtttcggacaattgatttcttgatcaacattctacaacgctaacgaaggttaccttgaccaggacactgtttctttttgtgctatgatctttattgttaaatttttctcttactttactgtaattgtattatttaatt

SEQ ID NO: 109824 - DNA, 394 bp, Arabidopsis thaliana columbia
cggacgcgtgggagatgatggaggtatatgagaaaatgaggttaagtggaatcaaagctaatcaaaccatcttaacaactatcatggatgcgtctgggaggtgcaagaatttcggaagtgctcttggttggtataaagagatggagagctgtggggtaccacctgatcagaaagctaagaatgtgcttttatcattggcttcaactcaagatgagctagaggaagctaaggaacttactggtatcagaaatgaaacagcaaccattattgctagagtttatggatctgatgatgatgaagagggggtagaagatataagtagtgaatctagtgacgatgaggatgaaggagatgacgatgatgatgatgcaagagaaactgtgttgtattgata

SEQ ID NO: 109825 - DNA, 113 bp, Arabidopsis thaliana columbia
ccgcggctactcatttctcttttaatctcaggcagtattgtgaaatttttcgatttcgtagatcaaaatggcggcaccattcgcgttgaggaaaatcggtgttttttttaact

SEQ ID NO: 109826 - DNA, 285 bp, Arabidopsis thaliana columbia
gtcaaacataaagttaggccaagaaacccatttaaaaaaaaagagagagagatggagagtttcccgatcatcaatctcgcgaagcttaatggagatattacagccgtcaatgtggttactactggatgcagttactgttgacctcgacgttgttgctaggatggatttgttggagttctttaaagaagaatgtgaacagagaggagctacaattggatttgcaactcatattttcgacgggctcgagacatgggctagtcatttggcttacatttatggaggaga

SEQ ID NO: 109827 - DNA, 354 bp, Arabidopsis thaliana columbia
gagaaatctcgccgccgtttgaagaaagaatattttatgaaagatatgatgtgaacatgatgcgtgcaagatctgatgctaggaggctttacaagaaggtcttaaagaaattttacagtgacgatgacttcatcagaatcttgacaactagaagcaaagtttatcttttttgcatcactcaaccactacttcaactagtatggaatcttcattaacatgaatttgaaggaagagtcttacgattatgacttcatgaaatctacttagtgctgtaattactagtttgtcatactctgattatgcttttgagaaggttttttaattatttaatcatatttattttaatattcttat

SEQ ID NO: 109828 - DNA, 354 bp, Arabidopsis thaliana columbia
ctcagagcttttgagtcttctaaatctctatcgaatttttctagggttagggctcctgatcgatttcgcgagctctgcgattattttaagtattaggatcctaaattagaaattgtcggagagtgatatattattataactatttaattggatcttttattcatttttgtgtgttatcttaatgtaaaattactttttgtaattcttattttattatacatatatttattaaataattttttttttttatatttatatttataataatttattaaaaattatttatttagttaatatatttatttataaatgtttataatctatctaattttatttattttatataatcttcta

SEQ ID NO: 109829 - DNA, 277 bp, Arabidopsis thaliana columbia
gagatatttaagtttagcaaaaaaatcctaagcttctacaatggcgaatcttcccaccgttctcgtcaccggcgctagtggcagaacaggccagattgtgtataagaagctgaaggaggggtcagacatgtctgtagcaaagggtttagtttgatgagcttaaggcaactagaatctttaattagacgctttagtttttattttggtaatctcatttactataacttttttgtattagtttattttgtatttttttttttttattttatttttaatt

SEQ ID NO: 109830 - DNA, 207 bp, Arabidopsis thaliana columbia
ccgaaagcatgttcttcgtatggctaaaagcatcaaagatatttcgacaaagcttgggttgccttggttttcaagcagtttgataactaacaacttatcaaaccttcgggcctgcatgctgatggcttagattttgagatgtaatgatcatttatttacatttcttttttttttttcatattaatatttatatttattttttttttt

SEQ ID NO: 109831 - DNA, 249 bp, Arabidopsis thaliana columbia
caaaatcagatccaacaaatcttcttcttcttcttcttcttcgatcatcatggccagtatcaaggttcacggagttcccatgtccaccgccacaatgcgcgtcctcgctactctttacgagaatgatcttcagttcgagctcatccccgtttatatttgatccgtttcctcatatcaatgttgtcttcttgttcttaatcttttttatattattttcttctatttattctcctttatttttattttatt

SEQ ID NO: 109832 - DNA, 235 bp, Arabidopsis thaliana columbia
gggaccaactggaatttgatttaaacggtaaattaccaaaaaattcaccatacaaacattacaaaaggcactactcagcttttttttggtgggttttgaaatccaacaacattagaaatgaatttgacttacaaactgggacaagcggcgagtctgtaaaaaaaacggtttttgattatttaaagcagttggacttttaagcagctttttggaaagaaagttttttcctgggttt

SEQ ID NO: 109833 - DNA, 251 bp, Arabidopsis thaliana columbia
acttctcactgccaaaggttatggatggacttttcagtctagctaagacactttttggaattgatattgaaccagcagatggtttagctccggtctggaacaatgatgttcggttctaccgcgtcaaagattcttctgggaacccaatcgcttacttttactttgatccatactctcgcccgtcagagaaaagaggtggcgcttgtatggattaggtttgttatcatttttatattttttatttttttttt

SEQ ID NO: 109834 - DNA, 407 bp, Arabidopsis thaliana columbia
aagattcctcaccggttcttccggtaggtcgaactcgcttttagtacatgtctgacgacgagcactagtttgaggcctgcgaatgcggagcttccaagacctattcttaatcagccggtaacattcgtataggtgtttacattgtaatcaaaaaccgtccttgcaaggttgttgatgttttgatttacaatactgactagcactgttacgctaaaagtcacttagtttgtattgatatgattattgtttagaagcttgtaaatattgatcctttttatcactattgatactttactacattttttccttgttgattacctgatgtttgatatcattgatggttgctttgttagtttttttattgttagtgtttgatctattgttgtttaaagatttctaattatttt

SEQ ID NO: 109835 - DNA, 286 bp, Arabidopsis thaliana columbia
ctcaaactctcaaactctctctctctcttcccttcttcttcgttactttgcccgaaacactgactgttgcagaagcagatttaattcttctttagggaatcttcgaattggttagcgcagagagatgaagcatttcatgatgccaaggaacgctatcttgcgtgatatcggagagtcacaatcgccaaaccctagcttgacgaaatcgaagttacaaaggaagattaaatcttttaaagagaatgctccatcttcggatttgaatcttgtttatatttgagtaata

SEQ ID NO: 109836 - DNA, 264 bp, Arabidopsis thaliana columbia
cgacctacgcgtctgttcacacttccgtccgacctacagacccctagaatgcgaaatctccaaagaacccgacaaagcgccatgtcgctcactatcccggcgaatctcgttctcaacccgagatctaacatatctctgcactcaatccgtacctaaatcctgcgcaagattcgtctgcttcgatgacaaatccttcacagttggtgttgcacacgatgcgttcaatactttctttagcgagactggtgctggcaagtattttct

SEQ ID NO: 109837 - DNA, 261 bp, Arabidopsis thaliana columbia
tttttcttgaataaaatcagaattacaaacaaaaatggttttgcaaaagcttcctctcattgggctgcttttgctcctgaccatcgtcgcctctccagcaaatgcagatggacctgtttgcccgccgtcgaacaaactaagccgggcaagtttccctgaaggttttttatttggcacggatacttgtgttataccatgtctgaggagctatttattattcttgttttatacctttcttatattttatttcattattaatta

SEQ ID NO: 109838 - DNA, 241 bp, Arabidopsis thaliana columbia
cttcttcttcctcttcgatattcgtcagtagtagtgtattttggggaaaactttgtgagcaaagagcgagaaaatgagcggagccggtaagaaaatcgcggatgtggctttcaaagcttcatggactatcgattgggacgtgtatgacctttcgttcattgtcattaattattgtttctttaatttatttgttttaaattctatttcttggtattaagatatttggtttaatttttatttt

SEQ ID NO: 109839 - DNA, 446 bp, Arabidopsis thaliana columbia
gcccatggtcaccatgctcaagaggctcttcgtcgtgctaagttcaagttccctggtcgtcaaaagattattgtcagcaggaaatggggcttcacgaagtctaacagttcttacttcacctagataaggcatgatatacgatctgctcatgacatgcgtaacgctaagtctctgtcatgctcatttgtctttaagctctactaggtctgtcttaagcgttgctgtaattcctgttaacagtatatatttaacttggattgtctcaccgtgtctctgaaagagatttgtatgatcatttttcttatgaatgataggattcttttgtttcatcttgtactgtacccatttacttagttaatctcgtgctttatgttttatgcttttatttaaagttttagtaatgcttttcatttacttagttttttagttctctcttttttttttat

SEQ ID NO: 109840 - DNA, 313 bp, Arabidopsis thaliana columbia
gccatgggaagaagacctgcgaggtgtttccgtttgatcaagggtaagccatacccaaagtctcgctactgtcgtggtgtgccagttccttaatttttgttcttcgtatgctgtttttttactttattttatttgttatatttgttcatttcgcttatctttattaaattttttttttttttattatttttgttttttttacattttttttttttactaaaattattgttattttttattttttttaaatttttttattttatgagatttctttcaattcctttaaattcttttttatgtttttctatttttt

SEQ ID NO: 109841 - DNA, 419 bp, Arabidopsis thaliana columbia
atggtttcatcacttaacatcatcgaagtggcacgagtcaccccttcaaactctgactcggccgagtcactcagtctcccactcacttatttcgaccttatctattataaacttcgcgccgtcgaacgagtcatcttctaccgaatcaccaacgtaactcgccctttctttgactcagtcatcgtcccaaatctcaaaacctctctatcctcatgcctctctcactatctcccactcgctggcaaacttatatgggaaccacttgatcacaaaccaaccattgtctactcccaaaacgacgacgtttcattcagcgtcgccgaaacaaacgctgatttctctagtttatccggcaatgaaccattcccctccaccgagttgtacccgttagtccccgcgttacaaagctccgacgactc

SEQ ID NO: 109842 - DNA, 251 bp, Arabidopsis thaliana columbia
  unsure (1)..(251): unsure at all n locations
tctcaacctctcaccatggtagctcaagctcctcatgatgatcatcaggatgatgagcaaattagcagcggcgagtacaaaaggagatggaggatcggtcgccgatgacttactcaagaagggcaagatactctccttcactatctccttatgacaagcgtcgtggaaggtctgtgtcaaggnctctgcctaaaatcccgacccggtgtgtcttaagccatgcttaaattcctggtaacacgctatatgca

SEQ ID NO: 109843 - DNA, 309 bp, Arabidopsis thaliana columbia
cgatcctcccggtgaaccaaaccaaccaaccccaaagccaaacaaagttttatagagaccttccatttctccctctcgtgacaaacgcaatttgcagagaagcaacagcaacaacaagaagaagaagaaaaagatttgagattactttgtatcgatttagctattcgagaaactcttgccgtttgaaagttttaattgttaaagatgtcgagttctatggaatgttctgagttcagcgggtgccgtaagttttatctggaagtagccaagctttttttcagatgtagttgttgaatttattcaattttc

SEQ ID NO: 109844 - DNA, 408 bp, Arabidopsis thaliana columbia
gcatcccacaaggcggtgaatgagtacaaggaggccaaggctcttggctgtgactccgcaacactgaactggggagacccatgtctcttatcttgttgtttctctatggcaggtcctgtgtgtgcgaagagtcttctgattaatttgagtttcttggaagcttttactcgatcttcatcggatcttagggttttggttaaatccagaacttgggttttgttaaataaaggcgactccttatcctggagcgacgcaggtggtttcgtactttgtggggcagtattatcaagagttgcagcatcagccagtccttattcatcagtttttattctgtgcctagtagagctattcgtatcgatggtgatttcaccgagtctgctaattctttgctgcttattctaatcatgg

SEQ ID NO: 109845 - DNA, 103 bp, Arabidopsis thaliana columbia
atcgacaaacacctttacgtctttgacctcgagtcccggactaggtccatttctccaggcacgggagacgcaacacaactggggtggtttaagcattattgtt

SEQ ID NO: 109846 - DNA, 194 bp, Arabidopsis thaliana columbia
ctcaaaggaaggaacatgtggcactgtgtttagtgggcgcgtggattaagtgaatagttttattctgatttgaccaaatcaaccttcctttttgtgcatatggttgtacagcggtgactcaaggagtcagcaccggtagggatggtccgatggagtgtgacaagcgggcgatgtaaatctggtgccctgatctt

SEQ ID NO: 109847 - DNA, 303 bp, Arabidopsis thaliana columbia
ctttaacaaaaaaaaaatggcaagcgcgaatcctttaaccgccaaacccacgcctgcaacggtggacatggctaatccagaggagcttaagaaagttttcgacctgtttgactttcactgcgtcggctagtatctttgttctttttactttcaatttatttttattgcttgtattcatttcatttttattttttttttctttatttttattatttttggtttattattatttttattttttttaattattgtttcatttttaatttaattctattttcattttttattttatattccttttta

SEQ ID NO: 109848 - DNA, 278 bp, Arabidopsis thaliana columbia
gaaataagcttcttccaagaagactggatttgattacatggactcaaaaaacactcttttataaaccttagaagaagtaaatctttctctctatcaatgctcttctttaccaaaaacatgtattactatgtgttattgcacaccaaacttttgttgtatttgagcttcatagaatcttatggttttgtctatatgcatatcgtcgtgtactgattagtataggcgatatccttatctctgtagcgactcatgttggttcgcactttgtggtgcagttt

SEQ ID NO: 109849 - DNA, 120 bp, Arabidopsis thaliana columbia
ctcgtcaattcagctgcgacaatggatttccaggtcgttattctagccggcggattctctagttatcttgttcccttagtcgccaaggaagttcctaaggcgttgcttcccgaatcgatt

SEQ ID NO: 109850 - DNA, 434 bp, Arabidopsis thaliana columbia
tcaaaaacgattttacaagaaaaaaatatctgaaaaatagtcagagaccaacaagaatgccttccaagccggtcaggccgctggcaaagctgaggagaagagcaatgttctgctggacaaggccaaggatgctgctgctgcagctggagcttccgcgcaacaggcgggaaagagtatatcggatgcggcagtgggaggtgttaacttcgtgaaggacaagaccggcctgaacaagtagcgatccgagtcaactttgggaagtataatttcccttttctaattaattgctgggattttcaaatataatttgggagtcatatttgattttggtactcatagtacttgttagtgcattaagtgttcattgtataatgggtaaacctctgtttaccacaatttaatattttagaattattttcttttttcattgtttg

SEQ ID NO: 109851 - DNA, 415 bp, Arabidopsis thaliana columbia
gttttcaggagagttaacttctggaatcaaatcttggaagaagctcaacgagttaaacttagccgataacgaattcaccggtaaaattccagatgaaatcgggagtttgtcagtattgaactatcttgatctttctggtaacatgttctctggcaagatcccggtttcattgcagagtttgaagcttaaccagctgaatctgtcttataaccggttatcgggtgacttaccgccttctttagcgaaagatatgtataagaatagcttcattgggaacccgggattgtgtggggatatcaagggattgtgtggctctgagaatgtagctttaatgattggtctttgtatggtttccttatttgtttttctatcttgtttatatgttctttttttatgcggtttatttttttatttt

SEQ ID NO: 109852 - DNA, 219 bp, Arabidopsis thaliana columbia
gagacagagaggtagagagagtaacgatggctgctgtagaagaagtagacgatgttggaagaacaatagaggaagagactgtgtgtgaaaaatgagaaagatgagaggaatctgatacattgattccttggttgcatcactccattattataagcatttgtctatttttctacaaagcttacttttctttgttttatcattttcattttggattttttg

SEQ ID NO: 109853 - DNA, 170 bp, Arabidopsis thaliana columbia
  unsure (1)..(170): unsure at all n locations
aaacagaacgnagtttgagtcagactgaagttgagatgtatagcgtggaagctgcttcgtggtgccggggttatctattgtcggttccatttcacattcaaatttcttgttatgattcataaaaatatatctcacttcttattctgttaattaatagtctatatattttt

SEQ ID NO: 109854 - DNA, 350 bp, Arabidopsis thaliana columbia
agcaatcacactctctctttgttcgagtaccaacaatggcccttcaagctgcttctttggtctcctctgctttctctgttcgcaaagatgcaatagttaatgctttttcattatctctcaaggtctcgagtttttatgtttctcttagtacattccataatttaatcctatctttgatttattttatttttgttctattttttttcttttattttattaattctcttaatttattgttcttatttattattttattatttttcaattcattttttgtttatatattcgttcatctttctcaatattttatttattgtttttaactatgtttttatttttcattataattt

SEQ ID NO: 109855 - DNA, 351 bp, Arabidopsis thaliana columbia
aacttcctcggctcgcctcacttgctccttccagtctgactttaaggacttcaccggtaaatgctccgacgctgtcaaaatcgccggattcgctcttgccacctctgctctcgtcgtctcgggagcaagtgcggagggagctccaaagagattgacctatgatgagattcagagcaagacatacatggaagtgaaaggaactggaacggctaaccagtgccctactattgacggtggctctgagactttctcgttcatacccggatagtatgctggatagatgtattgttttgagcctatttttcattaccgtcttggcttattttcttttgatagatatatttctcttat

SEQ ID NO: 109856 - DNA, 364 bp, Arabidopsis thaliana columbia
agagaaagcatgtataaactgtcactgaatcatttgactcttcagtctgtgtctgcaagtgattcaagaaacccctttgtagagcatgcgatacagtatgctatagctgctgctcatttggcaaccgagaaggacaaagaatcattgcacaaactcttattgcaaggtcttgatataacaatattaggctccaatgacttttactcatatcggaaccagatagaatcggctgggcttccattgacaccagaatcgctgggtacccttgcaccgtttgcatcaatcacattcaatgctgcggagtcaaatggtgctaattccaagcctgaagtatcaaaaactggcttaggttcttctgcagcaa

SEQ ID NO: 109857 - DNA, 250 bp, Arabidopsis thaliana columbia
ctttggacgaccatcggcgacagtgttaagtcttgagtcttcttcttcttcggcgtagttttgacccactcttataatatgagaggatctcacaaaaagatatttttcattactatttgcaaactaagttaagcccatattgatattatttcattatatattaaattaaaaaataataggattcattgattagttaattaaattaatttaatttttattataattaatttaattttattaaatgaatttt

SEQ ID NO: 109858 - DNA, 407 bp, Arabidopsis thaliana columbia
cttgaagacggcttcttcttctcacaaacctcatctctgctaatcaaaatgtctctggttgcaaatgaggagtttcaacacattcttcgtgtgttgaatactaatgttgatggtaagcagaagattatgtttgcccttacctctatcaaaggtattggtaggctattggctaacattgtctgcaagatggctgatttcgtcattgttcaaaatgtctgtttatttttattctatttatatttataacttcattacattttttatttatcatttttttgtttaagatatctttttaatatttttcaatataattattttttattatttattttttttatatttattttgattaattatttattatttacactcaatttttttaaatatgtattgtattgttatttttt

SEQ ID NO: 109859 - DNA, 327 bp, Arabidopsis thaliana columbia
cttcacccaaaaacccctaaaagccttatcccttcttctttccatggctgcttcagcttcgtctctcgctctctcttccttcaaccctaaatctcttcctttcggcgtctccagacctgcctccgtttccctcttatctccttccctctcctttaaactcaattccgactccgtgtccttgtccatcgccgccaaatggaactctcccgcttctcgcttctcccgtaacgttggcgttttccccaatagttcgttgtgtatagtagattgttttctcttcttcttttcttgtctatttgtactattcttattttggtttgttccttt

SEQ ID NO: 109860 - DNA, 359 bp, Arabidopsis thaliana columbia
agtaacaataaattccaattatgtctcgaagaagacaaccaatttaggaaatataagcagcagaaagtaacggctaaaacaagtctcgaccgaatacttggtggatttctaaattctaaactttcttttttaccatccttatgttcgtttaccgaaggtatgtatttatttctttatttgttgatttgttttattaattgaatcattctatagttgtatttttttttttattatttaattttttaatctattaattattcttttattttttttttttcattttatttttttattttatttatttaaatcaagtgtatttttattaattttaaatatattttgattatgttttatattta

SEQ ID NO: 109861 - DNA, 377 bp, Arabidopsis thaliana columbia
gttcatcaccaagactccatgaatcagcagcatcgacacaatcctaattctagaccacttcatgaaggtcttccctttactatggttacaggtcaaacctgtgatcatcatcagaatcagaacatgtctatgtctgagcaacagaaagctgaaagagagaagaattcagtgagtgatgatgatgaaccaagtttcacagaggatggtggtgacgggggttataggtcctgccaggagaatttttttgcctgttggttttttggatagaacatggattctatagtacttatacggtgtttttgcttgagattattgtttttacccaattttggcttatttattaattctgtttaatctttgttaatgtattaaatttt

SEQ ID NO: 109862 - DNA, 258 bp, Arabidopsis thaliana columbia
agctgaaagctccttttgctcaagcctctccacaatcagacccaacaaatactaaggaaaagagatcacatggtatagtttccttgtcccaggactcaagtggaacctatctcacagcatcatgcaaggacaatagaatctatctatacaacacgctgcggcttgacaaaggacctgtacaatctttctctggctgccggatagattctttcttcgtaaggacgatgattagtcctgatggtgaatatgttatgagcg

SEQ ID NO: 109863 - DNA, 189 bp, Arabidopsis thaliana columbia
cagaattacaaacaaaaatggttttgcaaaagcttcctctcattgggctgcttttgctcctgaccatcgtcgcctctccagcaaatgcagatggacctgtttgcccgccgtcgaacaaactaagccgggcaagtttccctgaaggttttttatttggcacgattactgtggtataccatgtcgaagttg

SEQ ID NO: 109864 - DNA, 258 bp, Arabidopsis thaliana columbia
cgcgagcggcacagtccttcttattaggtcttatttttcgccgcctcacacgacgggcatctttagttcctgccgtcgtgttagagcgcgccgtcattcggttatggtgaccttaattacctttatcgcctgtaatattttttctgtctctacgcgttttgatttatctatctgataattttccttcatttatttaattttttttattcttttaattctttttcaatttattgtacatcctttgcatcttatttctgt

SEQ ID NO: 109865 - DNA, 302 bp, Arabidopsis thaliana columbia
agcttcttagtagttgtgacgcatactcgtcgcagtcttgagatatggccgccgcagtttccaccgtcggtgccatctacagagctccgttgagcttgatcggttcaggatcaggagctgtttcttccctagcttcaatctttttgggattgaaatatttactttgtctttattttatcttttcttctagtattttttttgtttattaatttttttatttttttcatttattttattaatttatattaaataaatttatatttaattgattgctatttatttaatttatatttatttgattt

SEQ ID NO: 109866 - DNA, 300 bp, Arabidopsis thaliana columbia
gaaagatagagaaaaaaaatgggaggcaaaggtgtgatgatggtggcgatactttgcctttgggcactctctgcaacatctgaagcagtaacagaggctgagccaggtttgatgatgaacttctacaaggacacgtgtcctcaggccgaagacattgtccgtgaacaagtcaaactcctctacaaacgcctcaagatcaccgctttctttttgttccgtaacatcttccatgactgttccattgttttatgtattgatatttttttaaatatatatattaattatatgtgtttttttaat

SEQ ID NO: 109867 - DNA, 217 bp, Arabidopsis thaliana columbia
cgactctcgtaatagtcgtgatatgttcaataagctttcttcaatggcgtatggttctttcggcgtctcatcaaaagctctagtctattgccgtccctgctatggctccattagagatctccctttctccctccgaacgtcaacaattggtcattgcggctgtgttggagctatcgcagcacctataaatgttgtgaaacctcgcaaggaagaaagt

SEQ ID NO: 109868 - DNA, 366 bp, Arabidopsis thaliana columbia
aagcttttgaaatctgcttgttccttgaaaatggaactacaagatgctatgaatgatgagaatgagaaagcccctgaggctttcgggttcaaaatgataagttttcggaacaaggggtgtaggggtgagctagaaagatggattgggttgaattttgtttttaaaaattaggatattgtttgaatttttgtttaattgttttttttattttttttgtaaatttttattttttttatattttttttttttttttgggtttttttttattttttttattattgttttttttttttaatttttttaatatttttatttttttatataattattttatttattatattaatttatgtgtttttttttgtt

SEQ ID NO: 109869 - DNA, 258 bp, Arabidopsis thaliana columbia
cagaatcatcacaagttctgataaaggacaaaactcttttctgatgcaactcacgttttcacttcacaagctccaaaagagtttacttgggaaaacaaaagtttgacgaatgcaaaaccaattttgttagcataagaccaaacctacttcttcgtctgcctctttgcctgtatttgagttgttcttgctttgataagaaatttgtatatttttttttttttatttttttaatgttattatactaattttattttttta

SEQ ID NO: 109870 - DNA, 384 bp, Arabidopsis thaliana columbia
agagagctgtgttggtttttgaggtaaaagaagagacccaatttcgatttggaggatagagacgaagaagaagacagctccgatggctgatcctgaactagaagctattagacagaggagaatgcaagagctcatggctcgacaaggcatgggtaagcagggcaatcagcagaatccagagcaagagaaacagcaggaagatgctaaaagggaagctgatgaacgtaggcaaatgatgcttagtcaagtattgtctttctcaagcccgagagagaattgcttgaaatggtctggggaaacctgagaaagctagaggttgtggaggatgttatttatttcgctctcattttatattgtcttgtattatttttatctagtattttc

SEQ ID NO: 109871 - DNA, 261 bp, Arabidopsis thaliana columbia
ttctttttcaagcttcttcttctcatcagtctattccggaatctaatttatactcgcaaaactcagcgattcgtttcgtttctggcgagtttccaattctacagtaatggatctcaatctcgattcacctcactccatgttatcttccatctttggctctactttccattttaagtttgatatttttttttcatctttgtattttaatatttttaattttatgtttttattttcatctatttataattttattatttattt

SEQ ID NO: 109872 - DNA, 231 bp, Arabidopsis thaliana columbia
atcctcagaaatatacaaactcctcagaaaattctttcgtttggtttgcttcgttctacaattttgtattgatgagaatgttatattgagtcattaaccgtttgataaatcgtatttggctctgtaagtagtatttattggtattgaaacgatggatcatgtaatcggtggcaagttcaagttaggtaggaagattggtagtgtttcatttcggtgatccatatattgtta

SEQ ID NO: 109873 - DNA, 245 bp, Arabidopsis thaliana columbia
cgaccacgcgtccgaaaagttaggttcgaaacgaaagtaaactatttaggtgaaaagcgaaacaacacccacagagcaatggcccctgctctcgccgttacacgagatctcaccgccgtcggatcttcggagaatgctcctgcgaaaggacgtgctttgtttttatttttaattttttttatctatgttttaatatattctttattagttatctatttatttgtttataattatttttgttttta

SEQ ID NO: 109874 - DNA, 135 bp, Arabidopsis thaliana columbia
cctaaacggagagaggcggagaggagaagtgaagtctgcgtgaagcaatggtgtcgctgaagatccagaagcggttcgccgcattcgtaatgaaatgcgggaaaggaaatgttttgcttgatcctattgaatttg

SEQ ID NO: 109875 - DNA, 482 bp, Arabidopsis thaliana columbia
tcgcattgagaattttcaactttttctatctctcttcccaaatcacaaatggcgggtcgcggcaaaactctcggatctggcgttgctaagaaatcaacatcgagaagcagcaaagccggtctccaattccccgttggtcgtatcgctcgttttctaaagaacggcaagtacgcaacacgtgttggtgccggagctccggtttacttagccgccgttctcgaatacctcgccgctgaggtattggaattggctggaaacgcagctagggataacaagaagactaggattgtgccacgtcacattcagctcgcggtgagaaacgatgaggagctgagtaaactgcttggagatgtgacgattgctaatggaggtgtgatgcctaacattcacagtcttcttctttccaagaaagctggggcttcaaaacctttcgctgatgaagattagattagggatttgggttgggggtggtttagctaatt

SEQ ID NO: 109876 - DNA, 168 bp, Arabidopsis thaliana columbia
ccgtcccgattcctgttcgactcacgcgtccgatttcaagatgttttagcagatgatgttcatattgtttcgtctttaccttctacacatgttatgactagacctgatgaagagaagaggactccacttcatgctatactctcaatggtttttctctcatttatttta

SEQ ID NO: 109877 - DNA, 393 bp, Arabidopsis thaliana columbia
ctctacgctctctcaaaagtcgaatatcccaaattcgatccggatcccgggtagaatccaaatgttacaatataaaatgtcgtttgggggagaaggaccagctatcggtatcgaacttgttaccacttactcttgcgtcggagtatggcaacacgaccgtgttgagatcattgctaatgatcaatgaaacaaatccactctctcttacgtttatttctccttttcttataggttgatctgttactcattttataattatttttcttttatccctttaactttcgttttcgtctcttttagttttatcgtttattaattctttttacttactcttaattatattgacactttaaatttttgctcttacatatcactattattgtacaatttttt

SEQ ID NO: 109878 - DNA, 239 bp, Arabidopsis thaliana columbia
tcgtgtcttaacagttagtccatactacgctcaagttctcatctctggagttgatagaggcgtggaattgcataaatatcttcgaatgaaaacagttttcggaattattaatggaatggatgattaagaaatgctctcgtatatttgcatgtacagggatttatgcttcgagcttaccaatcgtacatactctatatcattgatattactttagctacataatctttgaacgtttgtta

SEQ ID NO: 109879 - DNA, 433 bp, Arabidopsis thaliana columbia
tttagatccaaaactcttctctgtctctctcaagatttatgttttcgtaactgtaactcatagcaaaaacgagtctaagatctgttcataatgatgatgttcaagagcggtgacatggattacacccagaaaatgaagagatgtcacgaatatgtagaagctctagaagaagaacaaaaaaagattcaagtctttcaacgtgagctccctttatgtttagaacttgtaacccaagctatcgagtcatgtcggaaggagttatcggaatcttcagaacatgttggcggccagtcagaatgttctgagcggacaactagtgaatgcggcggtgccgtgtttgaagagtttatgccaatcaagtggagttctgcttcatctgatgaaaaccgataagatgaagaagctgtgaaaactgagatgatgaccaatgaaa

SEQ ID NO: 109880 - DNA, 364 bp, Arabidopsis thaliana columbia
gtgctcgagactgtagagtgaagtttgatttctctagacgtgtatggctccttcaacaaaagttcgctcggtacttctcttatatgtcgtcgagtcattagcctccggtatgagtccatcatcaacgaccatctccaactttcatcggacggctagtggagaaccgatgaagaagtgaggtccatctacttacaatggtccgcagtacacgggaaaacttacatcaactacttcggtattattaacgaccttgtctttagattcattatttttatagtcaacttaaagattcactgttctataccctgattacaccttgtacgtttcttatcaagcttgtctcaccatattttctgttttcact

SEQ ID NO: 109881 - DNA, 233 bp, Arabidopsis thaliana columbia
catcgtcggtgttggtaactgcacatttcatattttatagaaagaagttgctagaatggatattccacatgaagcagaagctggagcttgtgttattctcacttgattattttttatttttaatttcttattgacgtttatttagaatctattatattagttttttgttattttatttattttgtttatatattgttttattgtattatttttatttatacattataattttt

SEQ ID NO: 109882 - DNA, 260 bp, Arabidopsis thaliana columbia
attccggtcgaccacgcgtccggttgaaagaaccttctgtgttgttgcgttgtcgttaagaggacttgggtttagtggaagctgtacttgatgacgcaaaggaggaatatgctgttaaagcaaaggttcatgccccagaggttgcttgtgacacaaaaatattctttctccttcctactaaatcttatgatccttatttatttcacttctcattcagtttctgttatagtcttttttatttaattttatatgatttttta

SEQ ID NO: 109883 - DNA, 258 bp, Arabidopsis thaliana columbia
gtcgaccacgcgtccgcaagaacggagattggctatgttcttgatgtttgttaacatacggacaaagccatcgtcactggggcggcgaccgatagagatctgcgctgtccatttgtccgatccaggcaacaacaacgcacggacctatgacaccatatttggtactgaattgtgagcccaggggtaaggggatctgatttaaatcttttttttttgagcttgtgatggaataggtattgattcttgaaatagtgtttg

SEQ ID NO: 109884 - DNA, 196 bp, Arabidopsis thaliana columbia
gaataacagataaaactctctgtgtgagtgagtgagactcaaccatggcgtctttggctcagcagattctcgggattgagatgttccccactctcttcttcttctaggttatcgaggagagcttcgaagaactttccccagaacaaatctgcctctgtttctccgactattgtcgccgcggttgcaatgtctagcg

SEQ ID NO: 109885 - DNA, 266 bp, Arabidopsis thaliana columbia
ctgagcaaaaaaaatggtggagcaagggagatacgctctggtggtagcgactttggactcagagttcgtgaagaaaacttacggaggataccacatcgaaaactaaaaatgtatgattgtccattgttagattttgacttctactttgtagtttatattttttttatttattaatatatatttttattttgttgacatatgtttttttataatattattaagtgattgtatttattttgatattattttattaattataattatat

SEQ ID NO: 109886 - DNA, 421 bp, Arabidopsis thaliana columbia
cgaaaccaattataggatttgggcttctgcagcatgaatccaagatgtcggttctgcattttagcgtaaagaagtatgatggttacgaagcttctattaaaacataagatgagcttatgttccatgttggtttttattatttattttttgtctgttttatttatttgttaatttattatttctttatcgtattttttattcttttttattttgaatttatttttttttcttttttttttttattttgttttatttatttctattttgttatttttatttttttttttttattttttctttttttttattgttttttgtttttaattttattttttttttttttttttttttatttttttttttttgttttatttttttttttttttgtttgtttttttttcaattttgttatttttagttt

SEQ ID NO: 109887 - DNA, 446 bp, Arabidopsis thaliana columbia
ggagtgatggaaagcttgttactcgaataggaaagaatagtgccaccgttctagcggtgttgaaaacgttggttcgctttggggctcctgataatatattggtcaacggaaagcctcatctaggaacagataagctagttccattactccgtaatttcagacattatcttcaaagtgcgggagtatgttttgaatgagagattgatctatttctctttattacttcttaaagcttttcttttaataatattatctctatccatgtaaatgttgattttaataattttggactattttcatgtttgtattttctatctgtatcctattaaatctctgtttcgttaattttatttatatttcttcttatatgcttaaattataaggctgtataatttgagtttattttatttattttggttttaattatttttaatattaaattattt

SEQ ID NO: 109888 - DNA, 278 bp, Arabidopsis thaliana columbia
gctcaacactatcctcttctacattttccaacgttggcctcaaacgcactctcgtctttcaccgccgctaatcccgctctggctactaagccactactccctcacggctctgcttctccgaacatgaacattgacaacttctttgcagagaatgagctatttgctttctgtccttcatttattgtcccagggttacattactctgatgataagctgtttgtaacctgtgtcgttttctatgccggtgcatttagacaccgtgttggtccaaactatct

SEQ ID NO: 109889 - DNA, 511 bp, Arabidopsis thaliana columbia
aagtgacggtggttccatcagcagtttcattcgtcatcaaggcgttgaaagagccggagagagattggatgtaggtgaagtgcttttttcctttctgttacatctctttatttgttttatcttttatattttatatatttaatttcctatattgcttgataatatatatatttgctttatttattttgtttttataatatttctttaaattttttttatttattttcttttattttattatatttgtttatatttatttttttttcctttgattttttttccttttatttccttttcaattgtttatttttttattttatttttattttttattttatgctttcattacttttatttttccttttactttattttatttgttttttttttatttttttatattttcattcatttttaattatttgtatttattttatatttttattctataattttttcatttattttaatttcttttttgtttcatttatattattatttcttttcattt

SEQ ID NO: 109890 - DNA, 170 bp, Arabidopsis thaliana columbia
aaattttctaagtgtctcataaaaaatgacgagatcctgattagctcttttgatgattcttgtgattcaaggtcttgtgacctttggagaggcacaattcgatgattgcgatatacgaccttatctttccttactcagttttgattttttctgcctttttgcttttttat

SEQ ID NO: 109891 - DNA, 160 bp, Arabidopsis thaliana columbia
cttgctgaccaacaggcctgaggtgtctgacacatcgttttcatggactgatttgcaagcaaaactgaatggcgagttgctgagcaacctatgcaactttgttaatcgagttctgagttttatagcatagcctgataatgcaggttacgggtctgttatt

SEQ ID NO: 109892 - DNA, 389 bp, Arabidopsis thaliana columbia
gagaagcactatgctgacatttctgaagatcaatttgatttccactcgtattgtttaaggaaaatgactttgcgttcatatgttgatatgcttaagttccaagaccgattgcactcattcccatatttccacaaagcatcaatcagagctatcaggtgctacccgaaattgcatgactctcccaagtcaactgctggagaagattatttgtcaaagttttttccttattagaattagttatctcaatttcttagatttagtctttatctcatttctatttaaattatttgtctattttacatttcatttgttatatttttctttatgttctaatgtttttctcttcttttttatttattctaatgatttttctttctcttcttttttta

SEQ ID NO: 109893 - DNA, 271 bp, Arabidopsis thaliana columbia
ctgagccattaactttggaccttcctaatgtaccacccaaattggctccaaaatctcagtatgtctgtggagatttgcgccagcatactgggggagaggctacacactctgcggttgctgtctaggcgccaggctggaataacgagaaagacgcaggcaccggcactgatctccagatactcatgggaggaggggggctattctgcgcgggaggcactgggaagggaatgcactcatggcttcatagacaggctctaatctaatatgaaca

SEQ ID NO: 109894 - DNA, 452 bp, Arabidopsis thaliana columbia
gtagacaagatcattggtctgaagcagggaaagcaaagcatttcacttgaacctgggggtcagttcgagcttagtggtgcacctcttgagactttgcatcaaacttgtgctgtagtcattttacatttttattaagtaaataccgtttatgataaagttgattttatatgcttataaaaactttctgtatattttttatatatgtatcatctatatttttaattagtagttacatttactaatgtaaatattatttatatttttatttgttactcaactttttacttttattttttatttgtttctataattacattttttgttttttatttttcatattttatctatcctctattgatttgtttttatttactttatcttaatattttttttttaaattatatattttattttatataattatgttttatttcatttattttatttgaata

SEQ ID NO: 109895 - DNA, 300 bp, Arabidopsis thaliana columbia
aaatcattcaaatccactcttcgacatcttctcactgcttgctccaaacaggattttgttgatattttctcgaaattcagtggggctgagcaagaactgctttttcagttgtatactcgggttgttgtgaatttgcatcagacaatagaggaagagtttgatgaacaatgtcacgaaactcaggtcggaccaattcttgatacagtcgtaggagctggtcgaagaacagattttggatcccttgctttctgatactactgttgtattggctatttcctatgatccttcaacttttaaata

SEQ ID NO: 109896 - DNA, 132 bp, Arabidopsis thaliana columbia
gtattcaagttccaatatctgatgattgtgaggtttgttctccgcagtcaagtaatctggccttgaatattcaaggtagtagcaactcaagtccaaaggccactgcccctagagtatgtggatccgaagtta

SEQ ID NO: 109897 - DNA, 398 bp, Arabidopsis thaliana columbia
  unsure (1)..(398): unsure at all n locations
cttcggcaagctccagagaaacgagagttccgtattcattttctcttgttgntcctgatcgcgtagctcaagcgaaaaaaatggcgtcgggtgaccttcctccatttgttttactacattgtctgttgaatttattattttttttttattaattttttattttttatttttttattattttattaaaatttaatttttttattttatttttttgtttttttttattttcttttttttgttttttttaattttttttttttattttttttttgtttttccttttttttttttttattttttttcttttttatttttttcttggtttttttttttgtttttttatttttatatatatttatatttatttaatttgtattttattttattcttttattttt

SEQ ID NO: 109898 - DNA, 182 bp, Arabidopsis thaliana columbia
gctcttggtcagcgagtaaagccttatcttccccagatctgtggtaccatcaagtggcgattgaacaacaagagtgcaaaggtaagacagcaagctgctgatctgatttctcgaattgcagttgttatgaagcattgcggagaggaacagttgatgggacttctaggagttgtttttttatt

SEQ ID NO: 109899 - DNA, 234 bp, Arabidopsis thaliana columbia
atctttcttcttttcgatcaaattttagattcaacccaaaatgaagacaaaaatgctgcaacgtactctctagaatctactgaaccaaggacagttcaacccgtccggcttcagccgacctgacggtgcctccgcttgacctttctgggattttattgattttatttttttttatttttttttgtattgtttttttttttttttttattttatttttttattttttttttattt

SEQ ID NO: 109900 - DNA, 484 bp, Arabidopsis thaliana columbia
ccgtccagacatctttgaacttaatccaaccaagtaagcatggatcagaaagtggggtcgaaaagaaaagattgtgttaacaatggaggaagaagagaaccacatctattgaaagaacatgttttggctgaacgaaaacgtctactaaagctcaacgagcgtttgattgctctctctgctcttcttcctggcctcaaaaagacggacatggctacagttcttgaatatgccatctaacattttaaacaacttctagagcggtttaagaagcttgaagttgatctaatgttttccaatatatattatcatttctattatattatttatttttttttcttttatttttttattttcttttttttattcaatttttttcttttctattattttactttatttacttattattttttgatatttatacattttattaagtttattttattttgatttattcatatattttttgttaactaattattat

SEQ ID NO: 109901 - DNA, 303 bp, Arabidopsis thaliana columbia
  unsure (1)..(303): unsure at all n locations
cggacgcgtggggttggaacaaaccgaggagatgcacatgcgttcaagcttgatacacttctcaagctagtcgatgtcaaaggcgctgatgggaaaacaactctcttgcatttcgttgtacaagagataatccgagcagaaggcacacgtctttcaggnaacaatacacatacagatgacatttaatgccggaaactaggtctccaagtttgttcaagtctttgttctgagctttggaacgttaagaaagctgttttgatggacttcataattactttgcattttattacaacaatctttttt

SEQ ID NO: 109902 - DNA, 225 bp, Arabidopsis thaliana columbia
gaacgattctccttcgtttctcccaaagtcccatcacaatcaaaaaccttctctccgagaatctcactcactacaaagagtaagattcgattcaaaaacaaactccgatcgttgaagcaacgaagatatgcttacttcaccttcttcttcttctacatatgatccattctcttccaatttctctccgtcgctcactaatgccttctcttgatagttcaccattcc

SEQ ID NO: 109903 - DNA, 357 bp, Arabidopsis thaliana columbia
caatttgagaccatctccagttcgtcatcgtacgacgactctctctctctctctcctcttctctgtatagtcgaattatattacaagttagatagatagcatgaattggttacctgaagctgaagctgaggatgacttcaaaggtcttctctctggtgatttctttgatgatctcatcaatcaccttgacgtccctcttgatgacattgataccaccaatggtgaaggagattgggttgacaggtttcaagaccttgagcctcctcccatggatatgttccccactttgccttctgacctcacctcttgcggctctggcatggccaaggcccctcgtgtggatattcaaaggaacat

SEQ ID NO: 109904 - DNA, 400 bp, Arabidopsis thaliana columbia
gttctcttgcttgcttctcaagattataatcatcatgaatctctcagccttacttatcttatctgacttttttttcttctctttgattgactaagacaataaagcttcttgcattcttctgcagaatgtgattttgaggatcttgagaatttcaacttcattgtctgttagtctctcttgtgaatttctctggagatgaaaagattcgagaggccaagaacttcgattcactcgcagccaaggaccagtaccagttcaggtaagaaagatcagaagccgcgtagtagtagtagtaaaggatctggtgtgaaaccgttgaatgcggctcagctggtttctagagttttagatgcaacaacagcttttgagcctttttcagtcggtgaaactgattcaactt

SEQ ID NO: 109905 - DNA, 152 bp, Arabidopsis thaliana columbia
gaatttttcttattttctagtacatataaaatgtaactatgggtcataccaatcaaattacttctttgaaattttaaagaaaacataaatgttaataaaaaggacattctataggaaaaagggtttatactctttaatgaaaaagaatccct

SEQ ID NO: 109906 - DNA, 412 bp, Arabidopsis thaliana columbia
gaaaatcaaagcagcagttatggccgacgtagctacaaagcaccccatggaagatgaggtgaagaagacggaggcgtctagtttggtggggaagctagagacagacgtggagatcaaggcttcggctgataagtttcaccacatgttcgctgggaaaccacaccatgtcttcaaagcaagtccaggcaacattcatggatgtgatctgcacgaaggcgacttgggcacagtctgctctatcgtctattgtaattacgtacatgatgatgtatgctaaggtgttcattgaaataatctgtgtctttgtatctttttatacacttttatcctcttttactatttttttaatgttttcttctactatctattattcttattttacatattttttcccttattctttttacatatt

SEQ ID NO: 109907 - DNA, 235 bp, Arabidopsis thaliana columbia
gcaagaggcagtgcgagcgaagctaggcaagtttgggctaccaagtcacaatcacttatctccaattgcgaaattgtctggaggacaaaaggctagggttgtgttcacctcgatctcaatgtcaaaaccacacattttgcttctggacgagcctacaaatcacttagacatgcagagtatagatgccttggcggatgcactagatgagttcacaggtggagttgtgttggtgagt

SEQ ID NO: 109908 - DNA, 337 bp, Arabidopsis thaliana columbia
aacactcgcacacacacaccaaactcacctgaaaccctattttcatttaccattcacactaatggcacgaccacaacaacgctttcgaggcgttagacagaggcattggggctcttgggtcttcgaaattcgccaccctctctcgaaaacaagaatctggatcgggacgttagagacagtggcagatgcattacgggcctacgacgaggcggttaggctaatgacgtggcccgagagctcgcactaattataccatacaaccctaatgccaatactactttctacttgcaagcttctatgagcaactattaccgctaaactgcacaaatgctacatg

SEQ ID NO: 109909 - DNA, 174 bp, Arabidopsis thaliana columbia
ggaacagtggggactcatcagatggtgggcaatgcacagattcttagatgatgatgatttttaattttattattattatattaatgtcggagaaaaagagaaaaatgattctggagagggaagcccagctaccttatgtgagagtctttaacttatcctctatctttcttgttt

SEQ ID NO: 109910 - DNA, 234 bp, Arabidopsis thaliana columbia
gtttctcttaagcttctctcacatttctctttttatatttcttcgagtctctctcgctctctccgtttcttcgcggtctctctctctcagatctctccgaaacattcttcgtagtgaagcaaaatggggttgagtttcgccaagctgtttatcaggctttttgccaagaaggtgattcaatttcttgtggttggatttgatgctgttatttagactttgatttagtacatgctt

SEQ ID NO: 109911 - DNA, 250 bp, Arabidopsis thaliana columbia
ggaaaaaacagaagagtatcggttaccgttttcgtcgttgcaacaactgaacctctcaccgtcctcgttaccggtgccggtggaagaacaggacaaattgtgtataagaaattgaaggagaggtcggagcagttcgtggcaaggggtttagtgaggacataggagagtaaggtgatgatctatggttaggttgttgttttctatgtggtttttatagtttcttgttttattttttttctgtttgttttaa

SEQ ID NO: 109912 - DNA, 216 bp, Arabidopsis thaliana columbia
ctccacgcaaaggctcaatttttacaaaccatgtttatttcttaagcaaaacaagtctaacatctttttgaattcacccaaaactcaaatcctacctcaaatttcgtatttttcttcttctgcattttctagtttaggatcgacatttttatcctccgaaagattcgtgcttttttctctctgtagattaacgatgttttgtagaattaagaaaaa

SEQ ID NO: 109913 - DNA, 326 bp, Arabidopsis thaliana columbia
ggccgttaccttttcagatctacacacagtaggatggtgtcaaatccgtggaggagcacctcgccggaaaaacctacatctccggagatcaattgtctgtggatgatgtcaaggtttacgctgccgttccagtgaaacccagcgatgccttccccaatgctagcaagtggtacgagtccgtggcttcccaacttgctaaaagtttccctggaaaggccgttggagtacaattcggtggctctgctgctgctgctccagctggtgaagcttgtgcacctgcagttgcatttgatgttgatctattgtccatgaatcctttttggttg

SEQ ID NO: 109914 - DNA, 431 bp, Arabidopsis thaliana columbia
gcggccagacagcattgatgcaagcttgtagatacggacattgggaagttgtgcaaactcttctgcttttccgatgcaatgttacaagagctgattatttagctggaagaacagcgcttcatttcgctgctgtgaatggtcacgccaggtgtattagacttgtcttggctgattttttacctagtgataaacttaactctcttcctgaaactggtgttgtcactgcaaagaacaaatctgagcaaagcgcattgtctaaatttgtgaataaggcggttgatggtggaataacagctctttacatggcttgcttgaatggattatttgattgtgtgcagcttttgtttgatcttgatgtcaatgtattctgttgtgacattttattttttgtacattatttggtttttttttgaggtctgttgttctccttt

SEQ ID NO: 109915 - DNA, 380 bp, Arabidopsis thaliana columbia
cgcacggaggcgcccgcacaggacagcaaccctaggtatcaacagcagaccacaatccgcgtcgctgaacggacgcccactgccccaagggccagcgccccacaccaccgccgcccccttacacctgcggaccagcccaactccccacccctccccccctccctcccccccccccctcctcaccccacaccccccccccccccccttacccaccccccacccaccacccccccccccccccacccccccccccccccccccaccccctcccaccccccaccccccccaccctccctcccacccccccccccacccgcctccctatcccccccccccaccccccacccccccccccccccactccccccccaccccccccc

SEQ ID NO: 109916 - DNA, 219 bp, Arabidopsis thaliana columbia
atccgtcggagagaacacagaatctccggtgacgttcctcgaatccttagttattggagagtgggaagatcgtttccaaagtggtctttttgctctgatgtctccggctgctaaaccaatgttttccgtcaagtacgtttttgtctgatatttattcattttttatatgacattatctatttctaatttatttttttttattattattatttttatatt

SEQ ID NO: 109917 - DNA, 148 bp, Arabidopsis thaliana columbia
  unsure (1)..(148): unsure at all n locations
gcaaaagacggcaaccagagacaaggnagaaatttaaattattgcgcgtggtcgtcatgatcctagtgttgctccacgagctgtgccataggtggaagcaatggatgctctagttcttgttgatcaattgatggcgcaatacgaacaa

SEQ ID NO: 109918 - DNA, 181 bp, Arabidopsis thaliana columbia
gtgctacggcacgactcaatacactagactcttacaacatcgttgataagaagtggtttcattgttcgactccaggagattcccttaccggaagaagaggagcaaggctcgaagtggtgcaagggaaggtttggttgttattgttttacatttattggttatctttttttatttttttctt

SEQ ID NO: 109919 - DNA, 154 bp, Arabidopsis thaliana columbia
  unsure (1)..(154): unsure at all n locations
cccctgtaagctctagagagaaagagagagagagaaggattttaattttttagaagncagagnccgagcggacaagganccgaagaggcaacctatcgtaacatccacacacagnggcaaggacaacaaagagccaccacccgcgccgatgatc

SEQ ID NO: 109920 - DNA, 382 bp, Arabidopsis thaliana columbia
cggacgcgtgggcttcttcggctgttcgagtcattgattttaggtactttgcatcactacagtgtggtgttgacttggagactctatgcactgatgatttagctgaacagtctcaggcttatgagtcactgaaacagtgtggctatttgttatctggagttcgtggtaatgtagataaatgtttgtatgctgtggatgaagattgtagaaccactgtttggacttataaaaatggagaagctgatgggagattagattcgttccagcctgatgagaagctcaagaagaaaaagaaattgtccaacgtgagaaggcgaagagatgtgtataagactcttggacatggtacagaagctgagtctgcagctattctagcctttgg

SEQ ID NO: 109921 - DNA, 446 bp, Arabidopsis thaliana columbia
gaacgtcaagacaaggggtagaagaattcaagaacgagatcaagctgattgcaaagcttcaacacagaaatcttgtgaagattcttggatattgtgtggacgaagaagaacgaatgcttatctacgagtatcagccgaataaaagcttggattctttcattttcgataaagaacgacgtagagaacttgattggcctaaacgagtggaaataatcaaagggattgctcgcggaatgctgtatctccatgaagattcaaggcttcgaatcatccaccgagatctcaaagcaagcaatgtgttgcttgattctgatatgaatgcgaaaatatcggattttggattggctagaaccttgggaggagatgaaactgaagcaaacacgaccagagtggttggaacatatggatatatgtcgccggagtatcaaatcgacgggtatttctca

SEQ ID NO: 109922 - DNA, 442 bp, Arabidopsis thaliana columbia
tgaaaattgggtgaagataggcgcatcagctagtgtacaagatcaaggaggaacataaagacttgagctacgatgatcaatgcaacaagtgtgagaaggaagctgtgaacgtatcgcttggaaacttgctttcgtacccattcgtgagagctgaggtggtgaagaacacacttgcaataagaggaggtcactacaatttcgtcaaaggaacgtttgatctctgggagctcgatttcaagaccactcctgcttttgccttctcttaagaaagaaagctaccggaacatataaaactcttttgagataaaaaagacactttgactcatctttcttcattctctcatgttgatgattcctctccaacttctttgatttctttttgttaattcaaaacttcaactttgctgcttctatttcaaaagctcaaacaataaagctgtaa

SEQ ID NO: 109923 - DNA, 343 bp, Arabidopsis thaliana columbia
ggaaaattgatgaagataggctcatataggtaacttgacaaggggaacataaaggggggctactagacaatgtacagtttagaaggaagctggaacgatcgttgaaacttgctttcgacccatcggagagctgaggtggtgaaaaccacttgcaataagaggggtactacaatttttcaagacgttgatcttggagctgtttaagacactcttgctttgcttttttagatgaagctccgtacataataacttttgagataaatgttctttgactaatttttttattttacatgttgatattcttttcaactaattttttttctttgtaattaaatttataatt

SEQ ID NO: 109924 - DNA, 209 bp, Arabidopsis thaliana columbia
  unsure (1)..(209): unsure at all n locations
gcttcaaatagattactttcaaagaagagtggtgaaagaaagatggagaagaacatgaaggtggagtgtagacttgtccagctcaatggggaagagagagnaccaacatggctctaatcaatgaagcttgtgagattggtgctttttttatatagcgatccatggtttaccatatgacttatttgtttatatttcgtgatttattactt

SEQ ID NO: 109925 - DNA, 453 bp, Arabidopsis thaliana columbia
gaaaaacgagaacaaggaagaagattctcaatcatttattcagaagctttctctggttttctacagagaatcatatgcatcggagagaagattccagtctcaccacctctggtcaaataatcagcagtcttaaacaacatcttatgaacatcaacagttcctttaggagcaaccccaatagcagaaagaatcacaaccacaacatggtttctccaataagcaatccttcccatctttaaccggttccaccacggtttagacggtggtttagccaaatctttctccttcactacctcaaacccaactttcttcgccgtcacggctatatcagcgtagcttcttagtccaggaagtgcgtctcctctctcgatcccttgaatcacgtccttgtgttcttcgtcatcgtctctgtatttttcagtggtgacccattcttaggacacgaacaaagat

SEQ ID NO: 109926 - DNA, 389 bp, Arabidopsis thaliana columbia
aatctctctcttctcttactctctacctctgtagctgatagggtcagcttcgtcggcgctatttctgccggatttcacggacgatttgagatctgttcttccttcttcttttttcctctcctgatctgattcaactctaatctgcttcagtctctgtgttacgaactgattccgttcagtgaaaaaaaatgttgagcgtttcaagcttctgcagtttaatgggagactgaggagtcatttgagtgaaacgtttggaactttggaaacagatggagtgtcgtttggagttgaagaaaggttcttgtgatagaccaccatttgtagctgctgagaagaaggtattaactaaggaaagctcaaaggcatttacaccgggataagtttagaga

SEQ ID NO: 109927 - DNA, 423 bp, Arabidopsis thaliana columbia
ctctctctgcctcctttcggattcaaatctcatttttatctcaaccatggcgttgctcgtcgagaagacctcaagtggccgcgaatacaaagtcaaagacatgtctcaagccgatttcggtcggatctaactcagagcttgacgaacttgagattctgggtcacaaactgattccgaccagagaaaaacaatgttaagcgtttcaagcttctggagttataatgggagactgaagagacatttgagcgaaacgtttggaactatgcaaacagagggagtgtcctttggagttaaagaaaggttcttgcgatagaccaccatttggagctgctgacaaaaacgttttaacttaggtaagctcaatggcatttactccggataagtttatagacgataaacgcgggttatcttatctcgattttc

SEQ ID NO: 109928 - DNA, 450 bp, Arabidopsis thaliana columbia
atcgtcgtcgtatctgtgactctcgtgattttcgtattgaaaaaaatttgagcatagagacactgtgttttttgtgggtggcaactggttatgtcacggaactgctgaggaactgcaatctctggatcgagtttctctcgttctggagcttcttctgaatctaaagctcttcaaatatgttcgattaggttatctgatcgaacccatttgtctcagagacgttactctatgaaacctttaaacgctgagtcacattcacgaagcgaatcttgggttactcgtgcttcaactctaattgctcctgaagttgaagagaaaggaggagaagttgaagactttgagcaacttgctaaaaagcttgaagatgcttctccacttgaaatcatggataaagctcttgagagattcggagaccaaatcgcaattgcttttagtggagctgaagatgtt

SEQ ID NO: 109929 - DNA, 417 bp, Arabidopsis thaliana columbia
  unsure (1)..(417): unsure at all n locations
tttttcttggaattaaaagtcnnagaattacctaaacaannnaaatgtgttttgggctaaaagcccttcctnnctcattgggctnnngcttttgggctcctgagccanntcgtcgcctttctccctagcaaatggcanngatggacttnttgtttgcctctgtccgtcgaacccaaacctatagctctgggccaagggtttctctctggaagggtnntttttaattnttggcaccggcttacctgcgnnngcataccannggtcgaagggtgcccgattaatgggaaactnttgtcgtggacccagctcttnaatgggacatcnntactgtagaagatatctcagagagggtgcaataacgataaccgggcgatgtggccccgttgatttcttccccatcgttataaggaaagatat

SEQ ID NO: 109930 - DNA, 414 bp, Arabidopsis thaliana columbia
  unsure (1)..(414): unsure at all n locations
taaaaaatgtctcccattccaaatccactcttttatttcttctcccgcaacnangagacggggggggccacacttgggggttatttctcactcacacccctccctatctccaccaccacaaactctcaccgcttcaccaccttccttctctcccggaaaaacccatctccgtcgtctccaccatacaactttcgatcaagattcaaatactcaatggctctaatcatctcactccccataggaacaccaccacaagctcaacacatggttcttgacactggaagccaactttcttggatccaatgttagcgtaaatagctttcttcagaaccaaaatcatcttttgagccatcttttttttcttcattctcatctttgccttgtccacatcctctttgtcaaccgtgaattacc

SEQ ID NO: 109931 - DNA, 314 bp, Arabidopsis thaliana columbia
  unsure (1)..(314): unsure at all n locations
cttctttcttcgcgaagaagataacccaaaaaccaaaagattaatttgtatatggtgacaacggttttgtattatcccaccgagcctccatnncaatattnngctcatattgtnnatgagcccgtcgtntggtgggtagcctgctttctggcccanatatnnncggttggggtctgggaaatcangtnaggaaatnctatctcataatacctttccaaatnntcggcgtatttcatcnnatcatcatccacatcaccacacgaatggagcccgattcggcaagcattctcaaagcccgaaataggaatggcttt

SEQ ID NO: 109932 - DNA, 396 bp, Arabidopsis thaliana columbia
attgattaatcgatctgagaaagatgggttagttgagtcatttgttgggaaaaattggaatggattgaaggatttctggagtgataggttatcatttttcgaaaattacaccagattcaccaaacgcgacgcgcctcttccttcttggtcttcctccgacgtcccggaatccattgcctccgatcccgctcatggacccaatctgaaaacggatagggaagctgctacgtttgaaggtaccggagctgcacttagagttgactatactgactgtgacgactccttagactacagatggccacatgatgctagatccgacgttttagtgacgtgaggtattacatgcttgcttttcacaagtggtcccataagtcgcagtggatcgttcccagcttg

SEQ ID NO: 109933 - DNA, 275 bp, Arabidopsis thaliana columbia
caacaaatcttaaacgttttacttagtgctgctctacgctacctcaatggccgcctcaacaatggctctctcctcccctgccttcgccggtaaggccgacaagctttcccccgcggcatctgaagtccttggaagcggccgtgtgacaatgaggaagactggtgccaagccaaagggcccatcatgctgcccatgggacggatctgaccggatcaagtacttggattcattctcaggcgaatcactgagctaccttacacaatagtttctctgag

SEQ ID NO: 109934 - DNA, 503 bp, Arabidopsis thaliana columbia
gcagagcctgagatcgaagaaggagtagaggaagatgcttatatcaaggagaacgatgatgttaatgttgaccctttggaaacagaagataaggttgaaacagaacctgtgcaacgcccacgtaaaacctctaagtttatgactaagtatgaacgtgcacgtatcctcggcactcgtgctttgcagattagcatgaatgctcctgttatggttgagttggagggtgagactgatccacttgagattgcgatgaaagagcttaggcaaaggaagattccatttaccattagacgttatctacctgatatgagttacgaggaatggggagttgatgaactgatcgtcgaagactcgtggaaacgtcaagtcggtggtgattgataaaatctggcctatgtgttttgcaaagctttctgctcttgtatggattatgaacttacgatatagtcgcatgtagaacttcttcatttgtcctattcttcaacactacaagagtcagggac

SEQ ID NO: 109935 - DNA, 358 bp, Arabidopsis thaliana columbia
ccggaatatgagtctatgcctgaggatttcttcttagcagacgacaaaaatcggggtccttcggaagggcaaactagctcgacccacgaaagctccgacatctccatggccaattcccgcaaaacatcaagaagcttggaaggaggtttcatcataggaagccaaccaagatcactctcgtccaagctcgcaaaagaagattgccaagatgaagggtcgcactctggatacggaagaggaagggacccgtgaagctaggttgccacaaaagactgtaatgcgtagatgcgtgtctaggcagctggtgagaaatcagagagacaagaagattgcaagacatgtaccatgacatgacatg

SEQ ID NO: 109936 - DNA, 338 bp, Arabidopsis thaliana columbia
  unsure (1)..(338): unsure at all n locations
cggacgcgtgggtttaagggtagtagagttttagtangtttcttctgntngntatctttagatgatatgccattttgttcgttttggtttttgcgcaaaagttgttaaagacttgcaaagtagacagtaatttcaatttctgttttctacaacaaaaaacacttgcttttcttgagccaatcttatctatcgagacgtttcaatttcaatgcttgagccttgtttagtttgctatcaaaaaaaaaaaaataaaaaaaaaaaaaaaaaaaaaaaaaaaaaaaaataaataaaaaaaaaaaaaaaaataaaatataaattattatataaaataaataata

SEQ ID NO: 109937 - DNA, 477 bp, Arabidopsis thaliana columbia
gagaaatctctagatcgcttgtggattcgaagtttctctcacggtcggttcttgacgacggatcaagctctattcctctagtatcatctaatccatcgagcaattctcattttgatcttccgttttcatcatcttctggaatcaattttgctcttgttaaatctgaaagttctgaggataaaatcatgaattccaacttcgggaagagatcatccggatcgaccaatagctttgatttcgatctggggcttggatcgagccaaggtagacctctgaatggtcagaagagccaaacatcttcttattcgagctcgaattcgcagccgagacctgcgtggcagcctggtaagccgtcgtggacgcatcaacctgcaccgaagcagagtacgatccgatctgagatcggaagtggaccgacttcaatggtgggtgatattcatggtaagaccgtggggtcagcttcgggatcgggttcgg

SEQ ID NO: 109938 - DNA, 450 bp, Arabidopsis thaliana columbia
ctcgccggaagtactcgtaacaaatctcagcccgttaactcggttcctaaaccggacacatctcctttatcggatacagtaaaagaagagattcatctttctccgacgacaccgttgaaaggaaacgatgacgttcaagaaacgaatggagatgaagatatggttggtcaagaagtcaacatggaagaggaagaggaggaagaagaagtggaagaagatgatgaagaagaagaagatgatgatgacgtggatgatcttttgataccaaatttagcggtgagagatcgagatgatttgttcttcgctggaagttttccatcttggtccgccggatccgccggtgacggtggtggatgatgaaaacgaataaaatctcaatttacaatttacaaaaagaaaaaagtcagtttttaattattatttttttttgttcaagttttaacaaacaaa

SEQ ID NO: 109939 - DNA, 175 bp, Arabidopsis thaliana columbia
  unsure (1)..(175): unsure at all n locations
atcaatcaatcaggcaancttggctatgttcggtaaacacgaacancaacgccaaatggggaggactagttatacgttggattctggacaatcaagcaccagcgcaacggcatgccactgcagatgtagatattgcagcagctaatgtacactatcactcttttaactgcggtta

SEQ ID NO: 109940 - DNA, 463 bp, Arabidopsis thaliana columbia
cggctatctcggatctcgtcacttatgtacagcttcttaataacgtatgcgtagaaacgctgctctattatgtcatctctcagtgcgacatttttcctccaatcgttctaccggcgacatatgtcccttgctagggttaccacgaacatctgcaatctcgtttcaggatacgacggaaaacgaatgacgtaaaggcgacagttgctaagagtccataaaaatatgcaaaacgaaacaaggttatggctgatcactcagagaccaagtcgacagaagctcatcttcttctacagcaagagcacctgctcgatacgcaagcccggctcgaggaacaaccgcacacatgaaagctgttgtctggggaagaacgaaactgatcaaaagctgctgctgcagaggcggacgtagaataatcggtggacaaagaggaagttatgactgggggcaacctgagccggttatt

SEQ ID NO: 109941 - DNA, 512 bp, Arabidopsis thaliana columbia
  unsure (1)..(512): unsure at all n locations
attcagcagctgaagaagatcccactaaaagaacaacgtgtgcctcaagagcgtttacacttgaaaaccttgaagtgtagggttgataatgaagagatatccttcctggagtccttcttgtcacctatacggagttgggccgataagcagctgggcgactaccatctgcattttgccgagggttcacttgtcatggaggatacagtcacagttgcaatgataacttggaggctcttgttggaggaatctgatcgagcgatgcattctaactcttcagatcgagagcaaattgaatcctacgttttatcttccatcaagaatacgttcacaaggatgtcacttgccattgatagatcagacagaaataatgagcaccatttggcattgcttgctgaggagactaagaaacttatgaaaaaagactctaccatctntatgccaattntatctcagaggcacccacaggcaattgcgttttctgcatcccttattcacaaagcttatgggaacaa

SEQ ID NO: 109942 - DNA, 439 bp, Arabidopsis thaliana columbia
  unsure (1)..(439): unsure at all n locations
aacagcagctgaagaagaacctacnaaaagattttcgttggcctcaagagccganacaccagggaacgttgaagtggagggttttttttgaacacatatacccccgggagnccttcagggcacctatacggagttgggccgataagcagctggacgactaccatctgcatatggccgagggttcacttgtcatggagagatacagtcacagctgcaatgataactcggaggctcttgttggaggaatctgatcgagcgatgcattctaactcttcagatcgagagcaaaatagaatcctacgttttatcttccatcaataatactgtcacaaggatgtcacttgccattgatagatctgacagaaataatggacaccatttggcatagcttgctgaggagaccaagaaactaatgaaaaaggactctaccatctttatg

SEQ ID NO: 109943 - DNA, 486 bp, Arabidopsis thaliana columbia
gaagtattctagcccctctcaagctcaaagctttatcgtagaaactgcagctctgcactctggtgatagaagctcccagatcgcatgtgcgagtctgttcaaaagcttctcatctacagctgctgatattatgagcagtcatcagtcggctattgttccagctatatttatttccagatttgaggatgaaaaacagatttcgagtctctttgaggaggtgtgggaagacatcacaagtggtgaaagggtcacactacagttgtttctgcaagaaattgtgaatcatatctgcgagagcatcacatcatcctcgtgggcaagcaagaagaagtctggtaaggcaatttgcaaactaactgaagtcttgggtgaatcattatcgccacaccacaagagattgctacaatgtcttgtcaatgaaattcctggacgtttattggagggaaaggatgctcttttggatgccctaggtgctctttcagtcgc

SEQ ID NO: 109944 - DNA, 507 bp, Arabidopsis thaliana columbia
  unsure (1)..(507): unsure at all n locations
gtggacccaagaattgcaatcaacatggaccctttcacttccaagacgtttgacaacacttacttcaagaatcttcaacaaggcaaaggtctcttcacctccgatcaagttctcttcacggatggtcgctctaggcccaccgttaatgcttgggcctcaaactctacggcctttaaccgcgcttttgtgatagccatgaccaaacttggccgtgttggagttaagaatagcagcaatggaaacatccgtcgtgattgtggtgcgtttaactagagctggtaatgggaaaatataagttgtcttatctcctattttcctttcgttttattaatgtttgaatgttcattttgacgatgagaagatattattggtttttcatttgttttgtttatgtcttcattttaagaaggcaattgtatctgatcctctctactttgtatctccaacatgtntattctcgctacaaatttaaataactatatactattcaatttttcctattataat

SEQ ID NO: 109945 - DNA, 249 bp, Arabidopsis thaliana columbia
  unsure (1)..(249): unsure at all n locations
gcgtccattccactcttgtaatccactgttangtcgaatcaaataacaaagatttgcaaaacgctggattgttacttgatacctcggatttccccgcccggcccggaaaagggattcagggctgagaccatgagaagaggattctgatgtgcaacgccctacgcaagagaggaggctgcgtagtcaggatcagcgattgggagtagatttggtactacttactcttgtgttgatgtatacaagattggc

SEQ ID NO: 109946 - DNA, 246 bp, Arabidopsis thaliana columbia
  unsure (1)..(246): unsure at all n locations
ccggacgaccccgcgccgaaacgggaggccgagcccgaagaaacgattgggtgccagcgaccaaacnaggncgcggggcgccgacattaaaagggcgaagcgcgagcccaacgatcggcattcactcccaggaaaggagcaccaaaccagagagcatcgacgcgggcccacgcggaaagacgaggaaaagaagaccaggcctggacagaaacaaaccagagccggccaaaggactagacacaaggc

SEQ ID NO: 109947 - DNA, 494 bp, Arabidopsis thaliana columbia
aatttttggtattaacttgttataagaaatcttatattaaatttggttaggtctacttcggatgttttgcattcggtataggagggctaccttgggtcattatgtctgaggtaaataacatattttaatttatataaatcatatagttagacgttatgaaagaaaaaaaaaagtttactgtgttttttgctgttgttgttgttgttgttgcagatctttccgataaatataaaagtttcagcaggaacaattgtagcattaacatcatggactagtgggtggttcgtgagttacgctttcaactttatgtttgaatggagcgcacaaggtctttattttctctattacttttttattaatttggataaaacaatttaccaaaaaaagttaagagttatctttataaaaatacacaaatcaaacataaagttatttaaaaatcgtgttcgaattttgacatttgtatcaaacaggtttagatgtgcaaaatgtgc

SEQ ID NO: 109948 - DNA, 459 bp, Arabidopsis thaliana columbia
cggtattgttggacaggaggttgttaaagcttgctctgtttataatttcatcctctcttccagtttttctactttgattcagtggagtcactcccctctgaacctgtggactcgagtgactttgcaccaagaaacagccggtatgatgcccaaatatctgtatttggggccaagttccagaagaaacttgaagatgctaaagttttcacagtagggtctggtgctcttggctgtgagttcttgaaaaatttggctctgatgggggtttcttgtggaagccaagggaagctgacagtgacagatgatgatatcattgagaagagtaacctcagtcgtcaatttctgttccgcgactggaacattggacaggctaaatccacagttgctgcttcggctgctgctgttataaatcctcgcttcaacattgaggccctgcaaaaccgtgttggcgcggagact

SEQ ID NO: 109949 - DNA, 423 bp, Arabidopsis thaliana columbia
  unsure (1)..(423): unsure at all n locations
gaacgttgagaaggaaatcattctcgntttcagttcattttctccanacaaaaggangaagggtgagccacttttggatggtttttattaanaacaagaagacattgatgatcttgagtatgagtttgatcatgggatggaccctgaacatgccgctgaagccgcactctcttcacgccttaacaccggtcgtggtggattggattcagctccacctggctctcagattcctcttttgacttattgcgatgaagatgctgatatgtattctgatcgtcatgctcttatcgtgcctccttcaacgggatatgggaatcgcgtctatcctgcaccgtttacagattcttctgcaccttcacaggcgagatcaatgtgtccttataaagatattgccgaatattggttattcaagtgtttgcttgt

SEQ ID NO: 109950 - DNA, 454 bp, Arabidopsis thaliana columbia
cgaaaaatattcacagatattttcgatcttaaccgaaataatgaagaaatggctggaccatcgacaacttcaaacgcaccaaagcagaggaagagagtcgaagccgagactagcagcaacacttctactaccttacgtcgcgctaaagacggaagcgctttcgctctctgtgaaggatgtaacaagagtgtagctgtagcgcttataagcatgcacaattgcagtctcgatgctaagatcagagtgaatctcgaagcacaagttgtggagacacaagcagaggctaagaagaagcctgcagagaagaagaagacaacatctgatggacctaagccaaagagacttaagaaaaccaatgatgagaagaagagctcgtctacttcaaacaagcccaagcgacctcttaccgctttccttatcttcatgagtggactccgtaaaacgtttaagtcag

SEQ ID NO: 109951 - DNA, 411 bp, Arabidopsis thaliana columbia
cttccctcctaatgttgtcttggagcttcttaagcttgtttatcggttctgctgcgatgaattgaaatccgcttgtgattcgcatttggcacatcttgttaattctctggatgaggcaatgttgttgattgagtacggattagaagaggctgcgtatcttctggtggcagcttgtcttcaggtttttctcagggaattgcctagctctatgcataatccgaatgttataaagattttctgcagcgccgagggacgggaaagactggcgtctcttggccatgcttcttttacattgtacttcttcttgagccagattgcgatggaagatgatatgaaatctaacacaactgtgatgctcttagaacgtctggttgaatgtgcggcggatagttgggagaaacagctggcgta

SEQ ID NO: 109952 - DNA, 393 bp, Arabidopsis thaliana columbia
  unsure (1)..(393): unsure at all n locations
gcgacgcgtcgagcaaaggagaaggacttaccgtgctcatgcaagaatcaacccaaacatggccaacggaagccacaaggagtggattgagccagancaggaacaacccgnnaaaaacgagcacgaagacacagaagacgaccagggccaagcaagaaccagccgaggacctagcagaggcttcacagaccgagaaatctgatgcacagccaagcaatgatgcgcatgagagggcatccaccggactgaacaaaacgaagaagaagccaacggacagaagcggacagaacaacgcaagagatgatgccggcgaagaccaggcagagaatgctaaagacaagcaacagggggaagaaggaaaaggtctacaagcaacggcacccccgggaggga

SEQ ID NO: 109953 - DNA, 474 bp, Arabidopsis thaliana columbia
  unsure (1)..(474): unsure at all n locations
ggggaagttactgccgccacagctgctgcnactaagttaccagggctgctcaaggtgtcgccgatattccgcagaagctgtttatactaactctgcgaaacaaatttacatagtgaagcaaccagcaggagagtaccaccacactgataaacacacttactggcaagagggagatgccaatacacatacttgggctaggtgctgccgttaagaccacaagagagtccaacctcaagctcggagagattgttaccaccatccctactattgggttcaaagagggaactgcggaatacgcgaaacattagtttcaccgcgagggatgtcttgcgtcacaacatgagccgaatctcgactagacactactatcagaacactcaaggtctaacctttgaagttgatagcaccgacagtgtctgaatagataggctcgagaagaactccacaagatgctgaatgaggacgagctgcgtg

SEQ ID NO: 109954 - DNA, 327 bp, Arabidopsis thaliana columbia
  unsure (1)..(327): unsure at all n locations
accggtcgaccacgcgtccggagngaccaagctattcaaccatactgaaagaaaaatacttaatctcancgncnnccgctcttgggggccatgctcataaaaaatgggtgacgctgatgatattcaaccaatcgtgtgtgacaatggtaccggtatggtgaaggctggatttgcaggagatgatgctcccagggctgtttatcccagtgttgatggaaggccaagacatcaaggtgccatggttgggatgaaccagaaggatgcatttgttggtgatgaagcacaatccaagagaggtatacttaccctagagcattctattgagca

SEQ ID NO: 109955 - DNA, 353 bp, Arabidopsis thaliana columbia
gcaacaagctttgaaaccaaataaaatctcaaatacccagaaagcgagtggagaagagagagctgatatgctacaatagaaatggcgagtggatgtgctctacatggtggttgtcccagcgattacgtcgccgtcgcaatttcagtcatctgcttcttcgtgctgttatcgcgctcagtgttaccgtgtttgattcataaggctcctcgtactaacagtagcagtttctggatccctgttattcaagttatctccagcttcaaccttctcttctcaattatgatgtcagttaatttgcttcgattcaggacgaaacattggtggcgatattgctatctttgggcagtgtggat

SEQ ID NO: 109956 - DNA, 174 bp, Arabidopsis thaliana columbia
  unsure (1)..(174): unsure at all n locations
gagagagaacacagacgataccaactctcaactanctcgttgccgcagtataattatctcattgctcggatatatatcttcttatgggggggcgaccagaagctaccagaataaaaaggctggtttcttttttttgaagaaaccacttacttccaaaatgggtcggtctatttt

SEQ ID NO: 109957 - DNA, 283 bp, Arabidopsis thaliana columbia
ggccgcccttttttttgtaattgagagtgtgaataatatttctggccctaaacaccaaaccgatgatctttattaaggtccgcgggaaacaacaaacacagaaaagggcactgcgcaccaagcggctatgatgggtggagagcactacctcaacaaaccaaagcgagacgggccatgccgagagaatacactgcagcagtgcccagataccatgccagggcacccctataggccccaacacaagaaccggacatagtagagggtcaaccacagcaggagaatc

SEQ ID NO: 109958 - DNA, 474 bp, Arabidopsis thaliana columbia
tgacaaggtccctcgccgtgtaattgagagtgtgttcatcatttctcttcctaaacccaaaacctatgagcgtcagtcccgcccgcctcatgctgcagagctcttaaaaagttactgtgcttctcgtggctatgttgcctcgagtggactaccggatgaaacgaaagctgcaaggctgattctgaaagattacattggaggtaagctgccacattatgcaatgccacctggaatgccccaagctgatgaaccggacatagaagacactcaagaactggaggatattctcgaaggttcagagtccgatgactctgcagtaggagatgagacagaaaacgagcaagttcctggtattgatgatgtgctagatgatctgagctcgtttgatcttgccaatgggcttaagtcttcaaagaaagtgacagcaaagaagcaaaccgcgtcacataaacagcacaaaaagccacagaggaa

SEQ ID NO: 109959 - DNA, 478 bp, Arabidopsis thaliana columbia
aaccaataacactttttctctcttctcagtccttctacggcggactacgacgacgaaattgaccagaataaccaacctttcatccccaaagaaactgctctacaagcactaaactcaataatccagctccacttcgagaaaaccttagagaagaaacgagccattgaccaccagaagaagaagctccacaagctatttcagctcttcttcatcttcctcgccgtaatcttcttctccctctctcaaccctcaggtcgtcttcactgccgccattgctgggcacccatctgcctcctatccttctctcacctcttcttctacgtctccgtcgctcaaactctccgttgcatcaacggcttcaagtaccagcgtcgctgccataagctcactctcggtctcgccactcacaagctccgtttcatcaagtcaagaatcgctgccggagatttcctcggtggaggcgacggtgatgaggcct

SEQ ID NO: 109960 - DNA, 405 bp, Arabidopsis thaliana columbia
  unsure (1)..(405): unsure at all n locations
gccgagcattgggcaacaagaggaggattagagaatacagattggtcaaaagctccttttactgctttttatagaaactacaatgtcgatggatgtgtatgggctaatggaaaataatcttgttccgcgaattcccaagggtcaattaaaaaactcgattcgaccggccagccaggaatgaagggggggcaaggtaaatccatgaccaacacctatggcaccgataaaagaaggtttcctcgaggggttcctgccgagtgcactaaaantcttgatccttgatacatgaatatgtacctgggcttggctcttggacttaaacaagagtttatttatatttatcatatatattgggctcatatatacaggatgtggtgtttgtgtaagatgttttaagattgaagt

SEQ ID NO: 109961 - DNA, 115 bp, Arabidopsis thaliana columbia
ccgtccgatcccgtcgacccacctcccaagctctctctcatcaaaccaggaccataattatcgccagcagacttagcgggcttttacaccaactctggtgcacctgacggacaca

SEQ ID NO: 109962 - DNA, 437 bp, Arabidopsis thaliana columbia
ggaggatgatgatgatgatgatgacgatgtatttgtgttgattttttggtaaaatcaccaaaagaagattgtttggaggttaaggaagaagatgttggtgctgcagattcaagaaaggatgatggtgctgtcgacttgaaagaagacaagtatgtggaagaacatatgctcgaactgaatctcgggcaagagacagtgtcagaaatggtctctggggaagagcgaggtcctgttgagggacagccaatggatgttgaggaaaataagaaagaagaggatgaaaggtgggcatggaatggagactctcatgctggttctcattttcttcgccgttgcaatcatagtagtgccagggagggaggcgaagataatcatatagaaggatccatggaaatgggagaagatgaaccaattgaagatgtcgaggaagaggaaac

SEQ ID NO: 109963 - DNA, 187 bp, Arabidopsis thaliana columbia
  unsure (1)..(187): unsure at all n locations
ctctgagataataaggacttgtgaaccnttactacatttaaaggcacaccaaagagacaagggggcattttaagaggcttttcctgccgttgcacctccccccgtagctgagccagcggccaacccagaggacatggactaaaagaccgcattggagtagactcctaagaaagctcgcgcatatgga

SEQ ID NO: 109964 - DNA, 252 bp, Arabidopsis thaliana columbia
  unsure (1)..(252): unsure at all n locations
ctcggcgctctactcaatctctctctcggnaataccatccgagccgcgctctctctgtgtgagctgatctcagccgattgattaatgcctcaccggaataaggaaaacccacctggattcattgattaggcggaagaattcggaaccaattctgaaccagacctgaaatcttcaatggcgcggaagaagccgagtgctccaggtgggtatgctgtgcagcaaccttctgcgtgatctctcggtggtgctgct

SEQ ID NO: 109965 - DNA, 347 bp, Arabidopsis thaliana columbia
gttttgtccgctgaacctaaacttgtctttggttttctcaactcattagtggggtcagagagtgaggagctcgcggctgcgtccagactggaagacgatctcagtttttaccaaactgcaagccctgatattgcaaagctatttgaaattgaaacccaagtcaagcgtcctgccttagttttactgaaaaaggaggaagagaaacttgcccgttttgatggaaacttcactaaaacggctatagcagagtttgtgtcagccaacaaagtcccattggtgatcaacttcacaagggaaggtgcatcactgattttcgagagctcagtgaaaaaccaactcattctttt

SEQ ID NO: 109966 - DNA, 388 bp, Arabidopsis thaliana columbia
ggcaaggccaagatggtgtgtcatctatcaactcgtgtatgccaaggactctcaagatgttgaaggtggtgaacacggatagaaaactttacttggatttgaaacgtttgaggttgatgcagacgactacatagtagcagtgcaagtgacctacgacaacttgtttggccaagacttttacatcatcacatttattacctttaatacattcaagggaaaaacatcttcacccttttgattggaaacgcaaaagaagtttgttcttaaggacaaaaactgttggaaatcttttgtggttcattggccccctttgtgaatttttatattattttgggcctattttttttttaacaccaattcttttattatttgtcaaataatatatttc

SEQ ID NO: 109967 - DNA, 313 bp, Arabidopsis thaliana columbia
aaaaaaacaaaaatgagctctcaaatctgcagattttcttccaaagcagccaaatctcttctctcttcagctaaaaatgctcgcttcttctctgaaggaccagccattggtgctgcggcagcggtttcggcgtcaggaaaaattcctttgtatgcatctaactttgcaagatcatcaggttctggtgtggcttctaagagagggatcactggactcttagctctttctgcggcagcttatatgagttaagagcccaaggggctctctctgctgataggacccacccttttttgctatcaagcctgatgggtgc

SEQ ID NO: 109968 - DNA, 316 bp, Arabidopsis thaliana columbia
caaactttggtcctttgttagctccaatctaatagttaactcctcaaaagaacatcgcttggggcaacccacgcgagaaaatcccgtgtaggctcacagagacaacttcaatatcttacgcctcaagaaggtggtcacatgagatctcttacagagcgattatctttaccagtatatactggagacacgcgtgtattctagagaaccagaatcaatgtatgaactcatggaagtgacagcataacattcatggaacataatgaccacatcatttgatgatggacagttctaatacattcattatatgctcgttaac

SEQ ID NO: 109969 - DNA, 168 bp, Arabidopsis thaliana columbia
gcaaaggctcacggaagtggttaagcactcgataaggaaaaggttgtcagggtggccatagtgacattcatgaaccttctttcaaaatgtacaaaccggcgcccagatggttgatcttggacttccacatatgatccacagtctaaaaacgcaagcaacgatggacga

SEQ ID NO: 109970 - DNA, 231 bp, Arabidopsis thaliana columbia
  unsure (1)..(231): unsure at all n locations
gtggagtttcgacatgttgcgattcagttgnagtggatttgatatctcaagttgttttattcatcttgctgaatggcatcctttggaataacgaagcttaccgggctttgaagcccctctttttgcagagtttcgttattggtagcttgtggtctacttgagaaattcataaattttggagtagataatgttttgggatagttttgcattttcccaagttattatttgctt

SEQ ID NO: 109971 - DNA, 257 bp, Arabidopsis thaliana columbia
tgctctgcgagagaccatccaatctccaccgcgcgaattatttatctacgaagacgaagatatccagcgacttttgctcgctaggttgttcttcttcacaagccaacgctttctctaacgatcaccggtgaccattcgtgagaaagttggaatcagcagaaggtcgtgacaatggccattgagcaggaaaaactcactcaaaggcatgctgtcaattttccaagagagtccgaaagacctaaacctggaaggaggcc

SEQ ID NO: 109972 - DNA, 464 bp, Arabidopsis thaliana columbia
ctcttcaatacctaacctgcaccgtcgccgtttatcttctcggcaaatcagggttaatcaatcacgatccattcacatgggacactgctaagaaatttctccctgcagctatcgtcttctacctcgctatcttcacaaacacaaacctcctccgtcacgctaatgtcgatactttcatcgtcttccgatctctaacaccgctcttagtcgcgatcgctgatactgtgtttcgtagtcagcctttaccttcgagacttacgtttttgtctctcgtcgttatcctcgctggagctgttgggtatgttgcaactgactcgtcttttactctaacggcttattcatgggctttggcttatcttgttaccattactactgaaatggtttacattaagcatatggtctctaatattaaattgaacatttggggattggttctctacaataatctactgtctctgatgata

SEQ ID NO: 109973 - DNA, 393 bp, Arabidopsis thaliana columbia
gccgtaccgaactgcgtgtcgacccgagcgtcccgacactgttaagagctaacaagttacttgtcaaattcttcctagatgaatctctagaatgggaactgtcaattcttcccagattttatttccccccctgcatgttttttaccctagttatgcaatacctaacattccttttgaatagttagactaatttaaggcagtatgtataatactcttaagaatctcacacatgtaccattcctcacttattttgctttcttttttggttggttctacagtgtgtaattagtcatggtgcacttcttagccttttgagccttctgactcacaatcataagaagagcatcaaaaaggaagcttgctggacaatctcaaatatcactgctggaaaca

SEQ ID NO: 109974 - DNA, 471 bp, Arabidopsis thaliana columbia
  unsure (1)..(471): unsure at all n locations
agnnaagcttagagaaccannctctggtcactcggagctctcgtatttcttactccaatggggggatccgatcacgcctaattnaatccgaattcatctgtctcctataaccatggnnccgcggcgacgtcggaatnccggttcgaagagcgtctaagacgcgtctgtctcttccacaggcgacgcagacctagagatctcgccgagaggagatcgtcgcaaaatcntgattgcattggagctaccgaagcatcacattggaagaaatttgatgatggattccctaatttgttcatacaaaatgctcaaggcattcgtgggcagcatgttgctttcttggcttcattcagttcacctgctgtgatcttcgagcagctttcggttatttatgctctgcctaagctttttgttcttcgtttacacttgttcttccattctttcctactggaacttctgagagaatggaagacg

SEQ ID NO: 109975 - DNA, 446 bp, Arabidopsis thaliana columbia
ggagatggccgccattacagctctcactctccgttctcctgtttatctcccatcatctgccacaagccctagattccatggcttcaccaatcaaccaccaccagctcgtctcttctttcctcttaaccccttcccttctctatcaatccaaaaccctaaatccatccgaatttccgcatccgcttcgccgataacaacaccaatcctccagacggagaagtcaacagctcggtcatcgacactcaccgggtccactcggtctctcgctactctcgcggctttagcaatcgctgtaaccagagtcctagctcagaaactctctctcgcaatccagacttcaagtcccgtaatcgccgacgggttacgattctctctcagtaccgccggacctgtcttcttcgcgtctctccgggatcgtccctccggatacttgaacacgccgctga

SEQ ID NO: 109976 - DNA, 403 bp, Arabidopsis thaliana columbia
  unsure (1)..(403): unsure at all n locations
aaaatggaaaccaaaatccctaagtcaatgatcgtcggtgtacagactgtcatgccggtggaagtgacgcaacaccgggaaatccgctccgtatccgtcgtagatcccgtcggagtaggaatattccggcgaacggttaacatagttacgtattacaaagaagcaggtgatagtggtggtgagagagggtggttagtcgccgggtggatcaaggaatctttagggagagccttgacggagcagccgatgctttccggtaggctacggaggaggaagacggcggggaatgatggtttggtgtttgtggccaatgatagtggtgtgaggatggtgtttgattatttttcnattatttgtctttatttttttatttttttatattgtttatatttgttattttatt

SEQ ID NO: 109977 - DNA, 455 bp, Arabidopsis thaliana columbia
  unsure (1)..(455): unsure at all n locations
cctcaatccgcctttcttccttatggcgtttgcttcttccatcctccctccggtcgngcctctgatggccgtctcattattttcttcattgccgaatcctggggactaccatacgtaccgacttactttggatcccaaaacgctagcttggaacaagggatcaattttagaggcgttagaaacaccacggatctaaaccagcttttcttggctaggaaggtaaagtatttatggagacgctggcaccgtcgtgtcaatgtcaacatgaagaggcacgcgattgtttctgcaatcgctgctactgcttgtccagctcttgtgatggctcgtggtcacaagatcgagaatgttcctgagatgcctcttgttgttagcgactcagctgaagctgtggagaagacatcagctgcgatcaaggtattgaagcagatcggtgcttacgacgatgcggagaa

SEQ ID NO: 109978 - DNA, 460 bp, Arabidopsis thaliana columbia
gattttatggatggagatgaaccaatttcttattaaaaagcaagaaagttctttgctcaggatccagcacaaaagtgggcagcatatgttgctgggacaatcttggtattgatgatagaacttggtgtgcgttttgaggatagcatcagcttgctggtttcttctgctgtacctgaaggtaaaggtgtatcttcatctgctgctgtggaggtggcgagcatgtccgcaatagctgctgcacatggactgagtatcgaccccagagatcttgctatactctgccaaaaggtggagaatcacattgttggagctccatgtggtgttatggatcagatgacttcttcctgtggggaagccaataaactgttggccatgatctgccaacctgcagaagtagttgggcttgttgagattcccaaccatgtcagattttggggaattgattccggaattcgacaca

SEQ ID NO: 109979 - DNA, 210 bp, Arabidopsis thaliana columbia
  unsure (1)..(210): unsure at all n locations
gaggatatgggatcgtgcagtacgacacatttttttcacctaagaacgctanaganaaggcgaaggttaaaggggggtttgtctaacacaaaccccccggacctaaacatcgtaaggaggaaagagagtctgctgctgataagatgaagcatactaaagtttatgtgaagaatctaacggaggcgactactgacgaagagaagaagacta

SEQ ID NO: 109980 - DNA, 364 bp, Arabidopsis thaliana columbia
  unsure (1)..(364): unsure at all n locations
gacccaggcgtccgaaatatgataagccacaggnttcaaccaagcacctccttctttgacccaccggcnccagcaaggcgcgccgtttttagcaagcggtttcggtcctacaaaaccgcgaagggnngancggagggagacacaggccacggcgaagagcccacgcaaaatacccgatgaagcgtgaagcaccactcccaaccagctcctgaacagcacttgaagactacaggtgggcaggacggtagaaactcaagcgctgcagtaatgagggaaggagaagggaaatccaggtgttccggaattgtcaactatgaaaaacctgaaaatgcaactcgcgctgntgaagctctcaaaggaaaga

SEQ ID NO: 109981 - DNA, 263 bp, Arabidopsis thaliana columbia
  unsure (1)..(263): unsure at all n locations
aaccaacgcaaaacactaactaagagatttagattactggagcgacgaagncggcaagcgaggggcgtggctagacaagattgtttccaccaccaacacacaccgaacgcacnaaagagaatgaggcacacgtcaacaggcaaccagacaagggagaacagcctacatagacccgaggtgcaccacataacacaagaggtgcaacaacgaaaaaactaaacaaaaaaaacaagaaacagaacaacacacagaccgacagcaag

SEQ ID NO: 109982 - DNA, 439 bp, Arabidopsis thaliana columbia
  unsure (1)..(439): unsure at all n locations
aaactccttaaaattgctctcaaggcggagaagaagattaagaagaagaagaagaagaaacggcgccgtttatttattgtctatcttggttttccacgcaccgagctttaagaagagtgaaagatggtgatggactcatcaaaatggtggtggattggaaatcacaacactactaatttctctccttggcttcattctactctctctgaattggatgaaaagacaaaggaaatgctgagagtgattgatgaggatgctgattcttttgcggcacgagctgagatgtattacaagaaaaggcccgagcttatagctatggtggaagaattctaccgttcacatcgctccttggccgagaggtacgacttgttgagaccctcttctgtgcataaacatggctcaganctcgagagtcatgagaaatcatcaacttgtgatg

SEQ ID NO: 109983 - DNA, 432 bp, Arabidopsis thaliana columbia
gtgaaaacagaaaatctagttggtcagttgaaaggtgaatttgatgtgcagactacatttgagggtgacaataatgtattgatgcagcaggtgagcaaggcgcttttcgctgaatatgtatcgtgtaagaagagaaacaaacctttcaagggactgggattggagcacatgaacagtccacgtcctgtattaccgactcaactcacatcatcaaccctcagatgcagccaattccagacaaatgtgttctgcttaagagagcgagatcttctggagcaatttacttctgaagttgcacagcttcaagggagaggagaaagtcgagaattctctttcctcctgagtcatcaacttgctgaagacttaggtaaagctttcacagagaaagcaatacttcaaaccattttggatgctgaggcaaaactacctact

SEQ ID NO: 109984 - DNA, 434 bp, Arabidopsis thaliana columbia
gtatcggatacgcttcctcgactctgtatgggacgctttgtctcattcaacaatctacaaagaagatggaaccagtctcttcatggggtaacacctctctcgtctccgtagatccagagatccacgacctaatcgagaaggagaaacgtcggcaatgtcgaggaatcgaacttatcgcttccgagaatttcacttccttcgccgtcatcgaagctctcggaagtgccttaaccaacaaatactccgaaggtattcctggtaatcgttattacggaggtaacgaattcatcgatgagatcgagaatctttgccgttcaagagctctcgaagctttccattgtgatccagcagcgtggggcgttaatgttcagccgtattctggatctccggcaaatttcgctgcttacacggctttgcttcagcctcacgatcgt

SEQ ID NO: 109985 - DNA, 465 bp, Arabidopsis thaliana columbia
cagtttttgtctcattcccgatcagatctcaacgtcgactagccatggcttcaactttcagcggcgatgaaactgctcctttcttcggattccttggcgctgccgccgctctcgttttctcctgtatgggagcagcgtacgggacagcgaagagcggggttggtgtagcgtcgatgggtgtgatgagaccagagcttgtgatgaaatcgattgttcctgttgttatggctggagttttaggtatttatggtttgatcattgctggtatcatcagtaccggaatcaaccctaaggccaagtcttactatctattcgatggctatgctcatctctcttccggtcttgcttgtggtctcgctggtctctccgccggtatggctattggaattgtcggcgatgccggtgttagagcgaatgcacaacaacctaagttgtttggggggatgattctgattctcatctttt

SEQ ID NO: 109986 - DNA, 460 bp, Arabidopsis thaliana columbia
ccaaagatgcaaatttcctaggttatacattcaatattttggagataggtgatgaacaccatatccgtggcatggcggaactgaagcggatgagtaagacagcaaataaaccatctctcaaaacactcttcgaaacaccatatcctccttctgagaatcaagccttaaaggatttgcttgattcacctatttactctgaaggctctagagggacttccggatcaccattttcacgaccgaatcaatcacaggcccggagatgatcaaaagggaaaatctaaaagtgattaagaacaaacaaagtaaaagtaaaaaaaaaggtagtcattgttcttcagttgcaaatattcatcttttcatacatatatactctgtaatgtaaaaaaaaaaacagtgaacatccggaagagaatcaaaaccaaaatgcatataggaaactttataggtatacaaacatatt

SEQ ID NO: 109987 - DNA, 177 bp, Arabidopsis thaliana columbia
taagctaaaatttgctactattagcaactaggtatattcacaaagatacaacaagcattagtcattcctttgttcaataaatgtggaagttacagggagtatacaaacaatacatgtcaaacaacctcgttagtctaggcactgcgttccacggttgaagatgatgatgcttattgt

SEQ ID NO: 109988 - DNA, 247 bp, Arabidopsis thaliana columbia
attaaggcattgcaaaggctgatggtgacgtatgtggttgccgactatgcttcaatcatcttcttatcgactctccattacccaatgctactgtatattcacatcgtattaattatttagctcttactcatttctgccgtttccatcattttctaatatggattttaactacttgataatttactggaagaatgttcatagattattatgctcatatttagtttgtactttttcttatatttttctt

SEQ ID NO: 109989 - DNA, 462 bp, Arabidopsis thaliana columbia
atctcgttaaacctagaaacctcgagaaaaaccgtatcaatggcgccgaaagcagagaagaagcccgctgagaagaaaccagcttccgagaagccggtggaggagaaatcaaaagccgagaaagctccggcggagaagaaaccaaaggccggaaagaagctcccgaaggaagctggtgccggaggcgacaagaagaaaaagatgaagaagaagagtgtcgagacttacaagatctacatcttcaaggtgcttaagcaagttcatcccgatatcggaatctccagcaaagcgatggggatcatgaacagtttcattaacgatatcttcgagaagcttgctcaagaggcgtcgaagcttgcgaggtacaataagaaacctacgatcacttctcgggagattcagactgctgtgagattggtgcttcctggagagttggcgaagcatgccgtttctgaggggact

SEQ ID NO: 109990 - DNA, 470 bp, Arabidopsis thaliana columbia
tgaaattctggtaagcaaatctttttctggtccacaacatgtttgcctttttttacttaattcttgcctaaactctgtcttgtgcagtcaagatgggtatttcaaaggtttcttattcagtcgagttgtaaagcattttgtgattcaagccggtgactctgcggagttcgatgctgtcaaagattgggcactcgacagaaagaacattgataccaggttggtacacacatgaattgataggaaggaaatgtgtaaaaaagaagctcggattaagctgattatggaaactctttctgtatctgtcttgatcagtttgaaacatgaagaattcatggtgggaactcctaaagctaaaaacgagcaaggaggattcgagttcttcattgtgtctgctcagatcaaagatctgaacgagaaattgactgtctttggtcgagtttctaaaggacaagacgttgttcaagagatcg

SEQ ID NO: 109991 - DNA, 462 bp, Arabidopsis thaliana columbia
cgccgaaaccctaaatctcgacctcaaaccctgtaccatggctgaaggactcgtgttgaaaggcacaatgtgtgcccacactgatatggtcaccgccattgctacaccggtcgataactccgacgtgattgtaacttcgtcgagtgacaaatcaatcatgctctggaaactcacaaaggaagacaagtcatacggcgttgctcagcggtggatgactggccactctgactttgttcaagtcgttgttctctcctccgatggacaattcgctctcttcggatcttgggacggtgagcttcgtctctgggatctcgctaccggagaatctactcgtcgtttcgttggtcacacgtaagatgccctcatgatatatgggatggaaaaaaacttgaaggagttcaagaagatgaagaaatttgaccgtcgttcaataggttatcatatggaattattattcatttt

SEQ ID NO: 109992 - DNA, 427 bp, Arabidopsis thaliana columbia
  unsure (1)..(427): unsure at all n locations
catacgctttgtgcccaggcggtaataccctttttcatagaccaaccaaaaaggcatgcccatatcctcacccttttcccaaggcaagcttccttaacctgcaatatttgtggtgtacttgatgaacttcatttcacctacgtttgtcctatatgcgattttgtcacccatgctgattgtatatatatcccacaaaccataagaatatctcgccaccaccactgtatctctttcacttcttctcttctaaaaggaaaatggtcttgtggagtttgccgtcaagaagttgacaggaagtatggtgcatacacttgcaatgcgtgtaatggctacactgttcacacaagatgtgcattgcgtaatgatatatgggatggaaaaagactngagggagtacaagaagatgaagaagtgagcccgccgtcaa

SEQ ID NO: 109993 - DNA, 189 bp, Arabidopsis thaliana columbia
cggacatcggaagaagtttccgcagttcaaaaactctcaccaggagtctcgagtagtaggttgcttgtctgtggagccaacaataagctctgtggtgtgacttcaacatccatactatggattttcagcctggagagtttctgaatgttaaggaagttcattataaccagcatggtttgttgcttctgg

SEQ ID NO: 109994 - DNA, 233 bp, Arabidopsis thaliana columbia
ctctgcagcgttttggattcagaaagcctaagctagctctggtttttggcgatttgttagctgatccagaacaggtgttaatggtgtctctctccaaggcactgcaagaggttggctatgcaattgaggtttactcgcttgaagatggtccagagaatagtatttggcagaaaatgggagttccagtcacaatactcaagcctaatcaagaatcgagttgtgtatcgactggc

SEQ ID NO: 109995 - DNA, 424 bp, Arabidopsis thaliana columbia
atctcactcgttaccggtggatcctcttctctcgggagaagagtcaccgggactctgtacggacacaaaagaggccacgtcacgttttcggtccagtacaaccaaagatccgacccggtcttgctcctcgacctggccatgtcaacggcaactctcgtcaaagagatgtcgtcggggctcgtcaggatcgcgttggagtgcgagaagcgtcatcgatcaggtacgaagcttttccaagagcccaaatggacgatgtactgcaacgggaggaagtgcggctacgctgtgtcacgtggcggcgcgtgtactgatacagattggcgcgtgttgaacacggtatctagggttactgttggagccggagttattccgcccccgaaaactattgatgacgtgtccggtgttggtagtggaacggagcttg

SEQ ID NO: 109996 - DNA, 433 bp, Arabidopsis thaliana columbia
gtttccatcacaggcccttcttcatgcctgcattgcatgttcattgaagccacatatcgaatggatcgcagcttcagatcttgaagacgaaagtgagaaatcgactccggaggcgcatgctgctgcttggaagatcttgaaggtgagaatttcagtcttagaattctctgatttgatttagttcataaactctccacttgcagagcgcagaatgcattctggttcctggaggttttggagatcgtggtgtgagtggaatggttttagctgccaaatacgtttgagagaacataattccttatcttgagatctgcttgtggatgcaatattgcagttcttgatttcactagatccgtttaatgtttggtttgatctattctttgttattccgaatctcagacattttgaccctttttttgtaattatgtccatt

SEQ ID NO: 109997 - DNA, 372 bp, Arabidopsis thaliana columbia
gtgatggaggaaacatacttcaagggttgccaatgcctttagagttcgaccagcttcagacaaacaacaacaaaagtagaaacatgaacagtaacaagagcattgctgggacctccatggcttttcctagcttctctacgcaacaaaactcgctcatcagtgctcctaataacaatgtcgtggttctagaaggtcacccacaagcaactcctccaggcttcccaggacaccagatcaataaacgtttggagcattggtcaaatgctgtatcctcttcgactcaccctcctcccccggcacataacagtaatagtatcaatcatcagttcgatgtctcttcattaccgcattctagacccgaccccttggaat

SEQ ID NO: 109998 - DNA, 275 bp, Arabidopsis thaliana columbia
ggcgtatgcagttgtctagttttattctcattagacacatgccattcgagaggagccaatcgacaatgcttgggggttcttatggaacatgcgtctcttaggctacaacaaatttcccatgcctgatccaaagacttttacaaccgtaggggctgtctccgtcctcggtgcgatcagaagggcagctaagaaagtctttgtatcattttcttaggacaaccgaagttgatgcccacagaatgtagatgcgttcctggaggagagcagcactcacg

SEQ ID NO: 109999 - DNA, 465 bp, Arabidopsis thaliana columbia
ctagattcgctcctccactgtcttaaatttcactatcttcttcttcattttccttccttctcacttcaaatccataatcgctctacttctctctctctctctagattcgaaaaaatggcgaaactggtgatgttgttggttctctgtatcttaccggcgatagccatggcggcaaggaggggaaatattggaaagaatacaatggtggttcaaggtagcacctactgtgacatttgcaaattcggcttcgagactcctgaatcctcctacttcatccccggtatatctctatctctctaaatccttagtttctgcattctaagatctaagaagttcccaatgttaacgttctctttagtgtttgattctcgattctaatgaagtagtttgttagatctgagttccgaatctcgactttgtatggataagttaggtagatctgagaattttacttatagtttgatt

SEQ ID NO: 110000 - DNA, 337 bp, Arabidopsis thaliana columbia
ggacatctgacataatattcacttctttcctataaccatgtctatagacacatgccaatgaggagcaaaaccccaacgcctctccgcttctcaaatggaaagcatcagagagatgattctgagtatagttggactgatgtaggtactggggagaaggccaggaatgtctccgtcctcggtgcgatcagaagggcagctaagaaagtctttgttattattttcttaggacaacggaagttaaagccaacagaatgtagatctgatcctggagagagcagcacgcacgacagagaatctacattatcaggctggactggttattcataaccaagctcct

SEQ ID NO: 110001 - DNA, 269 bp, Arabidopsis thaliana columbia
tcccgggtcggccgacccttccgttcttccattgttttcctttaatggaaccaactatgttttcatgggtccaataacaaccacggggacaccttttgggagcacacaggggcggcacattaatcaagaccatcatttatctgccaaccgaaacttgacagtttcattaacatactgaccaagttaaccaaaagaaagggggtcccgatttccaattcaactcccataatacatagatctagcacacacgcccttgattaaactcgatc

SEQ ID NO: 110002 - DNA, 359 bp, Arabidopsis thaliana columbia
aaaatctctctctgccaatctcatcttcaacctctctctaactctcgttttcgattctacaatggctgacaagaagattaggatcggaatcaacggattcggaagaattggtcgtttggttgctagagttgttctccagagggacgatgttgagctcgtcgctgtcaacgaccctttcatcactactgagttcatgacctacatgttcaagttcgtcagtttttacgttctctgtaatcttaatcaactcatgatcttggttcgtgatgtcctcttttttttgtgagtattcctttactgttgtatggcaatttgtatgtatatggtttttcttttgcttcttttcattttttttcaat

SEQ ID NO: 110003 - DNA, 416 bp, Arabidopsis thaliana columbia
tccgagcgcttaatatctctcaagacccaaccatttatggaggggtcagcagacacacgaggggtgctttttacgttttgaaagccacactcaccaccgttaaggttcggccaaattcatgagtttcgatttttgcgagagaaatttttatctttaaggtgttgagacttttatcattcactatccattacttggttctttattggctcgtgtagttttacttaatttctttctattcatgaaatctatagagctttatattttctttgaaatgttttataccttttagttttattactttttttaagaaagctactttttttttttttatgctattcctttatttctttttcttatgttctttttttttaattttttttattatttttttatctttttttttttttatatttttt

SEQ ID NO: 110004 - DNA, 414 bp, Arabidopsis thaliana columbia
atggcgacggagccggtcgtttgctccgacgattgcgggttgaatttaagcagtcgatatgttggatgagcagtggttgcgcaagagcaatggttgggccggattcatccttctcgaaggcggtggtcacgtcgatttgagattacggcagaaggaagacgggttacactttataatggttacctgattatagtggctttaaaatttgatttgagcttcaacaagctacatggaccaaggtttgacagatggcaattagccatgacaatcgtgtaaggactacctctgtggattgcaagctaggatccgcatacttgaagagagggctcaagggagaacttatataagcagcataatgtttgttgtaacgtgtgaactaataatttatttttttcatgaaaactcattatagag

SEQ ID NO: 110005 - DNA, 228 bp, Arabidopsis thaliana columbia
attttcctcagccatggccgtcgggaaaaacaagtagaatctctaagggtaggaagggaggaaagaagaaggctgttgatcctttctccaagaaagattggtatgatgataagggttcaccaattttcactcacaggaatgttggtgtgacatttgtttccagaacttatgttaccaaaaatgtcccaaatggcttttttcacagatgtttttgaagtttctcttttt

SEQ ID NO: 110006 - DNA, 431 bp, Arabidopsis thaliana columbia
aaaaagttggaagaggagagagagagagagcgactacgcaccaactgttgcggctcaaagagatctcgatcgggatccacaagacggagatagatagagagagagtgagagctaacggaaatgggatctcagctacttgagtgttgcttccgtttcgttttctactgtcacttccacagtttcaacttgttttcttgatttgatatatcttttctctaaattttattttttatgcttttacatcattttttattttttttatatatttttaattttttttattattttggatattattacattttctatatatgtttatattttttatattttttaattgttttttctttaatttctaatatttttttttattctttctatattttttattaattttattataattttctttaatattttaactccttttt

SEQ ID NO: 110007 - DNA, 290 bp, Arabidopsis thaliana columbia
atctaactgaccggtttgtgttgaattcattgtagtatgtttagttaataacatttttcttaaatcataactgcagacattgttgaacaaaggtgtgaaatatatgttggtgcaaggacatccagcaactggatgcttaacgttagcaatgtcgttggccgcagaagatgatcgggacagtctaggatgtgtgcagagtgccaataaccaaagttacactcacaatcttgccctttaatccaaacttaaacaacttaggtcagttgtgtcaagattcctaaaaatttgat

SEQ ID NO: 110008 - DNA, 402 bp, Arabidopsis thaliana columbia
agaaaaagagttgaatcaaatatggctgggagagctacgatccctgctcgcaactctgccctcatcgcaatgatcgccgatgaggacactgttgttggatttttgatggctggagttggtaatgttgacataaggaggaagacaaattacctcatcgtggattcaaagacaactgtgagacaaattgaggatgctttcaaggaattctcagcatgggatgatatcgctatcattcttttaagccaatatatcgccaatatgatccggttcttggtggatagctacaacaagccagtttcctgaaattttggagatacttaataaggaccattcctatgatactttttcatgattctatttttaatttgtgtcaagttattttattttttttagaattttttt

SEQ ID NO: 110009 - DNA, 114 bp, Arabidopsis thaliana columbia
ttcaaacgcatgaacaaggtacagagacttttttttctgcagaacaaccagaatgggtgggcggatttctgtataatgcgaggctgtaactgaaatagacgactcattactgaa

SEQ ID NO: 110010 - DNA, 346 bp, Arabidopsis thaliana columbia
tatcgatctaatcttttcagctctctccatcgttgtcgtatctgtgactctcgtgatcatcgcctgaaaaaaatttgagataatggccagaaagttcttcgtcggaggcaactggaaatgtaacggaactgctgaggaggtgaagaagattgtgaacactcttaatgaagctcaggttccttcacaggatgttgtagaggttgtggttagccctccatatgtttttcttcccctggttaagagcacattgaggtctgacctttttgtagcggcacaaaactgttgggttaagaaagtgtgtgcttttaatgttgaatttcgttccatatattctaattaatctcat

SEQ ID NO: 110011 - DNA, 113 bp, Arabidopsis thaliana columbia
caaaaagtaacagtcccctgtgatacactgacagtcttacttatactcattgcaaaaacccagcggggtttactgacaaaaggagcgtgtttcttctattctttaaaaactat

SEQ ID NO: 110012 - DNA, 242 bp, Arabidopsis thaliana columbia
acgtagttatctcacacaaagatcaaaggagatttctgtttgtaaacccccacggaaacaactggggaccaaagccggcaggaactaaacttcttccacctcaggaataaataaaccccacagatttcgtcctggttccgttgtcctaagagaaatcatgttgttttaaaagtgcactcaatttttgattcttaagctattgttccatcttttgttttttgagatctctctcgaatttaaaa

SEQ ID NO: 110013 - DNA, 282 bp, Arabidopsis thaliana columbia
tttacgaaaacggttttgatccctattgcgcactgtacggagcctctagaagcggtggcgatgattaccgtgttgcgtcgaggtggtgctgacctgacgttagtttctgcttatactcaggttggcgcttttttttctttttggatcaagatggcttctgattcttctttttatttattttttacattgtttcttttttattcttatttatgttttttatgtgttttctttattcttctttcttttcttttatttagtttactttctatttctctctcattt

SEQ ID NO: 110014 - DNA, 194 bp, Arabidopsis thaliana columbia
cttatctgcaaaactaaagactgctgtctaaagtttttcaacaaaaaggcttcatctttactcagtgtgaatgacatgttgcggcggggatgcgctccggttcacccgtggcatttacatggcccacagagttctctctggaaccgatgccctaatagaaatttggatgttatattagagcactgagctttttt

SEQ ID NO: 110015 - DNA, 99 bp, Arabidopsis thaliana columbia
taaattcgaaggtaaatatccagaagcttgattctcctagttgtacgaaagcttgagtaatggggtctagattaaacttcaagagcttcgttgatggac

SEQ ID NO: 110016 - DNA, 351 bp, Arabidopsis thaliana columbia
ctcactgactcatacaaccttgatttcggtcgcggaacattccggaaagaagcggatttcaccactgacgacatgattctgagcaagaaacttgttcttcaataatcgaaatcctaagagttgctcattcttggcttgtatgattctgatcacccggttctcttaaagttctggactttattggcatctcacgtatgttatggtccggattttgttcgacttttctcttaagaaggcaagcttgggaccattaaaaaaaaaaaaaaaagggcgggcggttttgagggtccaaggttacctacccgtgcctggcacgttataacttttttattggggcaactaaatttaaat

SEQ ID NO: 110017 - DNA, 371 bp, Arabidopsis thaliana columbia
agcccttggacttgcaaactcaacttgcacttggctttttggatcatcttaaggtgggggcctctggtttaacacttaaaaaggacttattgggaaaggggttaagggaaagtttttgcaagtgtggggtggtaaaacaactcttggcggcccaagttgggattgggttggaaggggtggtccaagagaatggtcaaaaaggtggagaggtgatcatgggtactctgtaaaagatggcagaaaaaggggttgtcaattgatctgtgggggcatttccgaatacaaattggatttttttgtgggggaacaacacacgatcttttttttttggggtatcacttatgtttccaacttttttttaaatgggtttt

SEQ ID NO: 110018 - DNA, 357 bp, Arabidopsis thaliana columbia
tttttccttctgggtttcttttgtttgcctggaaacatttgtctcagattttgattttgaccggagtactcatattctccggcgatttctccggcgacatcgtttgtgaaatggagggaattactcatccaatacctcgtactgttgaagaggtctttagcgacttcagaggtcgacgagctggtcttattaaagctctcactaatgatatggtgaagttttaccaaacgtgtgatcctgagaaggagaatttgtgtctctatggacttccaaatgagacatgggaggttaatctacccgttgaggaagatccctcttgagcttcctgaaccagctctaggcatccaatttcttttt

SEQ ID NO: 110019 - DNA, 215 bp, Arabidopsis thaliana columbia
aataataaaaaaacaacaaaaaaaaaaaaatttttttcttcgcttgccaaaaaacaaaaaaaggtaggggagtttaaaaaaaacatatgaaaaggcttaatgcgcctaagcattggaaaaggggcgcccgttttaggggatccaagtttccgaacccggtcttggaactcaaaagcttttttatggggcccccaaaattaaattcccggcccggg

SEQ ID NO: 110020 - DNA, 371 bp, Arabidopsis thaliana columbia
aaaatccgttctaaaactttcttcttcttctctctttcccttcgtatcttcttcttcttcttcaacctctcgatctcactgatttttctcttcaacaactcgatcttcccttcctatttttcaattggggtcttgcaaacgaatatctgctttgaaattgaacgaaattatttagttttggtggtttttcttcgacttcaccaatctgttgaactcaaggagaatatatgagataacatcagtcttcatatttgtgagtttctataatggatcagctcgtttacttcatcattcgtccctcatgagctgagtatgacccggaacttgttctcttggaaaagaagttattggtgaaaggtttaaggtaattt

SEQ ID NO: 110021 - DNA, 301 bp, Arabidopsis thaliana columbia
gcagaacctaccgacgattccataccaaacatatcccgatctggaaacaactgacctggaaggtgaagtgtatcgctggaaatggggggccttccgggggccgggaggcgtggtccggccaatctaccggacttgtgttcttctctaccggatctttatctccgtttgtctctttttcttctcgcactttctccgtcgtcttaactctttgcatagcctattagacatacatgcggtttggcacgcatatatgcgaggacttttcggctttgttcgggtccatgtaatctaggttggactg

SEQ ID NO: 110022 - DNA, 124 bp, Arabidopsis thaliana columbia
atttttatatatatgaaaaggcaaaaggtaattttatgtttgtaaacatctagaatgagcaacagcgaacggataaatgaataaccttggaacggaaaatgcaaagtaaaaactgataaaagac

SEQ ID NO: 110023 - DNA, 253 bp, Arabidopsis thaliana columbia
cacttttaaggaaaaccctagaatcctcagaaatggcgttgagcaccgtgtttcgtcgagcttcgtcaacagtagccaatcttgctttccgtgcgggtagatctccggttagcttccgcagtggcgctgtctccgccgagaggctggttcgggggctgcaccagatcaggcgtggatcggatagtttattctaagtctctagcattttctaccaaaatgctgatttttttcctttccttaaccatagattatt

SEQ ID NO: 110024 - DNA, 332 bp, Arabidopsis thaliana columbia
cgccggcagaggattcaccttcacaggctattacccatgaaggagagtaacaataacttgaagattgtgtaatcccctccgtttttagttttcatgattctctcttgaatcaattttttttccagtttatccctgaaacggaggctttgaagctgagaaaaatccattttgctataactctttgataaaggttgctctcaataagaacaaaatttcccaggaaattgctttcaaaaaaaaaatacttttcttaataaattctatataattatttataataattacttttataattttatatctttatttttttttcataacttattttaatt

SEQ ID NO: 110025 - DNA, 158 bp, Arabidopsis thaliana columbia
accgatttgttttatgatttgcattctattcggtagcaaaagtgttccttgattattagaatatcacatgatggacaactcataacattgttagcacgactaactcaacagaccacgcactcacttagaagggaataaacatagagcagtgactaaat

SEQ ID NO: 110026 - DNA, 348 bp, Arabidopsis thaliana columbia
cagcgactggcgagaatgcatttttcggtgcctatggcctgaagcctgcaataaatgatgttaccaaactcgttgaagatttttcattgaaaagtcttcttgaaggctcttatgagtgtccttctttgggcaaagacaagatgaagaaatcggagaatactaacaacactttattgagtgtagtcaaaaatgtttggtccattctaccaacaaagaggcctgttcaatcacaaagctctactgaattagacacttgtctcagcagaactctgggttcaccgcctagctctatctttgctacactaccaaatagtgaaaacatcgataaagtaaatgccctggatggag

SEQ ID NO: 110027 - DNA, 290 bp, Arabidopsis thaliana columbia
gaagatggctctgatgatcaatctagtgagcttggttctgaagctgatgagaaggaattagatttgggtttgaaggaagagaaaaaaggagtttcggattataaatctcttttatctgagtttgatgattatgttgcaagtgagaaaatgggttctggagtttcgagggcattgagttatgggtttgaagttggagatttggtttgggtaatggtaaaaatatatattttgtattttttttttatttttattgtatattatgtattttttttttttatttgtttttttta

SEQ ID NO: 110028 - DNA, 448 bp, Arabidopsis thaliana columbia
aaaatcagaattacaaacaaaaatggttttgcatatagcttcctctcattgggctgcttttgctcctgaccatcgtcgcctctccagcaaatgcagatggacctgtttgcccgccgtcgaacaaactaagccgggcaagtttccctgaaggttttttatttgtcacgggtactgtgtcataccatgatagatgcgcgcttaatgaacctggtcaagacccgaccgttagagacacttaccgctcaagagctctcgggtggtgcattgaatggctccaagcttatttccttgggcttgatgacatcatggacaactctgtcacacgccgtggccagccttgttggtttagaaagccaaaggttggtatgattgccattaacgatgggattctacttcgcaatcatatccacaggattctcaaaaggccctcatggaaatgccttactat

SEQ ID NO: 110029 - DNA, 288 bp, Arabidopsis thaliana columbia
gttggatgggctccaaaggaatacaatactggttagaaacaaaacactggagggcaggcccagggtgttggggaaattgaatcccagaaagggacttctgctccacagtctggctatgtgtgggatgaagcatctggttattactatgatgcggcttctggatactactacgatggaaattcaggtctctattatgacagcaatagtgggctttggtatctcgttgaccagcaaacacatctaattgctctttgtcctgatctgaacattgagcgttaagtatcagaa

SEQ ID NO: 110030 - DNA, 128 bp, Arabidopsis thaliana columbia
gatgagaagagtgatcactgtgctcagatttattagagcactgttcatgatgttatgcttgttgtcacgcctatcttacgagctattcttcaggaaaacaaaagactcacgagctggctgttgctttt

SEQ ID NO: 110031 - DNA, 108 bp, Arabidopsis thaliana columbia
ctcttgttcatcggatctaaagcgccactcaaagtgtttatgaaaaggctagggttttaacagcgactcataaaacagagatggatgttgagattagaaatgctgtta

SEQ ID NO: 110032 - DNA, 392 bp, Arabidopsis thaliana columbia
aaaatgtcgaaagaagaaaaaaaaaagaaaaaaatcgtaaaccctataatttttgctcagaaccctaattccgcaaacgtaacctgtgttcattgcgccgtcttctcaccggagaatgagtactactactactacggctgcacttccgcagcgacaccagtcgaaggttgacccgcagaacgttaacagagccgtgaagtctctgctaaaatggtgggactccaaatccaagaccgagaactctgaatcactcgagaacgacggtttcgtctatctaatcgtgacactgaagagaatccctcagttggatcgtactaaccccttgatgatccctcttcctcatcctcttatcgatctggtcgccgaagatccggcggagcttttgttgatca

SEQ ID NO: 110033 - DNA, 371 bp, Arabidopsis thaliana columbia
atttgtctctcttaaatgtgtttatttccccttttgtagtaaccactcaaaaggttttacttcactcaaaaatggctttgtctcttatctttctagctctcttagtgttgtgccctagtagtggtcacagccaacgttctccttcaccgggatactacccgagttcccgagtaccgacttcaccttttgatcgtgaattccgtactttatggggctctcaacaccaacgtagagagcacgacgttgtcactctttggctcgacaaattcacttgtagtgggtttaagtttttttcttccttacctgtcttattttcttttgttgttttaactctgtttctaattatttttttactgatgatgctcttttat

SEQ ID NO: 110034 - DNA, 376 bp, Arabidopsis thaliana columbia
tctccctcctttttggatatctctgagactttttattttggttttcaattatgcagtttccggataaaaaaaaaaaaaaagggagagagaaagtcacagaaataaagagaaaaaagaaaaaggctcaaacgccatcaaagttttaagaaccaaagaaaaccataagagagtcgatcataacgaaagtctcatcatttggcacccttcttcactgcagccttggtgaccttggctccagatgggttcttcttgtccacgctcttaataacaccaacagcaacggtctgcctcatgttcctaacagcgaaacgtcccaaaggtgggtactcggtgaaagtctcaacaaccatgggcttggttggggtcattttaacca

SEQ ID NO: 110035 - DNA, 165 bp, Arabidopsis thaliana columbia
  unsure (1)..(165): unsure at all n locations
cgtcaattggtaantatactaaacnaaaccaaagaaaaagggacaatgttcgaacctaggtgcgtctccacccacgcaaaataatcaaaagccatatagcctatagagaggcttacaaccaatcaaaatgctcatagggggtccaaatctcatacgtacactcat

SEQ ID NO: 110036 - DNA, 163 bp, Arabidopsis thaliana columbia
  unsure (1)..(163): unsure at all n locations
cgaaccctcgatctcaaggcgaaagcagataatgnatcttccatggcgagaaattcgaattccgaggaggcttactcgtccggggcctgctcaagttcacgaaccaacttcttccactttattcctattcgatggagaaatggactctctcgcaaccgctcca

SEQ ID NO: 110037 - DNA, 169 bp, Arabidopsis thaliana columbia
  unsure (1)..(169): unsure at all n locations
acattgtcggttggaagaggatcccatgccgatnctagagaagttgcatcagttgaaagagcttgaattaaggcgtaaatctttcagtggaaaggaaatggtttgctcgagcggtgggtttccttaattgcagaagctttcaataaaaggactagatgaatggtacgat

SEQ ID NO: 110038 - DNA, 341 bp, Arabidopsis thaliana columbia
ccaaaatcagcggagcaaaagttacttccgattctttaaaaaaaacacgatgatgctcaagcaagctgcgaagaaggccctagggcttacgtcacgtcaatcaacaccgtggtctgttggtatcctccgaacctaccatgagaacgtcattgaccactacgataatccttgcaacgttgggtcttattattagattgatcctaacgttggttcgttacttgttattgctttcttttttttctatctttttattctatttttcaactatttttttaatatttatattttttttatttatatgttctaatttttttaatttcttttataaattgttgttttat

SEQ ID NO: 110039 - DNA, 192 bp, Arabidopsis thaliana columbia
gagtgaagatggcaatggagcagcagtgcaacttttcgtcaacatgatcatgggaagtatgatggcatcattcgcggagggaagacttctaagccagaaagctggactcgatccaaatgtacttggggagggtgattcacagggagctatcaacgcaccaatgtactgacttaagggagcttgaatgctcaa

SEQ ID NO: 110040 - DNA, 239 bp, Arabidopsis thaliana columbia
  unsure (1)..(239): unsure at all n locations
ctgaaaaatgggagcaattcatttatgncttcccttngtcctttctccccctgctataaaacaccataccttcctttattcttcttcatccaattccaatttcaaaatcagatccaacaaatcttcttcttcttctttttcttcgatcatcatggccagtattaatggttacggagttttcatgatcaccgccactatgttctgtcttgcttctttttacgtgatagatcttttttttg

SEQ ID NO: 110041 - DNA, 209 bp, Arabidopsis thaliana columbia
  unsure (1)..(209): unsure at all n locations
caacaagcnaggaagagaccncccacagaagagcgaagacaacgcggaggagttcagcaagaagcaagaggcaaaggcaggcacaggagcgatggagaagaatgacacaaactgggcagaaaaaccaggaggaccagccacacagagcgggctggagacaaagcagaagcagaagccggaaaagcaggaacgcagcagaagggcgcgga

SEQ ID NO: 110042 - DNA, 273 bp, Arabidopsis thaliana columbia
gatcgatcaccagattcgtgtttgagtacaagggttttctcaagctctcgtctttctgaatcaaactggtctaactcttacatgtatccagaggatgatgataagctcctcggtaatggtaaaagagctttggaggttgttggttcgtttagatttttatattttttttttttactcttttgttatattgttattttcatatgtattttttattctttttcttttctattagtttaatatttgatttttttttttatcttttttatcttatta

SEQ ID NO: 110043 - DNA, 345 bp, Arabidopsis thaliana columbia
gtctcttcttcttgattttgagtatcgattctaattttggatccagagggttcatttatgtgaaagattaggttttaacatactatgtcagctagaacgttgtaggccacaaacactatgttacagggcaatcttttattaactccatccaaaatcattgttggaggtctctcaccatctactgatgtggagctcttgtaagaagctcttggcagtattggaaaaattgttgattgcggtagttggttctgaccgtgaaagtatgtttattaaggtgctttggtttcgtaacatattgaatcgatcgaagttgtgaattacgctatttcttgctatgttaaatat

SEQ ID NO: 110044 - DNA, 362 bp, Arabidopsis thaliana columbia
cactttacatctgtatcagggagcgtttgttgacattggaggtgttcatgaaggatgggtacctataaaagtaatgactggttttggatccggcatttcataaaagttgggatgcatgttatcgttgaaatcacggcaaaaagagatccataccggtttcggtttcccttggagttgcgctttgtccatcctaacatagatcacatgatatttaataaatttgacttcccaccaatattccatcgtgatggggatactaatccagatgagatacggctagattgtggaagacctttttaaccttaaaaagatccattgatcaaagccagtggatgatgggctggttctttgatcatccttat

SEQ ID NO: 110045 - DNA, 194 bp, Arabidopsis thaliana columbia
cggacgcgtgggaataccgtatatcagacaagcaagctgataaggcgatcaaagcggatgagggaggcagcactggggaggatacaattatcttccatgcttatactgttggtcagatgatctgttaaggaccggctacggatgcatcacaggagacgaggtgctatgttggagacagcagatgcatcataccc

SEQ ID NO: 110046 - DNA, 237 bp, Arabidopsis thaliana columbia
gaagctgtcatcgattatgctctgaaaaacagggtatgttaaactcgttccatgtggacttgattttggccgaccaggatttacagttttagagaacaccggttccacccttctttagagaagactagacgtttctatcctcacgtgcacaacatggatggattctttggtgcaaagctgcagaagatgtgcattgcaatgcaatcttcatgaaatgttgtgccagcttgtacaatg

SEQ ID NO: 110047 - DNA, 268 bp, Arabidopsis thaliana columbia
agcaaagtgaagaagctccagaacacgccatagctatggctcttctctgtccttctcttccctctccgaattctcgtcttttcaggtgcaggagcagcaatatttcgagcaagtatcatggagcctcaaaggagctgatgattgctcgttctggtgtgtctaccagatcaatctcttcggaaaaggggcatgctcgtatggatttagagcgaaatgggtctctagcttccgatcacgatctcgtgtcataaggctaatgtcaacgact

SEQ ID NO: 110048 - DNA, 351 bp, Arabidopsis thaliana columbia
cagagatcggctgattttcacatccacaagtatggcgactctaatcagcaagaagagaaagcttgtagcggatggtgtatctacgctgcatcgaatgaggttctcacacagtagctgaggagaggatggcccacaaagtgcatatgattaacctctctgacaaaccccagtggttcttggacattagtcctcaagggaaagtaccagtgcttaagatcgacgactagtgggtgactgattccgacgtcatgttatggtatacttctaggagaagtatacttgatccacctctttaatacttctgcttgaatttacactcggtcggtaccatcattttttaggtactttatg

SEQ ID NO: 110049 - DNA, 462 bp, Arabidopsis thaliana columbia
gcaaaacaaacagagagcgagtcacgcgccgagttttcctcacttgttctcaataaatctctctctctttcttctctatcgtttcatttttctcctccagatctcgattccaatctctctccctctctacttccttcaacaggtttggtttctccgatccatcgtcactctcttcgttagatctgttcatttttgctttggtagctaatgtaatcactcgtttcgcgatttgaaactagatctgacgctcggacgttgtttccttagatttgtttagcttaattgctcaaatctgattagaaattgatcgaattagattctgtaactggaaaattttggaatcactctgcagaaaatgtgtcggtggaagtgaaactatacatttttttttttttgaaatttgttgcttaatttttcaaattcgatcggaaattgatggaattagatcttgaaactggaatc

SEQ ID NO: 110050 - DNA, 187 bp, Arabidopsis thaliana columbia
aaattattccggttgaggattcaaagttacagtttgttgtagtagagaaagatgatggggtcatccctactgctttggagtctgctcctacagatctctattccaatctgtttacctgtttacttccttcaacaggtttggtttgtccgatccatcgtcactctcttagttagaacaggtcattttt

SEQ ID NO: 110051 - DNA, 105 bp, Arabidopsis thaliana columbia
gtaggtgtacgttcttcccaagcatttttatgattatggatgcatcacaacacttgggcatgcttgttgctgtcttacaaagctttctaaataccaaactattcc

SEQ ID NO: 110052 - DNA, 347 bp, Arabidopsis thaliana columbia
gctcattctaatggatctggtcctgtagattggattaacaaacacgccgatttcggtaaagttttcctcggcggagatagcgcaggcggtaacatatcgcatcacatggcgatgaaagctggtaaagagaagaagctagatctcaaaatcaaaggtattgctgttgttcatccagctttctggggaacagatccggttgatgaatacgatgtgcaagataaagaaacgagaagcggaatcgcggaaatttgggagaagattgcgagtccgaatagtgttaatgggacggatgatccgttgtttaatgtaaacggatccgggtcggatttttctgggttgggatggga

SEQ ID NO: 110053 - DNA, 266 bp, Arabidopsis thaliana columbia
gcaagagaaaacagaggatttaggttactctgtttttcacggcgaggataaagtaaaaacagaggattactctgtttatcctttaagaagaaaaaaatcagatttttaacagaggaagattttttggagtcggactctgattttgttgattcaagtcagacattcacaagcaacgacgaagatgggtttttatcagattcagatttcgcagaaacattactgatgaaaggacatatccgttttagcgtcatttttggttctggttc

SEQ ID NO: 110054 - DNA, 255 bp, Arabidopsis thaliana columbia
gttggtagctggaaacgctttgaattgcttattcattgattccagtggcttccagagatatttgggttttgtgtcacaaatctcaatggtgccactgttaaaagctataagcaagaggggtttgtcatagatgaacgtgggaaattaaaaagatttaacaggaagaaactcttcaggaaacgatgtggctctttgagagggcgaggatggaaatatggatccgggtttgtctattggttattttctgttctatgt

SEQ ID NO: 110055 - DNA, 394 bp, Arabidopsis thaliana columbia
caaaaatgagcggagtttcgacggcgtcgtactttgcgcggcgagcggctcagaaggagagagttcgaatctttaccgtcgtgcccttaaggatactctcaattgggctgttcatcgccatatcttctaccgtgacgcttctgatctgcgtgagaagttcaatgtcaaccaagatgtggaggatgtcgacagattcgtcaaactgattgctcatggtgtagcagaatacatcaaatggcggcaccctgatccttatatagtatcatgggctcctggttgctcaaagttctgtataaccctactccatcatgcttgatttggtttgtttacattcttggtctagattacaacccttattttatcttagttttcttttctttaattaccccattat

SEQ ID NO: 110056 - DNA, 112 bp, Arabidopsis thaliana columbia
ccggagctggtgaaaaaaatcgtcttttctatcttctttgaagatggcgagcaatattatcatgttcgagctatcttcgtggtcgatacactagaccctgatggcaaaaagt

SEQ ID NO: 110057 - DNA, 393 bp, Arabidopsis thaliana columbia
cgtttatccaggtgaattcttgcaaagccttgagtcagctttcagatgataaagactttggtctctccttcgagtggatttggatctcagaagatgaagtttgacagatcttttgagaaagtgaagacccgagcagtatgaatttattttacaatttctcaatctgattattggtttcttcatttgcgtgacgtgtatcaaatttattgctgattatacattattttcattgttattattcacaatttctttttcaatcattataatattccttctgattcatactaactcttttttatttttttccctattatcattattttattatttcttctcataatttcgtattttttattctttatctcttctttttctcttttctttcctttattc

SEQ ID NO: 110058 - DNA, 326 bp, Arabidopsis thaliana columbia
aaaagaaagaaaaactgataatgaagggtcttcatctccacctcgtcctagtcaccatgacgatcgttgccccatcgccgccgctgcaccggctgctcccggaggagctctggctgatgaatgcaaccaggattttcaaaaggtgactatgagtttggacgttgcgaccgggaaggcaccaattccgtctaagaagagttgtgacactgttgaagatatcaaagaaagagatccaacagagcacgagggagctatacatcatgtgactacaaggggtcatgccgtggattacaactttgaccaaggaagctctgatattcatggca

SEQ ID NO: 110059 - DNA, 289 bp, Arabidopsis thaliana columbia
  unsure (1)..(289): unsure at all n locations
ggaggaaggaggagaaggagaaacaagtctagagttagcagttagaatcgttgacgaggttcttcgccggaaacattctttgcaaagatcaccagacgaaaccttactcttgatgatttcaattattacctcttttctactgatcttaatcctcctatcgcctatcaggtccattaaaacatgtatgctccattgtcacattactttattttcacaggccacaattttctattttactggtaatcagctaanntgtatctgctgtgtatcttctattgcatattcattt

SEQ ID NO: 110060 - DNA, 351 bp, Arabidopsis thaliana columbia
ttggattaatgtcccaagcaacattatctcagcccttgaagaggttggtcaaaagcaacacatgtacgagttcctgtcttcttggatggtggagttcttcgtgtctctttttttttctatgttcttgtactttaatcctatatattttttattttttaccattattttttttcttatttttttatttgtattaattcttttttttaattactaatttcattttattttcatttttttttattataatttaactttttttttcattctttttattattttttatttaactttatctttttttttttttattttttctattttttattttttttattattttttttttttttt

SEQ ID NO: 110061 - DNA, 180 bp, Arabidopsis thaliana columbia
  unsure (1)..(180): unsure at all n locations
aaacaatcatcttaaaaaacggaacaaacacatgggtgaatgattcnacggaccaaacaagcgtgtgtgacatttgcacaacaaaaagttaaagctaaaggaaagcttaaaaattctttcttgtcggtcccaaaatagcttttttcttcctatatgagatctgtgtaaaattttatattt

SEQ ID NO: 110062 - DNA, 253 bp, Arabidopsis thaliana columbia
ccaaccttggttgtatgagagactcatagacattttttctttcctttggcagacccccacaaggggcagtgtggcttcttcaaaagggaaacacacttctagaaaccccaacccaggatcaactaaacatctgttatgtcaatcaaccataaccgtcgagcgcagctctcaaaccgccgactccgacatacaagccacccacgctgccaactacttctattaaaccacccaccacaaaaaccttcgggcaaac

SEQ ID NO: 110063 - DNA, 185 bp, Arabidopsis thaliana columbia
cggacgcgtgggtctggaccaagtctgcctttgagaagcttgagtctatctatggttcgtttgagaagccatcagagaagaagaaggggtatgtgcttcctcgtgcaaagatggtgaatgctgatcttgccaggattatcaattcagatgagattcagagtgttgtgaatccgatcaagaaggat

SEQ ID NO: 110064 - DNA, 429 bp, Arabidopsis thaliana columbia
gcgaccaatcatggttttagaccgcccgactttattttatcgtatctagaatctagacatgggatcgtcatgatacaatctcctgagaatagaccgtcaagcactgtatccaagaaagctgctgatatttggtacctgatgaacgaaggacttccaaataaacgtgtcaatttcgtctcaaccgcttggcccgctaaaaactcagctaatagcaattggaaaagtgatctcggtgtgaatgtgaagaagaaggatacttgtgtttctgatgtacagaagagtgttttgaattatagctgttgtgaggaggctaagagtattgctgcagccgctttagctgcggtgcgaaacgcaactgtaacggctgcagctgcattgagcccgggcaagattgaaataaccgaggtcaaagattttgcgggccaagaa

SEQ ID NO: 110065 - DNA, 248 bp, Arabidopsis thaliana columbia
gcgcttatctacagaaatggagacgagcactttaaagtgcttgccgacacgaagagaaacgatgacgacgcattattggacaatgttgtgaccgctaaagacctaccagccatggcccatatgaagactatccttgaatcaatgggcgctgaaacacagattttttagaacgagcccatggcgcaggaagtgaaaggaaccgatctggctgaaatgattgctgatggcaggatctagttagctttaga

SEQ ID NO: 110066 - DNA, 399 bp, Arabidopsis thaliana columbia
ctacaacaggtgaagaacagttctcaaactttttttgaaaagcaaaaccctaaacaagaagcttcactttcaccaatatcatccacttgttcttctccttctcatgacttctctttcactatctctctccagcctctctcttcttcctcaaaacacatcagtcctactcttagaagcccatccaaaacgacatcgtcttatcaacaaaccgatcctttcgccgtcgacttatcccccgccgatgaaatcttcttccacggccaccttcttcctctccatctcctctctcacctccctgtctctccccgaacttccacaggctcgtataatgacggatttacccttcccgtcaaagatatattacccgaccagcccacaaacaacaacaacaacacttaa

SEQ ID NO: 110067 - DNA, 370 bp, Arabidopsis thaliana columbia
aacagagaaaaatatgtgcagggaacttgggatgaggtattatattgtgcgaaagaaaagcagctattgtatctaggtatagacatgatccagccattcttagagaaaagaggggacgattgagatcaggaacactatattgcatacattgctcacgtgaagatgatgattgcaacagtttagagagtaccatgtgcgaggatgaacagggaccaaatatatagagtgcgtgatgcgtacggaagctgctgtaaggacaggtgagagtagcctacgccatgcacagtgcgtacagcgactgagaagccacgagtagagtccaaacgaagatgagtgacagcagtaactagctcaagatctggcttgatca

SEQ ID NO: 110068 - DNA, 431 bp, Arabidopsis thaliana columbia
gatccacacactctctcttatatctctccggcgaaaactttccgatcaccgacaaaaaaaaaaaatggttgcagacgcaaacggttcatcatcaagctcatttaacttcctaatctacggtaaaaccggatggatcggtggtttactcggtaaactctgcgaagctcaaggaatcacttacacttacggctccggtcgtctttaagatcgtcaatcgatcggcgccggcatccaattcgcgagacctagccacgtgttcaacgctgctggagtcaccggtcgtcctaatgttgattggggcgaatctcacaaagttgagacgattcgtactaatgtcgccggaaccctatcttttgtttgccttacgctggagcgagcacttattgtgatcaattacgctacgggttgtatatttgagtatgattcgggtc

SEQ ID NO: 110069 - DNA, 332 bp, Arabidopsis thaliana columbia
ctccctgtcaatactcttgcttgtggcgactctgtgaatgatgctgagctgtttagtattcccgatgtttatggtgttatggtaagcaatgctcaagaagagctgttgaagtggcatgctgaaaatgcaaaagacaaccctaaggtaatccatgcaaaggagaggtgtgcaggtgggattatacaagccattggtcacttcaagcttggtccgaacctttctccaagagatgtctctgatttcttagagatcaaggtggagaatgtgaaccctgttcacgaggttgtgaagttatctttgttctacgagagatggatactgtgcgagtttat

SEQ ID NO: 110070 - DNA, 432 bp, Arabidopsis thaliana columbia
cttgatgttgaagctatggaaattgcaggttctcatggtcacaatctcaaggatttgtcacttttgactacacttggaatagcgtttcagacgttaggtgttgtgtatggtgatatgggaacaagtcctttgtatgtgttcagtgatgtgtttagtaaagttcctataagatcagaagttgatgttcttggagctttgtctctcgttatctacactattgctgtgattcctttggcaaagtatgtatttgtagtccttaaagctaacgacaatggcgaaggagggacatttgcgttgtattcacttatttgtaggtatgcaaaggtgaataagctgtcaaatcaacaacctgcggttgagcatatctcgagttttaggcttaaactcccaacttctgtgctggaaagagcttttttaattatataagctttt

SEQ ID NO: 110071 - DNA, 396 bp, Arabidopsis thaliana columbia
cgacccacacccacccgtttgcttctcttcgattcttcctccgtcagtatttgatatatcaaaatggcttcacacattgttggatacccacgtatgggccctaagagagagctcaagtttgcatttcaatttctttaggactgctactaccctgggagaagtcttcataacttctatgaaatctgcatctattgaaagacaattgccttgtaccttgtaagatttctataaaggtgacttccagaagatgaagatctctcgtgatggtctcgactactttcggagaggctcaacaccggtttgaggagatctttgacgatagaaattaaacccggttggaaaaaaggaacaaagataaccttcctggaaaaggtaatgagcatcgtggagtcatac

SEQ ID NO: 110072 - DNA, 279 bp, Arabidopsis thaliana columbia
gtacagcccaaacccggttcgtggaaatactatcagcagtgtttgaaatcaagacgctcgataaacatttgggattcttataactgaatttaatctcgtattgttattattgtttgtatgtatagtatttcaacaacaatttcaaaaattagttgattcatcataaggatataaaatttataaatccttatgtcgatcaatttcttttttattcaaagaaagattgtttgcttgttttatgtattaagagaaatataataaaatgatatatttcttaag

SEQ ID NO: 110073 - DNA, 247 bp, Arabidopsis thaliana columbia
cactgggactacgataaatcatggagctgtcttatctcacttgtgccagaacagacttggggatgcccctgattggagaggatccagatgaacttaagaggtgcttttaccgatattgcatcacattaacctgagccaagcaaatgcttacgacgaatggaaatgttatcgaaaacaagtggagaaaagctatggggaggaagcttatcttgcagaaacgcaaggctaaccttaacgactttgatag

SEQ ID NO: 110074 - DNA, 206 bp, Arabidopsis thaliana columbia
ggcctaggcgtacgccgacaatgagcttagctatggcggttgttctttttaggtctctgctcaacaaaaacaccatatgctcttaactcttgactcccactttcctaccggacaaaatctggttacttgtccgcaagagacttcccaataccagattcgggggtgcataaaccatggaagctggaatcggggtaatggggtcaaaa

SEQ ID NO: 110075 - DNA, 272 bp, Arabidopsis thaliana columbia
  unsure (1)..(272): unsure at all n locations
cgcgcaaaaccagncaaaacacacgcgcatttttttttatgaacggcctcacatcaatggggaggagacttagctatggaggggaggctaaaaacgagcatgtattatagaattctacctcagttcaagagcccaccagattctatatctattcacttccgaaccacttactgtgccactaaacataacaagggttcagtattattgcaacagtaacgtgctataaccatttaaacaacaatataaaaactcaaagcattgatgacaataat

SEQ ID NO: 110076 - DNA, 149 bp, Arabidopsis thaliana columbia
ggggcaccccttgggagatatttccgcgggttgggtcaaaggcctgaaaggtttttggggttaaattctgggcctttttcatggaaagaaggggaagcccagatctttagccacccgtaccaaaagcgttaagcttttgatatgggttt

SEQ ID NO: 110077 - DNA, 264 bp, Arabidopsis thaliana columbia
gctatcgtttctctttgcacttagaaatcgagggtattatttttcccagctctaatctaatgactgaacaatgacgttttatatctcgagctcgttaactccaacccattttcgaaacccttaaacccttctaataccctcttccccagtcaatatcgaggttctctgtctagtttcgtccgccgaagaaaaccaacggaagcttaatttatctttcaattttaattttttacttttacatactattttttttgcatattttta

SEQ ID NO: 110078 - DNA, 319 bp, Arabidopsis thaliana columbia
  unsure (1)..(319): unsure at all n locations
ctcggctagatctgtggcaaaacctttcctaatgnttctagttcctcgttaatcgaatcatggtggagaatttgtttccttctcgatttcaatttcatcttcagagactcgcccgaagcgtcgtcttacttctctccttgcttctcacaaaacactcttcacatttctctggatcacttcctttggtttcgattttctactactactaacggtttacaacttatgcttctctttttacatgttctttctcattctaagcttataatttttttttttgatctaattttttatattatatctctttaatttatatcctttt

SEQ ID NO: 110079 - DNA, 136 bp, Arabidopsis thaliana columbia
cactttctctctctctgtatactcttctaatgatttcaaaaaacggtaatttagtcggtgttctatgggtatctttggcattgaccctatctaacaaacacatcaccggcgcttgcagaatattgcggcggggggc

SEQ ID NO: 110080 - DNA, 222 bp, Arabidopsis thaliana columbia
gtggggctgaggaaaaaagatctgatgggcggttttgatcctttcgtgaaaatcaagctctctgaagatatgattccttctaagaggacatcagttaaactcatgattttgaatcctttttgaatgaggagttttatttcttggtttgttgtttttattatctttttttattttatctttgtttttttttttgatgtttaaattatttacttatatttgttg

SEQ ID NO: 110081 - DNA, 111 bp, Arabidopsis thaliana columbia
caagaaagactgaagcattttcctgaaggccaactgtgcgtgttttctgggacactcccgctgaaaacatagtgaagctcacggtcatggctctccgcaggtggatagaca

SEQ ID NO: 110082 - DNA, 434 bp, Arabidopsis thaliana columbia
atccattcatccacagcctattactctagttctttctttcaccattaacaccaaattcagaaaactcagaagaagcaaaataaagagcttttactgatccaccaaacacagatttcataaactcccaaaaaagttaaattccaaacaagccccacaacaacaacaacaacaaaaaagattttaatctttctcatttacccatatcctcaaaattcccacaaaaatcttttctccaataacataacaaaacaactcttcttctacaacaaactatgttctgattttctagtttcttcttccacacaatacataagaaatggggttttatttacttgaagcagcttttgttactttacataatcatcatggctctgttctcagatctcaagcatgctaaattttcttcaccagagtccacgaaccttatttacaaa

SEQ ID NO: 110083 - DNA, 403 bp, Arabidopsis thaliana columbia
gcttcttcgtcttcttcttctcggtctcgcacctttagataccgcgtcttcacgaacttccatggacctgacgtccgtaaaacattcctcagccatttacgtaaacagtttagctacccgggatttcgatgtttaatgatcaaagtatcgaaagaagccaacccatggcacgtgtttttacaggagtatttaaggaattttggatatccagcgtcgcggttctgtataaatacacacgcatgttgtgagctttcttggtatctcttccctatccaaaccgtcgtccttcgccgtaattctttagtcatttccgtaatacctgatcaagcgcgtgtgatccacacatctatcacgcctggctttcttgggtttttcaaaactctgtactttggggcactcatat

SEQ ID NO: 110084 - DNA, 151 bp, Arabidopsis thaliana columbia
gaagaagcgaatcgctcgaaatagtgttttctactgtagagaaagagcgagaaatcataagcatgcacatcagtcaagctgtgatccagggcggaaaatcgtgttgggagcccactgattcgaaaatggaattcagccggacggaaagaag

SEQ ID NO: 110085 - DNA, 176 bp, Arabidopsis thaliana columbia
gggttttcgatcgtattatttgattgtatcgccgccactaaaacgtatataaacatctctgttttctacttgatttatgcttccaaatcttatttaatcgtgtgtgagacctaaaaggaacagattagaagctatggatacgactactggtcaaacagcacgcgagctacatgtac

SEQ ID NO: 110086 - DNA, 350 bp, Arabidopsis thaliana columbia
caactattgctcctaatgagaacctttcgggagatgttcagatggcagatgaaactccagctcagacaattgtgcatgagacggatccagttgatgctacatatgctgtaggttaacaaagattaagggaattttatctggagagacatctattcagctgacactgcagtttctttacagccacaacaaatcggacctgctgatactgaagacaatcaaacagtctgtagagatgcggaacagtgtatgccacagtgctacaatatatgctaatgccattatgcatgctggaactacagtggacactttccttagagagaatttggattggctaagcagggcaaccaatt

SEQ ID NO: 110087 - DNA, 278 bp, Arabidopsis thaliana columbia
  unsure (1)..(278): unsure at all n locations
ctcagaagctcataggggatgaaccagttctcgttcgagatttcatacacactgcattatatgatccaatacaaggctacttctctcaacggtcaaaatctgtcggggttttggagagcgcattaagttcaaccagcttgaagggaggaaagcatacatgaaacttggaaaagtatacagcgaggcatttttggttactcagggacttntaagctggatgctatgggattgcaaacatctggtccaaaattctagtccattaagatatacaaatgggg

SEQ ID NO: 110088 - DNA, 239 bp, Arabidopsis thaliana columbia
cggacgcgtgggcaaaaaaaaaaggaaccatctttctcctaaatctctacaatggctcgatctttatctccttcactttctctcttcgataccgctcgccgcagctttcttcttctcctcattaaacattttatcgactaatcctcaatgcggctaactctaaccattgggtatcacggattgaatcgtgggtccttgtaatagtggagagcgtcccggatatggacgccgaccgacct

SEQ ID NO: 110089 - DNA, 110 bp, Arabidopsis thaliana columbia
gttaaatgagtttgtgtctcgtaacttatcttgagcgaaaagggaaagcaactaagcagaaaaaacgctacatccaacttgtagtatcagaccacccaactggcgtgcgg

SEQ ID NO: 110090 - DNA, 111 bp, Arabidopsis thaliana columbia
aaaagatgagctgatgcttgatggtattttcaatgttttaacctaacttcttttgtgacgacatggggggaaccagagtgggacaaagtcatcaaggactttattaatgag

SEQ ID NO: 110091 - DNA, 202 bp, Arabidopsis thaliana columbia
ggcgcgtgggcgaatatcccaaattcgatccgttttcggcgataatctccgatctagatccgatggcgatgaaccagttctgtgctcgttctgggctgtagcaatatctatttctcttgtcctatgattgcaaggggtatcatgcttgctgctgccaacctttattctccatatggattaccttagcttttgatgctatgta

SEQ ID NO: 110092 - DNA, 376 bp, Arabidopsis thaliana columbia
atctccatctcagcctttctcttctcgtgattcttccaagcttgtatcttcacttcctctctcttatacctaattgcacacaaaaaaaaaaaactctcaaacacgaatcacattaacacgtattaaaatcaaccataaatttaaccaattaacgttaatcacctagccatgaatttagcacgttctgcttcatcccaaggcatggctcgagcttccatagcactcataggcttcttactctccacaaaaccattaaccttctcactattattactctctacccttctaaccttcggtaccgtgttcatgacaacccccaccggcttaccacgttgtggaggcctcaccgggggagtgacagggctcctcccaaccg

SEQ ID NO: 110093 - DNA, 388 bp, Arabidopsis thaliana columbia
ctcgagtttgatctcctcgaacagaacctaaacggttttgttccaaggactgtagctttcattggctctggtcctctccctcttacttccgtcgttcttgcctcttcccatctcaacgactcgatctttcataactttgacatcgacccatcagcgaatatggtagcagctcgtttggtttcgtctgatcctgatctttctcaacgtatgtttttccatactgttgatataatggatgtaaccgagagcttgaagggcttcgacgttgtgttcttggctgctcttgtagggatggataaaaaggagaaggttaaggtggtcgagcatcttgagaaacacatgtcttctggtgctttgctcatgctgagaagcgctcatggacctagag

SEQ ID NO: 110094 - DNA, 111 bp, Arabidopsis thaliana columbia
gtggggctgaggaaaaaagatctgatgggcgggtcatatccattcgtgaaaatcaagctctctgaagataagattccttttaagaagacaaacaggtaatcacaagaattt

SEQ ID NO: 110095 - DNA, 344 bp, Arabidopsis thaliana columbia
aagagagaaagaaagaaagattcaatctttattatccggagatggattcgccaaactgggaactccgtggttgttgtaaccggaatcaaaatactttcctcatcaccatcgagtcttcaccgtagttatccttctgctatggaggacatttctattgactccatttaaactcattacggtgtttttgcacgaagctagtcatgccgttgcttgcaagcttacatgtggagatgtataggggatggaggtcattattctttattattctttttataatatttcgtttctgatttttaaataattaattggttctattctgtatacattttagtccttgttgtttt

SEQ ID NO: 110096 - DNA, 249 bp, Arabidopsis thaliana columbia
ggacgatggaccgatgctgctaccttggccgcaatacatttagaaggatcggattatgccaggggattgcaaaggtgggctgatcatgttctccatgcggagcacaacgtctggcggggcttattttatatgtggctgctggttccctgcaagaggcgcttgcagctctcagagaggtgcaacagcctgatacagtagccatgtttgtcctcgcgtgtcaggagattcattcagaaatcataaccgagc

SEQ ID NO: 110097 - DNA, 295 bp, Arabidopsis thaliana columbia
agaacagcaaatcccggaggtagagccaattacttgggagactttctgcaagtcaaaactgtcggctcttagcgcacaagccgtgcttcgtgtcaccaatgttgtcactgttactgctcgggagggtttggttactacaggttcatcatcttcatcccagttataaacattttctactacaaattttttaaaaaccgtttgctacgagtcatacggtttacatggtattctccggcatggcggcatgatctaccaaattggcaaattatggaccgataaaaagagtgaacgttcg

SEQ ID NO: 110098 - DNA, 300 bp, Arabidopsis thaliana columbia
acgatcttctcaactttaaagagtttctttagggctttgtttgtgttccctcaaaaatcaatggctcttaaagactctcttgcgctcctccttctcttcaacatccttttcttcactctcactactgccactcgcagtaccaattgtcctcctccaccaggaaaacacaacaaacaaaaacctagcccaacacccactaccgggacttgtcctaaagatgccttaaaggtcggtgtttgtgttaacgcactcaacttgttaaacggtttgacccccggaactcctcctgtgactccatgt

SEQ ID NO: 110099 - DNA, 299 bp, Arabidopsis thaliana columbia
gttccaaatttcactcttttcctctaaaacgcatttatcgctttccctcattaaacacaaaaactcattcatcgtcctctctcgcttgacctacaacacccgattctctaatcgaaaccgtttctctctttttgatcagatctcagatctttccctctttgattcttcttccttagatcgattctctctagaaacaacaatggcgtctgggcgtgaagagttcgtatacatggctaagctcgcggagcaggcggagaggtacgaagagatggtagagtttatggagaaagtctccgccg

SEQ ID NO: 110100 - DNA, 299 bp, Arabidopsis thaliana columbia
gtactatccaggcctattaagtcattccgaacatgaactggcggagcgacaaatgactggtctttgaagcatatgcagatggacctgtttgcccgccgtcgaacaaactaagccgggcaagtttccctgaaggttttttatttggcacggctactgcggcataccaggtcgaaggtgcgattaatgaaacttgtcgtggaccagccttatgggacatctactgtagaagatatccagagaggtgcaataacgataacggcgatgtggccgttgatttcttccatcgttataaggaagat

SEQ ID NO: 110101 - DNA, 296 bp, Arabidopsis thaliana columbia
ctctatcatggtatcagagcattttttgcgtttttccagttgatttcatcttcaatcttcaattcttgctcagtttcttcgattattcactcctcttggtgtcgattgttcttccgcgcattcgattttggtgaaaatggtgaagaaaggtgggaaaatgaagaatctcaatgttactcctgacgatggtggttctgttgctagatctactcgaaactcgatgatcgctgaagatcttgaagttgcgagagctcaacaacaactcaatcgaagattcgaagcttctgaggtccgtg

SEQ ID NO: 110102 - DNA, 299 bp, Arabidopsis thaliana columbia
gtggaacttgggattcaaggaacactcctggcaaatacagcgcatctatgcctacaccaacaagcaacggtcatgcctctcgcgtgcagattcaagaaccaagaataatgtctcctcttcctccttcttcttctccaatcgccttcaaggaacaacaaggtagaccacctccaacaacacaacaaaccatagcaggaaaactctttagaactcttttcaagggtcttctcttctcacaactaaccttaatctcacttttggtgatcgttctcaccattcgcggtctcatctcagcaagt

SEQ ID NO: 110103 - DNA, 196 bp, Arabidopsis thaliana columbia
cttggttctgggaatcatcctttatttctgggaatgtgtgcacttttcgagagggaaaaaaggcccaaaaccaaaagaaaaagaaaaggttgtggcttggaactgaatcaataccatcttcatatattcaatacaccttcactattcccccttttggatttttaatatatttttcccatcaaaggtctggtttttt

SEQ ID NO: 110104 - DNA, 227 bp, Arabidopsis thaliana columbia
gtttgttgaactataagctaccaaggaggttgaggagagtcagtcaacaaatgctatcactgagcctgcaaatgaaagtgtagaggcggttattgtccctactgaagctaaaactacggtgacgaagccagcaagtgccataccaaacggacatgcgaaagtccctgaggagaaagttgtgaatgaaaacagtagcttacctaaagctgctgaagcaaaactttaag

SEQ ID NO: 110105 - DNA, 297 bp, Arabidopsis thaliana columbia
cacaaactagtcaatttctcggaaggagttagagagtctgtgagacgtctttcacatgtgacttggatggcagacgaactgcataaagcaacatattatctattcagcaaatctgaccaacgcatatcttgtgttcatacacaaaccgtagagatgcatcaatctggcagtggagctgtaacagcactcatctaccataaaggcttgctctttagtggattctcagatggttcaatcagggtgtggaatgtgaaaatagaaatagctacgcttttatgggacatcaaggagcacaaa

SEQ ID NO: 110106 - DNA, 289 bp, Arabidopsis thaliana columbia
  unsure (1)..(289): unsure at all n locations
actttctacagcttaggaagagttctcgacaagctgattcttcgagttctcgacaagtttcagtgtttttgtttccgggtcacagagaacaaaggcaatttacaataatggcagagactaaacaaccactgatcggtcttaaatgggaaccaaagcttccaggcttatccttagacttgaaaactggttcaaccagaagcaaaacagctgagagttctaagtcagagctttgtgatggtctttgtctccacctaatgatcncaggaagattaacaggattattagaaaa

SEQ ID NO: 110107 - DNA, 298 bp, Arabidopsis thaliana columbia
gtttgatctagggttttagacagagctctctctccttccaaggtcaaaactgtgtgaagaagaaaaaatgtcgagggttttcggagcttgcaaggtactgatggcgaaggccgcttcttccaccggcgctaaaactggtagacaaggtactggcattcttaagggggttcccgtttcgaagccgctcgctaattttattggggaaaacgaagtctctcgcacaactgccgtcaagaaaatctgggaatatatcaagcttaacaatcttcagaatccggtgaacaaaagggagatacta

SEQ ID NO: 110108 - DNA, 299 bp, Arabidopsis thaliana columbia
ggaactgcgagatatgctagtatgaacactcacttgggaattgaacaaagtcgaagggatgatcttgagtctcttggttacatccttatgtatttcctcaaaggaagtcttccatggcaaggactgaaagctggaaccaaaaagcaaaagtatgaaaggattagtgaaaagaaagtttctacatccattgaggctttatgtcgtggttacccatccgaatttgcatcctatttccactactgtcggtcgcttcggtttgatgataaaccagattacgcttatctgaaaagaatatttcg

SEQ ID NO: 110109 - DNA, 300 bp, Arabidopsis thaliana columbia
cagcaacatcattttttaatagacccaccaaggtgtgtgggattatgagggtggctggggcttatgcattggatgacatcataaatgattagaaagctacagaacccgcaggcatcactgactactgtcaccgctaaaccggacaaccaaactcttaacgcgaaaaggacaagctactaattgcttatgaccaacagcgaacacatgatcgacctaaaaggaaaatttacacgcatgtgcatgacgaccacatttaagaaacttaaaatacatcttagggatgaatggatgaaggaaaac

SEQ ID NO: 110110 - DNA, 363 bp, Arabidopsis thaliana columbia
atccggggccgcccacccgtccgccaaatcttttgttatattttcaagaaaatgtttcgttgggggatcattgcctcgaaggggggccgctttttccaaaaccaggggaggagtgcttaaaaagattggttaaggggttagttccagtaaaaaaaataatggaagtgcctaatgggaaagaagaaccagtgaaatggatggtttactggagaacctttttaatcgcggttgctgagcttttcggatccaacaatggaaaaaaggggatggttgcccacttccttttaagaaagaaaggaggaggattctttttatttttttccaatttttcaattaaaaattcaacaaatcccattttacttt

SEQ ID NO: 110111 - DNA, 465 bp, Arabidopsis thaliana columbia
  unsure (1)..(465): unsure at all n locations
aaccgnccggaanccggggggaccaggcgtccgattaatttttttttggggggctttttaaatatttaatttggtttccaattttaataaagggcaccaaattaggttaaccccggtacctgccccaagtttaattttaattcagggtttggttccttaaggttttttaaacaaaatgcttaagtctgcattattagaaccagttttccagtccaaggggttaatgatgcacgtaggtttgttgttttttggctttggcgctctgttttgcggtaacattattttaatatagctcttttggggattacattttggcaaagtcgggccctactttttggaaaaaggaattaaaaaaaaattttttattaaaaggaattattttttttgggtgactttccttccttaatgaaagaaaatttttttttcttacacaaatcaataatttttgttttttttgaaattttt

SEQ ID NO: 110112 - DNA, 392 bp, Arabidopsis thaliana columbia
gggccgaccacaggcgtccgttgagaataattccttcttcttcttcctaacttggttaataatcttcttctccgacctaaacaccgagggcaacaccaggggcttggtaagaaagagatgaattcgtttccatggcgaacctcgccgaccaggcaaggcgttccaaaaaaatggtggaattaatggagaaggtcccgaaagctgttgccaaaaacaaactaaccgccgaagaacgtaatttcctttccgtggtttccaaaaacgtaatcggagctcgtcgggcttcggggggaataatttaatcgatcgaccaaaagggggagtttggcggtaccgatgaccacgtttcgttgttccgggactccagaagcaaaatcgaaccggaccttttt

SEQ ID NO: 110113 - DNA, 288 bp, Arabidopsis thaliana columbia
  unsure (1)..(288): unsure at all n locations
cccccctncccccncaccacccgccctttttttaacctccccccgccgcttaaaaaacaaatttccctaattattgccnttttcatcttccagccaaacccaaaaacaatttcccacccaaattacccattttttttaaagatcctaatcacaaaaaaagccccacaacctattcttccttttatacctaacccatcctatcttcctggggttgtaatccctccacctcctccctacttttaaaacgtccaactctttttaaaaaaatataaattccttctccattcc

SEQ ID NO: 110114 - DNA, 328 bp, Arabidopsis thaliana columbia
  unsure (1)..(328): unsure at all n locations
gggccgacccacccttccgacctacaaaaagtaacaaattttttttaccattatttccttttgttccttcttaacactccgcgaattttttttccttttttggcggtgtttccaccaanatctcaacttccctttccatttgttttttcccttcaaacccttttttttccttcccaatctccttttttcccttccgaatttgctcaacccttttccctaacttccacttttcgtcgtacctttctctttctaaccccatccccatttttttttccctgtttggaaatccattcctcttttatttttttatccatattccttttttttt

SEQ ID NO: 110115 - DNA, 359 bp, Arabidopsis thaliana columbia
gggaaaaaaattttttcccaaattaaaggttttgcttttgcctccttcttctcttcaatgggccgggaaattaaataacccaggttttccaataaatttttgttgaggaagattttttgttgtaaagggggtttaattaaatattgcttccaatggaagttgagcttttttctgttaactttctggtataataaaaattttaccgtttaaaccgttatgttaatccttttttgttttttttcatttccatttttttttgtcttttttttctctttgtttttccttctttttatttttattttttaagttattttgatgtttttttttcttttattttatttttattatatttttttttt

SEQ ID NO: 110116 - DNA, 391 bp, Arabidopsis thaliana columbia
ttttaaatccatcctaaatatctttcctcttttcgttttttctactaccagggaactttttggaagggcccaccgtattgggaggatggcaaaaaatgggtaacaaaacctaaccagaaccacttccaggtaaaatcctaattttcctaatcctaatacccccacccccttttttttttttccacataatagtttttccatttaccacggcccacaggttcgtcccgtcaaagagtccatattattttccaccaaggcttttttttgggtctatcaatccacctggttggttaaatccatttaaaccagccggccattttggtcaatccctttaaaaggaaataaaaattggaaggcattaggcttcaccgttccagttttgctgtttttc

SEQ ID NO: 110117 - DNA, 244 bp, Arabidopsis thaliana columbia
ggaaaggaaaaaatggcaagggggggaggaccaaataacctggattggagaagagaaccgggggccaggggattctttttcctctaccattcaaggtggcttaaaccctatgcttaagttggcaaagatcctttactcaagaggtttttggatcaccataatcaaaacccgcttaaacgcgcccaaattttaagaccatccttttttaactttttaacaaatccgggacggttggtttgaattt

SEQ ID NO: 110118 - DNA, 315 bp, Arabidopsis thaliana columbia
aaataccggggcggccccagccgtccgttcttttttaaatcctttcctttcatggtatttaaccaaagattccgattttggccacggggggtttccaacattcttccggggccggccaaacggttttaaagccttccagcgccctattccaaaaggggggctttttgggcggtggccggttgcccttccgttgtcccgccaggtttactcccaaaagcatttggtttggaccagaccgtcctaggtacttgggaccattttgggggaacacaccgtttaacttaactggggattccctcggagcctccggttggt

SEQ ID NO: 110119 - DNA, 304 bp, Arabidopsis thaliana columbia
gggccgcgcccacccgtacacacaatttacttttttttaaaaaaatattcgaagtttccttatcaaaaacacaaaaatatgctccaaaggcggggatttaacatgtagggaagcgacccaacttatggaacaatgaatcaccccataaccccttacaccaaaattaacttcccacaagccttaaacggaattaaatatgttcattttatttttttaaaaaacgaccaacccaaccaagctcttttttttgtttcaaaagccctgtttttccaaattaatcccttttttattaaccatccaacct

SEQ ID NO: 110120 - DNA, 311 bp, Arabidopsis thaliana columbia
aaacataaaaacacagggggaggctttaaacctggggggggggggcaaaattggcaccttcgggaccgtccttaccggaggtgtgcgttaaaaggttcgcccgtgaattcctccaggggggggaggaccgggacccttgttttccctgttgttttcggccaccacatccaaattgttcccgttcacgaaggcgaccatgactttaacgggtctatcaggggttggacctccccatgggttggaagggggggggtgttcagggtgggaatggggtttttctttttgcctaaaatttttccttattaggcctt

SEQ ID NO: 110121 - DNA, 305 bp, Arabidopsis thaliana columbia
ggcggcccaacccgtccaaatggatgaagccatgaccaacccattattttcaaaagggtttaacccttgttggggtcccggggcctgtaattaaggcggggaacttcgatgggatccttaaaaggcaaggacctgaaattgccaaagtcctaactcttgctatggaggccccaatttgggaggaaggaataactcggccgatgtatccacccttatagtggcaggggttcccataccaaattggttctacctaaaaccccggaggtggtggatattatacggtggagcctctgatccaccttaag

SEQ ID NO: 110122 - DNA, 388 bp, Arabidopsis thaliana columbia
  unsure (1)..(388): unsure at all n locations
ccgnncngaaatncccgggcggccccagccgtccgaaaagaaaaaaaaagccttcttttttttttccaagtttgagaattttttccaaaaccaaagattggtttgtttttccaactgggcattttttttgaggatcccacttccggattttaaaggatcatttggaaggtcgttgttaagtttacggcaggcccaagttgactaataaacagtcgtttccggaggtagtagccaccacgggccaagccccatggaggttggcctagattcgtttaaaagccaagtcgttgggaaattaatcgatctaaacgttttttaaaacaaccttttttttttcgaatggatcggaaagcttcttgattctttcctttgtgtgaaagaaaagttt

SEQ ID NO: 110123 - DNA, 199 bp, Arabidopsis thaliana columbia
gaaggtggggacctgaacagaaaggttctttttcttgcggaacctaatgtaaagaaggagtttcgttttgtacaagaaacggttgccaccattgcggtttttttttctcctaaatcagggttctataataatttgggggtggttggaaagcagttaatgcttgttgaacttccatgggtgggtaaggctcgaattgttt

SEQ ID NO: 110124 - DNA, 450 bp, Arabidopsis thaliana columbia
taaaaacattgttgttttttttttgcctaaattaacaactaatcggaggggttaattaaaagtttgggccggtttcttatatttaaacacctatacttaagtgttttaaacccatttgaagaaacctgatccttaaaaaccaaaatggttcctattttctttatttccatggaatctttaaattgctcaaatttcccccattggtagaatgctttttacccttcatttgaacgttacctcttaaggttttaaaattttgtggattttctttaatgccaaatccccaaatctctaattattattcatctaaatctgttttggatattaataagtttcccataattctttctttgatggttccctttttttattacatttatattttcttaatatcctttttttatatttcattaatttttttcatctttcaatttattttcctttttcttt

SEQ ID NO: 110125 - DNA, 437 bp, Arabidopsis thaliana columbia
gggaataccggggcggaccaacccgtccgaactaacaacgccggaaatggccgctatttataaccgccgttgttgttttttaaataatgggtccccggtgggtttccgcctttacttcaatttaaagccggttaacagcccggttcggttttgaacccaaaaaagcatttccaaaaagggttaaaacggttttttaaaaccggcttttatggttccaaggcccaaaataacccgattttttcgacggttaattggtgggggcctacggtttcgttcttttgggtttaggcaaaccggcggagtttttccaatccgattggaatcccttggtccagaacttatccaggaacttatccggggaattgttcggaatttgatctaaggcggtggtcccaaatttgccccctttttatccatataaggaattttcggggttt

SEQ ID NO: 110126 - DNA, 249 bp, Arabidopsis thaliana columbia
atttatccaggaaaatcgggtccgggggtttcatttcattttacagccacttaagggaaagcccggggttcaaatgttcccggagattttaaagtactttgggacctgtggtaaggacaggacccgtattggggattctttttttgtttggatgaaagttaacccttagttcttaaatgactggcaggccaagctctggtttggtttcttttgccttcgggtttatgggcacattgtacctaattgact

SEQ ID NO: 110127 - DNA, 361 bp, Arabidopsis thaliana columbia
cggacccttggggcttatttcgaccgtgtctatttttccttaaagggtttcgccaagttttgaagggattcaattgtggaagaccgggagcaccttaagttgttgttggagtttaaaaccaaacgtggggggggggtaaggttccagcccatggggtggcctaagcttgggttggatcatcctgggaagggagatgctttttatgctttggagtgggtcttttattggtggaaacttgtcattgaaagtgttctaaactttcccagtgtggttttaaataactttattgtcaaattgtcagatttttttgaaggtgtgttttttaatcaatcttgttgtttcttttttatattattcttat

SEQ ID NO: 110128 - DNA, 328 bp, Arabidopsis thaliana columbia
ccgccgtccaaaaagttaactttgtaataattctccctttatttttctccctctggcctaccaaatcttccgctccttttaaaaagcagggcgcctatttccttccttttcaatttaactttttccaaatcttgggccaccacctcttaataaaaccgccggttaaccgttttttccaccgcttttccaatttccatgccccaattttttacctccacttggtttccccccggcccgtcgtatttttttcttcctccttgccaaaaaaatccttaacagttaaaaacaatgtctattgttaaaaccgccctctttttttaacctccaa

SEQ ID NO: 110129 - DNA, 345 bp, Arabidopsis thaliana columbia
gacccagccgtccgtaaatccacctccaaaatctgaaccctttttttttttttttacctccggttccaccctatgccgggaatttcttaaaagtgggtcgcgctaaacattttttgaaccaaatttttaaatcctaatcctaatatcctttcaataccctttttcctgcatataactccttgtttcaaccaaaccttcctttccaaattttgcttaaattaaaaaacctaaaactccttccaaatttaagaccctataaactcttcttttccttatttggtaatctaaatcccccttataaaaaggccaccattttgtcccaattaacctttttttaaaaggttt

SEQ ID NO: 110130 - DNA, 420 bp, Arabidopsis thaliana columbia
cggggcggccccacccttccgttaacacatgtcggaccctaaggcctgttataaacccgccaactttaaacccggttgggggggctgttaattttgggaggcgggttgtccttaatccttacttttccggttttgccaattcaaacttttgcttcctcctaatttctaatattttgggttttaaacttccaaactaaaggccccttgcggccaagtttgaagtttctgaatctaatgtgggggttcctgattactttgggggaaacccttataatcctttaaaccagaacagacccatccttttttgaatcaaaaaccatggttgtaataaggctctttaaaccactaatccagtctttgaaaccataaagaccaaaggcttacctgcctttgtaccccaaggttatttttgggttccaa

SEQ ID NO: 110131 - DNA, 395 bp, Arabidopsis thaliana columbia
  unsure (1)..(395): unsure at all n locations
aaaaangggccgcccaccaaattttttttcccccccaccantttttgttttttatctcataaacttaaacttaaccgcgcccattttaaaaataagtccggactcaaaataatttattaaattttaaatgaatataaaaaccaaacccagtccattatccataaccatgaactaatcaataaaactttccaaatttaaacaccaccaaacccacaacctttcacttttttcaaaaaaccattaaatcaatcttataccctaagccattattaaagtactcctttaacaaaactcaccaccttcctttattttttatacttatcacacaatctctttaccttattctaaccaacaaaaactccaccttttttataatcttaatccacccctccttt

SEQ ID NO: 110132 - DNA, 381 bp, Arabidopsis thaliana columbia
aaaccggggccgcccacaccctacacgtaattttaatctttaaacataaaaccactcttaatccaatccggaaccttaaccctccccgccccattttaaacttcccgcgcgcctcccttaaatcacccttggccttattaattttcaccttcaaccttaaacatgcccgttccaccccctggctccgtttcaatcctctttttttaaaactcaaccacccttcttttttgaaccacaccaagtctaaaacccaaaccttttttcttcttaaaaacctcctaatcaaaacctataaaaccattttggccttctttacctccaacctaaccttacgattcttacttttggattacctttactttctttcccggtttctcctac

SEQ ID NO: 110133 - DNA, 350 bp, Arabidopsis thaliana columbia
ccgtccgaattcctcacaccactggatccaccgttatttttattcaaaaaaaaccctattcccaacgggttagagtttaataatgtgggggggctcttaaattttacggccttgtccattaacctttcctaaccctattcttcctttctttgcctttgattttcaaatattccaaaacttttcttttaaaaaaaacccaagtgttttttgccctttatctcgtttaaatataaacccttcttttcaagtatttccatctttttttattaccaccatttatcttccatccttttattctcatattttcttactttctttctttttcatatttctttatttttatttttttt

SEQ ID NO: 110134 - DNA, 329 bp, Arabidopsis thaliana columbia
aaaccgggccggcccacccgtccgcttaataattttggtccttcctgcattaatttttttgtggttaaccttcctcttgcatgggcaaacattgttaaaacacggggcttgtaacctggccttaagcttaaaaaactccaaattaaccaaagggggtctgccaagcattccaagaagcttaatttgtgaaataagtgaaaaaacccttttcttgttttttctaactctaaaggaattgttcttgaaaaaatgcgttttgaggtaaacaaccctacctttcctttcctaaagcttgttaaagtcaagtttataaaaaatgaaaagataat

SEQ ID NO: 110135 - DNA, 380 bp, Arabidopsis thaliana columbia
ccgggccgccccacccttccaattggttttaatttcctcaaatataaaaagtttttcttcattcctaacctaaaaaaatcggggcctttttaatataaacccggcctatttaaaccaaattgttccaaaaaagattccaaaccaaccttgaaaaaatttatccaaaatccttgaatttaaatttctcccccaccaatattaacccacttttactcctttttctttgcccaattctaatttcaaaacttaaaacctttttttaaacaccaccaccacatcttccaatcctaacccaccgttctttttttacctaacaaccttggaacttctccaactaatattccaaaagaaaactttttaaattcggcccaattttccat

SEQ ID NO: 110136 - DNA, 256 bp, Arabidopsis thaliana columbia
  unsure (1)..(256): unsure at all n locations
ccaaaaaactttaaaccaagaaaaatataaaattttttttacttccgaaacttacttaaccccggtccggtttaaattatatccggccagccactacaaaaccttnaaaaccaaaacccattttttcactaaccccattgcccaccacatccaaaatttcgtttttaacaaattttatcttaattttaacaaatctataagaatttccaactccacatttgatgaaaaaaaccaaattttcaaactaaaaaaccaa

SEQ ID NO: 110137 - DNA, 230 bp, Arabidopsis thaliana columbia
ccaaaaaaaaaaaaaacccctttattttttatcgcccccctccacataaccggccgcttttcatacttttccgggaaagctaataaacctttcccccccattattttaaatctctctaaccacccttttaccaataacaaaaaccgttcccaacccaatttttccttcattaatcccacttacctaacccacccatccaaaaacctcaattccattccttttcaattcac

SEQ ID NO: 110138 - DNA, 186 bp, Arabidopsis thaliana columbia
gggacgaccacgcgttcgataatttttctttcgtgggctttttcaattatttatatggtgtcctattttaataaaaagcagcggaatatgttaaacacagttactgtgccaagtgttatttttattcaggtgttttgctactttaggtcttataaacataatgccttattttgtaatattagtacc

SEQ ID NO: 110139 - DNA, 162 bp, Arabidopsis thaliana columbia
  unsure (1)..(162): unsure at all n locations
ccacgcggccgctgagaatcatttcttcttcttcttcctcactttttttatcancttcttcttcgatctaaacaagggtgtttacaccaggagcgtggttagcaagagatgaattcgtttacatgttgaaacttgccgtacaagcagagcgtttctaataaa

SEQ ID NO: 110140 - DNA, 206 bp, Arabidopsis thaliana columbia
cgggccggccggcgcgttctatcgtaccatgtctccactctaatatcagcttttttgttcggccttcccccactacaccaagaggtttatttacctgcgccaggtgtttttcacacatatttccctcattattgtctatcttattctccatgttatacgtaagatgattttttatccagattacctaatattttatatggttctat

SEQ ID NO: 110141 - DNA, 455 bp, Arabidopsis thaliana columbia
ctctcaatacattcttaatatctctcctccactcgctctttctactaccatggaactttctggaaaggaccaccgtcatgtgatgattgcagaagatgggtcacaaaacctcaacagaaacacttccaagtcaaatcctaatcttccttatccttataaccccaacccctcttctctctatacacataatagtttctacatctaccacggtccacaagttcgtaccgtcaaagagtccataatatcttccaccaatgcttcttttttggtctatcaatccaactagttagttcaatccatttaaaacagccggtcattttggtcaatcactctaaaaagaaataaaaaatagaaagcaataagcatcaacgttccagttatgctgattttcgtagctaagggatgaagtatggtgtgtctcttttgcagctttttatttatttagatatgtgtga

SEQ ID NO: 110142 - DNA, 245 bp, Arabidopsis thaliana columbia
cgacccacgcgtcgaaaaaaaaggagagagagagagagagagagttttttataccaataaaaaaacgaagcgggaacatttcggttctcgggagtaactcaaatatggcaccaacctcattcttggatgaagccttgggtagaaaaaaagtccagatcaagcgaatcgtgaacaaaattagtctttcaagttactttttacaatcgacgcaatggtctcatcgagaaagcccgtcaactatcaaa

SEQ ID NO: 110143 - DNA, 271 bp, Arabidopsis thaliana columbia
tagaaaagaaaaaattgcaaattagaggaagatcttttttatacttgaatgtgagaacaaaaacggcggacattttattctttgtgcgtgtaccatcacaaggtagcataaaccctatgcttcatctagcaaagattctttactcaagatttttttttttcaccattattctcactcttctttaacgtcttccatatttttataccatctctctttatactattattacaaatttctttactttcttttcattatatttcatatctaaatt

SEQ ID NO: 110144 - DNA, 305 bp, Arabidopsis thaliana columbia
  unsure (1)..(305): unsure at all n locations
actctctcttcaatcctttcctttcattgtatttatattcaaagattacgantattttccacagcgccggtctaacaatcctgctgggccgaccaaacaactctcaatccctccagctaccttattcataatgttgtcttctttttcttttatctcttctatctatactttatcttcttttaatttttattcctatatcatttttttttttctctctattctctctatttcctttttttcatttttatacatttctctctttaatttcctcatttttacattattatctttttctctttttttct

SEQ ID NO: 110145 - DNA, 177 bp, Arabidopsis thaliana columbia
taaacataaaaaacaagtggaagctttaaaacttgttttgagagcaaaaatggctacttctgtaacgttttttactgaagtggggctttaataatcatcactttaatactacaagaattggaagaacttgtactcattttttcttttatgctatattttactatatttcaaattgtt

SEQ ID NO: 110146 - DNA, 381 bp, Arabidopsis thaliana columbia
cgtcccaaagaaaaaaaaagctcttctttttttacatgttgagaatttctacagaaacaaaagctgattgttttccactgggcatcttttgaggatccacctcggattttaaggatcatttgaaggtcttgctaatttacggcgagaccaagttacttataacagtctttccggagtagagccaccactagccaagcaccatggaggttgagctagattcttttaaagacagtctctgtaaaatcatcgatctcaatctttttaaacacctttttctttgggggaggggggcttttattctttttttttttctataaagttttagctttttttttaatacttattttaatttctttattttgtcgaccgttgttttatatt

SEQ ID NO: 110147 - DNA, 367 bp, Arabidopsis thaliana columbia
tcattcgcacatatcattaaatacatttttggtctattgtattctctaaatatacaacttatcagggtgcgatactttaatcttttgcgcgatttcttttatctcaactactatactttattgttatcaaaccatatttagaaaccttatcctataaaaccaatattgattcaatattctcttattacatgttattttaataattcgcataattactccattttttataatcttctttctctctcttttaacttttatcttcaattttttattttacttttcatcttttcttttattttattttatttatagttggggggtgtgttttttattttttactaattatttacttatctctatttatttt

SEQ ID NO: 110148 - DNA, 298 bp, Arabidopsis thaliana columbia
  unsure (1)..(298): unsure at all n locations
gnaatgcagcagcagaatctgaaaccatatttttcatctctagctacggtcgcagcctatggcaggtaagcccttcaagtagatttagctgatcattatttgtatcaaaaatttgaatgcttattctcatatcctttcaatttctattatgttgttatgtctctctttttcaatttttattctgtcttttttttttatttattaagtatttctctattttttattttttactttttttttttttttatatatttttaattttttatttttttataatttctttttatatggatttttt

SEQ ID NO: 110149 - DNA, 244 bp, Arabidopsis thaliana columbia
gcttcttttctctctacacctcctgtctttttttttagatctcgttaaccttaaccttagtgggggttctttgaaaattagggggggaatacatattgatcgtttgatctggaatgtatatcataatcaatatctgtacactaccattaccattgactgatccattaatactttccaagtggtacttcgactgatcctgcattagttttgttgttttataatacattgtattcatttattaccc

SEQ ID NO: 110150 - DNA, 257 bp, Arabidopsis thaliana columbia
gtatttttaatcttaaataacaaaacactgattattcaaatcagaaacataagccaaccagggcgagtttaatccaagcgtggggaggccttaaaagagcctgtgacatattaaatatcaactacgaccagagacatggcctgttcaccccctggcactcgctgtcaacacgctgacattaatctgtaccacccctcctttctgaaacacagcaagggttatagcccaaactcttttactttgaaagatcgactcat

SEQ ID NO: 110151 - DNA, 350 bp, Arabidopsis thaliana columbia
tcgcaacgtaaaacactaactaatagatcattatttctggagtgatgaagttggcatgcgggggggtttcttgcatgattggggccggtccaatcacatataactctcttatgagttgtgtcaccttcaacttcaactctttattgttcattgtctattttacctcgatgtgctttactttcccaagtttgctgtattttatctactttctttataattcatttcttttcatccttatattttattaattctttatttttttttttttattttctctctattcttcttattattttttatttttttatctgtgggggggatgtttttatttttatttatttttttatatt

SEQ ID NO: 110152 - DNA, 237 bp, Arabidopsis thaliana columbia
cttaccaccagtcattattttcactccttaccatcatcttctttggcagactctttaccttcattgcacggtttcaccatttctaatcttctacataccaattgacatcaaattctgtcattattctttcaaacactataatttctcttactttgtccataccaaattttcaaccacattataattttttttattttaaatatcttaaatatgaaccatttataacccttcaacata

SEQ ID NO: 110153 - DNA, 362 bp, Arabidopsis thaliana columbia
attggatgtgatatactcaaatataaaaagattgacttcattccttacctcaataaatcgggggcagatttatgtagaacatgtctagttaaagcaaagttgtacaaaagaggatacaaaccaagcttggaagaatatatgcaaaatgcttggatttcaatttctgccccaacaatattgatccacttttactgcgttttctctgaccaaatctcagttcaaaacttagagactttgtctcaacaccgacaacacatctttcgatgctcagccaccgttcttcgtttagctaacgacctttgaacttcgccaactgaattgaccagaggagactttctcaaatcggtccaattttacattca

SEQ ID NO: 110154 - DNA, 194 bp, Arabidopsis thaliana columbia
  unsure (1)..(194): unsure at all n locations
catacactcttgattccaaaccatacttcttttatttttttantctctcttctgatcttctagggcgagttatatataatggcggctgtcactactcataccacanccttaatttttctaccatttacttcaaagccaacattcctcacctattcttctcttaatttaaactcttacccttcatcttcatcaat

SEQ ID NO: 110155 - DNA, 235 bp, Arabidopsis thaliana columbia
agaaactttaaaacgagagagagagaaagatatgtttacatccgcaacgtacgttactgaggttgcgttttatagatctgtggggaaacactacattatcttttatagctattacctaattttttccttctctcatttccacctcactcaatatgtctttttctacatatgtctttcttctcttcctattaatttcatttttcattttttctacttcttaatattgtttttattt

SEQ ID NO: 110156 - DNA, 400 bp, Arabidopsis thaliana columbia
  unsure (1)..(400): unsure at all n locations
ggagagagaagagtataataagactctcttttagcaaaacagaggatnttcattgtgtgtgcttttttaattattacggacccatcacctcgnntgcctctacttcgacaatgttctgaaacaaagaagaagaggatcctcgtattcatggaatcaaaactaagatccgtgtctctccatattttcccaagaaaggaattttgtttcaagacattacaacagtgttgtttgatcctaatgccctcaaagacacaattgatctttttgttgagaggttcagagacaataacatctcagtggttgcagggaaagaatcttctttgattcctattctgtccacccatcttcctatccatttgagccaaaattttttcctcttcgcaaacccaaaaaacttcct

SEQ ID NO: 110157 - DNA, 309 bp, Arabidopsis thaliana columbia
  unsure (1)..(309): unsure at all n locations
accaaaaaaaaaaaaatacacatttttttttatggccgcctccacaatntctgtcgccttctctaactacgccggaaagactaaaaacctttccccctctgcatttttaagtcctctcaagctacccttttacaattatgaaaactttttccaatccaaattttccatcattcatcccattttacccatcctacccaattaagtacttttttccattcttcttcctgtcaccgatctaccctaccttataatttccccgaaacttcttattttacacccctttactttaaactgttcccgatacattct

SEQ ID NO: 110158 - DNA, 219 bp, Arabidopsis thaliana columbia
  unsure (1)..(219): unsure at all n locations
tcaaccaanacaanaacaantacaatactcctaantatcnttttcttttcctttttaccaacaaatacatattttcacatattctatcttcaaacattccttntcacattnttaaaacttcttcttacccacatnaactaccttactataatctcactttttntcttacaaactattcttcaacttactttacttcccttcttttttcttcccctcttt

SEQ ID NO: 110159 - DNA, 311 bp, Arabidopsis thaliana columbia
  unsure (1)..(311): unsure at all n locations
aaatacaccaattactaattcttacttcattttttttttaagtaaagtacaaaaaatcaacttcttttaacaaaaactacgctgtctgcttccatctnatcctccaaaacaactacacgttcttttctcctacttatctattctttctcctccttaccatcatatacattattctctatattctatcttcaaaccttattaaactcattcttaaaccttctacttacacacatctacttactcagtatctttacacattatttacaacaaactatcttacattttactaacctatcctttttttacctctc

SEQ ID NO: 110160 - DNA, 410 bp, Arabidopsis thaliana columbia
  unsure (1)..(410): unsure at all n locations
cccgcgtacaatcgatctaaaacactgaatcaaacatttcttttattaaaaaaaaaaanaaaaaaacccgccggaaaattacaaatcttcgtttcgcctcctataatcantanttttnttttttctcctctccccatcatcatccactaatatcttattctatgactcaaacccaatcctaattgtctccgatggtcttcccaacctaaaaaaatctcttacccacatcttatctcaatctcgccaccccctctctttcgctctctttactcacctttatttttaaaacaaccataacttctttttttttaaccttcccttctccacnntcaaccacaatctttatttcatcacatccaccaacactaaattcttatcttacctactctttcttaatcaattttcttatt

SEQ ID NO: 110161 - DNA, 334 bp, Arabidopsis thaliana columbia
  unsure (1)..(334): unsure at all n locations
ccgctcttctaattattcctccgccataactacatttcttattctctcaaaaaatacacccagcgcgacaacaaatattcgtcgtgggcctcctccaacnacttcaacttcntataaattccattttctcataatccaacaccaaagtttcttctctcttccccacggcgtctactatatcctccaccaattctaaaccctctgttgtcattatttccaaaacctcctcataaatctaaaacatattatcccataccacataaccaaatcatatgctcttttactaccttaaagaaaacaatctatcacttttaataaacaaattctaatgtat

SEQ ID NO: 110162 - DNA, 289 bp, Arabidopsis thaliana columbia
  unsure (1)..(289): unsure at all n locations
gtccganccatcaatccacaaattttcttcacatttttttttttttcaaacacaaaacaaaaaccgccccgcacatttaaaaaactcttgtccctcacaancatccacaccancaaaatccaaacttcttcttttacatcaccccatcttacacctcactcacccataatcactctttttttcaccaccttatctactccacctacaatcccttggaccactaactccttctcactagaacctctctcctcaccatcttttttttttttcctccttccttcccccctcc

SEQ ID NO: 110163 - DNA, 405 bp, Arabidopsis thaliana columbia
caagaactcaaagagagatccatcaattagattcactaatttctttagaaatttcctgagtgattgcttacaatagcagtgtctgttacaacaacaacaacattgtcgttgttttcgacttcgacaagaccatcatcgacgttgatagcgataattgggtaatcgatgaacttttcttcactgatttgttcaatcaacttctccccaccatgccttggaacacactcatggaccgtatgatgaatgagcttcatgatcaatgcaaaaccattgatgagatcaaacaattctttagaacaattcgcaattgatgcactttttgtcctctgtcatcaaatctttcacaatgatttagggttttgagctttattgattatctatcctaatcttatatattcttttttt

SEQ ID NO: 110164 - DNA, 258 bp, Arabidopsis thaliana columbia
  unsure (1)..(258): unsure at all n locations
tttccttaanccattacctcttaaaccatccaatccttttatttcaactctattcaaaccacacatttcttttctttaaatccctcaaaatacacaacactttcaccattatctctttatacttttcttactttttttatttcttatttttttttatttcctatttcttactcttttttttaatttccccttttttttattaaattttcctcccccccccatggctttcaaaactccccctcaatccttactttttca

SEQ ID NO: 110165 - DNA, 176 bp, Arabidopsis thaliana columbia
ataacaagaactataactttactctcactcaatatctcctttttcgaaaacacaagttgcgcactaacaatcaccattaactttcaactccttatcttataccaattattctatcattccacttttttttaaacctccgacaatataaaccctccccagcgcaaccaccttcacat

SEQ ID NO: 110166 - DNA, 282 bp, Arabidopsis thaliana columbia
  unsure (1)..(282): unsure at all n locations
aaacccgggccggcccacgcgtccgctttggtggcaaacacaacnacagaatgatattaacgatggcgtcnaactcncttgtgagcgttacataaacgacttgttcgctgcgcttntntcttcttccaagtctaaattcgtatccgcctgagttccactcccaaactccgggaatgttggtcctatcacaatttctgctcactcgatgccttgcgatccacaaccagcttaccttgactgttctgctcctcctgactctctcttttacccactttaacttta

SEQ ID NO: 110167 - DNA, 190 bp, Arabidopsis thaliana columbia
  unsure (1)..(190): unsure at all n locations
tccccaactccaattannctttttttttttccatcagccaacacacaatcgctctgttatattaaatcattctcctgtcaaannnnacntttcacaaccattnctacatacaanntcaaattcatcacaccaaaacntnaactanaattttattcttactactacttctaccttctttattcttcttaac

SEQ ID NO: 110168 - DNA, 257 bp, Arabidopsis thaliana columbia
  unsure (1)..(257): unsure at all n locations
tctcacatcccctctaaacatacctttttgttgttctagacataaaccananatctacactgttataaatcaacttttgtgtggtncnatnacttnctcaacacnncaatanaanattcatataaagcattatatttatttaaccaaaattcaattataacccttatttttaccctttcatttttcactcaaaataccacctcaaattccatttttttttctattaaatttctatttttaatcccaaaaatttcttt

SEQ ID NO: 110169 - DNA, 344 bp, Arabidopsis thaliana columbia
acttggtgcaatgggggcaacaacacaaatttatatttataaattctcagcagcaatagcttgtcagcgcaacaaagcaaagctgttgcgtctatcaatcttcagccttttcttcttcgatttcacaagtttcatcatctcgcttatgcagaaaattgtatcatgtgcacaagaggacaggttacaaatcatatgtaagttgcggaacaatgttctaggatcaccaaaagctaatcccagatggatatgaggtctggagatagagaattcccaaatggtgatttctattcttgggaagtgaaaggaataattcctaatgggaagggaaagtatgcatggtcaga

SEQ ID NO: 110170 - DNA, 320 bp, Arabidopsis thaliana columbia
  unsure (1)..(320): unsure at all n locations
gtcccgcccacgcgtccggctctaatcaccaggagtaaaaatggcggtttcttttcttacgaagaaggtggtgaanaaggggggtgccaaattcatcagggcccggggtgatcgcanaatcaccgtcaaggaaagctggaggaggcctaaaggtattgactccccggtgagaaaaaagttcaagggtgtcaccttgattcccaatgttggttacggatctgataagaagaccccgcccttccttcccaattgatttaaaaaagttatttgttacaacaacttttaacttcaacttcttattaatcacaacaagacttact

SEQ ID NO: 110171 - DNA, 401 bp, Arabidopsis thaliana columbia
  unsure (1)..(401): unsure at all n locations
cacaactccaccacgagagtaaaaaaaaaacttttttttacaaatctaaatggcnanaattgcgcgcaacacaaacactcgcgcgccctntcctactccaatctcaacccnccntcaccccttcctcnntctctcacctccacacatcccttcccactctctctccctccacatcacctacttcctacaccaaacctcttcctcctttcaccctcccttcttcttcttntctttttaaaaccacccaattttttatcttcaacctccattatcttattaactttactcatacccnatctatctttcctattaccttttatctctctttcttccccatcaaaattattcatactccttcttctccctactatctctatctattcccaataatctttaaacct

SEQ ID NO: 110172 - DNA, 288 bp, Arabidopsis thaliana columbia
  unsure (1)..(288): unsure at all n locations
aaaaaaannnnanaaaaaaatttttttttttaanaaaaanaaaaaaaaaaaaacgattgtaaaaaaaaaaaaacgccgcccccaaaaaaanacnaaaaaaanacnannatctctcttcacctcaaaactattaactacaaattccctcaaaacacatatttttctaataacnaaatttcacaaaaataaaacccttttcacaacaatattccnaatattattcacacttacaaacctaaatataaatccaacatcataactcaataaataaactatncaaaaaactat

SEQ ID NO: 110173 - DNA, 339 bp, Arabidopsis thaliana columbia
  unsure (1)..(339): unsure at all n locations
cccacgcgnacgactctacctcccnatnaagaaccaatttaacttacctcangccgatgatctncacgtgcgcgctacaaaaccaacttgcgtcgccnnnanacanaatcatnnctactttttcaacaatnnnaccaaaaactaaacttcccctcttatttaaaaccttcccnatttttactttatttttccccttcaaaaaaaccaaacaaaatttcccccctattttcttcctttttataaccccccattttattccaccccttttnttattaataaaatcattcttccctttaacatttaaatcatttttattactccctcacccatttatttttt

SEQ ID NO: 110174 - DNA, 440 bp, Arabidopsis thaliana columbia
  unsure (1)..(440): unsure at all n locations
ggcagaganacagagctcatgttaacgcgtgtttctttatgaggatcttaacacgacntgcggcggggttacaaaaagatggcgtcggggcatcnnnnaacctaacaataaccgccgtggagcacaattacttcaccgtgaagaagctgatcaagaagaggaaaggactgactcctcgcgagaagacggcgcttcatgactgtttggagactattgatgagacgctggacgagctccatgaaaccgtggaagatctccatttgtatccaaccaaaaaaactctccgggaacacgccggagatctcaaaacactaattagctccgccattaccaaccaggagacttgtctcgacggcttctctcatgacgacgccgataagcaagttcgtaaagccttgttgaaggggcagatacacgtagagcacatgtgcagcaacgct

SEQ ID NO: 110175 - DNA, 431 bp, Arabidopsis thaliana columbia
  unsure (1)..(431): unsure at all n locations
tccgcctcaagaaaatcaaagcagcagttatggctttcgttttaacaaagcaccccatggaagatgaggtgaagaatacggaggctgctggtttggtggnnaagctagagacagacgtggagatcaaggcttcggctgatanagttcaccacatgttcgctgggaaaccacattatgttttcaaagcaagtccaggcaacattcatggatgtgatcttgactaaggctactgtgtcacaatttgctttatcgtctttttgaattaccttcatgatgtggagtcatatgttgtatatgatattatttttgtgttttgtgctgattttatttttttacctttattattttttatggaattttcatattgtatattaattttttttttttttatttatgtttttttaaattcttatttttttttttttttcatt

SEQ ID NO: 110176 - DNA, 344 bp, Arabidopsis thaliana columbia
  unsure (1)..(344): unsure at all n locations
aagaatcacatttacacatcatttatgaagaagaagancncanccgtggaccgcaaaattttaatgcgggggccggacaaatccaatactctnaaccaactacccactcatgtcgctctttttagcagctacactgtcattatccgngctgatccctacctcctatcctatttctcccattccaaagatgagctcaagatcgatttctaaatgactctttcaattttcagcgttgaatccctcagatacatacattatgaatcaatggaagatatctatcttgaatattcatcctgatgactcttaaaacctgaatttccataactctaaggcatctatttctt

SEQ ID NO: 110177 - DNA, 407 bp, Arabidopsis thaliana columbia
  unsure (1)..(407): unsure at all n locations
acaacaaccaccaccccnnataatcctttctttttacactcctcctccaacanacccgcaccgttacaataaccaaccgctcctgccnaaacatnanctactccaccaccaccacatatttttaatcctcaatcttcaacacctccatcatttcaccctcctacctttttctatatcctaactctttttatcttnaacttacactattctatatatcataattttctctactattacttttctcataccaaacacatcctttcttctaaattcattcttaacaatcaaacctttcaattttaatcatactctttcattttattcccatctcattctccttcttaaaaatttttacaaacattcaacaactctcctatccctaacttttctcatcatctttttaaact

SEQ ID NO: 110178 - DNA, 337 bp, Arabidopsis thaliana columbia
  unsure (1)..(337): unsure at all n locations
catacaactaagttaatttaaagaaatcttttatgaaattctttataaaaaaagaacgaatgggttatgttgtattgtggtcgggttttccattccctaanaatgaagtatcggtgttgagattgcattattaggttaatgcaactctcataactttgaaaaaggttaagaaggatgaactttttcttttatcagagaaaaaggttgttctcttgttcttcggatatactctttctaaacaaaaaaaaaattgtgggaggtttgaaattttaacttctttcttgattttttaatgcatgtatatgttgtgtggggggaaaaaaattccatttgttct

SEQ ID NO: 110179 - DNA, 447 bp, Arabidopsis thaliana columbia
  unsure (1)..(447): unsure at all n locations
aaaaaccgggccggcccacgcgaaacaaaactaaactcactctctttctctctctatttacaaagctcaacaataataanccggtccggaagattttataagctggtcggctccnnaaatttacttacttaacaatcatggcgtcntcngagggattagcaagcgttgatccttggtcattccgtcaaaacttcaacatcgattcgtggctactctctgattccttctcacacgacagtgatatactcgctaaagctcttcacagatccatctccacttccaccgaatcatctcctctttctccttcatctttcttcgactcttcaaccgccgccgtcgatttttctcctcctcaaactctctccaacgtctctttcggctcagatccagaaatccccgccgctagtgctcttggtctcgggaaacgaaaacgtggtcctggtgttt

SEQ ID NO: 110180 - DNA, 351 bp, Arabidopsis thaliana columbia
  unsure (1)..(351): unsure at all n locations
aaaaaccgggccggcccgacgcgnacgaaaataagaagaaaaaggagaagaacttttatttttcaccaagaacgactnnnanccgcttggttttaatataaattgtgttcgtccccannaaaatnactactaacacncacaacgnaacccaccaccattgtccttctatttctcttattccacccatcaataattttatttttttcaagttcctatctctttcttttcttatcttcagataatcacaaactcattaatcttttctacacatctatcttcatttatataatattatcttcttattttcattaatttttttactactttttatttctctcttcttctaatttt

SEQ ID NO: 110181 - DNA, 434 bp, Arabidopsis thaliana columbia
  unsure (1)..(434): unsure at all n locations
gcgtccggntgcacaacaacacaaacatttatcgaaaattatttttatcatgactcatcttncgntttggctggacaaatttctctgtgaggtgggttacagtagagggaagagaactcttgtgtattgccataactcttccaaaactcttttttctttttgttattgttagtcattgttcttaaaactcctactcgatatgagctttgcaaatttgcctttgaagaaacaaggccctttgcctttgaagagacaaaaaaaaaaaaaaatattatataaaaaaaaaaaaaaaaaataaaaaaaaattaagttttttgttttgtggttaaaaaaaaaaaaaaaaaaaaaataaaaaaaaaatgtaattatatattattaatatataatttaattatattatttattttataataaaaaagggggtctttttttaa

SEQ ID NO: 110182 - DNA, 164 bp, Arabidopsis thaliana columbia
  unsure (1)..(164): unsure at all n locations
aaatgtttatcatatcacanctnctcttcaaacacgtacttcatcccacaagaaatctttttaccccntccaaaccattaaacancgcttcatcaaattcaagaaggataaatactaaaccaacccttctttttaccttcagcttccaaaacttcaaaatccta

SEQ ID NO: 110183 - DNA, 365 bp, Arabidopsis thaliana columbia
attcttttgtttttaatttccaattggttttgtttaattaacaaataacaatcctcttttggttttggtttttctttgggacccaaggtttttttaaatttgtaaataaacaagggccgccaccattgagaatttccttaaactaaaatccgccgccgatggccttactgggataagtgaaagtgaaaaaagcggattaataagccgggtttaacgttacctgagcgggggggcccaccacattggggggggtaggatccaaactcctaccgttgaaatcgtggttccttacaggaaaatgacccctgtttccaaggaggtggccgggcccaaaattttgtgggccaaacttgtggggttgaagc

SEQ ID NO: 110184 - DNA, 329 bp, Arabidopsis thaliana columbia
ttcgatggtaaaaaccttagatcgaaattttatttttttaatcggtggtaccagtccgaggggtaatggggttggcataaaccacgtggccgccaaagtccggatatttttttgggggtccgttttttccgtttttggttggccgatttccggttggtttttttccgatcggttttggaatcgtttccagaagcctggtaattgtttggttggttaacaagaatcgcaggtttgtgattgttggggggggaaaggctgttggttttgctgttagaactttgggggaaaatggaagggctgatggtcggttttgcatggggaccaagggg

SEQ ID NO: 110185 - DNA, 369 bp, Arabidopsis thaliana columbia
ggggaggcttttgagtggaaattaataataattggtgaataacctgttggttgggagagggttttacttacatccacaccagagtttccaggggatgccaccagaaacctgtaacagaatggttttaacgcctttgttaaagtggttcccggtttcctggggggaggggttgacctggcataatccaacatgacattgttgaaggccttgggggatttccaaagggccaaacttgaggaaggaaattttaggttgggggttggggggcacggaaggggagccatttgcaatggaatggcctttaaaagccccggtttaatccttaactgggcgacgttttttgttttaaccgattacttgggaggggcc

SEQ ID NO: 110186 - DNA, 458 bp, Arabidopsis thaliana columbia
cccggcccgaattccggttggaccaaggcgtccgccccgcgtccggtggcaggtgggggggcgtccttatggagcaaaaaggtgcgtccatggtttttggaaccaagagattaacacaaggttaaggtccagttggttttcaaaggaggggttcccgctgtaatgggggttttgggtcccataaagttgccatacccaacacgtgctttcgacatggttaatggttttcggggttggattccatggggagcaaatgatgggatgtccttgatggaagttgacgcgttgcttaaacctggggggtactggattttgcttggtcctccaatcaactggaaggtcaactccagggcttggcaccgtcccagggaggaccttcaggaggaccaaagaaggattgaggaagctgttaaactttttttggggaagaaaaagtttgaccacggggggattgcaat

SEQ ID NO: 110187 - DNA, 405 bp, Arabidopsis thaliana columbia
cccggcccggaattcccggtccgcccacacccgtccggaggaggcaggggtttccgccgcctccagcatttgcttaagggctgaaaaggagccagtggattggaaaaaccaggagctggccagttcaatagtaaagccttaacaaaaggaggttccggttgttttaagcaaaacaggccccgaagttgattcaggaggtccctccgaaagggttggggcaggacccgagatagttattggtaaagaagaggagattggaccgattgcaattgagccaaatggaggggaagggttggggattggggcaaaaaaaaggtgaaggattaccagggggcgccttacaaagtgtgcgtgtgggctgtcccatcaaccggggttggtttgtgaatgatttaaaaagtggtt

SEQ ID NO: 110188 - DNA, 229 bp, Arabidopsis thaliana columbia
cggaattccggggcggaccacaggcgtccgaaaggcctttccaaggcctttttttcgaactttttttttaccgttcttaacggtggtttgattaacggccttaataaatcgggggatcttttttggggccgggtccttaataaagctgcctgggtcttccatggtttattcctgcgggggtgggagattttcctgtagacctaccatgtttgttccctgtatggtgttt

SEQ ID NO: 110189 - DNA, 409 bp, Arabidopsis thaliana columbia
ccccacccgtccgacctaatttccggtccggtttaatttttttttttttggattcctctttaaaggagggcaaaaaactgtaattaaggcggggttctatgggatttttgggattggccctttttaaccaaacccataaccgtggccgggcagatttttccggcggggggttggttaacctttggggactccaacttgaacgccggaaccaaacagattttaaccaaaaccttactccttaaaactttttggccgtttggaaaatcccgggaggaccccaacggcaaattttccgccggcctaatggttccagacttcctggttaaattcatgaggattccgttcgggatcccgccggcctcttaaccgaacgtaaaggtttaacgtggggctagtttcgccgcccttg

SEQ ID NO: 110190 - DNA, 288 bp, Arabidopsis thaliana columbia
ttgcccttttggggccaggtcctaaggcttaagtttggggggttgttttcaggaaggggaggggattgaaggaagcgatgactccattttttgggttcgaagccaggttttaagcttaaccaaaactggtcctagcctttttcccaagggtggctcctttttttatctaaatttggcctggtttaataaatcctctaatggattgacggatggggaaaatttttttttggccatcccctgaaggtttttaacttttttcctagtggagaactttgttatggggttcgc

SEQ ID NO: 110191 - DNA, 359 bp, Arabidopsis thaliana columbia
  unsure (1)..(359): unsure at all n locations
gcccacacccgnccgaaggtcgaattcgccgaatttaagtttttttgttttaaaggagaactccatcctttcctgggggccttttaaaaatgcctggtgaatttaatcaaattcaatgttaaggtaaccaaaaatggttgccaaatattattcaacgacgacttaatttattccaaggaccagggaggggtgaccaaaaggagggtaacggaggttggcttgtcgaagttcagtgcctacgggccactaagggatccaggcaagacaggaaagcctttgctgagaaagttaagggaggggaagatccatatgtggggctgtttacccgacaactttttttgtcctttcaaagaggcttt

SEQ ID NO: 110192 - DNA, 375 bp, Arabidopsis thaliana columbia
ccggcccggaattcccggtcggaccacacccgtccgttcacactcgtggacccaaattttggacccttttaaattggggttttttaaatcgttgcccctcgccggcgtttggcgattaaccgtggggttaatattcccctggattaatgctcggtcctatatcggttgggataagaaatctggattggaagctgctctaatgggttcctttggctgggtgggttccagttttttggctgttcgactgggatctttttttgcctaaaaggtggggttagcatctaacttgtattgttgacccggccagttcgttggccatggagtttttcggaaccggcccccggccctgttagccaattacctccaagttttttt

SEQ ID NO: 110193 - DNA, 411 bp, Arabidopsis thaliana columbia
ttggggaatccttttttaaaagccagggggttggaattatggcaaactttaaaggaagcaatccatgctaccacaggtttttttccggtggcctttttaactgttttagctttggccttcgccatttaccaagtaatttaaggctggttggcctggccgttcgatgatgttaaccgccttaagagagttagatccttggttaaggagggggggccaccgtttcttaagcctgttcaggtcggggggatcacgggggaggagcttaaccagtccgagggttctgatcctaaaaggcccttttttatggttttcaaccataagatttttgatgttccacaaggcaggatgttttacggaccaggaggaccttttgctttgtttgcagggaaagaccctagccgggcttttgca

SEQ ID NO: 110194 - DNA, 211 bp, Arabidopsis thaliana columbia
  unsure (1)..(211): unsure at all n locations
ccggaattccgggacggactcacccgtccgnggaaaagacaaaatcaagggtttcgccgttttttttactggctgggcctcgttggctgatggggaggcgaaaatggcttgattcaggaatttgcaggattgcttgaccaaagggccaggaaccattgatctaaggaggatgaaggggggcctatacctctttttttttatttttagccat

SEQ ID NO: 110195 - DNA, 304 bp, Arabidopsis thaliana columbia
gattcttttttggcgaggaggagcaccgccttggcctgctggaccatgtccgacctttcaaccgttttaaacagggaggatggggccggcctggtaaatgctttaaaaaccaggtggcaaatttgggttggccaccactttgatgtcctggaaaactggattccaccagtcaggaagcgtgtcaggtttttaagagggattcagacccattttgaggggatggatgcaaaattttttggggagagggctagtttggaggttatgtattaaaggttattttagccttattttcccaagcgatttg

SEQ ID NO: 110196 - DNA, 329 bp, Arabidopsis thaliana columbia
ggccacagttataactcggctcggtaattttgcctttacctcagggaatcagagccggagggggaaagagggagggggagggcgggggaaagggaaatggaaaaggctttaacgaaggggccgggctttaaggggggaggtcaagggatctttaaaaaggctaaggaagagctttaaaacataaccaaggccctaactccattttccagtccggtggaggggaaggcaaaagggattttcaccaggcttaagggaaaaccactgaaaggcttcccagacctcctaaaggaatccactttaccaccaggacttttcccacaaacaataat

SEQ ID NO: 110197 - DNA, 402 bp, Arabidopsis thaliana columbia
ggaaaaaatccgcttactttttccgaccgttttttaatggatcggaaaaccaacaccgccccattattcctttccggtttttggcccaacccttggtggcaggtttggattttggggagaaaattttttagggttttgaaaagaaggaccacgatgttgccaggtttggaagggttgggggaaaagggagttttggttgattttttaagaggatggttggagggtaaagggggcaaccgggttcagttttccgggggcgggattcgtaaactttgttttaacgcttggaaaattttcttttttaaacctaatttcctggatctccatgccccaattcgaatttgcggggattttaatggccaatataaagatcttttggggttgtttgaatccgggggtttt

SEQ ID NO: 110198 - DNA, 152 bp, Arabidopsis thaliana columbia
gagaaacggggccagaattaaaacaatatttttccgtttaaacccgaggttggccaagcagttaacaaggggggttgatgatcctggcccccattgacttgttgaagggttctccaatcgacgaaagtttttggagctcttgaccaaggccc

SEQ ID NO: 110199 - DNA, 357 bp, Arabidopsis thaliana columbia
gcccacagacctggttttttaagttgatgaaggatgccctaatggcttaaaagcaaaagggtttcgatgggttcaacgcgtgggttgtgatgcccaatgggggtttttggaaggaactgaagttggggccaggagatggccaccttaattcctatttttccaattcccgttggaaaggggccttgaagccagcggacctcgggcttgttttttattaagctcaacaccttgttttgatggtttcaacaaacttgaaattggcctttcttttttttttttaagcttgaactacttctcccatggtttactgaaactgattttaattatttgggcatggcaatttgggattttgttttt

SEQ ID NO: 110200 - DNA, 203 bp, Arabidopsis thaliana columbia
ccgcccgccaaaaaaggcccactatataaactgtatgttaatttctctaatgctttcaaaccaaaaagggggggggatgtccaactcatggaggggccaccccaatgaacgttgttgaaaataacgtaacttagtcccggcaaatggacaattcaattcctattttaccaattcctgttggaaaagggccttgatccccccga

SEQ ID NO: 110201 - DNA, 404 bp, Arabidopsis thaliana columbia
ggtcctttaataatgcagtggttaagggccattttaacctttgggacctccgttttgcagggccagttggttgaggcctgagggtttaatggaagaaaagccggttttgtaaggtccttgcacccgaacccgaaaatttgggttcaacctctttggttgtaaaactggtcgaaaggaaaggttggtttttttttgccagattttgggcccagtttgggggtaatctgctgttttgattaaactttgttttggttgggtaattaatcctaatcttggtttttttctttttcaaaaaaaaaaataaaaaaataatataaattatttatattatatattttttaatttaatataattttatttaatattattaatattaatattaaaattattggggggggcctttt

SEQ ID NO: 110202 - DNA, 369 bp, Arabidopsis thaliana columbia
acccgtccggttaattaattctaagtaaaaggttttatttttggtgggttaccaaaacctaaaggcggggcccatgtgtgatggttggttaaattgaacctgttccttgcccaatattgccggtggttcttgttggactgtttaatggcgggaccacgaaaattgctgtcctgctggtatcttccggttgatgaacaaatcggtaggcttttcctaacactggtggaaaattcttaagggtaaacagttataatggattcatgagaactgattttaatggaactttgggtcaatattttctagtttgggataaagtacatattttacagggtcttttattatgatctctaataatttttgtttataata

SEQ ID NO: 110203 - DNA, 340 bp, Arabidopsis thaliana columbia
accacaaccaaaatcaattaattggtttttgttttattgggtaactccacagggcctaagttttatcagggccccaggaggagggccaagaaggggggtaaggtaaagccgttaaccacccagacggttttacaggcggttttgcttaagggatcggttgttttaaggttggatctaaagactcaggttagattcaggatggtttttgggaaaactaaaaggtttggggttgaagttggggtcttttttgaagtcaacggtgatggagttaaggctcagaagaagggatttaagatgaagaaattggtttcttcttttccattaaaaggcttttttccga

SEQ ID NO: 110204 - DNA, 426 bp, Arabidopsis thaliana columbia
gggttttccattttttggggccgtaaccgttgccgtgaaaaagctttcctttttttatttccgattttttaactgcaggctcaagggaatggttggtggttaaaaggttctttccccgattggtcggggggggattttggggggttgcttcggcccgaccggggtccactccagcagcagcagttgcttcgacgattcggccgccaccaaatccactcgaggggttttttgggttcgccggaggccaagacgaagataaacctgttgcttttggccggggtgggaaggtttaagagctgcgtttaaggtcatgggaggatcttcagaggctgtgggccgtttttttaaaagggaaaaccatgtggttgacttacggtaagatgcttaaggctaagaaacttgcagtttcctaaccctgaccccatt

SEQ ID NO: 110205 - DNA, 389 bp, Arabidopsis thaliana columbia
attgtttgaaccaggttaaaagttgaattccccatttttgccaggggggttgtgaccggaaggaccacggacccatattccaggtccttgaaggcagagaaggggggttggttcattgaggctataaaagggaccttaaccaaattttgggtttttcctgatggcagggttttccagagatattttccaagaacttttccttttaaatttgggagggccattaaaactgcgtggggccaggcctttttttaataaccagaggaggaagtttcaggacctttcgttgggtccaattattgttctatagattaataaccatggcaacctattttttttggaattctatcattttggttttaaaaaattgaggaattcgaggtcttttaatg

SEQ ID NO: 110206 - DNA, 330 bp, Arabidopsis thaliana columbia
cgggcccggaattccggggccgcccacacccgtccggcctggtcttttgaggcctaaaatttttgttggggccaaaatggcacctctgttggcccgatcgaatttgttggttccaggggatattgaatgggcaaatttggttttgggtttggaccaggaaaatcgttttatggtagaagaggttggttttccgggggcaccgggggggtttatccgggaccaaagcattttactggccgcggagttgtttggtccccgggccccattggtggcttccataactgttgcttggggaaatgggcttttccgggttcggcgacctttttgggg

SEQ ID NO: 110207 - DNA, 398 bp, Arabidopsis thaliana columbia
ttttaatccataaaaagggaagcggtaccggcgattaagccacttatcaaagtcgttgttttttttggttttttccggaaaacctccttccatcctggtttcctccggcctgcgatggattggccgaaggaatcggttccgggatggcaaatggggtttttagatttataaccgttcccgttaattaacacggatctggaagtcaacggtccttatcctccagtggtggaagctttccgccagaggattttggaagctgatagaatctggttggcttctccggagattaacttctttgtttcagttccacttaagaatgctctggactgggcttaaagaccacctaatgtttgggcggccaaaccagttgttttattaagcaccgggggaggttttgg

SEQ ID NO: 110208 - DNA, 289 bp, Arabidopsis thaliana columbia
  unsure (1)..(289): unsure at all n locations
cgggnccggaatcccggggcggacccacccgtccgattgtggattatgtttatacccctttttttttttgaaaagaatccttttaccatgggtaagtccaaacctttggaggggaccgatgcttatcggcttttcttgggtccatttggtttcatcattcctgaaccttaaaccaaatatggctctacctgtggccctgaagttgtctgtttaaaaacgggggctttgttcttggatggaaccacattaaccacctttggcaggaccatcctaatataacttagttttc

SEQ ID NO: 110209 - DNA, 249 bp, Arabidopsis thaliana columbia
gaattcccttaaggcccttaagttaccagttcttttgtggaccgtccttaagttaccagttcttcgggggaccgtccttaagttaccagtccttccggggaccgtccttaagttacccgttcttcctgggaccatccttaagttacccgttccaccagggacggaacttaagctacccgttcttccggtgaccgtcccaaagctacccgttcttccagggaccgtcccaaagttacccgttcttccagg

SEQ ID NO: 110210 - DNA, 285 bp, Arabidopsis thaliana columbia
ttgggaggaggttccaggggcaaagcctcaccatttaagatggggggggggggtttatggcagttggggcaataaatacccggcgggttggttaaatttgccaggagggtggggtaacgtcgttcctttgcctttgaggctgccctgaaaaagactgttttttacgacttccatgttgcccatgggggaaggagggttcctttggttggtgggggtttgccaattcagtccaaagattcgattttggcctcaacggttaactgcagggaaattgggagttggttg

SEQ ID NO: 110211 - DNA, 339 bp, Arabidopsis thaliana columbia
ttggtagcaatgccgttttttaatccacagtcgttgtggaatccttttttcgggattaagccccaaggaggaggcatttccacaccaggatggtttttttttaacaggtttttccattttaaggcttccattttttaaatttccaggccaggaatcttaaaacgggtttttaagaatttttttgtagttaaggttgtttaagttaaggctggtagaagggtggtggggggggttgttcaaccataaaaaaaggaggggtggaaggttttgtctcagattattgatcctgttttggggccagttatggtttcttggggtttggtgaaagttttggtgatt

SEQ ID NO: 110212 - DNA, 406 bp, Arabidopsis thaliana columbia
gttttggataacagcggtttttaaaacaggtttttattccgccaggaaagttttcgacccggtcgaacccattaagcgggggttaatcaaattaaagagggggaaatccgaacccaaccttgttttgtccggggggctggcaaggggtaaaagtcctaagtccatggggttggttggttaagactaacgtgtgggtccataaaacgttttggactttaagccaggaaaggccttcggggtccgtaccatacccaacatggttcttcctttcgccagggtcaaatccgggggcgtgggagcagccattgattacccggccttccaccttagggtggagaccattgtggggttaggccacagtgcttgtgtggggaccaaggggtttttgtttttcccctaagatgga

SEQ ID NO: 110213 - DNA, 416 bp, Arabidopsis thaliana columbia
cgggcccggaattccggggcggaccacaggcgtccgttttagctggaagccttaagccagggccgttttttccttttttaccattttttccaatccttccatttcctttaccatttttgcctccagaattggaagttccagggtttccttccttaccggccgcataaaccggcccttttttttttttggggtttttttatttttaaaaaccaaaaccaaccttaaaaaatcccccttggtctccttggtggccaaaacttcggatggggctgaagaaggtggagaaggaagcgtcttttttggggggaccgggaccagttaaaagtaacaggatgtgagcaaaggatatgagagcaatggtaattcaagcgaaggaattttgagcaaaggaaatgagagcaaaggaaatgtatgct

SEQ ID NO: 110214 - DNA, 299 bp, Arabidopsis thaliana columbia
aatctggtcccttttggttttttttactggattaaccaactcggtttttggattggtccgtggaaacctaatttgggtttggttggattccttttaagtcggtttttggatttcgttttttttgatgggttggggggggggatttttatcgaggttggcccttggggttaagatatttaattggatgggggggttggtttaatggaggcttattgttgggaaggttggagtttttttaagttttaaggtggaattattaaaagaaggggaggattttggttgggaagttgggtattttg

SEQ ID NO: 110215 - DNA, 367 bp, Arabidopsis thaliana columbia
cccggcccggaattccggggtggccccagccgtccgggatttaataagcattaagcagccagccgaaacttttaacgacttaccatggaaccaggcttttaatattttccgaccattttttcggataccaattttttctttttggtttttagataagctaaaaaatttttttaacctttttttttttgtggatctaacacctgacctggattttggttcccggacccaccattttgggggatactttttaattaccatggcaccaggaaaggcttggggaatggggcttggtaggttctttaggggcaaagttttaagcgaaaaggaaagagccgttggaaatgttttaattaagaaaatggagcag

SEQ ID NO: 110216 - DNA, 366 bp, Arabidopsis thaliana columbia
ccaaggaatcgttggggctttcggtggatttttcttggttttcgtttactgaacggttgggttttccggtggccacataaacccaccggttcctttcggttggttctaagttgggaggttttcgttaacacaagcggggtcttacttagtgatgcagtgctaaggacttatcgttgaagctgtggtggtaaagggtttctagccaaagaaatttcagcttttggggggtgtggccaacaccttacttaatggtttttcaaaaggaggtgatttgggggtctataatatgggaacttagggcatttattacttgattctttatttttatatctattatattcctttgtattttttatatttctattt

SEQ ID NO: 110217 - DNA, 313 bp, Arabidopsis thaliana columbia
accagggttggattttgggaagggaggagtgggtttcgccaaagttgtttaaccaatattttttttttaatcccctggtttttaatatgaggttggggaaggggttggaaataccttaaaccatatggttttcctagaagggattaattttaatccagattttaattgggtttcaaaaaaaaaaaccaaaaataaaaaaaaaaaaaaaaaaaaataaaataaaaaaaaaaaaaaaaaggggggggccgttttaggggatccaggtttacgtccgcgggcttgcgaggtaatagtttttttttggggcccccta

SEQ ID NO: 110218 - DNA, 336 bp, Arabidopsis thaliana columbia
gggggtggtccgacctttggttttaagtatttttttttttaactaaagttaggttaattaagcttgtcaggggtaatattctccgccaggcaatccatttattttcaaaccgccccatttccaaccaataattggatggacaaacccttcttattgaaatgtggaaagagtcaaatggttgggcacttcctcagggccagatgattcaagaggattttgacccaaagtcttagagttttgttaatccttaccggcaataatttcccggggtttgcagggttaactggttttataacctatccgcccattaactaaaatttgcccatgattaactaa

SEQ ID NO: 110219 - DNA, 330 bp, Arabidopsis thaliana columbia
aatacatcggtttaaattttggtttggggaaagaaaaccaaaagggtttcaagggggggattccacggggcatttccggcggttctggagggaggcttaaagatcaatggttccagccgtttgaatggttttggaggaggggcgggggttcaaaggttaagactggccgccggagctcaccaaaggggggggcctttttgccgtcccgggtttgggctttcctgggccggttacttcagcccaagcaggaaacttggtttggctatttaaggacagttttatcttactgccatttcttccaacataagtcttagctggggccaaagattt

SEQ ID NO: 110220 - DNA, 454 bp, Arabidopsis thaliana columbia
gggcaaaaggggggagggggggggggggagtaggattgttccaccttccacaaagaaccatggaggttgggaaggaaccagaccaggagggaacctggccggtattgaaccttccggggttcccaattaaacccaccattaacagccattttatgtaataaccaattaacagttccatttaagtttaagttccttttagttgggaggaagagcttggcaggcccaagcaccactttacttttttttcctccttttccttttcctaaccattaacttttaatttttaatctcctttggaaattaacaggtctttaaggttcccaccagggtttaatttacttgaaaaggatggaggatcagtacccaaacttaattcgcttttaccagtcttggtgggcctttttggctggccgccttcaaaagggttggattaaccttcctttaggttgatggt

SEQ ID NO: 110221 - DNA, 309 bp, Arabidopsis thaliana columbia
caggagcttgaggttttgttttttaaaggggttggttcatttgggaagggggtggaaagggatgtttttgaaccttccagggaggaacctcttcctgaaaccggggccgttattggaaaacccatgggggaccacgaggtaccacctcaggtgggcccaagggaggttgttaaaaccgcttttgattctcgccgaggggacctcaacccaccaagagtgctgggggccctgtcagtttaagggttccggcctttggggtttgttcgtgaggttgaaggattgggccaggttggggttttagttattgcc

SEQ ID NO: 110222 - DNA, 205 bp, Arabidopsis thaliana columbia
gggaccggaattcccggtcggaccacacccgtccggtttttctctggattaatcccctcttgggtttaaaaaacccctacctctcccttcggtccgcttctttggaagtaggggcgttcgaattctttgaaaggggataaccttttcatatttggtcctctctttttcccgtgtttggattagttttttggaaacctagggtttt

SEQ ID NO: 110223 - DNA, 347 bp, Arabidopsis thaliana columbia
cccggcccggaattccggggtggccccagccgtccgggttgggataatttggagacagaagtcgaggatgtcgttggggaaagcattttttacgttggtaacttccttaaatccaatttaaaggccatttaaaatgtgtttgttgaatccaggccggccttgaaggactttggtaggagactggagaattttgttggggattggtgggatctactgggtgggaatttagggttggggaaggggtttttgaagaaggggtttaatggaccaaagggcccaacctttgggccaaaggtgggcaatattccaccatgtcctaaaccagagatgatcaagggttttagggc

SEQ ID NO: 110224 - DNA, 381 bp, Arabidopsis thaliana columbia
ccccagcagattcaacagcaccagcacctgtggcagcaccaccaccaccaccagcggcggcaggaccaccatgggtttcgccgggttcagtttcttggggatccaggttccatagatgaggtcgaaaaaccggttcaatttgaagtttttagcgattttaataatgaagactggaaggcacccttaaggttgccaccacgggataatcgttcccagccagaggatgtgactgccattaagggaaatgattttgaggattcctttttgaggagggatctgtttaggggattttatgagaggggttttgaaaaaccatttctttattaggaggaaggcattcccatggttttgactgggagggatatccttgctggagccaaa

SEQ ID NO: 110225 - DNA, 456 bp, Arabidopsis thaliana columbia
cccggcccggaattccgggtcggccccacccgtccggtacccaatttaagttttccctctaaaccattccaggttttttaagatccctttccttggatcctctttttaccaacctctttttttctgttttcttggacccgtggtaggaaaaatgggtcgttttaaccagtttccgccgttgggggcgtcccattcaggttattttgcccagaaggtttgccacttgcttgtttgggacctccacttccaggaggattttaattcctgaggcagcccctgagaagaaaaccactgttgggcttaaggggcttgatttgctggcccttttaactgctggatggcaaacggctgttttagatccctgggtcattgcaaagcttgagggaggtaatggtgttgatgatcctgggaaaaaatatctggcctttttggttggtttatggggacctgccttag

SEQ ID NO: 110226 - DNA, 408 bp, Arabidopsis thaliana columbia
aatttcctggcttagaagagggaccagatattgttcaaggattaaaggtttttgttaacttaaagggggagatattggaggggccaactaactgttttactttaaaccaagctgagcatgcagctgctgaagtttcccttaaggccctttcgtttagggccctttaaaggtttttaactgttaaaattttggtggggccagggatttccaggaccctgcttaaggagacagcacataaagcgggtttggatctaccaaggtccacaagggtgagaccaggatctggtcacttccaaggtttttttgtgcctgttgaactggttgggatgacgtttccaggtgattcagcatagccaaagaaccaggttgggaaaaacccaccctttggagctgggcctttttgaaaaa

SEQ ID NO: 110227 - DNA, 173 bp, Arabidopsis thaliana columbia
gttaaccatatggggctttttttctaaggtttttggcctaatatcttcaaggggatcccctcctttaaggcgtggcttggttctttgggctatttggttttttggcaggcgtccataatctaaacaggaatccttcaatagccttttttaaataaaggtcagtggccgaagaa

SEQ ID NO: 110228 - DNA, 396 bp, Arabidopsis thaliana columbia
cggaattccggggcggccccaggcgtccgaaatcaccatgaaggttttaggaccttaatgcccggtgttggggggatcaattcctccccttaaaggttggatcttgtccgttgggttgggaaggttcccacccttccaaattcttacattggatttggaccaaggggcgtcttcaagaaggagaccaccttcaaccaggttggagccgggtccagttcatgggccccagccaggcaggacaggttggttaggagatgggtggggattttatgggggccacgtttaacccacgggatccggggattttggatcttttactggtctaaggcggttcgaccctggggccagaacctggcaggccgtttgaacgtggggccaagcttttaagggccaatt

SEQ ID NO: 110229 - DNA, 286 bp, Arabidopsis thaliana columbia
gtggggatgggtcaggtcagggaccaccattggttttttttgcaccagccccaaattcgttatcttccttctaatcttctttcttttaatcctcctttaaccaaatccttaaaacctccatttccgtttaaaaactcggttccggcggagtttcgaagccgttttttgttttttcccagttggcgactttcccgattttttatttcaaaggagagaaggtcggaaggccttttttagacctcaaagcggggccggaggataccggccgtgccgttgggcaccgggc

SEQ ID NO: 110230 - DNA, 311 bp, Arabidopsis thaliana columbia
ataaaataggccaccagctggattcttaataaagggggtggctaaacatcaccaaacatttttttgcaggcttgaattttctcaacgggacctaacttctgctctgataaggaaatccagggtttggttgaacttgtttgtttttaaattttttaaagccttaacaacaaagtctaacacttgttggcttccaagtttgcgcaaatgccggaactttaagacggctttttttcaaatcgtcagttctggctatttgcccactttctacattacttaaaaagcagttgtgaaatcttacttccctggaaaaa

SEQ ID NO: 110231 - DNA, 394 bp, Arabidopsis thaliana columbia
cccggactggaataccggggcggccccacccgtccgttttttttttaagaagaaaaataacctcttttttttttacccaaaacctaaggaatctggggccctttcaaggtaaacctttggaaaaccccatggaaccagaaatggctaaaagctaatccttttggagcgcggttggccaaccacctggcctgaggaaatcctggaattactggccggatttttccatggtattagggaggatttccacctaaggaagaatttaaccccaaccccctttagaaggccattcgcagggccaagaatttttcctaatggaagaaaggaaaagggagtgagccaggctggggggcaattttaccacgacctaatggccgggctctaaaaaaagggttta

SEQ ID NO: 110232 - DNA, 170 bp, Arabidopsis thaliana columbia
cgaaattccggggccgccccacccgtccgagaaaaccaaaagggttccaatgggtggattctcatttgtcttttccgccggtttttgaaggagggggtaaagatcattggctggggcggccataatggctctggaagagtgtcgttgtttcaatatgttattccttgttg

SEQ ID NO: 110233 - DNA, 285 bp, Arabidopsis thaliana columbia
attaaaatcgccgaattggcagtagggggacgaaattttggggcacgttggttactaccgaacctatggaaggaccttaaggggaccacttcgtctttacaagagggagcgtttggattttgaatggaagctggtgggggggattggtttgcgtaccaggcgtgagctttggaaagtgcagtcctttttaagccgattccgtatggttgttagagatttttggattcttgttaagaagagtccaagagggatttttgaaggtggggttttgttcctaaggatgaa

SEQ ID NO: 110234 - DNA, 426 bp, Arabidopsis thaliana columbia
gccagggccccgaaccttttaactggtgttttggtcgggggccctgatgctaacaacattttcgttgccaggagagataattatgaccaaactgagcctgttactaacaacaatgcaccattcttgggggttttggctggtttaagcaggggtaattccggtattggccggttttttccaggggttccggttccggtggtccgaagaccaaggcttattcgtggaccgaaggggattactccagcccgggctttgggtccaggggctttagttaagaggataactagttaatgggtttaaaggggaaggatttactacagtatcttatcaccttgaattaacaatttttttagacttttaaaaagtttaaactttttgttcaagaatttttatgtacaaatttggggtctttggagatcaggcaat

SEQ ID NO: 110235 - DNA, 452 bp, Arabidopsis thaliana columbia
  unsure (1)..(452): unsure at all n locations
ccgggtccgaccccacgccgnntccgaaaagaccctctcccaatgacctttttnnnctcgtagcttgtctctttattacccgttcnnttcatcgnnttgctttgatgtcacgcgtnnncttatattagtgccggcggaggctctnnntctcgcgccccgcgtccccttcattcnnaagctgcgnnntcggtcttctccatcgcntttcatacctcgcgacgagggttgganngattagccccgctcgagaccacaccaanntgttggaccccctcggaagggggannttccgtcctctaatgccgaaaacctatttattaaaaacctaccatcaaccggagggnnccagttcgaccaaagactaccgattgtagtcgcttagttaccgctcattgactaccgctaaaaccggtcaaggggtggcggagaccgctaaggacgcgtgggtcttt

SEQ ID NO: 110236 - DNA, 287 bp, Arabidopsis thaliana columbia
  unsure (1)..(287): unsure at all n locations
aaaccctatatcgaaatnttttttctttttatacaagaaacacncanncgggacatgttatttttattaacgccccggccaactaaatacttattatttctatccagtcctccttctccaactttaaatcgcctattcaccgctcctttttcatcgatcttttctacaatcgttaccaaaagcctattaactactttcttcgctaacaagaatttcgaaattctgattctttatttaggaaatacatctaaatatgctgcttccaattttggaactcttccaatttc

SEQ ID NO: 110237 - DNA, 286 bp, Arabidopsis thaliana columbia
aaaatttttaacctgatactcattatttttttttttttacccacagcaccaaaaaaagcgccccgtacatatacaccacgccccgctcttaataccaacacaaactttaaacttcaccaacactcctactatccttattcccaatccttgctactctctctatcttaattttctctagtattattaatactcttattgtatgacttattctaaaaatatttctcctccccctcccctgaataaattttacttttttcctagttaaaaacttttctaatctttttcc

SEQ ID NO: 110238 - DNA, 428 bp, Arabidopsis thaliana columbia
  unsure (1)..(428): unsure at all n locations
tggaaaagtcaaaatcaagggtttcgtcgtttctttgactggcttggactcgcttgctgggggagaagcgaaaaatgcttgagtcaggaatttgcaagtatgcgtgaacaaaggagcaagaaacaatgatctaaagaagatgaaggtgagcctatcactctctctctctatctctagacattcactcatcaatcatgcggtgtattataactcaagtagtaatcatgttgtacataattccctgtgattcaagttccacttactgntagagagacgtttcctaagatggtgatggaagaaagatcttgtcatactgctaacagagttggggatgtccaaatgggtaatggtcataagcgtggaagaagcgaatattcatccagcaacaatgttagtataggtgtggatactgtataacaggatatgtt

SEQ ID NO: 110239 - DNA, 424 bp, Arabidopsis thaliana columbia
gaagaaactgtggtcaagaactaagaacacatcatcagaccagttattaaccaagagagttggtacgaagtcagcatacggagaatagggtttatcgtgtcgatgacctacatctaacttaggtggaatggttcttacaagccgaccgaatagttttttgagcgtcctgcgacaaggccacctcaagacactcaatcgcatagagacaccagggccaaatggagcatttgtagagcaaagacgtgactgtactaccaatataaacaaattggataatgggaaccctaacgaccctgaagttgttcgcggagagattcggacttgcgccatcagtcaatcggaaggggagagcgggacttatgttgtaagcaccagactcatgtctacaaacgggtgatcctgacgggtttacgcttgcggacac

SEQ ID NO: 110240 - DNA, 273 bp, Arabidopsis thaliana columbia
atttaactaaatcaattttctacaaaccaacaaaatttctacaccccctctacaataccacccacacaatcaatccaaagacccaaatccaattgatctcttttatacaaaatcttacttcaaccaacataaacacaatctataatttttaacccaacaaccctcatattttctcaaaatattcttacatccccattaccaataataatccaccccggcactatctttttatcacctaactcacctctacataacttctcctcccatactttt

SEQ ID NO: 110241 - DNA, 269 bp, Arabidopsis thaliana columbia
atacacaattagattttctttaaaaaactgaactttggcccacgacattgacaacttcattactatctctacaattaccctttgcaaagtgccttgaatccatcctaactcttgcttgttctcttataaactcaacaactccatttgattttatcaacaaacttcaaatctgtctctctttttttttctttaaactgaactacttcttccatgatttactgcgactgagtttaatttatttcgcattgcaattttttatttctctttta

SEQ ID NO: 110242 - DNA, 267 bp, Arabidopsis thaliana columbia
cacgcgggcgaacacgaccaagatcaattcatctgctcttgtcttagtttgtaactacacagtgcctaaggtctatgaaggatacaagaagagggcgaagaagtgaagtcaagtaaagccgctaaacaaccagacggttttacgagcggttttgcctaatggatcggctgttttcaggttggatctcaagactcaagttagattcaagattgttttttggaaaactaaaaggtatggggttgaagttggagctgatgttgaagtcaa

SEQ ID NO: 110243 - DNA, 429 bp, Arabidopsis thaliana columbia
gtctggtcttctgaagcctaaaacttctgtttaggccaaaattgcaactctgcgggcacggtcgaatttgctggggagcaagggatattgaatgggcaaatctggttcttggttttgaacaggaaaatcgctatattgtagtagatgtttgctatcctgaggcacctgtggggtctatccgagaacaaagcaatttactggcgcggcagctgcttcgtacccggcgcccatttgttgcttccataactgatgctttgggtaatgagcttttccgggttcgtcgacctttctggtggctcacaagttcaatatatgctgaaattgatggagaggaaattggtgttgttcatcgacgatggcatctatggagaagaatttatgatttatacctggggaacaaccagtttgcagtggtagaaaatcctgggt

SEQ ID NO: 110244 - DNA, 249 bp, Arabidopsis thaliana columbia
  unsure (1)..(249): unsure at all n locations
aatgtagattatttttattacccatttttttttcaaacaaacccntactacatcggggcgttttaatcttattaaggggtccattcataactatctattttattatccgattttttcatcactccttaatctttaaacaaatatctctctcacagtctccctttagctttatgatttaaaactggatctttgcttcttgattataacacattaaactacttaaacaagaacattcttatcaaccttatt

SEQ ID NO: 110245 - DNA, 447 bp, Arabidopsis thaliana columbia
aatcatcggcttcaattttcgtcttgagaaagaaaaacaaaatggcttcgatgggtggatgacacggtgcatctccggcggggcttgaaggaagcttaaagatcaatggctccagccgtctgaatggctctggaagagtggcggtggctcaaaggtctagacttgtcgtcagagctcagcagagtgaggagacttctcgccggtccgtgattgggccttcctgggacagataactcagaccaagcaagagactttgcattggcattgaaagacaggttttacttacagccattgccaccaacagaagctgcagctagagccaaagaatctgcaaaggatatcataaatgtgaagccattgatcgacaggaaagcttggccatatgttcaaaacgatcttcgtccaaggcttcttatcttcggtatgatcttaacacaatcattttct

SEQ ID NO: 110246 - DNA, 353 bp, Arabidopsis thaliana columbia
  unsure (1)..(353): unsure at all n locations
ccatgacctcatnanacgcccggtttcattaatcaacgggccgcgccattcaacacttaaccactacaacaaccattattgaaactccattaacaacaacttcaacgaagagtcctgactacaattactactttaaactactaacatctctaatcacatttttgacataccctccaaagcatttttacaaagttctttctctatcaatcaacaaaaactcaacaaaccaatttctacttaccctatttttaacttcacgaactgagggggacatggaacttattaaatttctaatatcatcttaataaacaccatttcctttattacccctctttattcttccaaacacatct

SEQ ID NO: 110247 - DNA, 409 bp, Arabidopsis thaliana columbia
  unsure (1)..(409): unsure at all n locations
ggaggatttggcggtggaggcttcttatgttttggcggaggtggaggcggaggaggggggggtatttttcaccagtgaacgaaacacatnaataattttcattgagtgcatgtctcactttacgnacaacatggtttacaagtttgatagtgttgataccaaatatagnacnnagaaaaactanatatggaccccgacccaaaaagaatcactagctatgagtctcgtaagacttattcactctaataatattcattttatcatctaaaactcttatactttattttattttaagtcaatggggggggaaaaatttttatattatcaatctttataatttatatttttattatgatacattatattttttttaagtttttttttatttatttcttttttattttatatt

SEQ ID NO: 110248 - DNA, 443 bp, Arabidopsis thaliana columbia
acgcaagagcatgaggctatgttatctaaaagagctagatcatctgggaaagtggttgaaaagggtgggtctgaaacttccaaggaggaaactcctactgaaaacggtgacgataatggaaaaaccaatggagaacacgaagtaacaactcaggatggaccaaaggaagctgctaagaccgcatatgaatctgcacgaagggaactcaaaccaccaagagtgcttgaggccctgtcagcttcagggctacgggctttgaggtatgctcgtgaagttgaaggaattggtcaagttgtggctttagataatgacccagcatcggttgaagcctgccagagaaacattaagttcaatggtttgatgtctacttcaaaggtggagtcacatcttactgatgctcgtgttcacatgctcagccacccaaaagattttgatgtggttga

SEQ ID NO: 110249 - DNA, 187 bp, Arabidopsis thaliana columbia
  unsure (1)..(187): unsure at all n locations
aacataaaaantttaaacctcattcttcttcaccctccatctaccaacaccttcactcacgaaaaccttctaatacttcctccattctcccatccttataaccaagatatccaacttatcaacaatctaaacacacactcctctacaataaatatcccatcttcaacaatatttcctcatctcacaa

SEQ ID NO: 110250 - DNA, 441 bp, Arabidopsis thaliana columbia
  unsure (1)..(441): unsure at all n locations
ccccagcagattcaacagcaacagcaactgctgcagcaacaacaacaacaacagcagcagcgggaacaacaatggtctcgacgggctcagcttcctggtgatccaagttacatagatgaggtcgaaaaaacggntcaatctgaagctattagcgattctaataatgaagactggaaagcaaccttaaagctgccaccacgagataatcgttaccagacagaggatgtgactgccactaaaggaaatgaatttgaagattactttttgaagagggatctgcttaggggaatatatgagaagggttttgaaaaaccatctcctattcaggaagaaagcattcccattgctttgactggtagtgatattcttgctagagccaaaaatggtactgggaagactggtgccttctgcattcctacccttgagaaaatngatccagag

SEQ ID NO: 110251 - DNA, 457 bp, Arabidopsis thaliana columbia
  unsure (1)..(457): unsure at all n locations
gaattnnccgggngcgacccagcgcgtncgcatataccttgcataanngagaaggaccacgatcatgtcttcaangattcaaacgcttctgttaactggcaaggggtgagatattttgagagcgcccgcgttnnactgttctacttctctagacaagnnnctgagcatgccacgctgctgannagtttccctnntaatgtgcctttcgtcttagagtgcccttcaaacgtcttttaaccctgctaagattctttgatgaagacacgaggatttacatagaacctctgcttcaaagagacctagcacanttagagctcggttcttgatctatccaatgtaacacaaagtgtgaagatcacaggatcttgtcactttcccaaggtttctttgtgtacgtgttgaacctttgcttgggatgaccgtttactaggagatatcaagcaaaagacaaaagaaa

SEQ ID NO: 110252 - DNA, 173 bp, Arabidopsis thaliana columbia
gcttaccatattgagctttttttcttaagtattttgtctaatatctttcatgtgaggcccgtctcttaggcgttgctgcgctcttttggctattttgtttttctgcaggcgttcataatctcaacatgtatcctttcatagtctttttttaataaaagtcagttgacgaagaa

SEQ ID NO: 110253 - DNA, 252 bp, Arabidopsis thaliana columbia
  unsure (1)..(252): unsure at all n locations
acactgtttccctctcatctttacactttagtattctaatcgatttcaatancnnnggcgccgcgaaacattctaatctcggtcggccgaatataacatcaacatgaatcaacaaaacctctcttcaatttcctgtgggtcaaatcgctcacttcttgaagaaaggcaaatattccttacttgttactgccttatctcctttttacttaactccctatttctataaccacaccctcctttatatttaatatc

SEQ ID NO: 110254 - DNA, 265 bp, Arabidopsis thaliana columbia
  unsure (1)..(265): unsure at all n locations
agaaaaaaaaaaagnnnaaaactcatttcacttatagacacaanacaccccgaaccgttattctaacgggcgcgcgaaattacacccctacaaactctacactaaattcaacaaagtcgtcatcaataaagagaacaacttaaacagcttttacagttacagatcatggcacagacatgcaagacaggtttgttagagatcgtgagattctatcgaaccactctacccacagatcccgcattgatctcttactgtctacgctgat

SEQ ID NO: 110255 - DNA, 197 bp, Arabidopsis thaliana columbia
atcaaattcgcctacatcttgactcctcatttatttcttctcttaacatcacaacaccttgctctacattcttatattgtcgccacaggtacttactttatctatgacataaaaattcaaggttctcgtaacactgcgcctctctcaaactgtcaaagccgccaccacaaagttttacacttgctactctacaaact

SEQ ID NO: 110256 - DNA, 215 bp, Arabidopsis thaliana columbia
acccgtccgcaattttccataaaggggaggaaccaaaacttttttttttaaagttccggagccgtttccccgcttctgggacgaattgcgggaagggcaatgttcgattaaagccaaacaaatgttccaacatttccatggccaattccggccaaaacatcaggaggttaaggagggtgggtttaaccttcaggaggccacccctgatgcatttt

SEQ ID NO: 110257 - DNA, 316 bp, Arabidopsis thaliana columbia
aattgcatccatggcggaaaaggcttgttttatcaggcaccagtatatctttttgaccaacaggttttttgccggaaggcatttctctatggatgttcttaatcctggaggagccaaggttttaaaggctgactttaaggggaaatgggctgggaggattgaggttatggccccaaaggctatttttggtttaaggttcaaaccccacttgggggggggaaaactttctggatatggttggacctaggaacctgccaggacccctaagaggtttgggcctaagtccaaatttttcaggaatggactggcccccaag

SEQ ID NO: 110258 - DNA, 244 bp, Arabidopsis thaliana columbia
cccaatttctacctgggggttttttggattcaacgtcctggcctcaagggggagttttttcctttcaaatcttggaagggaataaattgatcatttattgcccatggtctccaaaacttaatggttcttgatctcaactgttgtttttaaacaatctttaaagaaggggtttgtacctctagcaacggtttaagtgaccgttatctttggaggaggggggaattttcctcaaatttttttcctg

SEQ ID NO: 110259 - DNA, 210 bp, Arabidopsis thaliana columbia
tttttatttatttccaaaattttttttttaataaaggtggttatttttaaaaaagttggggccccataattatttcgggaaaagaccttctttaccaaaccatttacctgttctggtcaaaatattccggcggggggtttgtttacctttgttgactccaccttgaacccttttaacaaaacaaatttatccaaaaccttactttttaaa

SEQ ID NO: 110260 - DNA, 391 bp, Arabidopsis thaliana columbia
  unsure (1)..(391): unsure at all n locations
ccggccgncccggnccgaaatccccgggcggccccaacctttggaaggtggcccaactttttctttcttggccttttcccaaaccacagaattttaaaaaggtctggtggtaaagaagaataatagggggccaccaaagtcctcttttacctggattccggatatggttggttacaacgctggagtcattaggaccattgttggcatgtaacccagaggccatgctgttaaacttattggttggggaactagcactgaaggaaaaaattattggttgttggcaatataatggaccaaaggctggggggataatggtattttcatgttaggggggggacctattgattgtggaattgaagttaaaccagtatttgttttggctttcaagcaa

SEQ ID NO: 110261 - DNA, 229 bp, Arabidopsis thaliana columbia
ccggaaaccccggaccgacccacccgtccgaaagggggtttctctaagaccaagaaagagtttatggccagccgtttcttttttacctcaaaggatgttgacttaataaaaaattaaccaccagaagctaggcctaccgttcaagttggtgccacggttgtggtttcctatggacctaggggtgccaggagtattcgccgaaaatagtccattagggagggccaatttt

SEQ ID NO: 110262 - DNA, 442 bp, Arabidopsis thaliana columbia
ggcggttcaaggcgtctgccacaccaaaaggcaggattatataccactttgggaacttaagagttccaatagaaagggcgaacctaccgattctttgggattacgggccaagttggttcggaatgggggctagagttgcgttgtgggggaaaggtgttgagtttgaatacagatgggaggttttttttgaaaggagctttttatttattccagtgtattctcatcaacaggaaatatctgtgtttgttccataagggttaaacgggtttgatataattttttaagttagataaattattttttttgtggattattcttttgttatgaatattattttttttcgttttgaattgttttatttgaaatttatatttgttttttttttaggttatattttttttggtacgatatgttttttttatgataaaattttttttttttt

SEQ ID NO: 110263 - DNA, 411 bp, Arabidopsis thaliana columbia
ggccccgggggggagattccaggggaaggagacacctccaattaaaggctctgattttttccaccaatcccaattttttccttttaccaatttttaagctggtttaatcctttcctccttccttccattggggttaaaagaagccatggttcccgggtttttccgacccctaaatcgccagatcctttggggggtcttcgtggctttcgtcgccgttggtgctggggctgcttatttttttccatcctccaagaaccgcaaagggtgtttggatccaaagaatttaaaggggttcaggcttgttaagagacataagcttagtaccaatggggccaagttcgtttttgaactcccaacttttacttttgggttggggcttcccatgggccaacacattatttgcaggggaaa

SEQ ID NO: 110264 - DNA, 462 bp, Arabidopsis thaliana columbia
gtccgccggcggacccggcccggaatcccggggcggccccacgcgtccgaaggtttccccccttttggttccaaccccccttccccaaaccccagttttttaaaaaggtttggttttaataaagcactatggatcggcaccaaagccgccgttatcctggaattcctttaatgttgggttaactcgtcagagtaacttcgaccactgttggcatgtgatccagcaaacgggttaacccggcccctccggttttgtcgggccaatgtcccgacccatgtgggagttcaggatttgttcggaaggctaacgttgcaggagaagatccgcaacctggtaaccattgctgccgccgtaccacgtttgggttttgggggctatgagtgggggtcccgggttttccacggcatttccgacgttggtccaggccctaagttcgggggggcttttcccggggccaccagt

SEQ ID NO: 110265 - DNA, 379 bp, Arabidopsis thaliana columbia
  unsure (1)..(379): unsure at all n locations
gaccaggcgnccgaacggggggggttccagccaagggggggggtattgggttaacctattggttagcaggtggccggaagcgaaagttgttggaggtggaaatccttggggggatttttgcaggacaaacccggttgttggggaatgcaaagtttatgactgaccaacttggaccatttttttttttatttttaaccaaaccaatactttgattaaggggttacttattcgaaatcgacctatgcttactggtttttttaaaaataaaaaaaaaataattatattttaaattaaatattaaatatttttttttttaatcattaattatattttaataaatttttttaatttacttattttaatataaatatgggggggg

SEQ ID NO: 110266 - DNA, 393 bp, Arabidopsis thaliana columbia
ccggggcggacccacccgtccggccgtgatccctttttttttcctttaaccaaacgcgcctttaatttttaaattttttccacctccaatttctggcaattaactccaccttcttcttaatctcctccttctttctttctcggggatcctagattccgtttttaacgtttctttaaccaattttgggaccctgtttttccagttcacctaaatccacggttgagacctttccctttgacctggtggtaaaacctcttcttctttccgccgccgccaccgaaccaccaacccaacgattccccaccgggaaaccagaaccatcgacggggggctttaccgcaccagggggattttccggcccccctaccagtttagggacgtggtttttccgtt

SEQ ID NO: 110267 - DNA, 392 bp, Arabidopsis thaliana columbia
aacgtttaacttggggcggcatttctaaacctaaatggccgcctaaacaagggttttttcttcccttgccttggccggaaaggcgcgaaagttttcccccgcggaatttgaagtctttggaagcggccgtgtgccaatgaggaaaactgttgccaagccaaagggcccatcaggcagcccatggtacggatctgaccgtgtcagagccttgggcccattctttggcgaataaccgggctactttaccggaaagttccccgaagactccggatggaacaccgccggactttaagttgaccccaagacattcgcaaggaaccgtgaactaaaagttttccccagtaggggggccatgctcggagccctaggttgggttttccttgggcttttgg

SEQ ID NO: 110268 - DNA, 425 bp, Arabidopsis thaliana columbia
  unsure (1)..(425): unsure at all n locations
cggncgggaatacggggcggaccaacgcgtccgaacaaggattccaaagttccttaatcccagttttagggggaattgaaacaccttccaaaaactccatgtaccaaggccaccaaacggatcaccaaaaacttaaaaccttatttgggaaacaaaaaccgcccaaccatagcttccgggggttttttgggtttaatcctggtcccttaactttaaggttaactcattttaaacagattaaaagcttatttttaattccagaggatcctaattttaatccaaatttacctttggatctacttttaaaaccaaggcctttaatgggtggtcaccggaatggaaccactaaggttttttttcgcaacaataggcttaaaataccgtggttgggggaacccggaaaccctagggaacggttttttacc

SEQ ID NO: 110269 - DNA, 388 bp, Arabidopsis thaliana columbia
gtgatcttaacaaaggcaactggggtcaagtcggttttatcgctttttggaactccgttaatgataaaaaggcaaaggtggttaaggaaaggattgaggcagtggacccaaataaaaacttgatcacgtttagggtaatcgccggggatctgataaaagagtccaaaagctttttgttaacaatccaggtgaccccgaaccttgaaggccctgaaagaattgtgcactggcaccttgagtttgaaaaaataagcagggaggtagctaatccggaaactttcttccaattttgggtcaaggcctcgaaagagatcgacaaacatcttttggccgaggaataaaggagtcctactacttttcgggtttgaatttaaaggcattaaataag

SEQ ID NO: 110270 - DNA, 340 bp, Arabidopsis thaliana columbia
gaggccggtattggcgaggtcggtttttttccattggactggggactatgtcccgggttccacactttaaaacagccgtggttttttaaacttggtggttcaaggaagaccactggccattttacctggcttttccggtttggataacaaaattgggggtcggaaatttgtccccaatagaagttttttggggggccaggcaagttttggcggttttgggagaaatcctgttttttaaggacttattaagcagggtacccggggaaccaccaggcaaagcggggggggagaggattttgttatcgaaaactttggtttggtggcttaaaaaaaagggcct

SEQ ID NO: 110271 - DNA, 360 bp, Arabidopsis thaliana columbia
ccggggcggccccacgcgtccggaaaccgaccataaaacattccctaggagatcaatatggttggggtgttgaagttggcttgctggttctgggccggcttgatgggggccggcccaataacatcgaccgctgggctaagctggggttaagttaacagcaactgggcagcgggcttgggttacgggctccaagggggggtcattcccccagcgggtggttccggcgttaaaaacctaaccagcttagccaagacgaccccagacgcgaagaaagcttgcaatggcattcaaggtgccgttggagccttaggctttggtttaaacgctggccgggcagttggaattcctaaggcatgtggg

SEQ ID NO: 110272 - DNA, 184 bp, Arabidopsis thaliana columbia
aaaagggcggacccacccttccggcctttggcagtaactgttctctaaataatttttattttcctttggggaacctttgaaacccccacagaaggttcaccaactcctcttaaaccccaaaaaaccctgtaatcgcttaagagggtttcggccgggaaacccacttgtcctaccgacccactta

SEQ ID NO: 110273 - DNA, 370 bp, Arabidopsis thaliana columbia
cggaaaaccggggcggacccaggcgtccggaaaagaaaggataatttctattttccctttttaccacccatccaaaaggtggcttcctatcttcctttattccttctttttggctctatccatggcctttgttcaggatttttggtttgtaatcttgaaccgcgctgaaaccccggggggttcccctggcttttgtcccatttatgtcaaagctccagctcttggcttcttgggcttaggccttcttggaaacattccaaacattattaactctgtggtcaccacccctttttttgagcccagttcccgggtctgaacggtcaaggtctttctccagttggatttgactaatcttctaagggggggtccc

SEQ ID NO: 110274 - DNA, 360 bp, Arabidopsis thaliana columbia
acctacaattttttggtcgacccaaagggtggtttagggggggggttattaggtttttcctttggatgggctccagctttgggttttttttttaatcttggttccggcttcgattcccaaaatttaccctttcgatttggggtttacctagccgggtggcctcagtaaagtcgaaggcttttgggtttccgaagggccatttcttatttgaaccaaaacctttcttttccatggggctgagaaaaaagcaggagcctttgattatttttgggggcggggttttttttaaaggggaggtcaatgctctagcctgggttgtggcgggaccacttatcacaagacagttgtttttgaagttcc

SEQ ID NO: 110275 - DNA, 396 bp, Arabidopsis thaliana columbia
  unsure (1)..(396): unsure at all n locations
cgccagaacccaagaanccgaaacccccaaggatcccgacaaggggccaggtggttaactagccgggggattttggttctaaaccggggatttaccaaatctttaattaaatcgcgccctaattcctccgaaggattggttggctccgatgccaaatcttcctcctcaaaacctaaacccaggaaagctttttcggcggcggtggccttacttacaatcctcctttcggctccaatgccagcggcggtggatatctaaggttggactcctggcagggcctaaaaaaggttggctaaaggggggaggcaccggaccaggaggttggattctttcttaaggttctacgctctggaatctgccccggttttggtttcatggctaaaatggggaaaccca

SEQ ID NO: 110276 - DNA, 415 bp, Arabidopsis thaliana columbia
  unsure (1)..(415): unsure at all n locations
cgtccntgatccttaaaacaagagggatgcaggtttttttaataccatggttagtctaagaaggggcaaaattcccccatgggaggaaggcctttgcccgttgatttgaacgttaactcatagggttttaaaagttggttgatgtccataaaggccaaatccccaattccggaaatattaaccatggaaaccggttttggtgaagaactaggggcctaaaattcggtggcggaggtgcccgttgaccataacaggaaatttttttttcggaggcaccttttgggaatccacgaagttgttggcattgccaaagggaatgttccaggatcctttgtatggacatgtgtgggaataactttaatgggtataagggttccaaaacaaaatttggacctttcttccgtgtatttaaaaa

SEQ ID NO: 110277 - DNA, 274 bp, Arabidopsis thaliana columbia
agcggtggttcgggggttttctccaggctttagccactcgattaatcctccaatctataaaaatccaaattttcaatctccctttcttaagattaaagggggcaaagtggagattttgttcgcctttttcctctggaaatttcaatcgaacctatttcttcagggatgcaaattctgtgaattggtggaaccgaatttcacattttttttggaggaatggccgccccaattttttcatttgccgttaaggacctgggctttgggtttttccttc

SEQ ID NO: 110278 - DNA, 421 bp, Arabidopsis thaliana columbia
tttttggttaagaaaaataaatacctggttcttgggaggtcaattaggattaagaaggggtggttattttataggggaattccgaggattattggggattgaaaccgggggcttgattatggcaaatacctatccattttttccttttatttctggaaaaggtttcttaggccaccaaatccaccctggttttttttgggaacaggcgtgggagttgggtttttaccaccgggaacggttcctgggcctccggggggggggccttttttttaatccaccttctttggaagggggttagtttcatagaactggtctggtttggtaataaacccaagaccaaagcggaggggatttttttcttccttggggccgcttgaacctcccttggggcttgggggcgaaaccttcacgggggccgggg

SEQ ID NO: 110279 - DNA, 338 bp, Arabidopsis thaliana columbia
  unsure (1)..(338): unsure at all n locations
tggaatnccggggccgccccacccgtccggacctggcctatccattttattccacaacctttttcgagggccctaatgataaatttttggggggggttggttcagcaataactatgctcaggttcaagactaataagcaaccgtttcctcctttgggactggaagctggcccagtttttgacctcaaagaggagggccccaggaccgtgggtttccatggaagagccttttttttgctccacaaatttggagctccaggtctgtccttaatccacctgttgatggacctttttttcttggattccatgcttttaataagttatcaaaccttccttcta

SEQ ID NO: 110280 - DNA, 356 bp, Arabidopsis thaliana columbia
cggaactactttaagattaacttcactgttccttggtgggggatggtttcttgaggacctgttaatcataaggaagttgttgggcacgggaaaaagctttttaccaagttgcggtctgatccaacaactattttcaaacgggtggccatggaacctgttagttttacgggaccgggggtccgaaggattgatgatgccctaccctttggtccaaatgggggaggctttggggggagatttttggcctgacccaaattccgtggcttttatggttatgcaaacaatgttgggttcggggaacaaaaatgggggggggggtaaacacgggggttttgtcctggcccatggggttgcct

SEQ ID NO: 110281 - DNA, 415 bp, Arabidopsis thaliana columbia
ggccgtcaattctttaaaaataacaaactgtggagtcaaagacagaaccaaaatccaaattaacatgggttattccaacttaaaggacataatacactcaataatggacagggatgctgatgtaataacaatggaaaactccaggtttgatgagaagtttttttccgggttccgggaaggagtgaagtacggggctggaatcggtccaggagtttacaacatcaattttcaaagattacaattttttggggaaatggaaaacagggtaaacaggaggctggttgtcctagagcaaaacatctttggggttaaccctgactggggcttaaagacccgaaggtccaccggggtaaagcctgaactaaagaacatggtggatgcggttaagttaatccgttccaagttggccagggcc

SEQ ID NO: 110282 - DNA, 247 bp, Arabidopsis thaliana columbia
aaaaaaggaaaccccaaaaccaaggttttttttggctccctaaattatggtttggccctcccctgccttcccgggaaaggttgttaaccctgcggaataaaatttcctcgaaagcggccttttaaccataaggaaaactgtcgccaacccaaagggtccataaggcagcccatggaacggttctgcccaagtaaagtccttgggtccattttccgggaagcccccaagctaccttaccgggaagttc

SEQ ID NO: 110283 - DNA, 401 bp, Arabidopsis thaliana columbia
  unsure (1)..(401): unsure at all n locations
gaccaaggcgnccgaaatgggccttttccgtcctcttggagcccattttcttggcctccccttccaaggcaataataaagattggcggtcccactaagctcctcctttttatccaaccacttttaaggctggttggggggctttttttgggggtaaagtttgggaagaccactcggggttctttcctttgcccggggggccagcctatttctaaccgaagtttttttgaggagagttctgtttttgaggggcacnttactaagttgggtttgaccagggtagccttcttgttgggcaatgttgatgagcctaaaaaagtggatgttattgctgcctttgccaaggactttcagtacttgcaccaccattgtctacacttttaagatgggcttgactggttt

SEQ ID NO: 110284 - DNA, 309 bp, Arabidopsis thaliana columbia
gcttggttcaacccagaaggccgccaggggggtcaaaccaaagatcgttgaaaatgaagacgattcttttttccgaaacgttggacatccccgccggggtacccatcaaggtcaaccctaaagggatcgaatttgaaggacctcccggaaggctggttcgcaatttaaagcatttaacccccgttttccagctgatcaaggacccaaaaactggaaggaaaaagcttaaaatcgatttgtggtttggaacacccaaaaccagggcctccataagaaccgtttttagccccgtggtaaacttgacctccg

SEQ ID NO: 110285 - DNA, 462 bp, Arabidopsis thaliana columbia
ccgggccgccccacccgtccgttcaccatttccccaatcctaaggctacctccttggggtccataatcgaaccgcttttggcgattaatcctaatcttttttcaacctccggctccaaattgggtcctttttgggtggaattgggttaaaaccatattctcctttccaattttctggggaaagggaagtttcagtgttgggaaatcctcaaccggggatctgcatagctgatttagcttccagggggctgggatttagattggcctctgaggtaatctccggggattcgagaattagggttggtttttgcacccaaggctttaaagggaaggagatcgcgatccgttgctttccgggacttgccaaatgggagagccatctgttccgatgccccttttccgtttttaaaatcccctccaaattctaaatcgttcgggagtgtaaaattatttgtgggccttc

SEQ ID NO: 110286 - DNA, 391 bp, Arabidopsis thaliana columbia
cggatttgggggtgaaggtggctcggcaagttttttccttggggttttccaacctccttccaggggttgttgaggggatttccaaggtggcttaaatggccctaatccctaaggcttttgttcaaattttggaaggtaaaaggactaaaagtattgtggtttaacttttctagaattaatgggtagtgttttgtaagggatattaacctgggtataggggtttgtgggtaaatccttcaaagccggtaaacatttattattaccagttcttccgggaaagaatggggtttttggaactttggggaaaaaaaccatggtttattcaaaatggttttaccagctgcaaaacctgtgagggcatttttatagaaggggcaaggtttctgttccc

SEQ ID NO: 110287 - DNA, 374 bp, Arabidopsis thaliana columbia
tttttcctccggtttgtcctccctttttttttagacctccgacgaccggatattgaaatccttccgattaattttgtcaatcacacaaaacccgaaacccaaaaaaaatccttggcgttggtgaggaccaggggggcaaatcccatcgccgggatggttggggatgaaatgaccagggttattgggaggtttataaaggttaagttaattactccttttggggggtgggttttaaggtccttggacctgggtcttcctaaccgggatgctccggttgacaaagttcctttggaaggtgttgaagcaactaagaggtccaaggtggcgatcaagtgggccaccttctttccagatgaaggccttttcacggaatt

SEQ ID NO: 110288 - DNA, 429 bp, Arabidopsis thaliana columbia
gaaacaaaggccccacagaatttggattcgtgtttaaaattgcagtagatggtcctgaagaaggtaatgctcaggatgctgagagcgagaataagcatgtggctacagaaacggaagcggaaaacactgattgcaatgaacaaggaagagttgttgttggtggatcggagttgactagttctccaaaggaaatcaagaatgtggaggtcgaaaaggcagctgaaaaagcatttccaatagaaacagccgtatcaaatgcaagaccaggaaaatctaagagtgcacaaatggctgaggattcagatacatgtctcttgaataagtcaccaacagcaaatgattcaaatggcagtgaatcagttattggagtgaagcttcaaaaggatttatgtgatgctgaactgaaaacagtatatggtgaaaccgaaa

SEQ ID NO: 110289 - DNA, 277 bp, Arabidopsis thaliana columbia
  unsure (1)..(277): unsure at all n locations
gaccgacccacgcgtcctagacatttgacaatccgatttaaattgnctttctattttcttaacaagaatacaaacaacaggaaggttttatttcttcctatgtggtctcctcctccacttttttatacattcccagctcattccaccatgttcgctccattcaccgtctttaagtcatccgttttattcccggtcaccctcaataccaacaagtacattattttcatctcatgcatacttttaagatttatctgtatcaacttgtttccaccaatta

SEQ ID NO: 110290 - DNA, 286 bp, Arabidopsis thaliana columbia
tctgttttactcaatgtcatcgtgttttatatttttacgttttccgggatgagtgtgggttctatctaagcaggtgactctacaacattattgataagaagtggttttattgtcactccattatattccctttcttaagatgaggatgcatttctcttttgttctaaggtaaggtttttttttttttttgtttaacggatgtgtatgttttgatttattttattttttttctttttcatttttagattttatcattttatttattttttttatttttttgtttttt

SEQ ID NO: 110291 - DNA, 272 bp, Arabidopsis thaliana columbia
  unsure (1)..(272): unsure at all n locations
cttttatcaaaccagagagccgtcatttttatctaaacaaagatcggagaanattaagacgggtcttttttccgaaacggtgggcatcccctacagtgtttccatcaaggttcacgcttaagttatcgaagtctaatgaccttttgggaagcttgttcgcgatttcaagcatttcaaccttgatttccaactgttcaaggatccataaactggtaagtaaaagcttaagatctttttttggtttggtacacgcaaaaccaacgccttcatta

SEQ ID NO: 110292 - DNA, 355 bp, Arabidopsis thaliana columbia
tttcgttttgttcttgctgtaagcatcccttttttttttctctcttatccacacgaattcgtgcgaggcctttaccagcttggaggggataaatacttcggtctctccttatagtggatttggatcctcagaagctgaagtttgacacatcttctcagaaagtgaatacgagagcattcagaatggatctcacattcactcaacctgatgattggcatctacatctccgtgtctttgatcttcttcatgctgctgttccccacattgccgagtaattttaagagagctactgttattcctaatgtgtagccggctgatacctccactgcatctgccatttttttccggaaattta

SEQ ID NO: 110293 - DNA, 350 bp, Arabidopsis thaliana columbia
gatagcaaaaggcatagctcgcgggcttactttcttacacgacaagaagtacttgcgggggggaccttaagcctagcaagtgtgcttttgggcttatatatggagcctaaagttgcggatttcggtcttgagaagcttttgattggggacatgagttatagaaccgttggatcggttccaatattcggaagcaagagatccacaacgtctcttgatgtttgggccgagtccaagcccaagtccaagttcagtcagtgtaccctacaatgctccagaatctctactgagtattaaaccgtattcgaaatggggtgtgtacttttttcgagttattctgcttgagctactaa

SEQ ID NO: 110294 - DNA, 414 bp, Arabidopsis thaliana columbia
aaataaaagtatagtactatcttcctctttttctattctttcaaaaagtttcatactagcgggggtttatttcttctgtggggtgtatccacaacctcttttcaagatttctgtgtctcaaaccttaaacgcgctgtaaccccttctggttacccttgcattcttcccattcatgtcaaagctacagactttgtcttctctggcttaagcactcctggaaacactacaaacatcatcaacgcctctgtcacacccgctttcgcagctcaattccctgttctgaactgtctatgcctctggtcaggtagacttgacttatctcctaaatgtgtgatcccaatgcacactcaccctggtgcctctgaggttctctttattcttactgtcttcattaccgctattttatcttctcta

SEQ ID NO: 110295 - DNA, 181 bp, Arabidopsis thaliana columbia
acacatatagttacaaacactcttattttttacacatatatataaaaatgtgggggtgtaatatagcactattgaggcggcaacaaaatcttctttatacttgtatctcctcactatgtgttgtccactcacttgattcactatgaccactgtttgcatgttatccagcatactttttaac

SEQ ID NO: 110296 - DNA, 287 bp, Arabidopsis thaliana columbia
caaggtggtctcccgagatcaagaatgtgtttattggcagccggatccgtgtcaccgggaggggtttttacttaatcagggagttcaccatcagaagctaggcctaccgttctagttagcgccacggctgttggttactatggtactagtgagacaggagtattcgactaaaatagtccatcagggaaggactatcttgcagaggtttgcagagaatgggaaggaacttgcattgaaagcaaataatgatgttagagtggcacttatccgtattgttgttgtttttt

SEQ ID NO: 110297 - DNA, 270 bp, Arabidopsis thaliana columbia
acaatctccagataaggggagaagcatatcttttttctatgaagctacggaagcggctcgagggattatggacggagtgcggggagctcaatcttcgactcgaggccaacaactgctgcgagatgtacatggccaatgcgcgacaaaacatcaggaagcttgtgaaggatggtttcactatcaggaagccaaccaagattcactctcgttccagagctcgcaaaatgaagattgccaagatgaagggtcgtcactccggatactggatag

SEQ ID NO: 110298 - DNA, 317 bp, Arabidopsis thaliana columbia
atcatctttgagcatagagaaaaaaatttttttttctagagagagagagaaatataaatccggggatgtttgaaaagcatgaggggaggagaaggatcgtgtttattccctctccagctcaaggacacatatcttcgatgatgcaacttgcaagagccctttacttaaagggcttttccattacagttgctcaaaccaagttcaattacttgaagccttcaaaagacttagctgatttttagtttatcaccatcccataaagcttaccagtcttggatctttagaattttataccaatttggttttttcttaaactc

SEQ ID NO: 110299 - DNA, 385 bp, Arabidopsis thaliana columbia
cccaaaaaaaggaaaccccaaaaccaaggtttttattggtttcctaaaccatggctttgtcggcccttgctttcgccggaagggttgggaaccctgccgaataaaatgtcctcggaggcggccggttgcccatgaggaagactgtcgccaagccaaagggtccataaggcagccaatggtccggatctgaccgagtaaagtactggggtccattttccggcgggcccccaagttaccttaccggggggttccccggggactacggatgggccaccgttggtttatccgccgacccaaaaaccttggccgggaaccgtgggctagaagtattccacagcaaatgggccatgcttggagccctaggctgggttttccctgagctatt

SEQ ID NO: 110300 - DNA, 235 bp, Arabidopsis thaliana columbia
aaaaaaccggtccgcgcccacccgaccggggaaagaacttctgttaaaaatccaattttttttacaataacctttcaaaaaaccaggttgcctttattaaaaggggggtgggccgaaccaaataaaaaaaaaattttttccattcaaaaaaatcccgattttcctactccaaaataatggaggccaaacactatatttttaaagtcccttttcataacaattccccggtttgttt

SEQ ID NO: 110301 - DNA, 468 bp, Arabidopsis thaliana columbia
aaaaacccgggccgcccaacccttccgaatttttgtaatcaagccgcaaccaatttttttcaacatttcccgaatgtctttacgggccgataaaatataaatgtttgtggccccaatcaacgcaattgaatccaaccttaacaaaataaaccttaatttatttttactttcaaacttccagaacctcggtttttccttttaatccaaaaaacttcttttcttccccctgaaaaacaaatttttccaaccatttataaccttttaaaccaacctaatttaaaatcaccctttggttaccaccaagcttgaaataaaatccaacttaataaccctttcaataaagtttttaaatttttccataaatatttaattttcaaagaaccatctttaaaggtgtccggttcctttcttttcatgaaaaaataaaaaaattaaccacccggcttcctttattgttgcttccattta

SEQ ID NO: 110302 - DNA, 444 bp, Arabidopsis thaliana columbia
aaaaaccgggccggcacacccttccaaccacattttttttaaagtcccggtttttcggttcgtttcttttaagtttacttaggaatatgggttattgtaattactaagcgttgggcctaaattttccaaccttgtccttaaaacccaaaattcttaaccggtttttccggtaggttgaaccgcaacttgtcttttccatcaatcggttaatcggccaaaacttcgtctttaaaggttgaacttaaaaaaggaaaatggttgcccggtttgcaatcgcctgataatctaaccggcagttttgccggtaccaatggttttaaccctttgggtttagcaaaggatccaaaaaacttgaaatgtttcttccagccaaagttgttaaacgaacaatggcctttccttgtgttccttggaatcctttttccggaagttttaaccaaaatc

SEQ ID NO: 110303 - DNA, 442 bp, Arabidopsis thaliana columbia
aaataccggggccgccccacccgtccggaataaaatcagaattccaaccaaaaatgtgttgttaaaacctacctttaattggcctgttgtggtgtcttaacaatagaggcgtttcgcaccaaatccaaatggccctgtttgcccgccgtcaaccaaattaagccggccaagtttccttgaaggttttttttttggaccgcttcctgcggattaccaggccaaaggtccgattaatgaaattggtcttggcccagcctattgggacatttattgttaaaaatttccaaaggggtgcaataccaataccggcgattggcccgttaattttttccatcgttttagggaaaatatccacctaatgaaaaatttaaacccaacccccttaagaatgtttatgccttggccaaaattttttctcttatggaaaaaggaaaaaggattg

SEQ ID NO: 110304 - DNA, 419 bp, Arabidopsis thaliana columbia
aaaaaacagggccggcccacccttccggaatttttaattgagtaagtccaccaaagtttttttaaactatcttccttaatttttacctgttttaaaaaaaatattaactgctcaaccaaaattaattattccccaaaaccaccaatttttgtaatcctaaatatattaaattcaacctccttttttttaaatcttacccttttttcaaccccttttttattccccaattttccaatatcttccccctttttaaatccaatcttaaattttaccccccaaaaacctttttctttttttttttaaccctttttttgccaaccctctttaatttttctttaaaatttttaatacttttttaaaacaaattcacaattttattttttccaccattaaaaatttccaaaaaatttttccttttt

SEQ ID NO: 110305 - DNA, 426 bp, Arabidopsis thaliana columbia
gaataccgggtcgaccacccgtccggccaaacattgggtttcggcaactaatcttcttaattggaatcctggaggccgggttcaaccccaggattcgggggatttttgacgggccacaaccgattcttcctggttgtcctataatcggaaactggcttaaactcggggaattcccacataaatctttatggaacctttccaaaaagtttggccctgggatgctttaaaggttgggaagagtcccaccagccttggttttttcttttgaaccagcaaaccaggcttggaaaatccatgacctccattgtggaagtcgtccaggttttgcaggggcaagagagcttttttccaactatttagacattgttttttttcctaatgatgataattggaaagaagtaaggaagctcgttgttcaagaccttt

SEQ ID NO: 110306 - DNA, 431 bp, Arabidopsis thaliana columbia
aacgggaccgaaattcccgggccgcccacacccttccgcttaataaaaggttaagttctttgaacctttttccagttctgcgaccaaccaataatgggggctaacttaaaacctttgaaggggccaaaaaaattaaaaagacttgattttttcccaaaaccaataaggatccattgaacaggatgtccaaccacttgcggccaattccaattaccaaatttcgaattaatggaatccttaacacaagccaaggaaggaaagccagtcaaggttcctaccttttccttcggggaacaaatagaaagtaacttgattatcgaaaagatcaataaaaaaggtgttcgggtaacgaagtttttccaattggtgcttgaaatactgattaaagaatttttttttttcccttttgaaagttatgataattaaatttt

SEQ ID NO: 110307 - DNA, 435 bp, Arabidopsis thaliana columbia
  unsure (1)..(435): unsure at all n locations
gcccacccgtccgccaaaaaaaggaaaccccaaaaccaaagtttttttttttttcttaaaccatgcttttnccctgccgtgctttaaaaaaaaaagggtggggaccctaccaaataaaatttcctcgaaaccgcccttttaaccataagaaaaactttccccaacccaaaggttccataagccatcccttgttccgaatctaaccaattaaagtacttggttccattttccgccaaccccccaacttactttaccgttaatttccccggtaactacggttggaacaccgttgttttatccgccaaccaaaaaactttcgccagaaaccttaacttaaaattattccacacaaaatggcccatcttcgaacccttagcctgctttttccctgaccttttgcttagaaacgaattgaatttcgaaaaaccgttttgt

SEQ ID NO: 110308 - DNA, 443 bp, Arabidopsis thaliana columbia
  unsure (1)..(443): unsure at all n locations
aaaaccnggaccggcccacccttcacacacaagtttttttccccaaacttttaaaacctttcttatttcctttccgcccaccnntcctcgcccggattaaaaatatcggctgtttggctaaccacttcttcaaacaaccgcaactttaaattccaaaaagggaccaaaaaaagaaattcaagattccttttttactctttttttttccacaccgactttcaagaaattgaaccactttttaaccacggaattcaccaagacctttaccaaaccaaatttcatgcttctctttaaaaatttcaaaaccgtttccacccaaccacatttcttagggaccatggattttaaataacttccaaccaattttcaaggacttttccaacaaatttttgttaatttctttaaccgtccttgacctgttaatttttttggtttcttttttt

SEQ ID NO: 110309 - DNA, 296 bp, Arabidopsis thaliana columbia
gacggaaaaacccgggccgaccgaggcgtccgagaacccttggccaaagtttgttttaaccttttttttccagatttcgaaaaagctttctgggtggtttctttggggttgcccagccgttttaaaatataatttgggggataaagtaattaaagaaatggtggataatttgggttaatgtcccgatggtttaataaaattttaaagttggacctaaaaaaaagaataaaatttttatagtagaaagttcttaccgtcctaaaggcacaaacttggttttttaatttgtaattgaa

SEQ ID NO: 110310 - DNA, 383 bp, Arabidopsis thaliana columbia
  unsure (1)..(383): unsure at all n locations
aaaaccgggccgccccacccttccaaaaaaaacctctaataattaataactttattctaaaaaacctaccccaaaaactatcggccgcaataactaaaaacttggttgtcttccaaacacanacacaacccataaacttaaagttttttccccaccacccaccatttttcatttttttaaaaaccttttttttttaaataacctcaatctttttctccctaattttttttttccaacctccttaccattttttatcgtccattttaatctttttatacccattaaccaatcttaaattttccaccaaccatttttcaaaattccttttcccattttcaaacactcctttaaatcaaatttcattttttttcttcaattttttt

SEQ ID NO: 110311 - DNA, 463 bp, Arabidopsis thaliana columbia
  unsure (1)..(463): unsure at all n locations
aaaaacccgggccgcccacacccttcactattactaagccaagccaccacctaaattttttaaaacaatccttaantaatnnaacgcgggtaataataataaaaatttcgcttgcccttaataaannattatctaatttctttttgaaaaataaattttttaatcttatttttttaaccatttaatttaaacatatttattcattttcatttttaaccttcaaaaaaaatatataaaaattaattaaaaaataaaattaattttatattaatataataatttttttatattatttattatatattatttaaaatatattttttaatttttattctcttatattttattcttccttttttttttatttaactaattttttttccttctttttattttataaatatatattttattttctatttttcttccctaaataattaaatttcctcttttctctcttatt

SEQ ID NO: 110312 - DNA, 461 bp, Arabidopsis thaliana columbia
  unsure (1)..(461): unsure at all n locations
aaacccaaccgcgcccaccctacaacattttcctttggaccaattacccattacccttaaagccaaaaatccccaanntttgctggctttaaaaaacaaatctttttcctaaaaaaaaaacccnccnccntaaaaaatcataaattttttcccttcacacccaccttattccaacccctttttaccattttttttttttaattttcgtacctaaactttcctttttttttccaaaattccaaccccccttttcccaaccaacccactcaatttttgcttaactttcccaaaaccaatattttatttacctttattttctccttagttccttttccaccttttttaccccttttccagcccccaccatccacctcctttaatttgttttttatccctccaacccctaatttaataacttaaccccttttcccctttttctttttcttttaacccacattttc

SEQ ID NO: 110313 - DNA, 477 bp, Arabidopsis thaliana columbia
ggggccggcccacccgtccgaaccgccaaaacacagcgggtttaaaataaaatttttcggcaaccttaccagaatcggaaccggtgtgggggttttcgggttggggggggaatctcaaaaaaagtttttttttaaccactttttaaccgatcctgaataaaaatttttgtttccgtcgccaagaaaaaaaaaattttaagttttaaaaaatttgaggaagctttaaatgctgttaaaaatttaatgcctggaggggtgaattcccttgttcaaccattaaaatccgtggtgggccaacctgttttgattgattttgttaaaggttaaaaaatgtgggccattgttggaaataagattattgactactttggtttttggggacctgtttttattggccatcctgataacaaggtttttgcggttttagctgaaacaataaaaaaaggaccaagcttgggggctccttgctttttggaa

SEQ ID NO: 110314 - DNA, 363 bp, Arabidopsis thaliana columbia
ccggaccttcccacccgtccaaagggtctgcctgatgaaaaaaattttttgattttttcccctgagtcaatactaccccttggaaggtcctttaataaaacacgtggggcaaatccgaaaataccacctccgtttccgctttttcttccaccacaatgttgattgggaaacctggttgaataaaccaaaatgccataatttgcaggcatgggaaccaccagtttaaacatccaaagggttaaaaccacacaaaatggttcagttaaagcaaccgaggcccaatttccataaaaagtgtcggttccagatgtggaaacccataatttcaatttttttccaaaaaaatttaaagcacccgaggaa

SEQ ID NO: 110315 - DNA, 424 bp, Arabidopsis thaliana columbia
  unsure (1)..(424): unsure at all n locations
aaaaaagaaccggcccacccgacacaaaaaaccacaccaatgccttttttttcccttttattttttcttcaatcttttaaaaancccgtttccattccaaaaaataattgctgcctccaaaccanaaaccntttttttttcctttccttaactcaaccttcctccaccattgattcaacctttccaaccgcctccttttcctttaagcttcctaaccccttgaaattattatttaaaaaccctccccattcaacacctccgtttaaaaagaaaaaacccccccccgttaaaaatttcccctccaaagttaaaaaattaaaaccaccgaaaatttttttcaatttccatattccaaaatgatttaatgaaccttggaattttaacacatttctgaataattaaaaacccaatttgaatcctttat

SEQ ID NO: 110316 - DNA, 462 bp, Arabidopsis thaliana columbia
  unsure (1)..(462): unsure at all n locations
aaaaaagggccgcgcccaccctaacattacctcccatgccctccatcaaaacttttttttacacccaaaaaatctccaaancttgtctttattttaaaacaatttttttgccccaaaacaaacccaaanntccaaaccaatcttcnttccaatcctttttttcttctttttaatcttaccccaaccatttctttttttcccaannttnaaaaaaaatcccttcatttttttcccaccaaccttttcattcccatcaccattcttatttttcctccaataaaaaaaattctttcccanctttaaatttcctttcctaaaccatcttttctttttaccaaattttttcccaaccttctttaacctttttatttcctccttttttctttaaaataattatccttantttttttccttcattcctttaacctcaacttcctcaatttcattttatttttcactttt

SEQ ID NO: 110317 - DNA, 482 bp, Arabidopsis thaliana columbia
aaaaaccggaccggcccacccttacaaaagtccaccaaggattcctcaattgaaatttttatattcctttgcctttaatctaaaaatggtgggcaatataataaaaaccgttgggccaaatttgaaaaacccattttttaaaccaaaccagaattaacaattatccaaagtttcccttggaaccttaactttattcttattttttttcgtaaccaacaaacattacaaagttaaatttaaaaaggggccattctttaagctttttttttcggtttttaaaaattaaacgaaaccactttttttttttattaaaaatttgaaaactaataattttttgaaaaacaacgttgattctttccaaaacaaacttgccaacattacttcttccaggattacttttagggaaaaattttttaattcccttacttttcaaggttttaaattctttggtaacgttaacactaatttaaaaaccttttaac

SEQ ID NO: 110318 - DNA, 468 bp, Arabidopsis thaliana columbia
  unsure (1)..(468): unsure at all n locations
aaaaaacgaaccgcgcccacccttacacaaaaccatttatttcccacttatcaccaaatttttacccatttaaccttaagacctcactctgctgcgaaatttaaaacacacccgccccctaaaaaaatnccaacccattccaaaaccacaaccccttttcctaatctattccttttccttttaattccatctcccacttttttttctttattccaccaaataactattaacctaaaaccaaatttccaccataagttagaaccaaacccaatccaaaccctgaccttagacctttccttccaaaaaattacgtaaacctcttcacttaattttaaattttcaccttcaaccccactaaaagtttttaaaaatcgtcctccatcgcttaactttttaaaaatgaattctttcaccaccctctttaattcaacttccacgaaaaaatttttttttcttcccttttcaatt

SEQ ID NO: 110319 - DNA, 409 bp, Arabidopsis thaliana columbia
  unsure (1)..(409): unsure at all n locations
aaaaaaaaaacggcccggccgnaaaaaaacccttttataatcctataaaaaaaanatttttttccatcctcctaacttaancacnncgcgctcgcgacaatataatacaaatttgttcggtccccaaaaaactaanccaaaanttaaccattttttcttttttgaaaactttccnnttcccctcccttttagaaaccaatattttttttttttncttttttnaaaaccaaaaacaaaatttcttcttaaaaatttttaaaacccaaaaaccaagttttagattctcatttttttacctttttttggaattgttttaacaaagccaaataactctttccttcttccttttcttttaacctctttctttcaatcattctttgttatgcctttacctgaaaaatctttttta

SEQ ID NO: 110320 - DNA, 399 bp, Arabidopsis thaliana columbia
  unsure (1)..(399): unsure at all n locations
aaaaaaaaaaccgggccgccccaacnccattaaaacattttttttttaaaaanatttgttttataaaaacaattttcaannnnaaccgtccgatttatcagaaaaccttgctcttccaaaaaaaannntaaaacnncctaaaaattccaattacccaccaccacttccatttttcttcccattcaacccaattccattttcttttatcacaccccaaaaccccaatttcttaccccctttcctttttttttccttaccantttttccattattctcatttaaaaaacccccaaacttttttcccctttttttaatccaacccattcccttttctttttcttgccttaaccttttcccttttttactttcctcttttaattcttttttntcccttaaccc

SEQ ID NO: 110321 - DNA, 379 bp, Arabidopsis thaliana columbia
tccgaattaacactgggggtaatcggtttctggaaattttccaaccccaacttcccttgggttttttttgtaaagaaaacaaccacttggggaaacatttaacaagccatcgacctttatttcctgtggttccaaccccttttttaattgttattgttcaaatcaataaagcttctttctttccgattccaagggtttttcggaatttccagattcctctgccaatggaaatggaccaggtccgaaaatttaccaaaaatttttttaacatccctaaaatgaaaaactttgatgttttaaatcctttaaaagacttgttgcttccaaattggcctaaccttccttttgctgttgttaaaaatcctaaaaccgcaatttt

SEQ ID NO: 110322 - DNA, 315 bp, Arabidopsis thaliana columbia
  unsure (1)..(315): unsure at all n locations
attcccgggtggccacactcgtccaaccgattccnttaaagggtggaaggtttttttttattccaagaaggagtccccgtgggctttaattagaataatggggggggccaccacccttaaagtccattgctttattttaattgcttacaagccccaaattttaaccttaacttaaattttttttttaaaacatcttaatgattaatctttgttaatttaatttccattggcttgggttcttttttttttaatgagacatttcttatcgttttgtcaaatgtcgttttattgaatttgtattttttttattaaatt

SEQ ID NO: 110323 - DNA, 347 bp, Arabidopsis thaliana columbia
ttaacttaatccgattggtggttttggaattttttttaactgggtttcgtttttaaacgggtgttgaccatgaatttttggtttggttaaacattttttgggtattaatatccaagggggaatgttttgggattttttgtggcaggtgggttgttttttcttaaatggaagaaaagtttaattggttaacctggtggtagtaaaactccagggaaggtttgggcgtaaagccgttatgtgccagggaaatgggaagatttgtcggtggttaagaagggtttaccgggaagggaaccggtggggaagctgggttttggggggactttgttgatggataattttgatgg

SEQ ID NO: 110324 - DNA, 387 bp, Arabidopsis thaliana columbia
ttaattaatactggaaaaattaagggattcgtttggtttttgccaggtttccaattttacagaatgggatttaaatttggaggcacctaattcaatgggaccgaccataatgggggtaatttacaatggaggggtggtcctgggggccgattaacgtaccagaaccggtttgtccgtagcgaatcgggcttttgttaagattccacaactgccagataatgtttacgtttgccgttttggatcggttgttgattttaaagtggtttttgattatgtccgttatttctttaaccagcatacaattaagaatggccaacccgaaactgttaaggtttttgccaacctaataaggatgttggaatttaataccaggaacatgttcaaaac

SEQ ID NO: 110325 - DNA, 340 bp, Arabidopsis thaliana columbia
cggaccggaaaacccgggccgaccacacccgtccgatctaatccttcctcttcctccgccagttttttttttggcgaaaataaccaacaccaggggcggcttgaacatgtccggttggtccaccgttctaaacagggaggatcggcccggccttgttaatgctctaaaaaccaagttgcaaaattgggttggccaccactcttttgtccttgaaaacttgcctccaccagccaggaagcgtgccgggtttttaaaagggattcaaacccaatttgattggatggaagcaaaattctttgaggagagagcagtttttgaagctaatttttaaaagttttat

SEQ ID NO: 110326 - DNA, 311 bp, Arabidopsis thaliana columbia
gaagaatccgaatccaattaaatgggtttttttcgttttttcctcgtggtggtggttcttggtttttttgcgggggccgggggggaccccatcgtttccagattccaggagtccttccgaataaacacggttaagcccaacccggattactccaaagccgtggcctttttaatatttaaggcgaaaccactgtccttggaatttaaaacaatcgatttggtaaaaggaaagccgtttttcttcttaaaatgggtgggttccgaccaaaccttacctgcttttttcttaaactccaacaccgatgtcgttcc

SEQ ID NO: 110327 - DNA, 383 bp, Arabidopsis thaliana columbia
aaagggaccggaaaacccgggcggcccacacccttccgttttggtggcaaacacaacaccagattttgtttaaacgatggcttcaaactccttaatgggcggtgtattagccgccgggtgcgttcagttaattttttcttccaagtttaaattcgaatccgccggagttcaactccaaaaccccggaattgtgggtcgtataaaaatggttgttaattgaatgcctggcaagccataaccagttaacttggacggttttgttcctggtaactttggttttgaccaatttgtacttgaaaaagttccagctaactttgtaagatccaaaaatgaaaacttaatccactgtaaatgggttatcgctttttgttccctgaattttt

SEQ ID NO: 110328 - DNA, 417 bp, Arabidopsis thaliana columbia
gaactttggactgtttttttgcggcgaaaaaaaaagcgaagttggaaatttccgattaagccatgattgttcccgaccgatttgggcgattcgtcgtccttgaaggaaccaaaaaggttttttttgatggggttccaaaaataataaaggttgtttctttaacggtggaaagagaagaccttccgatgggaaacattgtccgattgcaacttaatggggacaggaatgtttggttggttggataccaacttcttaatccttttaagtccaaaatattaggggggtttaacacaacaggccagttttccccaatgcaggcttccaaccgggccataattgacttggccaaggagttggactacttgaaaaaccagtttggggacaaggtggccaatttttcaaataagtttaaggaac

SEQ ID NO: 110329 - DNA, 385 bp, Arabidopsis thaliana columbia
ccggcccggaataccggggtggaccacacccgtccggccacattattttgaagccgaagttgaaaacatttaatggattagggccagaccttccgggttatggggtcaaatttaattttggaggggtttttttccggcgtagcgccggggtcgggtgggccattaccggagctttttccggggctggattggggaagggtccagttgattcgttggatccagggaaagtctgggtttggaggggaaatgagattccgttttttgatttatggaaggataggaaggccgtggtggcatttgctgcgaatttgggaggggggctctgccggaaacaagcagttaattttgcagaaaaaaaggatgggatggatgcatctggggtggt

SEQ ID NO: 110330 - DNA, 394 bp, Arabidopsis thaliana columbia
atggctttagccaggaccgaaagggaaggcatatagttgagggttccggggttaaaagtcctgctttgggttcctggttttttgggcaaatccaaaggagctgtggttcctgcactaataatgttgggcgactccattgtggccgttggcaccaccattaacttactcagaatggtcaaatccaacttttttctttccggtggagacttaatggaccaaagacccaccggaggattttgcaccggaaaactcgttgtaaatttttaagccgagtcccttggttttttttattaccaacctgctttcttaagccgggaggcaggcaccgggaatatcctgatcggggccaactttgcatcagctttttcaggatactttgatgccccatttgttc

SEQ ID NO: 110331 - DNA, 252 bp, Arabidopsis thaliana columbia
cacccaatttaaaaatccattttttttaatgaaccatctttgaaagggcggctattaaacatttgggggggttcaaatgattaaaactattttctaattaattaatggccgtctttttaaccaagatttataattccattaaactaatattaatatttggaatagaaaaaaccttaaagtgatctataaggacttaaaatttattccaactcaaacatttttcttaatcctctttaggttttttccaacaaa

SEQ ID NO: 110332 - DNA, 180 bp, Arabidopsis thaliana columbia
ggtcctaaaattttatctttcaaaatctttttcgtccctcgggctccgttttaaaatttggtgggtccgtcaaaccaacctttttgaattcttagtttcacatcaggaattattccttgtcaaatctatttttgtttcaatctttactttttaagttcctttcttactaatttttggttc

SEQ ID NO: 110333 - DNA, 429 bp, Arabidopsis thaliana columbia
  unsure (1)..(429): unsure at all n locations
aacgggnccggaaaaccggggcggacccacgcgtccggaccaccaccattaagcaaaaggaaaggtttatgccgggggggccaagggcataaacattgaggggttaaagcagggtggtgaccccaccaccattcttgggccagactaaagcctaaagcttaaacccctttcgggaggtggcttttttgggatttcccaagtccactatgggaaaggatcttggtgttggacctgccagagggaagtcctaaggacccttttccgttaaaactccgttttacttaaccggaaaattcccgggcgattatggtggggacaccgccggtttatccgaagaccttgaagcttttgccaaaaacagagttttggaggtgatccatgggggatgggcaaggttgggggctttgggtggcataaccctggaaggtt

SEQ ID NO: 110334 - DNA, 381 bp, Arabidopsis thaliana columbia
ccggggccgaccacacgcgtccgttgaagggaagggggttgaaactaccaagatgtttttcttaattgaagaataagttgatcgtagggttcccaaggttaacttggccccaaaaggagtttttgatttttttgcaaaggtgggtccaaaaaacaacttttttgagttaaaactggaacttgccgttaaagtaattgttggggaaggcaaaataaacatgggggggggaggctttttttgattaattgaaaaagcaaagccggaaggggggaataggttactccgggtgaagaagccccaacattttttaagggttgattggaccaagtgggttgttggggacaataaaggcagggctgttgctcaagatttggttttggc

SEQ ID NO: 110335 - DNA, 365 bp, Arabidopsis thaliana columbia
aaagaaaaacccgggccgacccacccttccggaaggaaggaaaaggaaacccagaattgtcttttccaccagcatctacggaatttgtggtgccggccaatgtaacttggggggcgggcccttaaccacccagaacctccgttttttttttgccattaaaaaaccccggttttagcttcgtagtcaggccacccaaaaatcctgttccgctttcctttttttaaaaaaattttccgccagttgccgttgttccgattggacctcctgccaccaaacccaaccaaccaccgattgttcttaaaaaagggtttaaggtcaaaattttaaggagagaatcctattgtttcaaaacctttgaatcagtt

SEQ ID NO: 110336 - DNA, 373 bp, Arabidopsis thaliana columbia
ccggggccggccacacccgtccgcaagtttaatattacagtccttttaataaaaatacctttcctgcattaacttggcctattggggtggaaaactaaactgtggggtccaggctaagcctttaaccttgttgtaacaagtttaatcctccgtgtgtggactaatggttaacctttgggagaactttctgtccgttttccaaccaagatccaagaccagccccggtagaccctccactttaaaaaacccccccattgttttaatctgctgaatcgtttttaacttcttcctttttgaactcttaagtcaaaccatctgcactattaatgggtccttccttggcctcataaccaacttaaattcttttttttcc

SEQ ID NO: 110337 - DNA, 356 bp, Arabidopsis thaliana columbia
aaaccgggccgccccacccttccgaaaaacacaaaatgccttcattggttgaattctcctttccttctccgccggttcttaaaggcgccttaaatatcaatgcctccggccgcctaaatacctctgaaaaattgccgttgcctcaaagttttaaccttttctccaaacctcaccaaattgaggaaccttctcccctttccctaattggcctttttcctcctgatttacctgtggcctcgtttgtccagcctttccttcccattccttttccaaccaaagttgcccttcctccacttccttccgttgcccttctctggccaaattcctcaacccaaccaataacctttcctttgcct

SEQ ID NO: 110338 - DNA, 377 bp, Arabidopsis thaliana columbia
aaataccggggccgcccacacccttccaactttttttgttaattgcaatgtcaattttctcctttttaccactatcctttgtcttttgtgtaaaccttcgttaaattggggtaaccctctaactgaatttttttttccttccactgcgtcaacttttcaaaccgatttaaccgtcgttccaaaattcgcggaatcattcttcaaacttgacccggaaactcccgatttcaaacctgggttggtttccaatgtttcgaaggttcctgtggaaaaagctaaacaagaagagattttcgctgttattatggttggtggaccccaatccatagggtttccagggagatattttttcattaaaaggttaaaaaatccaaatg

SEQ ID NO: 110339 - DNA, 337 bp, Arabidopsis thaliana columbia
aaaaacccgggccgaccacacccttccggcacatgaataccaagtttttccaaaccctaattcttaaaatttttttgggggttttcatgggttgaataacaaaagatgctggggctgctaattttctaacatcctcaaaaaaacgcaaagtgtgtttggatccaaaaaatttaaaggagttaaagcttgttaaaaaacataactttattaacaatgtgcccaagttcgtttttgaactccaaacttttacttttgggtggggtcttccaatggaacaccacataatttgcagggaaaaggatgttaaaggaaaggattttataaacccatacacccc

SEQ ID NO: 110340 - DNA, 390 bp, Arabidopsis thaliana columbia
  unsure (1)..(390): unsure at all n locations
ccgggccgcgcccacccttccgaagtaaaccttgaacctttgacctaaaaaattttcttttttggttttttcgaaaatcctgggtcctcccttaaacttaagggcggttccaaaaccgtttgttccnttgccttaaaccccatccactttcaaaacttttctttttttttttaaaaaaaacccacttcttcttaattccaaggttttttttaaaactaccaataacctccccaattgttttgttcctgccagaaaaatttttttccctattggtcttttgattaaatcaaaaatcccaaagtccttaaccggtaaatttctttgaaattttgtttttaccccatttgtttttgaaaggaaccctgaaaacttttttaattcccaaccttt

SEQ ID NO: 110341 - DNA, 414 bp, Arabidopsis thaliana columbia
acgggaccgaaaaacccggtccggccacacccgtccggagttaataagtgaaattaaaccattactttatgttactaatttaagtttggttaaatccgtgggattttttgttaataggggggggaaaattttcgttggggatattgtacccaatggaacttttaaaaataatttgaattgtaaggaaggaaagattttcaccatggcaactcggttggatatcgaacccaatgaacttaatgccataacctattttaacatgtttccacagccacttttattccacagaattttaaaattttaaaacattttcttaattgaaaattacaaagccaaggttgttgatttcggttttgcaagattagctccagatctctgttcaggagccacccattttttaacacaagtaaaagg

SEQ ID NO: 110342 - DNA, 347 bp, Arabidopsis thaliana columbia
aaaaaagaaccgcgcccacccgaccaaaaagaaacaccaagaagtattattgctttttttttttttttcttccacccttaaattaccggccgggtttaatgcaacctgtgtggttcaattaaccggtttaaaataatccgttgctttcccgttaacccgcaaaaccaacaaggccataatttccatctaaagcaacgtggaaaaagttacttccataaagttttggccaccaattgtaaaaaaaaattttgaaacttttttttacttccttgactcttataacttctaattgtctaagaaagttaactaccttttccgaaccaagtgatttcttttttttaaattca

SEQ ID NO: 110343 - DNA, 289 bp, Arabidopsis thaliana columbia
aaccgaaatagcgggaccgtctcacccgcccgctaaacctacaacctttttaggactccactaattttaacttttggcaaaaggcaaaaaatcggggagtggaaattgatctaagggcgcgaacttttcttcctctggtcgttgatgtgggtggggaaacctttgtttccaaggataaaaagttgggcgaatgctgtggaagcgaaaccggcaagggctggcaacagttgcttaaaaagacgtgcacgggggaactcgccggcccacgatgcttttttttgccagtctt

SEQ ID NO: 110344 - DNA, 435 bp, Arabidopsis thaliana columbia
gatttttgtgattcaggcggtaacagatatttacgacatgtaccgtatgtctctcacagccaatcacatgttgatgctcttcgacgctatgcacggcattggatccaacgctcacaaaatcaacgctgatctactcttacgttccaagctccaggagctcgggtcgtcccttgaatcccaagaagctcctctgctgcgcctggagaacgaatctttccaaacatgtatgaccttcttagacaacctcatctcagatcagcctgtgggttacaacgaggctgaaatagaatcccacctcataagcctctgcagagaggtgttagagttctacataaatatttcatgttcaaaggagcagtcttcaaggtgggcggttcccttggggtcaggaaaaaagaaagagctaacagcgcgggcttcgttagtggtggcttg

SEQ ID NO: 110345 - DNA, 250 bp, Arabidopsis thaliana columbia
  unsure (1)..(250): unsure at all n locations
acgnctaatgaaaggcttagttgcttgtttctgttgccagttctgcggacaagcgataatcgggactaatctaagagctggaaaggcgacagaagaagtatagagacttttatctgtgccaagaccgatatggatgcattggacaggatgtcccaacacttgctgacaagttcaagtagcatatttcggattcatgggatgcttaacactaggctaggaatgaatgccagtttagggtgctgactgtgta

SEQ ID NO: 110346 - DNA, 427 bp, Arabidopsis thaliana columbia
  unsure (1)..(427): unsure at all n locations
ccaaaaaaaagaaaacacaaaaacaaagattataatggcttcctcaaccatggctttgtcctcccctgccttcgccggaaaggctgtgaagcctgccgcatcagatgtcctcggaagcggccgtgtgaccatgaggaagactgtcgccaagccaaagggtccatcaggcagcccatggtacggatctgaccgagtcaagtacttgggtccattctccggcgagcccccgagctaccttaccggtgagttccccggtgactacggatgggacaccgctggtctatccgccgacccagagaccttcgccaggaaccgtgagctagaagttatccacagcagatgggccatgctcggagccctaggctgcgttttccctgagctattggctaggaacggagtgaagttcggagaagcggnttggttcaag

SEQ ID NO: 110347 - DNA, 211 bp, Arabidopsis thaliana columbia
  unsure (1)..(211): unsure at all n locations
ccccaaagctctcaaacctctgctttttcctctccggccgacgtttcttcaccgggatcagaatgtcaggctgttgctcaccgnctattacaaccaccgccacctcgaagttcaagacgggaacgaagatagagattcaagagtcgcttcttactccgaggttttacacgactgacttcgaggtaatggctcagcttttttacacggcgat

SEQ ID NO: 110348 - DNA, 258 bp, Arabidopsis thaliana columbia
  unsure (1)..(258): unsure at all n locations
gacccacgcggncggaagaagagaaacaacaagaagaagnaangttttttctttatgctcaacccccaccgctgacggaccggcccagctcaagccagcagggggcccccactcaccagactgaagacaaccccacctttccaccacacccaaaaggccaacaacgacataactcccatcacaagcaacagaggaagactcacccccacgaaagaccgcccaccaatcgaaaagaaaaagtccgagacactataccac

SEQ ID NO: 110349 - DNA, 349 bp, Arabidopsis thaliana columbia
gaaaaagtactcgcaagatgtatctttacatgcataaaagctggcccaaatgctggaaacataagatgctgagtatgggagaagtatgattacctttgacgaggccataaacagaaaggattttacacaacacacaacagtgatcaatatgaggaaaagcttcttttgcgagatgatctgcatcgtttaggtccttagtgttttgctcccagctccttaccatatgtcattgcgcagcttcagctgtctattaccatttaacaatcggtaatgtttcaacaatcacttttgttaattccctttcccatattccaaactcctgtagaatcaaatctaatattgtagttgg

SEQ ID NO: 110350 - DNA, 254 bp, Arabidopsis thaliana columbia
gtatactgaggcaaggcgacaactgaaaggcataaaacgatgcttcagtgatgtgatccagtttataactataagagaatccaaaagcctttatgtgtgtatatctgatttctgtttggagaattaagtatatgatgctatgtggttaaacgattgatataaacaaaatcaagcaatgtcgattttcaacttcaaaaaaaaaaaaaactaaagatgatctaactggttaaattagaataaaaagaaatagatga

SEQ ID NO: 110351 - DNA, 255 bp, Arabidopsis thaliana columbia
  unsure (1)..(255): unsure at all n locations
ccgggccgacccacgcgaacggaaaacagcacgcaaggcagacaacnataaaggttttaaaacaaccacggcantnnaccgagccaggctataacggaaagggaggggagactcccttatnagaagatctccgaagccggcccgcaaacataaggaaaacaggcgacaagccaaagcgaccaacacgcacaccatgaaacggagccgacccgacaaaagcacaagggtccaacctccggcaagcccccgagctac

SEQ ID NO: 110352 - DNA, 310 bp, Arabidopsis thaliana columbia
  unsure (1)..(310): unsure at all n locations
cgacccacggcggcgacagagncaancccagggccaacaggggcattttctttgtttccgagatatgcaccanaaagcagagcgcataaggagcggcgacagggttnctacacattccggtgtagctcaaaggttctacaacaatggaaaccaacctcttgtcatcgctagccgcatggattaagctagccaccagaaccaggttgaccacaacccaaggcgcatttacttagcaagaaaaaacccacaaagccaatcatggctacacggacgagggcaacagccacaaaacaacatccttaatggcttc

SEQ ID NO: 110353 - DNA, 326 bp, Arabidopsis thaliana columbia
aagggtctgactgatgaagaagatttcttgattgtattccctgagtccatactacccctctccacgggcctccatgaaacacctcaggcaaatccggagataacacctccgcttccgcctcttactccgacacaatggtggatggggaagctggttgaatcaaccgaaatgccatcacttgcaggcagtggaaacaacagtttcaacattcagagggatgaaaacacacagaatggatcagttcaagcgaacgaggcacaatattcatcagaagtgtcggctacagatggtgataaccataattttttatatttatacagaagaat

SEQ ID NO: 110354 - DNA, 297 bp, Arabidopsis thaliana columbia
  unsure (1)..(297): unsure at all n locations
cggaattngngagaacgcccacgcgtccgcagaccctaatataatcctcagaaagaatgttttatttcatgctgctaacttcaagcatcgccgcggttcattttttgaggggacaagatccctttggctcaccccaaagttcaccatcttttcctctttggaaactctccggttgcactaccatctaggagacaattattcttacctctctatttttgtaatcccaacaccaaattctttccttatattcttagttatcctcttttttttttttttcctatttctcttccttatttt

SEQ ID NO: 110355 - DNA, 267 bp, Arabidopsis thaliana columbia
  unsure (1)..(267): unsure at all n locations
agaaaccacaacaagggggtgggtctccccgtcaatctgttcttcatctcttcaaaatccgaatgggattcccaaagtttcggtctccctcctctccagtaaccgcttctctctcctctccgtcactcgagctttctgcgacagtggatcaacctntcccaccggcgccgtcttcgaggaggcttctgagcccgggggagtgatagttaaagagccttcgcaatcaacaccgggggttaaaaaggaagaaaccggcaccggtaaaaa

SEQ ID NO: 110356 - DNA, 428 bp, Arabidopsis thaliana columbia
ctactactttgtggagtttatgcacagagtgtagctgcttctggaaatatgaaacatgcggggcgagtcttcgacatggcggtgacttctatctgtggcctccctaaggttagtttcagatcttttggttatattgttacttgttagcatatgatacaaaatttcaggtttccacgtatgtttctaattccaaggaacttctggatcagtaaccctggttttgtgtttatttctgattcaaattatcgcgtactggtcccaaaaactggggcactgccacttgagtttggacaagataatctctctcatggacggatcatagtagagtttgttatagaacagtctcttcttggtaatgtacagggaagcatggcctagtggatatattctagccccatttccgtgctttctttggatttttatgacat

SEQ ID NO: 110357 - DNA, 244 bp, Arabidopsis thaliana columbia
  unsure (1)..(244): unsure at all n locations
ggaaaacccgngccgacccacacgnccgcngaaccaccgcacaaccncaaaatttatgtttcaaaccacgctncttactncacggggcaccttcaaacagggacggaggaacaatatccctttttctcaacccaaaaatcaccatctcttcctctctgaaaacactccgcatgcactaccatctaagacacaaacattcaatcctcacgctctcaccaaacccaaaaccaaagctattcccaaa

SEQ ID NO: 110358 - DNA, 263 bp, Arabidopsis thaliana columbia
  unsure (1)..(263): unsure at all n locations
ctagaacgcnnncnagagagagagggaaggtttatgaagagganggacgaangggagcgagcgagnnccccgagaggcgaccgagacgnacancggcacaaacggacaaagacgacaaggagccaccaccagccccaaacngcgagccaggcgagcccgagccgcggacccccaacagagccggaagcagccgagacagagcccaccaccgganccaaaacanaacagnacagacagggangggagggaagagagcaccaaac

SEQ ID NO: 110359 - DNA, 282 bp, Arabidopsis thaliana columbia
ttaccatttaccaagaaagaaaaatgacaattgcgatgatgatattcgcggttttggttacagtggtggaggtggaagcacagactgagtgcgtgagcaagatagttccctgcttcaggttcttgaacacgacaacaaagccgtcgacggattgttgcaactcgatcaaggaagcgatggagaaagattttagctgtctttgcaccatctacaacactcctggtttactcgctcagttcaacatcactacagattaagctcttggtcttaaccttctatgtg

SEQ ID NO: 110360 - DNA, 166 bp, Arabidopsis thaliana columbia
  unsure (1)..(166): unsure at all n locations
cggcccgacccacgcgnncgnaccgacnccgcncaagngnngaaggaagtttaagaacgcaagaaggagnacccgggcgcggncanaaggagcangggaggggacaacacccgncaagnccaangcancagnnncaaagccgacaagcccccaagcaccaccgaag

SEQ ID NO: 110361 - DNA, 121 bp, Arabidopsis thaliana columbia
tttgaatttcttttcacttggcttcgtttctaaacgagttatgaacatgaatttgttgggttgggtcaacatcttctgagttatcatatccaagtgagaatgttctgagattttctggtgc

SEQ ID NO: 110362 - DNA, 193 bp, Arabidopsis thaliana columbia
ctaattaatactcgcaaaactcagcgattcgtttcgtttctgacaagtttccaattctacagggagtggatctcaatctcgatgcaccgcactccatgggaacgaccatcatcggcgtcacttacaatggaggtgtctttcctggttgttaggtaccatatcaataatggtttcctcattgtgcatcgatgtc

SEQ ID NO: 110363 - DNA, 244 bp, Arabidopsis thaliana columbia
caaggagaaagagctagcaaacgggttaaagattccaccagggtaaccaacttcacccttaggtaagctgtattgcttaaagatagggtcttggttcacacttcctgggttcttgatgtcttgccaccgtctgatctcaacgtaatgaaacaatatgaactcattcacgaacattgtttgcttccaatccaaactctgttatgtgccagcatcttgccactgatgtacatagatgagctcgggc

SEQ ID NO: 110364 - DNA, 314 bp, Arabidopsis thaliana columbia
ggactattgcgcaataaatataatttttttttctgcttgtgcaactggaacagagggaaggggcgttactgcgatggggccgctttcaccggcgatagtcaggatgagagctcacaactttactatagaggacaacgaatctggcattcaggtatggaagaactactctctataggcatgcaaaaagcagaacaggctctactttctggatgatcagctgggggattagctttcatcctacactgcgatcaggtcaaggaactatttcctggcactactatcagtaaatgcttaatttgattctggaatggtta

SEQ ID NO: 110365 - DNA, 276 bp, Arabidopsis thaliana columbia
accatggataccgagtgtatccgaactttatatcgtcagagcactatgcgcggctgtgtggctaaacctgccgttgatgcggctaaacctcagactggaacattctctacgtacactgcggcgacgtcgcgaaccgcattcaccaaggctccgaagctcgcggaatcacacgtcgaaactgaaccggagactaccgatatcgaagctgtggtggtttccaatgtttcgtagggtactgaggaaaaagctaaacgagaagagatttccgctggtatt

SEQ ID NO: 110366 - DNA, 222 bp, Arabidopsis thaliana columbia
gagtttatgagtgagacacattctagttactatggttggtaagatggatttgtgcataggcagaagatttgtggattgtccagacttaggacctgattgtagaggagcttgcatcactggtgtatcgaccggtctagccaccattacagttcacgcccttatccggattaatttaacatttctatgaatcaaccggtgtgttcgtttcagatgctcagtctg

SEQ ID NO: 110367 - DNA, 239 bp, Arabidopsis thaliana columbia
gacgaaaccaagcaaccagcggagccgacgctttgttttccagcccaacatccagaggaggcgacgggctttttcgaaaaggggagggcgattcttcccctgcatcaagcaaagaccacctaagaaccaccgcatacagtgacagagactgcgactaaccaaacaaggtacaggacgcaggatgatgatcgaactcatccatccaccggagcaggacacctcaatccaaacaaagctag

SEQ ID NO: 110368 - DNA, 219 bp, Arabidopsis thaliana columbia
gttacgagaatatgaagaaggaaggtgctttgatcaccgagtggaaagaaaccccggaggcgcttatcatgaagggggtcaaccccaaagctctcctgcccttgaccatgacgttcggggtgtagacaagaaagacaaggagctaaagcattaaccacaaacgttaaagcaaaaacaatgaggcctgaagacaacaaacccccacagacggggaccatg

SEQ ID NO: 110369 - DNA, 267 bp, Arabidopsis thaliana columbia
gcccgaaattccggggcggaccacacccgtccgttggtttttgttcaaaatggcaactttggggtggggattatttaaattaataagttaagcctacctaggttttgttgaggggaattatggtttttaagacctaaataaattggggacctcttataaaaacctttcccaggttaagaaggggtttttttttttaatctaatagcctaatgggattagcccttttggggtttgggcggtatgtgttggggggaacccaactggttt

SEQ ID NO: 110370 - DNA, 302 bp, Arabidopsis thaliana columbia
  unsure (1)..(302): unsure at all n locations
cccgtttaacctatccttgatttcctattcgcaccccaaaacttccaaaaaggaggttttttataaacatttaatgtgttcccaaaaaactttttaanttaaaaaanaaaaaccttaaaaattttctaatcctaaaattaaactttcactcnncaatatccattttttaaaattnaanaaaaaaatcctcttcaaaaccattcctttttttattttttcaccattaatttttttttaaaattaaattacaaaaccttattttttccaatccattttaaccantactcccacttttttttttt

SEQ ID NO: 110371 - DNA, 323 bp, Arabidopsis thaliana columbia
ccgggcggaccacagccgtccgatcacaaaggagacggttggtttttgcaaaaaacaatcttgttttataaggaatcctaagggggtggaaccaccttgctctgggagggttttttgttaataaaggtcaccctgttgaacatgtaattcgaaggttgtttttgccaattgttgcaaccattgccggccatttttcagtggttgaactaaaggcccttttaattgggttcagttttggggtattagattttgccagggtttatcctttggaaaaggtcttccaagtttttgttaagacttttgttgagcaattttttcaagag

SEQ ID NO: 110372 - DNA, 341 bp, Arabidopsis thaliana columbia
  unsure (1)..(341): unsure at all n locations
cggcccacccaacaaatttttttatacctaaaatttttttaaatttaatttaaaaaaaaccaaattgcccccaggggctctttttaaaattttcctgcccccataaacaactccattttccaacaaaacccctaactccatttaattccatncccttcttcccttccttttaattnnttcttttttttccttacccaaactataaaccacctntaaaaaatcctcctccctttccttaaaacctaacctaaccccttccattctattaattttaaccccatttttttcccttttccttccccctttcttttttttcaacttccaaaaaaaaaacttaccaa

SEQ ID NO: 110373 - DNA, 396 bp, Arabidopsis thaliana columbia
gttaagggtttgaatcccaacgatttggttccactaatgggggggggccacagcgtcggggtggaacattgaagttttttccgggacaggttttccgcccgggcaatggaaccttaattgaagtttagttggggggggaaatgcagttcccttaacgccccaccaccgtttttggcccaaaagacttaatttactggggttaacgcattttatggggggatccgaagccaaaggggaattttaggaattgatcaaaactggggtttggatagatcaaccagggggatggggtttggttttgcataaggcattccacttttaagaaggagattggccgaagcatggttgaaaatgggtcccataaaggtttttaccggccgttttgaaaagatcagg

SEQ ID NO: 110374 - DNA, 421 bp, Arabidopsis thaliana columbia
ccgggccgaccacacccttccgttttttcatccactataaaattccttttatatgtaataaagggggaccaaaaagggaaggggccagtcttaaaatgctgacaggccatacaacaattagccaccaagatttactcttttgttgccaagttaacaccaattcatcccttctccaaacacctttccttttttaacctctaaacccgaccttgatccatttttccacccacctaatcacttcaacacctctttgttttagttctccgtatgtcttctttatattctcccttttttttcttttttttccttattttttttggctattccatcggtaatttattcttttttttatcttcttcttacttttttatattctttttacttcttttttttaattttttcctttttttctttatttctt

SEQ ID NO: 110375 - DNA, 320 bp, Arabidopsis thaliana columbia
  unsure (1)..(320): unsure at all n locations
gggaanncccgggccgaccacacccttccaagctgggttaacccggggggaaccacttttttttttgccccaccataaacaccaaactcgggctaaaagttaatactcgaacgggccccatcaacccggttggtcatttcgccctcgtcgtaaaagttaacttaaaagccgttcatccaaggtttcccaatgggggcctaatgtttaaacactaaaactcgttcccaatcgggtcaatgatagatataaaaggtccattagggcccatcgggtccaaaggcaaaggcaccttcctggtcagcggaaaacctaagtttgcc

SEQ ID NO: 110376 - DNA, 411 bp, Arabidopsis thaliana columbia
cggggtcgcccacacccgtccgttaaatttaaggcctgatctgatgggttgtttttcccacggggttcctttaacacccaacgggaaccttaaggcgggggctggtggcctttttttaaaactttgaaggggtccgtttaacctccgtttttttttcgcctttggaccgagctagatccatggttgtttttgtttgccaggaaatgaattttcctggggggcttttgcaggtttcggttgctgtggttgagatgagttaaggggcctggaaaagctgtcatcggtcagagattaacccacttgaaactttaagtttattagaaggatgccaaccggatttttaagctccatctggggattcactcagccaggtagagtttcggttggttaattttttgattgggccagttt

SEQ ID NO: 110377 - DNA, 418 bp, Arabidopsis thaliana columbia
  unsure (1)..(418): unsure at all n locations
ccggnncggaaancccggggcggcccaacccttccaaccaaatttaaaacgtttaacttggggctgaattattaaacctaaagggccgcttaaacaagggttttttcttcccttgccttggccggtagggccgcaaagctttcccccgcggattttgaagtcctgggaggcggccgggtgccattggggaagactgttgccaagccaaagggcccatcaggcagcccatggtccggttctgcccgggtcaggtccttgggtccattctttggcgaataaccgggctaccttaccggggggttccccggggcctacggatgggccaccgccggactttaagttgaccccgagccattcgcagggaaccgggaactagaagttttccccagcaggtgggccatgctcggagccctaggct

SEQ ID NO: 110378 - DNA, 343 bp, Arabidopsis thaliana columbia
  unsure (1)..(343): unsure at all n locations
acctctnccaaaataatgaatttttnttttctttttttctaaccgaacgacataattgggaagggcctacttaaatggggggggaaccttcttctaataaccgtcgttaaacaccgctaaccacatatttttgtttaacaaccttttttctccgaaacctttactttaacacctaaatctgtttcaacaaaaaaaaggagaatttctcccccaccatgaaaaagtttaatatggattttcaaaagttttcaccagaacccacctccgtttttaatggttcctccacagaacaccacccatatgctctgtaaacttataatattttgtccctgatcccacacca

SEQ ID NO: 110379 - DNA, 340 bp, Arabidopsis thaliana columbia
  unsure (1)..(340): unsure at all n locations
gaatncccgggccgcccacacccttccgaccacagggggggaggggggaaagatttaatttttgccagagttattgccttccagggcgggtttcctacaccaaagggcatgggcttaataaccccaccaatcataattttcttcttaatccaagcttaacttgtcgttttccaaacctgttcaaatcatttttaaagttaaccagtttaataaaaacaataactccgccgtttcccgccgtttggttttaattttcctgttaggccccgttgttgttggttccaaagattctcctgctgatcccgcctacggtaaacctgcaaacgtgtttggtaagcca

SEQ ID NO: 110380 - DNA, 437 bp, Arabidopsis thaliana columbia
ccgggccgacccagccgtccgattgttaataatccaccaaaagggggttttttccatccggtttaaatggccattgggattggaagggctttttaatggttaggccgccccgccttaaaaaataaaaaaggccttgacctttttgtcccccgaatccctactttttttgaaacttttccgttagttttgttttacggaaccggaatttttagacctgccttcccttttagaaggccaaaatcaaattttattttccaccaagtaggtttaactgttaagttttatggtggtgaactcaatggagtgagttttattgatcccccaactgtgaaaaatttttcttaacggcttcaattggttgagatttttgaattagatcgtccaactttgaaatcttatggtttttttcttaccaccccaaaaggttgtttaacttt

SEQ ID NO: 110381 - DNA, 415 bp, Arabidopsis thaliana columbia
ccgggccgaccacacccttccgttaaagtttttgtttttgaaaattttttttctattggatccaaccaaattaatttagggggggtgatccaccagggggggcggggataacctaataaacaaaattttctatttgaaattaacgcaaaattttcttaaaagccattaaaggaagtgtgagaagtaaatttaatgcaaaaaaatttaaggtaaaaaaggctttcttaaagggaattttgattgttgcttgtacctactcttaaacctcattttttaatctttataagcaattaacctatttccagttcttttttactcttaacgctgttgtttttgtccttaaacctaagcttattttatcccccatttccaattctttgcccaattttttaaaatcttttgattttttttttcc

SEQ ID NO: 110382 - DNA, 331 bp, Arabidopsis thaliana columbia
cccgtccgaccgtttttggggttggtcaatgggcccacttttttcctacttggtggattggcctcttccattggtggattagaaagaggggagggccattaaattgcccaggaaaggttagaatttgctttcggatcatctgttaagctgggttaactcttcctagaccatcgatggtttcggggttaactatgggaccaaagatgtttgcaggggaaaagaacctattagggatctggggggaaggtaacaaagccgttgtggtaaagtccattgattatgtcagggcccttaaagctggtcctatggcgccattttaaggccctccaag

SEQ ID NO: 110383 - DNA, 443 bp, Arabidopsis thaliana columbia
cggggcggcccaacccttcgaaccaaagaaggtcttaaggggttaattttattgttaaaaaacaaggtaccattggggggggtttttttaataataagggttggatgtccaacttgaaatttggggcccgaggttaaattaggccccgagacctgttacaacgtttgttcaaccgcctgcttccaacgtgacccaagaaagacttcccgatccaaccgcaggtgtccaatccgtgggggcccaaatcctgccagggcaagtggaagtggtttttaaactttatattttaccaaaacccatgcatttggattaaataatgtggtaatctaattaaaaaatcgtttctttggaaaccatatcctgtaattttaatgaagtaattgtacccaataaatattaccagttccaatgttggaattattaccacttgtgctggttgttat

SEQ ID NO: 110384 - DNA, 415 bp, Arabidopsis thaliana columbia
  unsure (1)..(415): unsure at all n locations
ggccacacacacttacaaaaactttaaacttaaccaccaaatttttttatccccaccaacccatccaaanaaccggaagcttttttaaaacaatttgccgcccccaaactaattcaaantcccaantttttacttaaacctcttaaaccctcatttcttaacaatataaccaaacttcccattttttttttctccataccctttaatattatcttaaacccttcctataaatactttaacttcatttaaaaaattactacttttcataactttaccaaatttttaattattctaaactcctccaattcttaccattctacctttcttttttttcctcttcctccaccaattaatcttaatccatcatttaatcttaaccctccttttaaaaaaaacaataaaaattctttttttt

SEQ ID NO: 110385 - DNA, 430 bp, Arabidopsis thaliana columbia
  unsure (1)..(430): unsure at all n locations
cggaannnccgggncggcccggcccttccaaatttttcaagttccgccgggggaaaacccggtatcttaagtggcaaaaccagaaagggaggggggggtttgggcctgggtgggcgccttttgggcttccttcgctgattccacgaccggggggaatcgccttttttccagatctaattttttcaagggttggattctgtcaaaatctgcaggcgaatcgggatttttcagatctggttttcgctggcccgagattcaaatctgttggggccggggttcaattttctaaaatccaaatggggaacccgggaggcgggaagaaatcggcggggtctgatgtcgggccatggcctatgaatgtaatcagctccgtgggaatcatcatggttaataaacagctcatgttttccctgggttccggtttgggctt

SEQ ID NO: 110386 - DNA, 438 bp, Arabidopsis thaliana columbia
cggggccgccccacccgtccgtcgtaccacgctctgaaagtcctggccgccctttttttgacctgggtggattcgttctccgaccggaaattagggctttggttttgggaaaataacaactgcagaacaaccaacctgggttccagttaaggggggtaacaggcaagggggggctcggatctttggcccatttaaaaagatttcgccccgtgatgtcgccgttaacacaactttaaagccaaggagggaggggcaccacactcaaaaggacctccagaggataaatcttcttgataagcttgaaaagcgtgagaggagacatttttaataaaaggccaaatcttccattgttgatggagaccgcataaaaggaagtcagttttaactgaaagattcgaaaagggatcctgaaaagcggttatttctccgcagggaaaa

SEQ ID NO: 110387 - DNA, 305 bp, Arabidopsis thaliana columbia
ggggcgggccacacccttccggatccttaaatctccaaattccctcctaatttttataataataaccaaaaccctttttttggtaaattttttccaaatgtagggaagtccctattaaaaccacaaatttagccaatctccggcaaccattggtggttccggttgtttcggagcgtaaacctccggcagacttcggactcggactaaaaagggttttaacggaccgtagccttccgtcccgaaggcccgtttccttaggggcttccataaaaataaagctacttttccggttggcacttccggca

SEQ ID NO: 110388 - DNA, 304 bp, Arabidopsis thaliana columbia
  unsure (1)..(304): unsure at all n locations
gaatnccggggccgcccacacccttccggtttagtgattgaaattggtgaagcctatgttatataaccccctaaacaacctaattggtgtggtattttccaaggaaggagaacggtttggtttaagtgttggaaatttgaaaagccttgaccagaaaaaactttgaataatctaatttgatgggaaaggttccaagaaccaagatgtattgtttttgtggttttaatttataaaagtccttccaaaaaaacctttcattcttatttaactttctttttacataatctcccctcttaatcccact

SEQ ID NO: 110389 - DNA, 303 bp, Arabidopsis thaliana columbia
aaatccccgggccgacccacccttccaaacaacctaataaatatccttctaattttattctctaaaattgcctaaacctttccatccggttaatttaaaaaaccatggtgagctacaacaacctacccataacaactttcttatttaattattctttttaaataaaatatttaacttgaaaaaaaatatcactttttttcttttcttccctaccaactattatctcttataatttccttaactatctatactctttattatattatactttcttttttctttttataatttattgtatattta

SEQ ID NO: 110390 - DNA, 458 bp, Arabidopsis thaliana columbia
cggggcggacccagccgtccgcaaaaaaaaaaccaaatcaatctgaccgttattgttttgtttaagttccttcaccgaaccccaaggggaccatctaagggaggaagagggccaaccctcccccaaacttcttcccaaacccgccaaacttgcccaccaccgaaaaaaccattttgttaagtttccacttttaaaaccttaccaacctaaataccaccaaatggttaaccaatttgcaaatcctaccaaaggaaaccctgtttttaattgccaaatgacttattgttaattcctggtttaaaaaggaataaattttgccaatttgtttttttgtaaatttgttttccttaaatgtttccattactttgtttttgtaaattgaacctaatttctttcctatataatctgataatcttttgacttttgtaaaccaaaaattaaattcctttttccatttt

SEQ ID NO: 110391 - DNA, 435 bp, Arabidopsis thaliana columbia
  unsure (1)..(435): unsure at all n locations
gaancccggccggccaacccttcactaaagcccacctatttccaaactaatttcctttttccttaccctctttcaaaattggttggagattttcaatactttggtcgggccttaaanaaaaaattttattcaatttccacacttctccatttttttcttttcgaaaacattttttttaaccaaatttaaattttaaccttcaatttttgtaacctacccaaatcaaaattttcttgaaatccccatttaaatccctccgcttaagttttctaaaatccttcctcttttaattaacaaaaacgaaccttttttttttattaatcttcgaactaatcacttaacctttttatccttttcctaataattaataaatttatcacctcctattttacccctccttttttatatccccctcaataattcattttttttttt

SEQ ID NO: 110392 - DNA, 341 bp, Arabidopsis thaliana columbia
  unsure (1)..(341): unsure at all n locations
gggcggcccaacccatccgttaaccttccccgaaggtaaacaccaatatttttcaaccaccgnatgtttacaattaaccccgaccactatactactaactgggcctataaataaaatacaaatttctaccaccaccaatcttttttaattaacaaccaccaccatacttctaaccttcccctaaggttatctacaaaattcctccacaacaaaattatttaccttcccctaaagttaactccaaaatttcctccccaaccatatttttacacttttctcccccccccacattacttaaccttttctaaaaatatatacctatattttttaaattaaccctc

SEQ ID NO: 110393 - DNA, 386 bp, Arabidopsis thaliana columbia
ttaaaataataaaaggtgggggttggtttgatcgggggtaacatgatattttatgttttatgatccaatgaaaggccagggagtccataaattttttaaaccaggattgttggaattcaaggaaattaggttggcatggttgttgatcttaggatcataattgggcccaaccgaaggttttggaaccttttttttttggtgattaagaaggggcctgtcccaccccagtttgattgtcctttttaaatggaaggggaggggttttgggggaatatctttttaggccttgtcctctagtggaacccaagaatttgtttaatttccttttgtttgtttatagtttgcataacttctcttcttttggtttataaagtctcttgtttaat

SEQ ID NO: 110394 - DNA, 351 bp, Arabidopsis thaliana columbia
aaaatcccaaagttaaaccccatttttaaaaggacccaccctttggaccattggtggcgccccataacgccgggcgcgaaattaaattcccaccagccttaaccggaattcaatttttccagtttgattttttcaaaaccggccaccccaaccaagctctttttcttgttcccaaagcccgtttcctcccacctaatccggttcctttattttccttccccataaatctcctccttcctatatgaatcactgaatatttggaagttttaccatttccatcttaacctatttctccagtttgtgattaaccatccaaccaaccatttattttttgtaaaaggttgttttacc

SEQ ID NO: 110395 - DNA, 427 bp, Arabidopsis thaliana columbia
ggcggaccacacccgtccgcgaacccttggccccacaaatcctttgtttttttttttgaaaaaaaaatgccaaccaccgaggggaacttaatcggggcaggggggagtccttttttaataaggccaagaattgttttaaacctaaagtttgtcccttacaatttcttccaaaagacgttggggtttaaaaccaagttgcttttaaaataaaacccgtttaacaagaaaatcccggttttgtttaatgctgataaaccgggaagtgagtccaccataatcgttaagattatcaataacatttgaagctaatttgaaccgcccattttcccttccgaccctaacgatcggcccttggtttgtttctgggctgtttacatcgacaaaaaagtgtttgccgctttaaaaggtttcctaaaatcccgaatgt

SEQ ID NO: 110396 - DNA, 439 bp, Arabidopsis thaliana columbia
tccaacccttccgttaaattgccaccatatttttctcttcagaattccacaaaatcctaaattttttgaaaatttttaacccaagcagccgcaattttaataactaaaaccggttttggagacttccaaaaccctgaaccaccggttaaagaacttttaattgttccaaaaagtttccattccatgattggatcctaaaaaccttaccaagcagcattgagggttggaccaattttaaaggttttttttgtgtggtcacttttaaccaattttaagtgttttttcgattccaaggttcggtttggtctattccatgtgattctaccaccttttaaaagttcacccaaccaatcattttattgttccaaaaatattttctattaacacttttattttaaatatttttttttttatttttttaacccatttttttttaatt

SEQ ID NO: 110397 - DNA, 337 bp, Arabidopsis thaliana columbia
  unsure (1)..(337): unsure at all n locations
ccttccggaaaaagngccttccatttccacaaaggaatttttttttccttatagaattttccaaattgctggaggattttaaatggatccgggggctttccttaacataataatttatcctctgccttatcccaataatcatcagtccaacttcttttttggccttcctcaaaaattttttaagaaaccatttagtattcttatttttgactctaccattttttaattcctagtgtttttaacttaaaatgtaaaactttcttccccccagcaaaaattacttaaaatccttcccagtctaattaaaattgtagagtagttaaactcttacttttta

SEQ ID NO: 110398 - DNA, 281 bp, Arabidopsis thaliana columbia
cccttggcctgagttggttatcaaggttggtttcggcggcgccatttttttaaatggtctgggccaaccaaaacttttgttgggcttcttcaattcgcccttcttttccggtttcttaattcctctcccaaaaaagtattgtcattgtaaattgcaaattaaaatttcccaaaagcctttccgtccgccctttttttaccttagattctgttgggactttgtttgcctccggagctggaattgttcggagcatccttaatgttttttggttatttgtttta

SEQ ID NO: 110399 - DNA, 331 bp, Arabidopsis thaliana columbia
  unsure (1)..(331): unsure at all n locations
ccggccgcccacacacatccaaaaaccttctttttttttttctcctttttcttttaattccctttaaaataaaaccggggcgtttttcaaataattttggtcgcccaacaatccttaaatttcaaaatnttttttcaatttcacccccccatttttccccaaaatctttccggccantccatccttttttttttttccaagaccttcaaaatcgtttcccatacccctcttatttttcaaaaccatccaccctcctaaacctcctccaatccttcatttaaatttcctccaccatccccattttttccaccacctccttctcccttttttt

SEQ ID NO: 110400 - DNA, 278 bp, Arabidopsis thaliana columbia
  unsure (1)..(278): unsure at all n locations
ggggggccaagacttaaaaaaatccaaaaaacttctttttaaccttttttttttcctcccaccttttaccaataagcgggtcttctttcacaatgtgtgtggcccaaaaaccccaatcattatttcctttaaaaactttgattgttattcttaacttaaccatcctccgtttttttaagaaccacttttacctaatccattgtttctccactctaatcctaaaatctntttaataaccttttatcctcctgttaagtttaatcctttcatttttaaat

SEQ ID NO: 110401 - DNA, 377 bp, Arabidopsis thaliana columbia
ccgggcgggccacacccttccaaaaaccaatctttccgcccttttgttctcctttaacctgtgaaaactgttaacccaaccggggtttcttcaatggggggcagatcgtcaaactcaattagttttttgcctatcaatccggggaaaaaggccaaataagttaatcctggccttcctatgggttgtcctccattgcttaacattttgattaataaggtcataaggtttaaccccaaaacccctatatttttaaaccgtaaccaattcgtcttatctgttgaacatgaatttattttgtttaaccctttgtttaattttgccggttacaacagcttccagaaggaaaattttaaccatttcctccattgggaaaccaa

SEQ ID NO: 110402 - DNA, 318 bp, Arabidopsis thaliana columbia
gcggaaacccgggccgcaccacacccttccggtttttttttttttaacccatactcttcttttttttaaaatatgcccccccaagttgccaccttctttacaataaacggaggtccataaaccttaaacggttaagaatcagaacttttttaacccccactttaaacttttttgtaaaaaaaagttttaacttttttttaattcccccataccaccaaaaaaaccaccgtttcattaaagtttttttttttaaaaaaaaacaaacaaaccaatgaaaacatatttaaagtttttccttacaacatttttattatcaac

SEQ ID NO: 110403 - DNA, 371 bp, Arabidopsis thaliana columbia
aaccaccaccattggggttttttaaccaacctttttttttttgtaaatccaaactcccacggggctccttccaaatcgccagatttttcccactccgaaaaaccttcccaatccgaatcaccaccggtggaaccgccgccggggcaggattgtcagcccccgaagcttaaagctccgcgatggctttagcagccttcgcgaaaggaaccgccccattggatttaccagtcccagccatcgggaggttcgaccaggttttttaagttccccaggtcctaacctttttggggaatccaccattaaccgtcgggaagaaccgtcaggtcttcgccgccttagtgaaatcgtctgtttttcaatttaacacattt

SEQ ID NO: 110404 - DNA, 419 bp, Arabidopsis thaliana columbia
ccgtccaaaaaaaaaaaaaaaccttttatttaaacccattgtttgccttttaaacacctgattccaccaggtgctaaccttattggaagcgttgggcctaaaactttttttcctttgttacccaacccttttttggcattttaagcctttgccgcccttgaggaccagaattttccaagacccatttgggcccatttcctttttttcggcaactttccttggttgttttaagccgttttttttcggttgggttcaatgaaaaccttgcccagcttttggaagcctatttattgttttttaaatttttttaccttaggatgttcccttaaagtttttccggaacctttttttttgttaaagtttgttccgtgataatttttataggtttttttttatgttttttcctcttatatttttaa

SEQ ID NO: 110405 - DNA, 452 bp, Arabidopsis thaliana columbia
cggggcggccccaggcgtccgaaaaaaaaaaaaaaccccaaaaggtttaattggccgcttccacaagggttttttcttcccttgctttcgccggaagggttgggaccctttcccccgcggattttgaggtcctgggaggcggccgtttgccattggggaagactgttgccaagccaaggggtccataaggcagcccttggtccggttccgcccgggtaaggtcctggggtccattttttggcgggtaaccgggctcctttaccggggggttccccggggcctccggttggaccaccgttggactttaagttgatcccgagccattcgcagggacccgggggctagaagttttccacagcaggggggctttgctcggagccttaggttgcgttttccttgagctttgggttgggaccggagtcaagttcgggggggcggtttggttcagggcc

SEQ ID NO: 110406 - DNA, 452 bp, Arabidopsis thaliana columbia
ggggcggccccagccgtccgaagaaatcgtttgggccaaatttgaccttcctttattttcttaagcaaaatatgccggaggaggagacccttaaacttaacgggggggccaaatttaaggaatcaagtccttttttgaaggtaaccaagaatgacggcaaaatctgttcaaaaggagatcccaaggcggcccctttggtccctcctcccgcggcggaggaatccggttgaccggcggttggattgcctgtaacccatggtagcgtaattggcaagccgatcaggaaaaaccagtggaattctggcttttttacctgtctgggccgcaaggataaattttgcaccaccaatctcaaagttggtttttttggaagggtggctccttgggtgtggtatggaactaatgcaaaaagacttggttctgctccgggaccattttaaaaccatggtttg

SEQ ID NO: 110407 - DNA, 446 bp, Arabidopsis thaliana columbia
  unsure (1)..(446): unsure at all n locations
cccacccttaaaaaaaaaccatgattcgttccacttcnccgtttttttttttcacattggcctctaccttgccgatcctctaaaaaacctttcgtcacctanaaccaccattcttacctttctttacctctttatttaatttcnccaccaccaccttttttccaccccttttaaaacctttttttcctccttatncccataattcccttacccacaaacccaccttccttttttccaccnccaaattacccactattttaactcttaaaactttatccttaactaattccccaccacctattttaattcctaaacctttttttaaaaatcttctaattnttcctaatttccctcttccaccttcaatttttaataccaaaccttttcttttcaatcacccaacccctttttttcaccaattatattttttcaattattccaaaacc

SEQ ID NO: 110408 - DNA, 417 bp, Arabidopsis thaliana columbia
aacgggcccggaattccggggcggcccacacgcgtccggccgaccggtttggttggtttttaaaagtattttgtaaatttggctacggcttttaaaccaatgaaaccagggagggttggtgtgggaagaccaattttggcatattaacaggatcagatttcctttttcttccaagaaggtgaagaacttggaaaagggggtgactgattttgttggggggcttacggccaggaaattgagagttatgggtccagtctgattgcccaccaaggttctaaggaccattcccggtaaggttccttggggggaaggacccaacacttggatcaaattcctgtttaggttccacatgcaagttttggatcttttaagttttccttgggtggccaagcggataacctccataaccattgaacc

SEQ ID NO: 110409 - DNA, 379 bp, Arabidopsis thaliana columbia
cccgggcgggccacacccttccgggaccccaaccggaccaaccaaaaattcatttgaggagcttttaagccgttagggaaagcggatggaaaaatggttgggtgttgcggcctccgtttcaaccgtttccgccgttcgtccggttttctttttaaagcctaccgccgccatctttgctccggttctgggtttgcctccaatggttaagaaaaagggaggattgagattttcattggaaccaaaccagggaaccgtttaatccatgggggctggagttcaagttgcagaaccagtttttttgccggcggttataaccaattccccattggtttgggttaataaaagattttcaccaaaagaaccagatttcccttttgtt

SEQ ID NO: 110410 - DNA, 293 bp, Arabidopsis thaliana columbia
aacccgggcgggccaacacgtaccttagaacaaaaccaagccttggtaattttttttaccgttttgaccgaagaaggaaccgcgggaaattcttgctttaagtgtggtaatcaacatctgtccacaaccattttttttgaaaataacttttgccttccaattaactttgttttaactaaaccttcaattaatccaaaacctgattctgtcaacttggtttttaccatatgtccaaaattttatttaaaaaaattaattatccttccgtttcctccacggtttgaaagaaagtt

SEQ ID NO: 110411 - DNA, 434 bp, Arabidopsis thaliana columbia
tcttttttaactcttcccacccactccattttttccaaatttaataatccttcctcaaagcagaactttaaataagttgcgtaaaaactacccaaccttaaccaaaaattccaaaaagctttttaaaaattccagaagaaacctaaaaggtttaacccctaaaaaaatctttccacccataatgttccaactcccatgcaactttcttgaaactttcaattgtaaataaagaactgaagttccattcgaaccaataaggtttaacccttaccaacctaattaacccaacaatgttttccacattcctctaagttttttgaaccccatcatgaaccaattccctaccatcttttttcctaatttccataaccttcctgtttttgtgccctttaaatttactgtttgccctaacattcctttcacaccctgaaaaa

SEQ ID NO: 110412 - DNA, 418 bp, Arabidopsis thaliana columbia
  unsure (1)..(418): unsure at all n locations
aaaccaaaaaagtgggctttttctttcttttaaccaaaaaatcctctcaaaaagccgccctttttaaacaaatttgttttcctaaacaacttaacctttaaacctttcaaccaacctattccctaatnntaaccaattaaaaagccaatcttccaatttttttttcaaaaaacccaaacccaaacaataatatattattaaatttttaaaaaaatttatttcaaaaatctaatcaattttctatcccccaacctttctctaaatttcataaaacctttcattccttcaccctattacccaccataaaaaaccccaccctttttaaccaaaatttttaccaattcataaataattaaaaccttaaaaaattccaatctttttttaaaatcttttccccaacttccccaacccatttaat

SEQ ID NO: 110413 - DNA, 355 bp, Arabidopsis thaliana columbia
cgaaaaaaaggcaaccacattttgctttcaaaattcttttttacttctttttcttaatcaccaaggggggcttttttgggccggggtggagattccccaatttccctttccgtaacttttccggtaaagcccgttgtgaacccatgtcttgttcttgcaaagctaaagctttggaaccgaaaggattgcaacccaaccagttttccttttttccacaaaatccatttcaggtttggggtaccagctcaatgtattttttggccccaacaggggtaaaatcgtgagggttcttaaatattttactaaaaccatctccctggtgatcaaagatttaaccttaaaaccaaaacaaatt

SEQ ID NO: 110414 - DNA, 395 bp, Arabidopsis thaliana columbia
cggggcggccccagccgtccgaaaaaaatgaagtcaagcctaaagactaaggttgtttttggggttccctcctttgatggggggaggcttccagtggacccggcggagggagaaaaccagccttttttggaagctgatgtggacctggtttaagcgggaagaacaccgtcaacttttggactggatctggagaaaatcggagtggaacctgccaaacccgggaggattctggggaatgatagatcctggagtatggtcccaggcgtgattgcttttggggatttgattccaggaccaatgcttgttaccaaagccaaaaaaaacggtgttgtttgtttggagttaatagcaggcaaccacggtcatgttgattttaccagggttccgggggtggt

SEQ ID NO: 110415 - DNA, 433 bp, Arabidopsis thaliana columbia
gggaatccccgggtggcgccacacccgtccggttttttggttggcagggcctgtggttttattattggggaagaccgttaaccttagggggaggaccataaccacagggttgcgttaatgaaaaaatgaaacctttaagtggtaatgccgttggtccaatccttgtaaataaatccaagcttaaagggctcccactgttcgagttccaagtgttagcagtggcaaccaacaatttttttataacaaacaacctcgaccaaggaggatttggtgctgtttccaagggggggtaccaagaagggctcattttcgttgtaaaaaggctttctcgaccatcggaccagggagtcaaggattttttaattgaattggtttgaaccttaaagttgcaacaccggatttcttggggatggctggttttttgcttttaagg

SEQ ID NO: 110416 - DNA, 312 bp, Arabidopsis thaliana columbia
ggcgggccacccttccggaaaacttaaccgaaacccttccgtatttttttaaccccaaatcaaccccttttaagcggggcatatttttattcggattgggtaaatcaaggaaattcaatctaatccacggccggtggccaattttcattacttatgaatctttttctgtcaattggttaaccttctttccatttaaaaaccttgccaaggtgaacttttgaatatggatcgcccaatttggggaatccattacctttttctatctctcctttgttttgaaccaaggtgttagttatcggttacatcaatttc

SEQ ID NO: 110417 - DNA, 361 bp, Arabidopsis thaliana columbia
tcccaacctaattttttttttttcatcaacctttttttttttcggtggtgttcctaaaataagccttgggtgaaaaaaccaagtttttttttttcgcccccgttctaaaggattttttcctaaccgtcttcttttccgccattggtttaaatttctttaacttgaccagaattacctcctttgttggaaattcaacttcctttaatttaaatcacttttgaaaaaatttcagtgaaaaaaaaaagcttcctaaccttttagcccctacccggatttccattttttccataatccctaatttaataatggaaaatgccaacttttttcttcccctttttcatccaatttttccaaaattttt

SEQ ID NO: 110418 - DNA, 322 bp, Arabidopsis thaliana columbia
  unsure (1)..(322): unsure at all n locations
aaacctattaaatgcccccnaaggcggggattaatcccatttggagtaagccaccttccaaaaacccttttaaggaaaaataaaaacccgaaaaagctccgccgtaaaaaaaaccaaagcccgaaaaaaacttccttaaggaagctgttcccgaagccaccaggaataaaatgtttaaaaagaatattttcaaaacttacaaaatctacattttaaaggtccttaaccaagttcatcccattttcgaattttccaccaaaccaatttgtgttcttgaacagtttcattaacaattttttcaaaaagcttgttcaaaaggctt

SEQ ID NO: 110419 - DNA, 396 bp, Arabidopsis thaliana columbia
  unsure (1)..(396): unsure at all n locations
cgggccggccacacccttccgaagaaaaaaaaatttaaaattcattaaaaactttaaaaaattggaaaaagaaggaaggaagaggaggccataaaagcatttgagttaatttaactctntttccgtttttttttgggcctttgctgggtcgttttttcggattatttttaatttttcgttctcggttggtttttgtttcttgggaatggatgaattgattaaaaagttttaaactttcctggaaactggatttggtttaatccgttttaactcttttgaaaagagaaaaaaggttgattctttttaatccaaaaaacaaaaaagggatcctttcaatgttctctttcgccgtattgtttttcaccaccgttttaatttcgtctttttaatttaaag

SEQ ID NO: 110420 - DNA, 355 bp, Arabidopsis thaliana columbia
  unsure (1)..(355): unsure at all n locations
aaacaaaaaaaccattgccttcaagttcttttttattgccaacccacctaanaaccggctcggcctcctttaaaatttggcggcgccaaaccaccccaaatgncttttnnnntnttttttttgttttttttccaaccaaaaaagccttttccttaacttnccaattttttaaatnttaaaaaaaaaaattnaaagtttttaaaccaatcaacgttaatccattcatctaaatttttaaaactcctttaacataaagccaattaatcggttgttacttttcaaactttctttaatacctaaccgccgtaaaccttttcctccatgtttttaatttatccttccccattcttttttc

SEQ ID NO: 110421 - DNA, 404 bp, Arabidopsis thaliana columbia
  unsure (1)..(404): unsure at all n locations
ganggcccggcccaccccaccctaccaataaaaacttaaaaaacctacccccttttattcaaacctttttaattcccccccaaggatggttttaataacaattgcgcccgccaaaaaaanaaaacctttcttaaacccaccatatttccagaacctttaatctccaatttcatccctcccccaagttccttccttttaactaacaattttatctgccccattcttaaaaccaaattaaaacctccaaaaaaaaaacctattaaccaacccaattttttcaaccttaacaataatttcaaaccttttttccaaggtttaaagaataactcgctttttaactccaaaaccaataataatttctccctcaattttaaccctttctttttaacccaacctactaaccc

SEQ ID NO: 110422 - DNA, 401 bp, Arabidopsis thaliana columbia
atccaagaaacaagaatagctacaacactaagtttttagtaatgctcaagccgagagagacaatggcatgaacatttatgagctcaagcggggttcttaccccaacaacattccttggccagactaaagccttaagctttaacccccttcgtgatgttgtctctctcggatctcccaagtacactatgggaaatgatctttggtatggacctgacagagtgaagtacttaggacccttttccgttcaaactccgtcttacctcaccggagaattccctggcgattatggttgggacaccgccggtttatccgcagaccctgaagcctttgccaaaaacagagcttttgaggtgatccatgggagatgggcattgttgtgagcttttggttgcataactcct

SEQ ID NO: 110423 - DNA, 313 bp, Arabidopsis thaliana columbia
  unsure (1)..(313): unsure at all n locations
taactttatacatcatactttccacacactttcttatacttaaaacacancgaatcattagctcacgctaaatttttcgagcaccgcgcgggcaaaccaacaaaagcaaacaacaatatagcctatgacacaaaactatgtcaacttatcgacaaatacactcaaatcttaatcacctaatgagacaaccatctgatcgactcagctccataacatcagtaaaggtctctctggagactcataggttctcatcagaaagaacactatgattaaacattccgttagaatccactccgagaactctcgaaacact

SEQ ID NO: 110424 - DNA, 214 bp, Arabidopsis thaliana columbia
caaaaactcttcgacatacaaagtactctttgtatatgtcccggatctagaaaaaggcgacccgatcaattacaccgcgccgccggaaacaatatctaagattgtcgacaactcaaacgcctataccaatcctaagatcacagcaactccaacagacaacacgcccatccctgattacgcttcttcctaatagtttaactctcagctcatttac

SEQ ID NO: 110425 - DNA, 295 bp, Arabidopsis thaliana columbia
aataaatccaactatcatcatataccaccttatcccacaatcacatgtccatctccaaacctataaacatcatctcaaaatatcaactaactcattaaaactataactctctacctctcccgtctactaactcttactctcctcttcacctcctatcctattacatccaaattatcttcttctcatcccacctacatataatctataaacctcaaattcaatccaaataccaacacatactttttcccatacaatatagatcctttcaaacttcatcttccaccaaatttcaacc

SEQ ID NO: 110426 - DNA, 209 bp, Arabidopsis thaliana columbia
aattttctcttcttcttcttcttttttgttttgagagaaaacaaaaaaattctgggtctacaggttttacgaaaaggagaaggggaaaacatatacggatcagctcaccgactatcagatctctgagtttaaggaagctttcagcttatttgacaaggatggtgatggttgcattaccaccaattagctggttatctgtgatgctttct

SEQ ID NO: 110427 - DNA, 438 bp, Arabidopsis thaliana columbia
  unsure (1)..(438): unsure at all n locations
gtttagtgattgaaatttgtgaaggctagtgctgatgacgccctaaatcatctcatttggtgggtaattttctaagaaatgaggaggtatggttttagtgtttggaatttgagaaggctagtacagaaaaaactatgaatcatctcatctgatgtgtaatgtttcaagaaacgagatggtatggttttggtgtttgaatttgagaaagtgcgtgcagaagaagctctgaatcatatttaactttccttcttcagcatctgccctcataattccacttttttctctttgctctcaacatatacctacccctactaattgagtaagtgtgaatagttttctctctcagatgactattagtctattactattaccatctntcatttaattgtttggtgtacttcaaaagtcgagatttagatacaacaactactctgtaac

SEQ ID NO: 110428 - DNA, 443 bp, Arabidopsis thaliana columbia
aacgaacagatagatatccgtctgattagaatttgtaaaaatggctaatgcttttcagccaatgtaaccaaagaacgagggcggggtacttccattttactataactactctagcagataatcattgttgttatataaaatgaggaacttgtaagaagagtttactgattatcatgagtgacataccaactttcaactcagagattaagctccacaatgagtacgttatacaaatctgacgatcgcttctgtcaataatagctgttgtaattgcactaatacatgtgtcctattacttcatagggttcacaacttagttatttaatctttttattctttttttgtctaagtattgactttatattcttatctctatttacgatactttgatatataattttttttatcttcattcaattattttaaattttagattactatta

SEQ ID NO: 110429 - DNA, 361 bp, Arabidopsis thaliana columbia
  unsure (1)..(361): unsure at all n locations
ggccggcccacacttacatcaccttccccgaaggtacacttctaatcttccttaccaccgaatgncnacagcgcacccccaccattttacgacggacctgcgcttaatttatattacaaatctccactaccaccatacctctatagtttaccaccaccaccatactacttaccttcctctaatctttactacaaatcttctccaccaccatactacttacctttccctcacctttattacaaacttcccttcccaccatattcctacactctttccaccaccaccatcatacttacttatttcaataactgatttcttactcttcacattcaccttccatatttactcttaaattctaatt

SEQ ID NO: 110430 - DNA, 449 bp, Arabidopsis thaliana columbia
gcagaagatggcccaaaaggtggaagcacaaggagggaaaggagccaacctatgggacgatggatcgacacatgacgccgtgaccaagattcagctcgcagcaggcatagacggaattcaatatgttcagtttgattatgtcaagaacggacaacccgaacaagctcctcttcgtggtaccaaaggccgtgttctcccagctgatccggttcctatattttccttgcccattaatcttcttctttctatatgtatactgttatattttgaagttttgacattttcatcttgatctatttctacagtttgtgattaaccatccagacgaacatctagtttctgtagaaggttggtatagccctgaaggtatcattcaaggaattaagttcatctccaacaagaagacttctgatgtcattggatccgatgagggtactcacttcactcta

SEQ ID NO: 110431 - DNA, 387 bp, Arabidopsis thaliana columbia
  unsure (1)..(387): unsure at all n locations
gcggaaanagtncatacattgacacagagggaaccttccgttctgataggattgtcccaattgctgaaaggtgttgtaatggatccgggagcggggcttgacaatatcatttatgctcgtgcttatacctatgagcatcagtacaacttgcttcttggccttgctgcaaaaatgtctgaggaaccatttaggattctgatttttgactcgatcattgctttattccgagtggatttcactggaagaggagaactcgcagaccgtcagcaaaaactagctcagatgctttccaggctaatcaaaattgcagaggagttcaacgttgctgtctacatgactaaccaagtcatagctgacccaagtggtggaatgtttcatatcagaccc

SEQ ID NO: 110432 - DNA, 441 bp, Arabidopsis thaliana columbia
gcttcttgtgttgtgacgcatactcttcgcattcttgagatatggccgccgcagcgtccaccgtcttttccatcaggagagcttctttgagcttgaacgggtcattatcaatagctgtattagtctcagctttaattcttttttcaaagaatgctattactttttcttctatttctcacatttcaataattttatctttcatttaattcttacaactcattattcttcaaccgttactttctctttttatcagttgtacattcaagtatttttctcttacttattttttattttctcgtctatttcattttttaatttgtattatattattatttccgtcttttgtattattttatcttatttcatacttttaatttatagtattctttattttatttttttatttttctttttgacatatatattataaaattttttttt

SEQ ID NO: 110433 - DNA, 288 bp, Arabidopsis thaliana columbia
aaaaaaaaaaaaaaacatttagttaaatccattttgagactcttcaacaactgcatccaccaaatcctcaccgttatggaaaccctttgcctcaaactgttgttccgttgatgaccaaaccgtctttggcaatttcagccgttgccgaccttcgagatcagaattctccaagaaccatctcggaccacttgcttcttttcggcgactttcctttgttgatctaagcggttcttcccaatgttagtatcagtgtattgctttcttaagctcttagaggcttcttatatt

SEQ ID NO: 110434 - DNA, 223 bp, Arabidopsis thaliana columbia
ctcgtgtcttactcgcgccagctatttttattttttcagattgcattattcttccgggaaacaagagtcttagctaggaggacgaagaactacccaaccgtgagcgatgattacacgaaggctgttgagaagtgcaggaggaagcttcagaggcttgatcgttgagatgaactgtgcacccatcatggtcctactcgtatggtactttgttggatctttcgat

SEQ ID NO: 110435 - DNA, 280 bp, Arabidopsis thaliana columbia
  unsure (1)..(280): unsure at all n locations
aaaaaannaatgctaagactaaattttttttttttattcctccactcacctgggaatctgccttattaccagcgggggcgcgacagcaatctattctgtaacctcatgtggtacttctctcagcggtaagaacaccgttcacttctggacttgatctggataaaatcttttttgaaactgacaaagccggtaggattcatggtgaatgatatattcttgagtaatctcccatgcctctatcctattgtagtatttattccagtaccaattcttgctcaca

SEQ ID NO: 110436 - DNA, 436 bp, Arabidopsis thaliana columbia
gcagggactgttgtcttagcactgtggaagatcgctaagcatagagagaagaacagaaacacaaggctacttaatgagagaatggaagctttaagtagtaatgacgttggtgcaatccttgtgaatcaatacaagcttaaagagctaccactgttcgagttccaagtgttagcagtggcgaccaacaatttttctatcacaaacaagctcggacaaggaggatttggtgctgtttacaaggggaggttacaagaagggctcgatatcgctgtgaagaggctttcgcgaacatcgggacaaggagtcgaggagtttgtgaatgaagtggtcgtgatctcaaagctgcaacaccggaatctcgtgagattgcttggtttctgcattgaaagagaagagaggatgttggtctatgagttcatgccagagaattgtttag

SEQ ID NO: 110437 - DNA, 259 bp, Arabidopsis thaliana columbia
  unsure (1)..(259): unsure at all n locations
cggaacgaaaaccggccgacccacgcgtacgtcatttatctacttacaacctttatttctacttttcacacaataccnccgcggaacaggtatttaataacgtgggggggcgggcntatattttttttaatgtgaaagacgaagaacatattaatgttctgatgctaacattaaactatcacttcggtgattttcatttggtgagaatggatgagaaagtactcatcataagcaataccttatttggatgtttaccatc

SEQ ID NO: 110438 - DNA, 372 bp, Arabidopsis thaliana columbia
  unsure (1)..(372): unsure at all n locations
gtgaatcttcaatgatnttccccggtgggagctgtatatgtttcgagtttgtatttcgaggttttgcgtgacgaatgacggtaacgagtatgcgtgtggtgatgccttacgaaattgtagattttctttgcatttggtgctgcttaagtttattgggaagtcacattaaagtctttggaaccacaacaagagaagtgtattgtgaagagattaaggtatttgggacttggccacgaaggttcttcttttgtctaaaacacgtgtcaaagaagttgaaacatncgcccgaagttgattctttagccgcgaaactgatggatgcgttggtggagaaactgtgtttaaccatgggaatgagtccttctagtgctg

SEQ ID NO: 110439 - DNA, 124 bp, Arabidopsis thaliana columbia
ctcgacgagaaaaccctactgcgaaaaaacttcgttttctctggcgagaagtaaatttttatctcggtgcttggtttcaccgtggggctatctctatctcctcgctgggttacggattggtatg

SEQ ID NO: 110440 - DNA, 345 bp, Arabidopsis thaliana columbia
  unsure (1)..(345): unsure at all n locations
gaaaaaaagaccggcccacgcggncgcaaaacaagatgatgagaagggcataacgctttttttttcttgtgtctcttcccaaancgggtgggcgattaaaaaatcgttgggtgccaccnaaaaaggaggcttttcaagaaatctgcagcgccatgaaattattgagcacgtgttggctatcgaggacgtgttcaagcatagggtgacaaatgtggttttcatgggaatgggtgagccgatgttgaacctaaattcagtacttgatgctcatcgttgtttgaacaatgacattgaaattctacaacgaatgattacaatatcgactgggggtgtgtcaaacacaat

SEQ ID NO: 110441 - DNA, 206 bp, Arabidopsis thaliana columbia
gaacgactattggattacaaagataactttttattttttcactacgcgaaccaaaactggggggtgtttaattcaaagttgagcggtcgccaacttgcttgcacaaaaacatttcacaaaccctctagttgctgctccttctgcaatcagtgttgtctgaatggcgctttgctggaacggtcttaccttttcctttataaacctac

SEQ ID NO: 110442 - DNA, 406 bp, Arabidopsis thaliana columbia
gattcgtcaagatgggctttttcatacgttttgtggtactcctgcttatgttgctcctgaggttttagctaggaaaggttatgatgctgctaaagttgatatttggtcttgtggtgttatcttgtttgtgttgatggctggttatttgccgtttcatgatcggaatgttatggctatgtataagaagatttacagaggggagtttaggtgtcctaggtggttttctactgagcttaccaggttgttgtcgaagcttttggagacgaatccggagaaacggttcactttccctgagattatggagaattcttggtttaagaaagggtttaagcatattaagttttatgtggaggatgataagttgtgtaatggttgtgatgatgatgaaactggagctgactcggtg

SEQ ID NO: 110443 - DNA, 396 bp, Arabidopsis thaliana columbia
cgcattactcgatcataagacaaggacagtatgtgcatttggacgacttatgcaacgctgatatgtgtcttatacgaacaagcgggcgccaagggacgttatatttgttcctctcatgatgcaaccattcttactatctccaaatttctcaggccaaaataccccgaatataacgtaccttcaacgtttgaaggtgttgatgagaatctaaagagcattgaattcagttccaagaagctgacggacatggggtttaacttcaagtatagtctcgaggaaatgtttattgaatctattgagacatgtcgtcaaaagggttttctcccggtttcattatcgtaccaatccatatcggagatcaagacttagaatgaaaacattgacgtaaaaaccgga

SEQ ID NO: 110444 - DNA, 246 bp, Arabidopsis thaliana columbia
  unsure (1)..(246): unsure at all n locations
aacgaaanacnaggagggggggcagaagaagaaagcagcgggcgggccacacangaagaaanngnaccacgacancagagaaagaggcgagaagaacnncnngaacgcnccccggaaagaanaacncagggcngccaccggcgacaaccgcagccaagccgggnaccaaggcnggaccaaccnaangcgcagggggcgagaagaacagcaaaaggaagggaaacaanacaagncagagaagaaaaa

SEQ ID NO: 110445 - DNA, 482 bp, Arabidopsis thaliana columbia
  unsure (1)..(482): unsure at all n locations
acccacgcccgtccgcnncaaaaaaaaaggaaaacaccaaaaacaaatgatttttaatgtgcttcctcaaccccatggctgttgggcgtcccctgtccttacgcgcgggaaaggcnttngtgaagccctgccccgcatctagattgtcacttcggaacgccggccccgttgtgaccctactgaggaaagacctgtgcgcgcaagctccaaaggggtccctatcaggcgagctccatgggtaccttggatctgactntngagtcaagtacccttgggtcccaaattctccggcgaggcccccgatgctactcttacacggtgatgttctcccggtgactaccggatgggacacacgctggtctatccgccgacccagagaccttcgccaggaaccgtgagctagaagttatccacagcagatgggccatgctcggagccctaagctgcggtttccctgagctattggctaggaacggagtgaa

SEQ ID NO: 110446 - DNA, 246 bp, Arabidopsis thaliana columbia
  unsure (1)..(246): unsure at all n locations
ccgggccgaccacgcgtncgagagaaggaagaagaagaagaagaagttttttttactatggagaacgagagggaaaggcgggtgtacttggctaagctggcggagcaaaccgaaagatacgatgaaatggtggaggcgatgaagaaagttgctcagcttgatgtggagctaactgtggaagagaggaatcttgtatctgtagggtacaagaatgtgattggcgcaaggagagcattatggagaata

SEQ ID NO: 110447 - DNA, 245 bp, Arabidopsis thaliana columbia
gctgaatccaagttctctgctcttggtgccttttctttcgacaccgtggagatagtgatggcgttggaggaaaagtttaacataggggtggaggaatctgatgctcaaaacattattatcatttaagaggctgttaattttatttgattatttttttaaaaaaaattcttttttttatatttattcatttattacttttttttatttattttttattttttaaattttctattattgtctttatt

SEQ ID NO: 110448 - DNA, 290 bp, Arabidopsis thaliana columbia
ccgacccacgcgaccgcttactttgacctgctctagactcatctccctgttttcagacacagcatatatacacaagtatcgcaagaacaagaagaagaataggagaagtcatgtcttgctctttgaggagtggactcgtgatagtgttctgtttcattcttctgcttttgtcttccaatgttggatgtgcctctgccgctcgtcgtttaaggtcacataagcatcatcatcacaaggttgcttctttggacgtcttcaatggtggagaaaggaggcggtcgttgggtgga

SEQ ID NO: 110449 - DNA, 419 bp, Arabidopsis thaliana columbia
ggagaaggagaagaaagagaggaaggagaatgctattaaggagaaagagcttgggaatgctgcgtataaaaagaaggactttgaaactgctattcagcattattctactgctattgagattgatgatgaagacatctcgtacctcacaaatcgtgctgctgtttatcttgagatgggaaagtacaatgagtgcattgaggattgtaacaaggctgtggaaaggggtagagagcttaggtcagattacaagatggtagctagagctttgactagaaaagggactgctttgactaagatggccaaatgctcgaaagactatgaacctgccattgaagctttccagaaggctcttacagagcaccgtaacccttgtacgttgaagagacttaacgatgcgggaagagcaaagaaagagtggg

SEQ ID NO: 110450 - DNA, 264 bp, Arabidopsis thaliana columbia
  unsure (1)..(264): unsure at all n locations
cgtccgaaaactataccaaatccattttcaactccattatctatctacatcaaaaacaaaccancggccacactctttactatcttggctcagtcnaaccccacactactacttcacatttcaccgctgcgtcacaacaatcatataaccataactgcttccacacgcttcaactcagaaagatttcgattacaactcctcttaatatgggtcttcacacttccaaaatcgctgacccaaacgaccctcaagattcaaacaatg

SEQ ID NO: 110451 - DNA, 216 bp, Arabidopsis thaliana columbia
  unsure (1)..(216): unsure at all n locations
aaaaaccgtcccggcccacgcgaccgaacgacaacacactctttcactaacttattttttcctcaaaaacaccaaacacatcatccgctcaatttaaaaattggtcgcgtcctacanataaattaaaaatctcttattgttattagaaaaaaacagatagttttcaccctctctaatcctatgatcggatttttttttgtttataactacataata

SEQ ID NO: 110452 - DNA, 170 bp, Arabidopsis thaliana columbia
cacctaaatacagacctcctgtggaggaactttcctttgtaccagagaacgagccgccggcgaaagattgtagatttccccgtcggtgtctgtttacaaaccaccggctaagaaagaggtttcactatctgacccatgttacacgctatcaccaaatgttgtgctttcat

SEQ ID NO: 110453 - DNA, 303 bp, Arabidopsis thaliana columbia
  unsure (1)..(303): unsure at all n locations
aaaaaccggcccgacccacgcgaccgaaaanctgagatgangaatacagagatatgttctcatctccaacactcgaaaatgcgcgggctctcttccaatatctgggggttccctacaacctcttcatcctctcaccacacatacttctctcttcctctaccctcattaccaccgccgatgacctagacgacctttctttcttccaccgcgccgacgtctcttactacaccaacaacaaccgccgtttcatttccctctctccaaatccacccccaaaagaacgctttacacttactaacaaac

SEQ ID NO: 110454 - DNA, 186 bp, Arabidopsis thaliana columbia
accctaactgtttccaagataatggcttatatttaagctcctagaatgaaggaaaggcgggatgtcatttttggagaggggggctccttctacacagtttcatcacatgtttgccgtgaagccacaccatgtttccaaatcatgttcaggcaacattcatagctgtgatctttacttaggctactg

SEQ ID NO: 110455 - DNA, 448 bp, Arabidopsis thaliana columbia
  unsure (1)..(448): unsure at all n locations
cggaatcccggggtgggccacaggcttccgaaaccaacaccaaaaggttaaggaaccttttattaataataataataataatgatcccacaagcttaaacttttcaatgggacgggcataataatataaacattccaccacctttgatcgattaaaaaagattttggcgggcgagcaaattttgaagatggcgttgaaggaaaaggtttccgttggggaagttaaaagagaagccaagaggcaccgggggttaggggaaaacaggtttgcaattgccaaaaggattaggcaaaaggcccaggttgaactcgggggagctaagtttttaagggaccattctatgaagaaattaatttaaccgttcatgcaggtcatttgntaaacatgtaaaggccagtttaaggcatttgcggttccggcggttacggctgttgggacgcttttttgt

SEQ ID NO: 110456 - DNA, 468 bp, Arabidopsis thaliana columbia
  unsure (1)..(468): unsure at all n locations
acgggnggaaattcccgggccgcccacacccttccgaaattttcgnngnttccattggcttaaattgtttcgtggtccccagaaccctcgcccgtcagtgtttaaaaggtttgggcgtgggcactaaataaatggccaattaaggaagtcgattccatgattgaaattggaggaaatccgtctgctaattaaattaatgaagtttttttccctgccacttcctttaagcctggccctgttgttaatcatgcccagcttttggaattcattaggccaaattttgacctgcaggagtttttgaaaccaaccttgcggtttccatccggaaaaggctcaccaaagagttcagttttttttccataaagtttttttagaaagaccatggttggttttcgaccaaattaatcatcgcagccaatttttcaggaaggattggtagagtttattggattgttgaaggtgactttt

SEQ ID NO: 110457 - DNA, 202 bp, Arabidopsis thaliana columbia
  unsure (1)..(202): unsure at all n locations
ttcacacaaaggattcggaaanggncggcaattggatgtggttccagagtcggttttaaagaagaggaaaagagaggaggattggcctttgaaaaaaaaccaaaatgttgaagccgccaagaagaagaacgccgggaccaggaggctaatcttaaaaggagccgggcattcctccagggaatttgccaggaaggagaagggg

SEQ ID NO: 110458 - DNA, 259 bp, Arabidopsis thaliana columbia
  unsure (1)..(259): unsure at all n locations
aaanccaggnaataattttaaggaccttgttggaaggccatcctatgtggccccataagttttaaaggggggctttgaaccaaaggctgatatctgaagtgctggtgtgatcttatccatccttttaaggggggttccgcctttttggggagaaaattaaacggggattttngatcccatctttaaagggcaatttgttttttaagtttttccangnccagcattatcaaatgttgccaaagttctttggaggaaaatt

SEQ ID NO: 110459 - DNA, 230 bp, Arabidopsis thaliana columbia
  unsure (1)..(230): unsure at all n locations
agaggatccgattgcacnaagccnggatggttattttgaagaataagtttaagggcttaagggctttggccacaaaggatcagttgggggctgaccaaaagagggtggtttgggttaaaggggcccctaaagaggatgcagtggttccaaaggtgttagccttggaggaggagctgtgtttcgtgaaggagaagctnaagaactttgggaaagggcctttatttttgaaa

SEQ ID NO: 110460 - DNA, 110 bp, Arabidopsis thaliana columbia
  unsure (1)..(110): unsure at all n locations
tttccttaaatncctcctaaatagcgcagggtcttttccggccaaaggcgggggcctaccagtttcgccgccgggttctgcgaaatccagttgggtgggattcgggtttt

SEQ ID NO: 110461 - DNA, 334 bp, Arabidopsis thaliana columbia
  unsure (1)..(334): unsure at all n locations
ggaanacccggtccggccacacccttccgttacaaactnnnccngntggaanaaaccttctcttttattataaatgatccttcccaattcttcgcggttttcaaacaaccaacggcgcctatttaacccccaccagttgtttccatacaacctcttccatctccgccaactgtaaccagcaacggaccaccaaacggattgtttattaaaaaacctnaattcaccattcaacttaaccttccttttaaccttccacatcttnactttctccgaattaacttccaatatcacccaacttcccaccaaattttttgtctttattttttttgcccaa

SEQ ID NO: 110462 - DNA, 288 bp, Arabidopsis thaliana columbia
  unsure (1)..(288): unsure at all n locations
ttttaaccttttccacttgggtggggtggaatttattccaaatggttggaaaaccacaacccatgttaaataatggtttcaggttctcacctcaacacctaaggccccttataaatacttgttcctccaaccccaccaatatcttttttcaaaaaannggccccctttcaactggaaaaaaacctctatttcctttgtaaaaaattcttaccctcgtcctttgtttaaaaactggctattgtttaattttttctaaaaaccatttccaaatggattcagttccttttt

SEQ ID NO: 110463 - DNA, 404 bp, Arabidopsis thaliana columbia
  unsure (1)..(404): unsure at all n locations
acccttccaccgtttgatccaccngntgttttcccggtgttttttttttttttgaaaaacactctcnngcctgtccttttcaaatggcagggtgtccggaaaaatcccaccgccaattgaaaatttaccggaccttcgaaatttgaaaatttccaataccgatttaaccgaaaagattccttctaaaatttcaaacctaactaatctttgccagttaaagttttccaccacctcctggcccggaaaccttcctaccgattccgaaacctttaaaaatctatcttacttgaccccttaaccaaatcttttccaaggcgattaatcgaaccttagttctttacctaatttcgtttaactccaaatttccaaaaacaatttctccgttaaaattcccttgaagtttt

SEQ ID NO: 110464 - DNA, 158 bp, Arabidopsis thaliana columbia
  unsure (1)..(158): unsure at all n locations
ggcggaccacacccttccgcacaaaaccacaatnggccggnaanggctttatattttccgccgttgttgaagctgtttggtgaataatggttactcgggggggtcctgttttcaatcccggttaaggtaggataaaatcctttgttgtttttgtaatg

SEQ ID NO: 110465 - DNA, 283 bp, Arabidopsis thaliana columbia
  unsure (1)..(283): unsure at all n locations
ttacactacatttgttaatnttttccgttttttacttccatggatctaagccaatgttccttgattttttttttggattggtcgagtctcaattaatttttgacctaaaatcgtttccgacgccgttgaactgggtccgcttggatttgggttaaggagaaagcttttagggttttggtttgggtggttgngtagaattggttggatctgaaacggaaataaaattgggctttnnnagaccgatcctaggattttgtggtttgggggttgggtttaaattggt

SEQ ID NO: 110466 - DNA, 210 bp, Arabidopsis thaliana columbia
  unsure (1)..(210): unsure at all n locations
ggcgtccaaccaccaaatttaaancnnnnaacttgggctctttttattaaacctaaatggccgcctaagcgaaggcttttttcttaccttgcgtgggccggaaaggccnccaagctttcccccgcggcatttgaagtccttggaagctgccgtttgccaatgaggaaaactgttgccaagccaaagggcccataaagcagcccatggtcc

SEQ ID NO: 110467 - DNA, 350 bp, Arabidopsis thaliana columbia
  unsure (1)..(350): unsure at all n locations
cgggccggccacccttccgccattgacgtttaaagttggccattttttctttttaaccgaaaagccttncttcgactggttttaaaacaaaacgtgtttgacaataaaaaaaaattccttaaaaaaaaaaaaaaatcttcaatggccacttcttaaaagaccactcaacggtttccacccaatttatctttttaccattttccttgaaaaagaaatttccataaaattttttttaaatcccttaccaatctaacaaaatacttttttcccctagcttaatgaacttccacacactaaaggaccattttaattcatccgggaggttaaggggcttgaccatttaacctccc

SEQ ID NO: 110468 - DNA, 319 bp, Arabidopsis thaliana columbia
  unsure (1)..(319): unsure at all n locations
gggccgaccaggcgtccaacctgttaaacaaagnccnttnnaccaaccttttttatctaacatgggcaataacccaaccggcggcttgttttataatgtgggcgggggtttacattgcccaaataaaccctctaatggcccctattttaagcaagggggagtgaaacccattttactaaaactgggaaaccattgcacaattttgagtaagagccccgttgttttttctgattttatttaaaacatatttgttttcccctttgtaattttatatttgggttggaacaacgaaactttccccttttttactaaaacatat

SEQ ID NO: 110469 - DNA, 314 bp, Arabidopsis thaliana columbia
  unsure (1)..(314): unsure at all n locations
gaagcaattnnnnntnngcgaaaaccttaatggtgcccatttgaaaaggttaaaggccaggcgcaaaagggggatggccttttgaagatcaaaaccaagggtggccgatttcggttggtccagcaaaaagtttagagggctgcatacacttccaccgaatgccctccgagttaatcggcgaaaaaatggatgnngggaacctttttgatgccgctaatttcttaatcttattnncaaggggttaatggaggtttgccattttgggggccagttcctggaaaaaaatgtcttgagtggtttatttccggtgggtg

SEQ ID NO: 110470 - DNA, 211 bp, Arabidopsis thaliana columbia
  unsure (1)..(211): unsure at all n locations
aatcctctttaataatttttaaagaactctattctttttgttccctccattcccacccaaatcaaatccaaccattattcttcctcgttaaaattcaaaaaaaaccataccttaatgaatttaccaatttattcccaaacccttgntatttcaatccctacttttccaaaatcctttttcttcaataaaactttttataaagaaaattttt

SEQ ID NO: 110471 - DNA, 435 bp, Arabidopsis thaliana columbia
  unsure (1)..(435): unsure at all n locations
cccgggccggccacccttcacgttctttgccannggnccatcatcaatttcttttatttccaaacccgaaattccaacctccagcaagtttcaaacttaaagggggggnccttcctcctcaacctctaccccatcgaaaagaaattcctctctaaaaaagtttcatccacagttttgaaattaaaaaacctaatctttttcttttttntttctnctccttaaatttcaaaaattcaaaaaaattttgaaccttcctggtaatgtacctttttctaagttccaaaaaactctcctttttttttcccatccatatcaacctaacccgggtaatttcatctccctaaaaatggcttttttttcttaaacaaaaaatccagttttgttcccttttcttcctttttatttttctaaccaaaaaatttttttctaagtttt

SEQ ID NO: 110472 - DNA, 314 bp, Arabidopsis thaliana columbia
taactttcctcctccccaaaaggccaggttttattaatctagcaggcctggccgttaccaatttcccctttcttatgctttattttctaccccattttactcttaaataacccattttagatattttttcattttttttttcaccatattaccaacattttggtccaatcttttacctaatttttttttcctaccttattttttttttttccttttttttttctcttatcttttatttttctttctaaatattttttttccactccctaatatttctctctcttttcttttttatcttttttattctaattttt

SEQ ID NO: 110473 - DNA, 449 bp, Arabidopsis thaliana columbia
  unsure (1)..(449): unsure at all n locations
cttccaaccattgaacctnccatggggcaatgcctttattttttcgttaatctgcctgctaaaccccggaaggtttttccagggtggttgaggcgaccccaaaaaactcaaaacccattttcgcctgttaaaaaagttccgttggctccttcccggaattctaagaatctgaatttggaagtttttccacataaagctgattctgcagccaaattgataagaattgattccggtgggccttttgttgatcttttgaataaaaaaggaaaagggtctgtgaccaatgaaataagtttttttaaaaggcctttgggttttgggcctcccaatttggataaccaaaatcttaaacgttttccagttgtggttggaggaccaatccggtggaggaggattctggatcatttaattggttcctttttccccaccaaaggatcatttctaaattt

SEQ ID NO: 110474 - DNA, 300 bp, Arabidopsis thaliana columbia
  unsure (1)..(300): unsure at all n locations
ttcccagaaatcttaccccagggttggttctttaactaaccgtgttgtccaaacaacatttnacctcaaaaaaacccttccttttaaaatccattaccaaaccttttttataatttaaattcctacctattttattttattcccccancaatttatccttaaaaaaaattatttttatttttttttttcanantctttttttatttctaatcatcctttttccattttttaaaactcttccaattctttattcctaaaatttttttaccttttatctttaccttcaatatacaaatcaaa

SEQ ID NO: 110475 - DNA, 214 bp, Arabidopsis thaliana columbia
  unsure (1)..(214): unsure at all n locations
gggccggccacagccgtccaaaaaaataactacaaagggtatccnnngccattccttcctcacccaaaaggaaccccttatcgagggttttttaacccctggggtccacctataaaccaaaaatgccaattcccagatgaaccgaacccctttaaagagacccaccaacaatatttacaacttaaaccattccaaaacacctaaaaagcaccaa

SEQ ID NO: 110476 - DNA, 243 bp, Arabidopsis thaliana columbia
  unsure (1)..(243): unsure at all n locations
ccttggtnnnnnnnngntgttnttttatatttttcccttaactgggttcctctaaacgttgtgttttaaaacaaagccatttgtggtcaanccaccatgtaaccttaaaggtttcatcctcatatttaaaccccacaaaaaacccgatttgcccaatcctctaacctttaagtataaaacctggaccaaaatacccaagtttttaaagaaaaatgtccctcgnttggnaagttaccatctttt

SEQ ID NO: 110477 - DNA, 335 bp, Arabidopsis thaliana columbia
  unsure (1)..(335): unsure at all n locations
cccgggcgggccacagccttccgaaaggaggtnnnnnnnnnnataancctttattattatactgtaaggccaaaaaggttaaggggtgtccaacttacaaattgggggagcactattatacctagtaaactgcctttgttaacaccaaaaccgataagctaatttttcctaacatttaacctgtgaagaattttggtttcttgattaaacattgcaacaaaatttttaaaagtcattttccataaaaaaatgttnatcctctctttgttcctttgttggtgaaatggaattcctaaaacttttttccataaaattattccattccattttttttt

SEQ ID NO: 110478 - DNA, 311 bp, Arabidopsis thaliana columbia
  unsure (1)..(311): unsure at all n locations
ttgaaggtttctatttttcctcctcaaaaacctttaccggttggtcttataattaagaagaggggtaaaaactcctcctccaattccaaaaaaaaccaaccccattttttctccaaataatcctaatccctatcctcatcctaatcttcttatttcctcctaaattctannctttaaaatttttccctaattaaaagtaaattaccattattaatccatttttttttttcccaaaacccattttataacctaaaaaataatttcaccacctttttcttctttaaactccttttcctttttccttaattttt

SEQ ID NO: 110479 - DNA, 339 bp, Arabidopsis thaliana columbia
cgggcgggccacccttccttctttttcaaaccaacttaaaccattaattatataaaccaatatgcttgaagtaaggaaggtgccttccataacctgggttggcataattaaacccgtcccaataacagcaaaccccctaataagttggggcaccgcaaacggcaacctgccaggtgccattgcttactttccccgaggtcctcaactaacccaagggtcctgcaccgcctttcctaaccttaaaaccatgcccattccaaccccaaaccgttagcaagcttgcctttgccttaaatctgcccttaaaccctttgttcccggcctaaacacttcccttcc

SEQ ID NO: 110480 - DNA, 165 bp, Arabidopsis thaliana columbia
  unsure (1)..(165): unsure at all n locations
ctcttttatttaacctaaatgcccncctaaacaagggttgttttctaaccatactttgtccggaaaaacctccaacctttccccccctccatttaaattcctttaaacctcccttttaccatttataaaaactnttcccaaccttatttttcccttcanccaccc

SEQ ID NO: 110481 - DNA, 378 bp, Arabidopsis thaliana columbia
  unsure (1)..(378): unsure at all n locations
cgggccggccagccgtccaaattataataataannnnaaancttntttttttttttccaccaaacccaantccccaaaatgccaggctttttaccaaagtttgtcacgttaactcccaaaccttccatttttaatccaactcctaaacctccaattatgccatttcccccccccaatggaccccaatttttttcccttcactttacccaaagccnaaataaatttttcgatgaccagattaagtctctaacctaattttattagttccttttaacctttcatcctcatttttttctcaaaaaattctcttaaatgttttttttccttcctgtttgtaaaaaccttttatttttcaccaatttttatttttcccctttt

SEQ ID NO: 110482 - DNA, 335 bp, Arabidopsis thaliana columbia
  unsure (1)..(335): unsure at all n locations
tttttattcctgaaattttttttaggggggaggtttaataaccaaatgggccgcatccccataacttttcttttaaccaaccacattttcaattgaattttcccacaaaacccctaactccatttaattccatggcttttttcccctccttctagtgggttcctcctcctccctaccaaaactataaaccaccggtttaaaatcctcctcctttttcttaagacctaacctaaccccttccatctcaataagttttaaaacaattttttcctttttcctgggccgtttcttttttttaaacttccaaaaataaaactnagcaaaccatgttttta

SEQ ID NO: 110483 - DNA, 338 bp, Arabidopsis thaliana columbia
  unsure (1)..(338): unsure at all n locations
tccaattcgaaaaaaaatcctttgtttgcattttaaaaaccgaaggggccgcaaaaaaataaaatttttaacccgaaatcactttttggtatttcaacttaatcagttatccctgccttgaatttaaatcctttttttttttttaatatggttagaatcccaaacgttcctagcataaaaaaaattgcttgcccaattcttaaaaatcctccttttaaccaattgccttacctccttcaaagttttattcctaacctttcccaggaaggtgttttctcttaactttattccttaacagatttttatttcattncaacattttttctttaacccctaat

SEQ ID NO: 110484 - DNA, 251 bp, Arabidopsis thaliana columbia
  unsure (1)..(251): unsure at all n locations
gggccgaccacacaccgtccttgggggccaggaattnnnttnaatttttcttttctcaatccttgaatccaatcctgagagggttttccaaataaaaacagttattcaaccanttaacccaacctttttcccaagaactaaaaataacctttaaatttttccaaaaactattaactcaactaacatttctcaaaaacctaactcaaaccanctttaaactcttttttgattctctatttaccatatttacc

SEQ ID NO: 110485 - DNA, 306 bp, Arabidopsis thaliana columbia
  unsure (1)..(306): unsure at all n locations
gggccgaccacacacttccggcttttattttnnaacccttnnttttttttttattcccatccatcgnaaaaaaaaacgatgcatttatcaacaattttgtttcccaaaaccttttaacctttaataaccttttttttacctttttcccttccaagtaaattaaaaatgaaatcctctggaaagtttatttaaagtgttttcctggggaacctttttatttataacatttttcccatcccattttctttccattctgtttattttaaaaaattttttttctctttctaattttttttatccatattt

SEQ ID NO: 110486 - DNA, 163 bp, Arabidopsis thaliana columbia
gaatggaagacccggcccgacccacgcgtccgcacatttattattgcaaacgaacatattacattttctaagagatcaatatccctggagggaggttgtttgtatgcttggtgggggccttcaatattgcgaccaaaccaatcacattgaacgctgttttaag

SEQ ID NO: 110487 - DNA, 209 bp, Arabidopsis thaliana columbia
gtcagcagagtgcatctgcaatggcgagccagttatttgagcagctcagactccgcgtctctgtctcagcgtatcgcacgcccgagagggcatcttcagtgctcctttcggtgtttcttccaccaaaaaagactcctcctacactgtgcgagtctgtaaagacgtcaagacaacatcccaagttgtgccaccaagcaacggtagtccat

SEQ ID NO: 110488 - DNA, 294 bp, Arabidopsis thaliana columbia
agaagatgcgaatgcacgaagacgagattgttaaatcgaagaatcagcttcagagcttcatgtcttttgacacagaggatcatcttggtgctgaacaaaagagtgttgatttggtttaagaggttccatattgttttttagtttttcacttagttctttttttctttttttatcttttctcttatttttcttcattattctctttctttctttttttttttttttttttttatattaattctttcatattttattttttattattttttcttactttccttttcttcttccttc

SEQ ID NO: 110489 - DNA, 172 bp, Arabidopsis thaliana columbia
ctcacgacatctgaacaacacctcctagatacacttccacggaactcagacaacggcgcgggaatttctattgacgcagaggcgcaatccccactaagctctgacctcagatcgctcccgacgccgctgaactgagaccgtctcgatctgagcttaggagaaagcttctagg

SEQ ID NO: 110490 - DNA, 444 bp, Arabidopsis thaliana columbia
  unsure (1)..(444): unsure at all n locations
gtttttgttcctcagctaaaccatatgcacatgctaccagtagtactaaaccgacgcctccgcaatcatacagattaccagggatctccgccgtttccggaaaagagctgataactttccggcagggtacgggcggggggagcccaaaaaaagccaatgcggttgtggcgtcnggaggatatatactgttagacgtgaggccggcttggggaaagagaaaggcacgcgtgaaaaggtttcttacacgtgccactgttcgtgggaagatccaaacaatggggccgatcacgttgctgaagaaaagggattcatttggggatatattggngctttggacgggccaaagattcaccatgatcaatgacgaattcgcccctcgtgtttggagggtggtccggacaagagagtaaagtgctcgtcgtgtgcggtgaaggacctaagtcg

SEQ ID NO: 110491 - DNA, 345 bp, Arabidopsis thaliana columbia
aagattagcgaaaacctttaaggtgaccatctgaaaatgtttagagacattacaaaagggggatggacttttcaagatcgagaacaagggttgccgatttcggatggtacagcagaaagtatagagtgctgcatacactttcaccgcatgccctccgagttcatcggcgaaaaaatggatgtagagaagctctatgatgccgtcaattttctaatctatttgcagagtgataatggaggtatgccagtttgggagccagcttctggaaaaaaatggctagagtggcttagtccggtggagcatgtggagaacacagttgtggagcaagagttccttgagtgtacg

SEQ ID NO: 110492 - DNA, 102 bp, Arabidopsis thaliana columbia
aaaaccccgaaatcgcctaagaaggctcctttcgtgaaacccacttgtcctaccgacacggggaagtttggagtttgcgcgggcttattaaacctagttaac

SEQ ID NO: 110493 - DNA, 232 bp, Arabidopsis thaliana columbia
cggacgcgtgggttcatagccgtcgttttctccgtgatttctccgctgctggcgccacgtgtgacaaaccggcaacgttcacgtgttgtcgtggccgaatttagggtgaagctacgagggagaacggtggttggtgcttcgcagatttggaaattaccgggtggtaagccaaaagcgccggagccaccatcaccgtggatgtaaccggtggagcatgacgttatgctacgta

SEQ ID NO: 110494 - DNA, 117 bp, Arabidopsis thaliana columbia
gacccacgcgttcgcacaaaatatggaaagccacaaacggtttttttgccccacaagacaggctctccggcgggggatttccaataacgcgggggggctcacaaaacagggcacaca

SEQ ID NO: 110495 - DNA, 301 bp, Arabidopsis thaliana columbia
gtctttgacaattgtccatcatcaatggctttaaatggcaaaaccgtaatttcgaactccaccaaggggcaaacttaaaagtcgatgtctttcttcttcacctcggacccatcggagagaagatactactagaagagattcattcacagtgttgaaattaaaaaaccgaaactttctcgtttcttcttcttcttcttcaattttcaaaattcgaaaagatgttgaagctttctcgtaatgtgttttgttttatgttacagtgtttctttctctattatttctcatttattttctcttctta

SEQ ID NO: 110496 - DNA, 124 bp, Arabidopsis thaliana columbia
cacgcgtccgcacaaactaatttctcaccaccgtctgaatcttagtttggttctaaaggccttttcctttaggttgtgttcaacaacagatcgtgtgtgaatcactcagtcatgtcggttttac

SEQ ID NO: 110497 - DNA, 333 bp, Arabidopsis thaliana columbia
gcaaaatgttagctcagtcgcacttctttttttagtccttcgatctgattccgccacagggtccggtgttgcggtctgcagatccttctcttcgtatctcttcttcttatagtaacagccgcttatcctttctttcttcttctgcaattgctgttcccgtctcccgccgtcggttttgcctgactatggcttcaaactcaaaacggcctaacataagcaacgagtctccttcggaacttagcgacactgagctggatcgattcgccgctgtgggaaatgcattagctgacgctttcggcgagggtatcagaaagtatttcccggtagaaattt

SEQ ID NO: 110498 - DNA, 327 bp, Arabidopsis thaliana columbia
cccacgcgtccgaaaagaccatacgatttatttaacctttttttttacagcaaggccgaaaaggacgaggcggttttattctaacaatggggggagacactatatcccctagtagactgtctctgctcacaccaaaacctataaactcatctctccttacagtttacctgtttaggagttacgaatcttgaataaacaatgcaacatatattgttgaactcagtgaacataaaaaaatagccaaccactctttgttactactgtggtgaaaaggacgatcttaattctttttccatcatatgattacaacatcactcttcattcaat

SEQ ID NO: 110499 - DNA, 448 bp, Arabidopsis thaliana columbia
ctggtggtaggtactttgatcgaatgaagggtacatttttgtcttcttcaaaggcttttactgatagtcgtttatttgggagaggtgttaatacttctgctacaattgcaagagaaaacaagcccattggttctgcagataattctcatacctatgctcattctagtcatactaatcctcctgaattcgtggctatgaaatatgtccctaatgaagaggaaaggaacactaataatccagttgtttctgagccaaaaccgagtagagaacctaaaaaatcatggcaccaactgtttgctcgttcaactcctgctcctgtttcctcaaatgttaatactataagtagacctagcacgaatccccagccaaatgttcagagctcacaggttcccagtcaagtttcctcaatacgaacctttgacaatcccatcagttttgggctcccatc

SEQ ID NO: 110500 - DNA, 130 bp, Arabidopsis thaliana columbia
aaaaaaagagagaatcttaaacaaattatgtttagaccatatcaaaaaatatgaatagagggctatttttttatgaaaggagggtttaaactgaattactattcatgattatgaaattgttgatagaaca

SEQ ID NO: 110501 - DNA, 143 bp, Arabidopsis thaliana columbia
ctgccgacgatgacatatccgagcattttcttcagataaagagaggaagacaactgaagaccatgaacattgtgtatgtgagaaaaagcagatctttttttgttctttgaagaacaaagtaaatgatctttttgaatctatgt

SEQ ID NO: 110502 - DNA, 248 bp, Arabidopsis thaliana columbia
  unsure (1)..(248): unsure at all n locations
atccttttgcaaaccaacctataacatttatctagagatcaacatggctgctgagacgagggtgttttgcatggtcatggggcgcatgatcgtggccggtccaatcacaacgaacgcgcttatcaattgcggcactgtcatcgctagcctcgtcatgtgcattaactacttgactcaaannnnaccacttacccaagggtgcttcaacgctgtttctaacctttataacattaccagttcacccctca

SEQ ID NO: 110503 - DNA, 191 bp, Arabidopsis thaliana columbia
aagatttgcaaaggatgacaaagagaagggtgttttattcggacacgaaaaaccaagcagattcagtggtgttccagacagagaagcgaactgaaagaactaggagagaaaattccaggtgaagtgaaagagaagggggaggcttaagctacaagagctgaaagacaagataggaagtggatcaacccaag

SEQ ID NO: 110504 - DNA, 272 bp, Arabidopsis thaliana columbia
acattgtcttttcggggttttagtcatacttattgtttttcaattcggagaaaaatcctgttgtttcagatgagaaacccagatcgacggaggagaattagagttctaaggcggaatctgcttatgggagttctattataggagttgtgtatggtttgattttgtaaagctaaagatatgtttgttatttcttgtgttttcaaatcattcttgtattttttattttatcttggttaatatctttctgaggatgaaggtgttgattactcttc

SEQ ID NO: 110505 - DNA, 114 bp, Arabidopsis thaliana columbia
agaatcggaatcaacggggtcggatgaatcggtcgtttgggggcttaacatgttcttcagaaggatgagttttacttggcatttgttctcaataccttaatgaggccgcttctt

SEQ ID NO: 110506 - DNA, 292 bp, Arabidopsis thaliana columbia
cagtatatatcaactacaacttcgagttgtctgttttgtacctagctaggaaactggccggtgaccattaccttcacttggtggagtcaccagctcttgctccaccagaggttcaccttgacattgctgcttaccagcagaatgaggccgaacttgcatctgctgcagctcagcctctccccgctgatgatgatgacgcatttgacttaaatctttcaatattgtctgctgagggttctctctatgaacgtttttgtgttgtttttcatatttattatatcttcttactttt

SEQ ID NO: 110507 - DNA, 420 bp, Arabidopsis thaliana columbia
cccggcccggaattccgggtccgccccacccgtccgaccgggggaccaaaataccatgcgaaggggttccgaagggggggtggggtccggttcaaccgggccatatagttgggttggggttaaagcgtcggttagggggggattcaggggcaggagaggcttttcagaaccaccttcgggaggggaaggagcgtcgccaggcttttagccaggttaaaaatctttaattttttttggaaatcatcctgattggggattggcaataatatcgatggatttgggtggttggggtttggtaggcctagagtggtcccggttcctgttgcggggctgatggggtcctttttggatcctgaacctcaggaaattgagtatgagatcgttgggcttagaggagggttaaccgccaaattttttgcc

SEQ ID NO: 110508 - DNA, 446 bp, Arabidopsis thaliana columbia
cccggcccggaattccgggtccgaccacagccgtccgaaccataaaaaccagggggaggttttaaaccgggggggggggggcaaaattggcgccttcggaaccgtccttgccggaggttccgttaaagggatcggccgaaaattcctccaggggggggaggaccgggacccatgttttccttgttgttatgggccaccacatccaaatggttcccgttaacgagggcaaccttgattttaacggttttttcaggggtgggacctccacatgggttggaagggggggggtgttcagggggggaggggggttggccgttgggcccaaaccgttgccgttaaggggccttgggggtaacgtgatggagcagttaaaaggtgccgacgtcgtttaccatttatttcccaattttggggatacctgcttcggcaaaataattttattttgg

SEQ ID NO: 110509 - DNA, 425 bp, Arabidopsis thaliana columbia
ccgtccgacacggttggttgaatcccgcggggaccagtccgaccgctttatccggcccctggacctaaggggggatcaattagaattttgggttaaagggcctctctaagctaaggaaaccatgggagaggaggatttcgggaggatgccccaggatttgggggaaagggggttaaggttggcccaaggcctaaaaaaggggggtttaaaccagaggggggtggtccgaaccccccctttccagccattccagagggttttagccggtttaaccggaattaacccttgttcaaacctgggggctctaaggcttggccaaaggaaccttaccgttttgggttgacttcttggcattggttgttggtcaacaaatggactcctcaaaccttgcaaggcccattggtttctcctaataaacttttatt

SEQ ID NO: 110510 - DNA, 330 bp, Arabidopsis thaliana columbia
gcccatttggttaatcgcctttttaaactaaaaacaaaaggctcagattagcgatcccttggttccttttggcataatgctcttcaacataatttcttttggcaggacccttaataacaccaaaaccttttccgatggattaattaattcctaacccaaagttggagaaggcggttgcttgttcttccacggggaccattaagccaggttgttcctctgggtttaacactagagataggaccagtttatcgttgggggtggtttacggtaccaggggtgttgtgaagggcttagacaatccttcttctaggacgttcgaaaggggttctt

SEQ ID NO: 110511 - DNA, 288 bp, Arabidopsis thaliana columbia
aggggccttagaagattaccagataaacctttttgtttgagtgagggagactaacccatggggtttttggctaacaatttttgggaatggaaatgttcccaactctttcttttttctaggtaatcgaggagggcttcaaaaaactttccccagaccaaatctgccttggtttctccgcctatggccgccgcggtggcaatgtctagcggtaaaccaaaggagctttttgagctgaaaaaaatgttcaaagatccttatgaccgatgttaaatttttcctatggaaggg

SEQ ID NO: 110512 - DNA, 301 bp, Arabidopsis thaliana columbia
aacattaaaaaacagggggaggtttaaaattttgagtgttgggagcaaaacgggcgacttggggaccgtccttgccggaggtgtcggttaaagggaccggccgagaaatcctacaggggggggaggaccgggacccatgtttcccctgatgttatgggccaccacatccaaatggttcccgttaacaagggcaatcttgactttaacggtattataaggggttggacctccccatgggtgggaagggagggggtgttaagggagggataggtgttttgactttgggcccaaaccgttgcct

SEQ ID NO: 110513 - DNA, 255 bp, Arabidopsis thaliana columbia
gaatccccgggcggaccacacgcgtccgttgggaatggttttggcgaaaggtttttattttgaactaagaaaatttccgagtgggattattttttccgttggggcaagggcgttggtaatgcccacatccaagggaaccaaaggggccattatggaactaatggttgtaaagtttgcggtggtgaaaatcgaggatcccgtaacctttaaaaggggctgtattaacaggcaacctttatttctttaaaatgaacc

SEQ ID NO: 110514 - DNA, 272 bp, Arabidopsis thaliana columbia
cccgcccggatccggccgccccgcgccgccttaagctaatttcgccctggagtttaaatcgggaaggacctccatcttttccgggggaaaaacggatccctaaatcggggattttttaaccggggaggattaattccatggggggaggagaaggtcttggtggcccagggttaattcgtggtgtttaccgggatggcggcatttccggtttttggtttaccagggaaaagcttttttttaattttagggggggattaaaggtgtttggtcct

SEQ ID NO: 110515 - DNA, 407 bp, Arabidopsis thaliana columbia
ttggggtttaactggggccagccactggaatttttccagatttaataatccttcctggaaccaggagcttagttaagaggacgaaaaactccccacccgggggcgaagattacaggagggttgttgagaagggcaggaggaagctcaaaggttggatcgttgaaaagaactgggcacccataatggtccgactggaagggaactttgttggaactttcgatggcaaataaaggactgggggtccattcggaccaatgaggttggacgctgagcaagttaatggggccaccaggggtatccacatggttttaaggtggtgggacccaatcagggagcaattccttaccatctttttggctgatttcaatcactttgctggggttggggccgttgaagttactgggggc

SEQ ID NO: 110516 - DNA, 320 bp, Arabidopsis thaliana columbia
cggcattaagtccaaccactttaatagggcttttattttaaactcaacaaggatctcctaagggttccatttgttgggggggaggttttcctacccggaactatttcttttttcgaggggaatgaccaacttaggacggcctccgttaattttttggcgctgggaaaaaaggttatccttttgggggttctgggggctttgactccaacttgcacatggaaccaggttcttgggttaattgagaaggcaatggatctgatgttaaaggttgttgtttagatacatttgttttagggtgatcaatccgtttgttatgatag

SEQ ID NO: 110517 - DNA, 339 bp, Arabidopsis thaliana columbia
taccggggaatattatgccaccgagttgttttttcattcctaagtggcggggtccggcccggggtttttgggtcttccaaatataaaaaaatttgcgcctgttctggcctaatcctttaacataaagactatggaggaggtaaagccggttccaaggggaaggaagattttcgcagttaaccctgtggtttaaaatcagcccctaagatggaaatccaggggtccttaaattacttttagggcacttgtggatatggtggtggtacactcttctggtccgctttgctattttctgggccacaggggtccgagaccaagaggaggaaagccttattttta

SEQ ID NO: 110518 - DNA, 214 bp, Arabidopsis thaliana columbia
cggaaccgcagttccggcccggccctccgcctccggaaacgagaccccaacctccccttttttcttgtttcttggccagggcttccgtttttccgagggttttaaaatcggccttaaagctggacctttttgagataatggccaaaatgggttttcccatgtttcctaccgggaccgcttttaaacttcctcccaaaaatcctgaagtctccgg

SEQ ID NO: 110519 - DNA, 388 bp, Arabidopsis thaliana columbia
ccgggcccggattcccgggccgcccaacgcgtccgaccgttaaaggccggcccagggccttgtttggggaaggagggggctttgccccagatgaagccggtgcctgggaaaattatccaaacctttgagataagggcggtggaaggacacaggatcgggccggttccttttataattcttaacaggaagcagggcctaaaggttccagccactaaaggatctaattggtttggaatttaatgcattactatgtgcctccatttagtaggaaattattatttagaattttccaaaattctggaataagaggggtatggtttccattaaaataatatttaactttttttataaaaaatatttttttcttattatttataaatatattatt

SEQ ID NO: 110520 - DNA, 439 bp, Arabidopsis thaliana columbia
aaatggcttaatcttctctctatctctctttttatttttactaataatttttaaggttaaggaaccggggtttaaaaattaaaaggccttttggggtggtttaaaattcctgtttaaccgcagtatttaattaaaaaattcctgccgttgacggggcttgcacttaaaaggaaccggccttgattccaaaaccgttgcgttttccccaacgccgggttacttccggggccgtggccggaaaacaaacggattccgccgggttaaatccaccaccgccgccgactaattccatggtaaggaaaacgccgttaatccttggaccaattaccacggccattgtggcctaagccgggcgggttggttcgaataagtttttagccggttccttggttcaggagtttttaaccattgtgccattttttggggggcttgggattcc

SEQ ID NO: 110521 - DNA, 302 bp, Arabidopsis thaliana columbia
ccgaaccaggatggtgggattttccacccttttgatgaaccgtatccagaaggggcggggccgtgtattctaactaaggcttaaaaaaaaaaagcttgaccccctattggcctttgttcccgatgggtctgttttaatgattgttgagatcaaggtcgccaaaaggacttttgaattgttggtttctttaggaaggtttgacacatccggaattttggcattcgagccacatcaggctttggaaccaatcgttgttttcggcggcgggtcacccaaaagaacctatataggcttaagttaat

SEQ ID NO: 110522 - DNA, 425 bp, Arabidopsis thaliana columbia
ttaaattcctaaatcttaagtttcccacttccatcttaaaaactttttttaaccacgttacccccagccttttttccaaggggaaaccggggttggtaccggccgaggattttgggcttttatggaggtgggtgggggccaaagatggcggtcctggtgggatcaaaaggagggcccgaccaaccccaaccttttaatataaggctgggaggcgggaccctgagaaggggcctccccagacccgaagcaaacctgggttgggggatgccactcccgggagggccggggactcttttggggatgatgggtcccgttccaggtgggatgattggctttggattcctattactctcgagcgtggcagggccacggcccctatggctggccattgggtgcgaaggttcccctttttttgtttgacaggg

SEQ ID NO: 110523 - DNA, 410 bp, Arabidopsis thaliana columbia
cccggaattctcgggacggccccacccgtccggttgttcttaagaaaccaccaggtggttcggttcggtgttcccctggcaaaactaaaaccatgggggggggtttgaggaaccatttgagggggttaaatgcccctaagcatggatggctggccaaactggggggggcatttgccccaaggccgttttttggcccacataagccaggggagggccttcccttggtccttataatcaggaccgggtggaagtttgctcttacctaccgggaagggtttccaatctggagccaagggcttatccacgttgttgggaaagtcaggccggccaaaacctaccctgttggtttaagggttgtggggtttttcccaagaaccattgggaccttccgccttttttttaatcccaag

SEQ ID NO: 110524 - DNA, 233 bp, Arabidopsis thaliana columbia
cggataccggggcggacccacccttccgaaaaaaatgccgcggcgaaaggttcttttatggttacccgaaaccttgacctaatagggggggttggaaaatattctgggtctaaaatgtcccaaaggatagtttggtggcctttaaaggccaagaccgttggcgttttccttgttaacgtgttttatccaagggtttcctcttcgtttgagaagcctgccaagttttatccggt

SEQ ID NO: 110525 - DNA, 215 bp, Arabidopsis thaliana columbia
cggaataccgggccggcccaacccgtccgaaagaggcaaaatctgggtaggaattatatttttccggattccttcttttttgaatttccggcctattaacctaattgtttgggtaccaacctattctaatagctttaattttacctccttcttagggaaccccttatttaccactccctcttcatatcgctccactgcttttgtttttttccttt

SEQ ID NO: 110526 - DNA, 391 bp, Arabidopsis thaliana columbia
aacgaggagacctgtcaaagggactggtcttatggaatgggcctgcgggaatgaccaacaaaggggcattggatgccgggaaattcaaactcctgaggcctgacctttacctaatcgcctattaattcaagcaaggaggaatggttttgccactcttaaaccgggtaaaaaccaggaaaaatgggaagaccattttgccaaaggttgacggaaccagggccagggtaaataccaccctggcggagaccatggctggaccagcaaataccgaaggggcactaaaggctttggttcaaatttaaccgggccctccgggaccaaatccgataaagcgtgtaccggaaataaccaaacgggttctgtgtttatggggggatcaaaatggactaac

SEQ ID NO: 110527 - DNA, 402 bp, Arabidopsis thaliana columbia
ccttaagagggaagggggttggggtttcctttggtggagccattctcggggttggttcaagggtgaatggaaaatttgggtcctggttctttaaaaaagtccgacccttcaaaggccggaattgggaatgggcatcggtttatgggggggaatcgttttctttcatgggggtttttcccggacctttttcgggtttttaaggagcaccctccggtggccaaattggtccttggggcttccaccgtgggccccaatggtggatcctccatttttccggttaatgagaggttgtggcgaccacctgttgttggggtgggcattgtggactccagtttccacggtctatcaaccattgttgttgagttctaggatctaaaatcttgccctttgaatgttgggaaa

SEQ ID NO: 110528 - DNA, 307 bp, Arabidopsis thaliana columbia
caaatttaataaagggcttcctaactcgtttattttttaacccaaggtaagcattttggggggatggaattgtgttcagggtttaaggcccacctttggctaaggggggttcctccagtaggaccattgatggcaaagattaagggttgggaaggcacccgttcgttgtaccttccaaggaaccctttgcattggagggtcaagacttgaaggtgaagggtccatttggggggttggcttttccttccccacccgaggtttaccttccaaggtaggaatcctgttttttagggtttaaaataccctt

SEQ ID NO: 110529 - DNA, 290 bp, Arabidopsis thaliana columbia
gccccacccgtccgttaatttccaacaggaagacttctgttgtttttggatccgaggggggtcctaacttaactgtccaggttaaagccaggaggatcattgcttttaatgggtttgccgggggcaatctaaattttttgggggcttacttggctccgtggcctactacaactccttggattcttgccaggcagttaacggcttttgttagtgatgccggacctgattgggaggtgggggcttccgttggggttaaaaaggtgtcctttggacagtcccaagatggaatt

SEQ ID NO: 110530 - DNA, 273 bp, Arabidopsis thaliana columbia
gggccgcgtggaacccgttgggttaaagcttatcatttgtaagggaggtatttgaaggattacctaaaccaccgggtggttggtgggttgttgttccaaaggggtgggggtttaatttaataggtggtttacccccaggtggtggcattttttctttgggaggtggatttttatattattaaacctggaattcaatattttaattctggtggtgggggttggtttttacttttaaaccatggtatttcttttcaatggttactaaaatttata

SEQ ID NO: 110531 - DNA, 299 bp, Arabidopsis thaliana columbia
  unsure (1)..(299): unsure at all n locations
cgggncgggaatcccggggcggcccacacccgtccgaaaggatgggatggggaatttctggtcaggtttcgggttttccaccaaccaaggggccggttttggaaaagaggaggacttggaatctctttcttctgggggctctttttttacctactggttacaggctggccctttaccctccctttttggttcctcctgaacccgtaggtggaggtggtgttcctccacccaaggttgcccttgtaaccattgttgttgcatcgaattggttaaatactattggccccgttgcccgacct

SEQ ID NO: 110532 - DNA, 476 bp, Arabidopsis thaliana columbia
cccggcctggaataccggggcggacccaggcgtccgtcctaatccaaaaaggctcttccatttaattggcgccggaataagttttttaataatttttttaattttaattcaaaaccggacccttttttttaatttccttttcttcaacaaaatccatggtttttttttcctccttcctaaaccgcggtttttaatttttaactttggtaaaagcctaatggaccgatcccgaaaccatttttttggaggccgaaccaccagaattacccgcaaaggtcgttttggacccaccaatggttcccgagggattcgcctttcctccgaatttcgccgaaggaggcgccaggccagaggaggggatcgctcccgtttttgaggagcttattggacctgcgtttgggggggggggtttgctgggaaaagttttttatgggtgggcctcaaggcttaggaggggttcaggttttgttgggaag

SEQ ID NO: 110533 - DNA, 346 bp, Arabidopsis thaliana columbia
aaaccttgaagaagaaaaaaaattttttaatgtagtttggaggatccagggcgaggtttaaggtccggcctatgctactccgcctggattaatccttctcctaaccggcttggtggggcgccaaaaatttcgaatcctgccccaaaaagggaaccgattccggacccgtaactagcatgggggtctttcaacttgtggggcctaactgaaaccccaaccatccttataaattctttgggttctgcaggcaaaaccatccccgtgggaacccttgggtccgtcgcctttatagatgggaaatttacgggcctttaaaaaatttacaccctttcgggttgggagggct

SEQ ID NO: 110534 - DNA, 317 bp, Arabidopsis thaliana columbia
aaggatggcccaggggtaaacagggttccttcaatttggggaccattgcctccacacatggggggaggtttgcaatggggggaggggttaatcctccaataaatagtaaggggaccagatttttggaccccaatttcagatttagcaaagaagtgcttaaccttgaggccccccctaaaagcgagtggaaaaaatggaattggaaatcttccgaagatttgttgttaaacggggcgttttttactccgtctgggggtgcagcctcgcctagttttgcaaaggcttcaagctttggggttaaaccgttttttttagtg

SEQ ID NO: 110535 - DNA, 344 bp, Arabidopsis thaliana columbia
ttcctttaacttttttaataatggaaaaaccaaattcaaatggtcttggtaggcgcaccgggtaggtggggccatccccacattggaggggtttggtttggattaataccataatggcttttggggaaaggaggttaggacgcccgtttttatggtttggaaaaccggttgggttaaaaaaaaaccggtttttttaaccgagtcggggcgcatggggttttgcattaaaaccattaacataaccgccgtttggggcgatccgttgaactggaacgggacggccgaagctttgaaggggagccacctggatggggggaaacaaatggtgaaggagtttaggaagg

SEQ ID NO: 110536 - DNA, 405 bp, Arabidopsis thaliana columbia
aaaaaaccagagcattttttaaaaaatttaaggaaacctaattaaaaggggttaaccggcggagccacatttaattccggggcaggtaaccgccgccaaagctgcctttttggccatgcaattggccggggtttccgtttttccgagggtttaaaaatccgctttagggctggcccttttggggattttggccaagatgggttttcccatgtttcctaccgggatcgtttttaaacttccgaccaaaaatcctgaagttccggtcatgctcgaccgattcctccgttttttaacgttttacttccgtttaaccggttccaaccgtaaactttccggggatggcgttgaacggatttacggccttggtccggttggcaggttttggaccaagaccgaagatggggt

SEQ ID NO: 110537 - DNA, 303 bp, Arabidopsis thaliana columbia
cggaattccgggacggacccacccgtccgcttggtttacaaccatggttaaggcagcatttgtgattgtcagcccatgaggcctgcaagctgaaatttttggaatggaagccgaaagggccacaccgtttaatcattaccaagatggaggggcggcataaccaggggatggtggggaaaatcggggaaccgggtacaaaccaatggggccttggctgcaggtcttccagttgatgatggccgttttgccatttccgttttagtttttgtcagttctgagggggtccaagggacgaggtttttt

SEQ ID NO: 110538 - DNA, 341 bp, Arabidopsis thaliana columbia
cggaattccggggcggaccacagccgtccgggggggccggagttgtcaaaggtttccagttaaatcctaaccaaactttgggggggggagccaccacagtcgttaacggttccactaagggctttggttggggggctggaataatcggacccttctccctggtttacacggttttttccgcaactgaccccaaaagaagcgctggggattccaacgttccgattttggcaccattccaaatcggattcgttgggttctgggttaacttggcgacgattccaataaccggaccaggaattaacccagctgggattttgggagctgcattaatttacaccagg

SEQ ID NO: 110539 - DNA, 326 bp, Arabidopsis thaliana columbia
ccggaattccggacggacccggcgtccgcaggtcctttattgattcgacggttccaattttcaagaactttccggagaaggggacctacctcgggcacacaggctgtggaacctccactataccaaggttttagaaagaaaggattttgggccatgcccgattgtgaggttttcattaccaagaacctgggggtttaattgaatttcacatgggtggtggttagaagaaagaaggccattacaaaatcgttcttgacgggtaaaggaaggaccccaggcttgaagacatgtgttccgagaagttccattttgaggacgttagggtt

SEQ ID NO: 110540 - DNA, 430 bp, Arabidopsis thaliana columbia
agaccaacaggaatgccttccaggccggccaggccgttgccaaagttgaggagagaagcatggttttgttggccagggccaaggttgctgttgttgcacttgaagcttccggccaccaggcggaaaagagtttatcgattgcggcagtggaaggtgttaacttcgtgaaggacaagaccggcctgaccaagaagcgacccgggtaaactttgggggttataatttccctttcttaataaatggtggggatttccaaataaaattggggggccataatggatcctcgacctcatcgacctggtggtggttttaagggtggaaaggtttaaaggtttcttttcccttaagatgaacaccgttgggaactttaaaggtaatcaaccaaattttgtttaggttcaaaaaaaaaaaaaaaggggggcccttttta

SEQ ID NO: 110541 - DNA, 268 bp, Arabidopsis thaliana columbia
aaccacggaaacaagggttcccggcggcagaaccctgtgccattttgtgcgctggagatctactatttctaactccggccgaccaagatgggaaggtgcctttcttgtaaaaccctccaaccaggggtttaactgggaagagactccattattgtacgtgggaagataaggtatgtcaacttacggggttttttgttggggaccgttcctggaattgggggttaaccccgaaggggggtttaatccgaagtttcttatatgttaaggg

SEQ ID NO: 110542 - DNA, 445 bp, Arabidopsis thaliana columbia
aaaaaaatttttttggggggtaccgaaaaaattgtttccgttggggaccaaatggttaaggggggttcaaaagggacctggtcctggggttagaacttaacttgccatgcccgtcgttgggaccaaagttaactgttttgggggggggtttaacccaccgatccatttggttaccgacctttcctttttggattttgagattaaggaatggtcgttggttcctgcaaccgggggggctcctttcccctgttttgggttttcgatggtaccaatcggttaaactatttatgtttacgggggccgtgacgttaaacgtaaatccaacggcttttattctgttgtttctgggcccaactgatagttaatggtggtctcctggttgggtaggccttcctggtcttattattcattcatttgcttgttaattttctgtaagttttttttt

SEQ ID NO: 110543 - DNA, 310 bp, Arabidopsis thaliana columbia
tttcctttctctcctctttatcttcctttaacacttaggggccttccaccagatttaaaggggtttaaaattccaggttccgtcctaaaaccactttccgtattcggtttctttagagccagggccgtggttcttggtccttacatgggcttaccaggtttttttgaccccaacgggacctttggatccgacccgacccgattggttttttccaggtaagaaacttttgccaacgagttattccggggggttggttcttccgtctttttaaccgtaccggaagatggttgtacggcttgtttatccgatt

SEQ ID NO: 110544 - DNA, 348 bp, Arabidopsis thaliana columbia
aataccgggcccgaccaacgcgtccgacgaacaacaaaaaatgcagattttttgtttaactttgaccggaaggacaataactttgggggttataagcagtgccaccatctccattgtcagggccaagacccaggacaaagaaggattccttccggatcagcataaatggatctttgccggaaggaatttcgaaaatggccgacctttggcggcttacaccatccagaaggaatttacacttaatcttgggtgggggcttaaaggaggattaattgtgctttcctttgaggatgttggttggtaggtccattcaggtaattatgattgtccgtaggtgatttttttttt

SEQ ID NO: 110545 - DNA, 307 bp, Arabidopsis thaliana columbia
cggaattccggggccgcccacacccgtccgtttcctaaggagaatcccagaaggttcaatttagggggcccaaaaggggaccggaggagagggcttttacctccgggaggtaattggtaaaacaattaaaccagacccgtcggtttcctttctttaagccattacctttgaaaccatccaaggtttgggtggcaactgggggcaaagcccaagggcttaaagtaaaggcccttaaaatggccaaggttttgcccggattctccgcggttgttttaacggtttcaagggggatcccggaaatagttga

SEQ ID NO: 110546 - DNA, 374 bp, Arabidopsis thaliana columbia
gaatcccggggccgccccacccttccgaaccaaaagggttttgtggggggttttctctttttccatctccggcggttctggagggaggtttaaaaatcaatggttccggccgtttaaatggctttgaaagagtggcgttggttaaaaggcttaaactgtttcccagacctaatctaatgggggggccttttttccggtccgtgattggccttgtgcctgttgataacttggggtgctttctttgttcaggctgccctccccaatcctttttcaattcaaagttggctcctcctccattttcttccgggggccttcttgggccagataccttattcccattcatgatgcttttttttgccttttaagtacagttt

SEQ ID NO: 110547 - DNA, 405 bp, Arabidopsis thaliana columbia
  unsure (1)..(405): unsure at all n locations
gggnngggaatcccggggccgccccacccgtccgaccaaattttttttaccaggaggtttaccattttggaagcacctttattccttgggtggttttgcattttttaatgtgctaaggggcatttcgccggagctaaacaaaccgccggcaccataaccccttgggggattccattacccccaaaggcttttttgattcgttttgggaccattaacatcaatggcgatcaaccaaaccctttttttttcttttaaagggcctttcctttaaccgccggggcctcaacccgtttggcctaattcgtttttaataccccccttaacacgcataattttgttttttgttccgccgggaaacttttttgtttccctgggttcgccgttaattccctggaaaaccacggg

SEQ ID NO: 110548 - DNA, 391 bp, Arabidopsis thaliana columbia
ccaggcgtccgttattgggaaaaattttttgttctggagaatcaggtggggttcctaaggagggatttttggacctaatttcgaacctttttatggggtcccgggtcggtttgggatccagaatcgggttcaaccggtgggggccgggttcggggcttagtggtaaggactttggttttaatggggggggtttttttaataaggcgtttaattaattccaccattcgtggggatcacgcccgggtggtttttggttttttaaccggagggaggtttacgggggagcaggcgtaaggagatcctgttatttccttaaccttaggattgttgagtggtccagttgctgaaagggtggatggttaaaaggtttgtgttttggaacaggcttttt

SEQ ID NO: 110549 - DNA, 328 bp, Arabidopsis thaliana columbia
gtggttccttgtgaccatggttcctccattttaaatttaataaaatcctttaacctcccgccatggttaccgtttccactaattttttacttaattaaagggaaaggtaagggttttgggggcaaacccaagtcaaattttatttttgaaactaaaccaaacccttaaaacgggaaaccaacagcattttgcgagaccccttgttggggttagccaaacgggggttacgtcgttggaagttgtagttccggaaagattccgttgggataatcttggaccccagccagtttctgggaagaagcatataaaaaaaggtggggggtttttt

SEQ ID NO: 110550 - DNA, 300 bp, Arabidopsis thaliana columbia
ttcggggtgggttaaaacggaggcttgaatttaagggaggaagatggtttcgattccgcagaagtaacagtccagtttccggggggggaccccgtcccgttccttttaacggttaaccagttgggggtttaagggaaccccgaaggcttaaggggcaggttcttagtcccatggtaccggggttggtcctttttggccccaaagggccgggggggttccattgggaccaaaattgcattggttttgcctgccgatggcaatggtaactaggaaaagtcttccatggaaatctttaggatc

SEQ ID NO: 110551 - DNA, 365 bp, Arabidopsis thaliana columbia
cccggaattccggggcggcccacacccgtccggaaaaaccggttcgttggtggtaacttgcaagggtggtccgaccttttgccttagagtttgggtcaagggtcccaaatccggacccaacggggttttggcaccgttccttggttccccggccattttccggcgtccgccaccaggcgatttttgggtggctttccattgcaaaaggatttggttaacacttgcagttttgtttaacactggggtgggagggtttttcatgaccacgatgaaaatggagcctgtaattcatttaaggaccgggggaaaccttattggaattgtcgggaacctttttggagggccaggagagtttttggggtttc

SEQ ID NO: 110552 - DNA, 355 bp, Arabidopsis thaliana columbia
accgaatctattttgggttggacccttttagggttaataacactaactaaatccttgggaccatgtcccaaatcgtttttttggttgccaccataccaatccgaacgttaaaaattgctaaggatctaggagtccgtttccaattaaaccaaccaatgaagttttattaaggctttgggaccgcggttgatggggccacaaggggcggtttaaagaaaaccaatggggccaatgcacctttggttgctttttacaagggattcaacatagatggtggccaagtttttgtggaagccaagtcctgtgccaaacagggccgaatgtggggggatcagaaggagttccgggaccttga

SEQ ID NO: 110553 - DNA, 267 bp, Arabidopsis thaliana columbia
gtccgaaccgttcggtaccaaatacaaataacccttggattcaccgttccaccaatggaaactagggttggttcaaatcaattaagcgcaccgcccccaagggacaacaacaccggagggggcaaatccaaatgggtggaaaccagcatgggagtctcctgtgcataatgcggaaggttaaccggaggagcgggttaaaaaaccccttgacccgaaggatctttccgaagctgattctgctgaaaagccaccacacattcggttttt

SEQ ID NO: 110554 - DNA, 361 bp, Arabidopsis thaliana columbia
cccggcccggaattccgggcccgccccacccgtccgaaaaaataaagaaggccaaaaacttgaagcttttcctaacagttggaatgggctcggaccatatggacctccaggcagttgaagttgttggcctgccggtggttgaagcaacggaaggcaccggggtctaaggggcagaggatgagctcatgaaaatcttaatcctaatgcccaactccttcccagggaccacccaggtcgcaaaaggcaagtggaccgtcggggcctttgctaccagagcttttgatcttgaagggaagacgatgggacccgggggagctggaaaaatcggaaggctttggctgcagcgtttgaaaccattcgg

SEQ ID NO: 110555 - DNA, 331 bp, Arabidopsis thaliana columbia
ccgggcccgccccacgcttccggaccagggatccaggtaatgacttggattgatagccaattccgaaccaccttggcctccgaagaaggagcctttaagtaaggcacctatgaacctcatggggggttcgatccgggctcaggaggacccctggcggcatgttaacaacaaccaagtcgttcggaatgggtggtatccaggggcgaccggttatttaccgcttatataacctgcccttggtaggggatcaacagttgtaaacgtttgcaataccccttatggcttatgactaaatgggggaatcccccctaggggggccttcttcttgttt

SEQ ID NO: 110556 - DNA, 364 bp, Arabidopsis thaliana columbia
agaggatgaggcggggccaccaggaggaggatgaaccagtttcatttggccggaaaagaagaaggatgttgtggaaataatccgtggttgaccatttaatgtgcgaggtggaaggaaaccacttaaaacacgccgccttttttggccaagacggcagggtttgggttaaaagttaagttttccttaagtggaagcctgcaaggatggcaggattcaccaaagactttgaagaagccggcctttttgcccaaaccgggtttttctttggcggggggaagtccatggtggtccaaggggaggttggagccgctttccaggggaaaaggggccctgggggggtaattttaaagaggactcctaaggt

SEQ ID NO: 110557 - DNA, 435 bp, Arabidopsis thaliana columbia
  unsure (1)..(435): unsure at all n locations
cccggnccggaattccggggccgcgcccacccgtccgggttgtggaaaaaaatccctcggcctatgttttttttttggaaaccatgagaaatttcaaattcagggggtttaggcggcagtttaggcccattggaaggtttttcttaggttcgaccaaagggatgcaggtggttttgggtcgttctgcaaaaaatgaactccgttctggtttttccaaagtttccaagctgtttcggggggatcctggccttttggttcctgttttgccaaaggaggaagtcgaaggcttttttaacgctattgaggattccgccttttaagggcccggaggctttgcagtgaaaacggttgacctgaaggagggtcctttagaccagtcaacccatgaaatggaaccactttttcggaggttggaaatgcctgtccaactaacca

SEQ ID NO: 110558 - DNA, 225 bp, Arabidopsis thaliana columbia
ggtacgcccggcgtccgcttgttttaaatggtaagcggtggcctttttttttttttttggagctaaaaaataggcttccttggttttaactgtcaaaaggttggcccgacttttattcccccctgccaaaaagccggttgggggccttcattttgttaacatttttcccctagcaaatttttttatttccgaatttccccctcacggggaaaaaataaggtaatt

SEQ ID NO: 110559 - DNA, 253 bp, Arabidopsis thaliana columbia
gtggatttttggaagaatcctgataggtttattgggttgggggctaaaattcctaagggtggttggtggttgggccaaccggttccgggaaaaaccctttgggttagagttggggttgaagaagttgaagtgccgttcttttggggggctgtttggaagttggtggagcttttggtgggtgggggtgctcttagagtaggggttttttttggtagggcaaatccgtaggctcttggattggggattattgatg

SEQ ID NO: 110560 - DNA, 471 bp, Arabidopsis thaliana columbia
aataccggggcggaccaaggcgtccgaactggccgggggggatatgccattgggttaagccgaaagggcagggacccgaaccttttaattggtgttatggtggggggccctgatgctaacaacaatttcgttgccgggggagataactatgagcagactgagccggttattaacaacaaggaacaattcctgggggttctggctggtttaagaaggggtaattccggttttggccagttttttccaggggttccggttcctgtggtccgaagaccaaggcctattcgaggaccgaaggggactactccagcccgggcttttgtgccaggggttttagttaaaaagataactagttaaggggtttaaaggggagggacttactacagatcctaaacaactgggataaacaaatcttttagacctttgaaaggtttaaacctttcgatcaagaatttttatggaccaatttgg

SEQ ID NO: 110561 - DNA, 335 bp, Arabidopsis thaliana columbia
aactaaagagggacttgggggccatggcagcttttttcaaatcaaccgttccattcctccagtgggggaaaatggcaacggttctttttgggggaggttttaacctccgatggattaaggccgtgggcaaatctttggggctggaaacttcttgggttggcttaactggctccttccagcttgattttaaggacttaaccggaaaatgctccgcccctgcaaaattggccggattggttctggcaacctttgcttttgcgtattgggaggcaggtgcggggggggctccaaggggatggccctatgttgggattcagggcaggacttccttggag

SEQ ID NO: 110562 - DNA, 426 bp, Arabidopsis thaliana columbia
cacggtggagcaaaatcacatgcgaatgggatccgtttggtgtgttgggtccggctcaaactggtcatatagctcgggtgtgagtttaagcgtcggctagagagagattcagaggcaagagaagcttttcagaaacaacttcgtgaagagaaagagcgtcgtcaagctcttagacaagttaaaaatctcttattttttcttgaaatcatactgatttgtgatttgcaattatatcgattgattttggttgtttgggttttgttagtctagagttgtaccggatactgctgcggagctgattgagtactttcttgatactgtacctcaagagattgagtttgagatcgctaggcttagaggaaggtttaacgacgaattctttgcgcagtttcgacttggaatttgacagattcgatttgctgtttc

SEQ ID NO: 110563 - DNA, 396 bp, Arabidopsis thaliana columbia
ccggtcttgaatttccgggccggggccgagccacgcgtccgtcatagagggtgcctcagtctcatggatatattctcaatagcttttatcagtaccatcgtggctgcctatagtggggaacgcagctgaacatgcaggggctatcatgtttgccatgaaagacaagctggatctgtctttgggagtggctattgggtcctcgatccagatttccatgtttgcggtcccattctgcgtggtgattggatggatgatgggtcaacagatggaccttaacttccagctttttgagacggcgatgctgttcatcactgttatagtagtagcattttttcttcaggaagggtcagtggagtacttcaaaggattgatgctgattccttgttatttgatagt

SEQ ID NO: 110564 - DNA, 491 bp, Arabidopsis thaliana columbia
  unsure (1)..(491): unsure at all n locations
gtccggaatnnntcccgggtcgacgccacgtnnngtccgcctttaatgctcatatcnntcgccactgnngagtctcatatcgtgtgaaagaaatctccactcttcttccggagggaaaagacggatcccgtaagatcggtgaagtttttaatacacgagnaagatatcatattcatatggagggaaggagaaagggcttcttgctgcacagagcttatatcgatgtatgttaaccgagaattgctgcgatttctgattattcgtatannacagtgaagaagcttttgttatatatctagncgaggagattaatagcttgcttgttcctatgttttgaggaaattagagaaaggtaacgaatccgatcatgcgaagataccgttgaaagactttgatgatatttgaaaggaagctattgtgttcagcgaagggattatctcaatattttgtagcccaagggagcaaagatttatctggttgatgggagaggg

SEQ ID NO: 110565 - DNA, 363 bp, Arabidopsis thaliana columbia
  unsure (1)..(363): unsure at all n locations
atcgtttaatgccggtccatggacttgtttgtgttaagaagtggctatgacacanatgaaggcagtgtctgtgagaagtatacaaaactatgagataaaggtcgttgaaggacacaagatcgagccagttccttctattattcttcacatgaagcatggtcttaaagttacagtcactaagagatctaatttgctctgaatattatgcattactattgtactacatttagtatgaaaataattattagaattttacaaaatacttgaataagaggggtaattgtttacaataaaattaatatggtgcggggggtggagaaataatttcttataatattaaatttttttaatataattacttat

SEQ ID NO: 110566 - DNA, 366 bp, Arabidopsis thaliana columbia
  unsure (1)..(366): unsure at all n locations
aaatcgnctaattctctctctatctctctctctatttttacttattatttcttaagttaagggaacatttattataaaggtagaaagccttctcnttttgtttaaaaatactgtttcaccgcattaattaatttaaaaattactgtcgattacgtggcattcacttaaaaagatacagctcattatacaaaaacgattcttcttcccccactcctagttaccttctgcgccttctccgtctaacaaactgattccttcgtgattaatccaccaccgcctcctactaattccatccttaattaaaacgcgcgtcgtgcggtgtccatctaccacctctcctttatccttatcccaatccattttttt

SEQ ID NO: 110567 - DNA, 143 bp, Arabidopsis thaliana columbia
ggcccgcccacgcgtcgatggctaccttagtttaagaacaaatttgttgttgttgcagccgtgaacatgatgtgcgtccggcattgtagtgctggggtggtccttgacttctaagctgtgtgtgctgtcactcgttgaggctc

SEQ ID NO: 110568 - DNA, 340 bp, Arabidopsis thaliana columbia
  unsure (1)..(340): unsure at all n locations
ttcgcaacaagattgctggattctcctcttcacttgatgaaacgtatccagaanggaccgggcctttttatctgagtgaggcttcaataaaaatagcgtgaacgccttatggactttgttccctatgagtctgctatcaagactgatgagatcaaggtcgacaaagatactcttgagatgctcgcttctttaggaatgtctgacactatctgctttcttgcagtctatccatatcatgctattggcaccaatttctgctttcggctgtaggtctcccaaattattcttaatattccctgagggggggagtggggggctatatgcttacatattcttttat

SEQ ID NO: 110569 - DNA, 415 bp, Arabidopsis thaliana columbia
  unsure (1)..(415): unsure at all n locations
aaaacccgggccggcccactcttncttctttagagagaatgtttatcggggtttcttttttccgagacaatctctaggtttgcggaatggttaattgaaaagggggggcctccttctctcaaaaagtcctatcctttcaaagtctgaatttttaatcggcatctgtctatatagaggaatctctttctatcattgaggctattcccagaactttttcgagtatctaaagatgcaacctcctgttgccaaatttgttcttcttgtctccaacgttttccccaatcatagaatctacattcttcctctttacgacaagcttctgtggacatcgggaggatgggtttcttcattttctcctccacttttcactgtcttttcaccattttttttgagtctcttatatcccatattcttc

SEQ ID NO: 110570 - DNA, 350 bp, Arabidopsis thaliana columbia
  unsure (1)..(350): unsure at all n locations
aaattttatcaatggcttcttcactcgnctcttcttttcacacccaggncagcatttttgggagatagttatgtgttcaaggtgtcaagcacaccttttgctcaagtgggttactccagtaagaccattgagtgcaaagaatcaaggataggaaagcaaccgatcgctgtacctttcaatgtaaccattgcattggaaggtcaagacttgaaagtgaagggtccattaggagagctggctttaacttacccacgcgaagttgagcttacaaaggaagaatccggtttcttaagggtcaaaaaaaccgtcggaactagaataaccaacattagacggaaaggagctggtgc

SEQ ID NO: 110571 - DNA, 279 bp, Arabidopsis thaliana columbia
  unsure (1)..(279): unsure at all n locations
tgaaaanccgggccggccgcgacgcgtacgacctaatacacctaaacatttacaaatttttttattacatgaagagttattattgctagctgggtttatttagccagggggttggtggctgttaaactcacctcgatccctaaaccggatggttcagttacggacgttgacctcaaagacttgaaccgtgactcatttgattacttggccaaagtctctgtcaccaatccttacagtcattctattccgatctgtgagatcattttcactttccacaat

SEQ ID NO: 110572 - DNA, 293 bp, Arabidopsis thaliana columbia
  unsure (1)..(293): unsure at all n locations
tgaattcccgggccggcccgacgcttcctataagattggattgagaatttcttgtttttcttctagtattccatcatacantattgcaggggttttaaagaggaggggttggaatcttcttcttcttgtngctctttctctacctactgtctacatgcttgtcccttactctacctttttttttcctcctgtaaccttatgtgtttgttggtgtacttcatccatttattcccttttaatccatttatttacaactgaatttctttatacttatttttcctattacccaacct

SEQ ID NO: 110573 - DNA, 269 bp, Arabidopsis thaliana columbia
ccggcgccccgcgtcgctatcaaaaagctctcatttcaatggcgacagcatcagctcttcatcactctttactctactccacaccggaccgtttttatctctttctcacaaatcatcgcttttctctcttctaaccgcgtttatttactctcgcaaagctatcgccgtccgaccatcttttgagcgaacaccgaataccgaatgtcgcttgcccaccatgtccgggatcgcttctcgattcgacaagagcgcagacgagagagacctcc

SEQ ID NO: 110574 - DNA, 388 bp, Arabidopsis thaliana columbia
aaagaatgcccaggtgtagacatggatacttccattttgtgaacaatgactacacacattgggagatgtatgcgattggtggaagtgctaatcctacaatcaatagtcaagggaacagatttttggcacccaatatcagatttagcaaagaagtgactaagcatgaggacgcgcctgagagcgagtggaagagatggaattggagatcttccggagatttgttgctaaacggtgcgttttttactccgtctggtggtgcagcctcgtctagctatgcaaaggcttcgagccttgtggctaaaccgggttgtgtaagttggaccattgacgtctacttttggtgcactgaatttgccgtaaagtttcccgttgcttattgtggcttaat

SEQ ID NO: 110575 - DNA, 327 bp, Arabidopsis thaliana columbia
  unsure (1)..(327): unsure at all n locations
tctgcgcctgagttgtctaatgcttttctttttatccttaccaaactctcttcgtaggaggcaacacagtcgcggacgggtacactaatgtctcttgtttgggtgctgagataatctgaaccttcttccttgtctacacagtcttctccgtcactgactccaagagaaacgctcgtgactcccacatttcgatttttgcaccactcccaatcggattctctgtgttctttgatcactttgctacgattccaattaccgtaacagtaatttacccaactttgattctnttatcttggaggtggggggggggaggaccatctcttttta

SEQ ID NO: 110576 - DNA, 112 bp, Arabidopsis thaliana columbia
tatgtgcattatctattctatcgatacaactatcctagaccttgctgagaatgagacactacctacggaacagagtatggagcagccacataccacgtgctcgaaagagagc

SEQ ID NO: 110577 - DNA, 298 bp, Arabidopsis thaliana columbia
ctttctttctctcctctctatctttctctttttctcatgggtcttccaacagatttcaaagagcttgatattccaggggacgtgctaaaaacactttacgtcatcggtttctttagagacatggtcgatgctctttgtccttacataggtctaccaagttttcttgaccacaactagacctttcgatccgacccgacccgacttgcttcttccacgtcagcaactcttgccaacgagttaatcccggtggttcgtttctccgatcttctaaccgatccggaagattgcttgacggttt

SEQ ID NO: 110578 - DNA, 254 bp, Arabidopsis thaliana columbia
  unsure (1)..(254): unsure at all n locations
atttctaaagataatctcanaaagatttatttattatagaccaaaaatatatctcaagagatggcttttacctcggcggggtcagttatcacaccacttaaccagacccttttatctcctttccttattccattacctctgaaaccatccaattctttggttgcaactgtaagcatatctcaattgctttatgttatagcccccaatattgtcataaccttttaccattcacttctcaactgatcttacttttt

SEQ ID NO: 110579 - DNA, 136 bp, Arabidopsis thaliana columbia
taaacataattgcttctatgttcggttttctctgttcatctccggcggttcttgtaggtagcgtgtattatcaatggcggcggcgcgtctcaatggctccgtaagagtttcctgtttctcaaaagtctatactttt

SEQ ID NO: 110580 - DNA, 459 bp, Arabidopsis thaliana columbia
aacaaatctctctcaccaagaagatgtacatttttgaagcaactctattcctctgcttctgtgggcatcttctcatgtgggaaggtgcatttcgccggagctaaacaaaccgccggcaacatcacgccatcggagaatccattcacaccaaaagcttctttgattcgttattggaacaatcacatcaatggcgattcaccaaaaccttcttttttcctctcaaaggcctctcctctaaccgccgtggactccacgcgtttcgcctcactcgcttctaatcacgcgcttaacacgcatcactctgatgtgtgctccgccgcgaaactcttttgctttcctgagctcgccgctcattccctggaaaaacaccgcgatgacgttaacttcgccgcttacagcggcaagaactttacaaactaccgctccgaccgtctttccggagcagactcattcaaaaac

SEQ ID NO: 110581 - DNA, 297 bp, Arabidopsis thaliana columbia
  unsure (1)..(297): unsure at all n locations
gttgatttcttgaagaatcctgataagtattctgcgttaggtgctaagattcctaaaggttgtttgttggttggtccaccgggtacggggaagacgcttttggctagagctgtggctggagaagctggagtgccgttcttttcgtgtgctgcttcggagtttgttgagctttttgttggtgtgggtgcttctagagttagggatttatttgagaaggcgaaatcgaaagctccttgtattgtgtttattgatgagattgatgctgttggtagacaaagaggatctctnatgggtggt

SEQ ID NO: 110582 - DNA, 256 bp, Arabidopsis thaliana columbia
aactcaatatagactttgttgccatattttttctctctccaatccaccgctacattccgccagtcttttattatcggcgagcgctccttttctcataatttctcaccttccatcgactcaagccgttttcaaatcttttggtctctaaacttcctctgctcgccttacttgcttcttccattcttaccttaaggtctttaccgttaaatgctcccactctgtcaaaatcgccgtattcgcttttgccacctcttct

SEQ ID NO: 110583 - DNA, 340 bp, Arabidopsis thaliana columbia
tctggggggacctaaaggaagctttcttgtggcccaagcttggcgtccttaatgagggtgtttttggcggaccaggctggccttttttttccggttggcttccacaaagacgtccaattccatgggggggttggccgcggaaggatcaacgccagaaatggaaaacttttttttttttggttgaacaaatcctttgaacccggttttaagtctaaccagaagtttttttttggcaaagccgaggttaaaatgaaactggtccctggtatataagctggaacagggccaccattttttttaaaatttccgggaactacgggggatgagatcgatttcaagt

SEQ ID NO: 110584 - DNA, 251 bp, Arabidopsis thaliana columbia
caacccctaccaaggggttccggagtagaagtaaaaaattagaccccgccgccagtcctgttcaacctcccaccgttaacccccgacctaaccctgataacccaattttaacccccccccctaaggtgccaataaggaatgagaggttacccctaacccctgaccaccccaaggaggtgccccaagcgcccgtaaagcttcaaaaatcctcgcccaagaaccctgccaaaaaccctcccatttttgaaaat

SEQ ID NO: 110585 - DNA, 376 bp, Arabidopsis thaliana columbia
accaacgcttccgtacacgcaaactcaatactcccttctttgtttttgagaaagccaacctcccaacaggacagagctttaaaacctttcaattgtttccaaccaaacgccttaaaaccctccttttggggaatataactaatctcctcaaccaaaaactccggttgtgggaactccaccataaccaattgttaatccagccccacccataattgaagaaagccaaccaactcctataattaaccaagccactcctgaaactcctttaattcctgctcctttccaaccaataactgaaccatgcaattcctgaaaaaaccaccctacattaatttgggccttgcttgaatggtgggaaactgttgaagaagctttt

SEQ ID NO: 110586 - DNA, 345 bp, Arabidopsis thaliana columbia
ccggttccgttccaactaagagcctagatttctttaatttaaccattaaaacctaaacctaaccctcccccaccaccaattttaatttttccttttccaacattttccaaaaggcaaaaaaataacctccttttcaattcaatgccggccaaaaaaacttcctaaaccgttttttaactttcctttaaccttgcttccggaatttgcccctcgtttgcttactccaacacactttttttaagttctgattccattgtccaagtgtttgttgaaaataataagccaaagaaaaacctttgaaatcattttagaaaaaaagtgataaaacctgtttttttccaggat

SEQ ID NO: 110587 - DNA, 372 bp, Arabidopsis thaliana columbia
  unsure (1)..(372): unsure at all n locations
ttttcccaaatttctttcccttgtaatatccccccctagggaaccaacaagacagaagggatacttccttggagggagccttnaccaccaatccattgccaccaccaaactttctgaattaataatctaagaaagttgggggaaaaccctactattacttttttgtgttaccaaaaccggctgttgaaaccaaaggtggaaagcttaacctattcacagcacccgtaaatgaaggaaagctttacatctgcaaagcacaacctgaaaacaaaaggtggttcaaggaacccagaaaatttgtcaaaagcccacccccttttttaatggttgcttaattaaaaacaccacaccgtaccattgctctgcttgctt

SEQ ID NO: 110588 - DNA, 324 bp, Arabidopsis thaliana columbia
tccgttaaacctttttaaacacttcctttgcctctcttctatcaaactttatcctctttcaaaacgaaactcccaccatcctcctgcaaattccccaaacctttcccactccaaaaaaccttcccattccgattcaccaccggtggaacccccgccggaccaggaatgtcagccaccgcagcttcaacctccccaatggctttaccaaacgtcccgaaaggaaccgccccattggatttaccagccccagccttcaaaaagctcaaccaagccttttaaaatccacaagtcctaaactttttcgcgattccaccattaaccgcc

SEQ ID NO: 110589 - DNA, 281 bp, Arabidopsis thaliana columbia
atggccctcttactaagagcctagattttaccttaaagagaagcgaaacaccaaccccatcattcacccccaccaatggaaatttttcccgattccccaattaacaaaccggtcaaattcggttccataattctgcttttttaactctccattaatcctccagaactgcaaaaccaaataaataacctttctagttcctttaaggctccttctccataagtaaccaaagttttttatcctaccaaaaatgtctcggctcaaaggtttttaaaaaatttaat

SEQ ID NO: 110590 - DNA, 431 bp, Arabidopsis thaliana columbia
cgggctaaatttggaggcctttcctcaaggttttttttcaccccaaagtttcataacccatgcatgtttttttgccaaaagggtggggctaaatcccttggggtccctccaggcccgtccggcaccaaacaagggtgtccttgttccaccacctggaaaactcaccagggtggcccaaaatgtccataaccaaaaccattgaaagagaaaccccaaccggttcccaatttaattaaataatttccagattgctttggtggccggaagggttaaatattagggttttggcaggtttaattattaatcgttaaccatttccatataaaacctccaatgttccttcaacgtttggttcctttggtggtagccattccacgaaaggtgtatggcccttttaattaggattttttaaaaatttatttaataattag

SEQ ID NO: 110591 - DNA, 400 bp, Arabidopsis thaliana columbia
  unsure (1)..(400): unsure at all n locations
cgccaagaccttgaccaggatgatttagaccttttctttataaccaaggnccccannaaacggcacgagagggaaccccaagggtggggtttgtcccaaaaccattggcttccaaaaaagcaaacaagcttaaccttaaggccacaaacctttgtttggatttccccggaggaccagagaagtccaaagaaaaccaggaggtttctggcgttaaaagtaccaccaagcttggcttggagtcgcctccggccacatggttgaacctaaaataaaaaccctggaaggaatcttcaaatgcacggaatcgtttacccccatccaaaaagccttcaaaggtccgtccatagtaccagaaggattttctaaaaaaaacgggaccaaggcgggggaaaagggaaaa

SEQ ID NO: 110592 - DNA, 422 bp, Arabidopsis thaliana columbia
cgtttttaattttttccaaattcttaaacctatcttgttaaacccccggcaacttttttttaagaaaggcaattcttcgggaagccgctccctgccaaacctttcactctcaaggttaaaagctctaccaccatcaccattgttaaggcaaaatttcaggccagggaaggctttcctccgaaccaccaaaaattaattttccccggtaaccacctaaaaaatggccgtcccttgcccatttccaccattaaaaaaaaataaaccctcaatttggtcctccgtttaaaagggggtttccaaatctttgccaaaactttacctggcaaaaccattactttgaaggttaaaagctctaccacttttgccaccgtcaaagcaaagttccaggccagggaaggattccctccgaatcagcaaaaact

SEQ ID NO: 110593 - DNA, 352 bp, Arabidopsis thaliana columbia
gcccaacccttccgaatttcccttcctggtgcttcattttcctgtgatttcaatgggaccaagggtccttcaaagaggggtagaagaatttttcgggaacctctttaaaaggaacctcaattccaaataagccccacctccggttttgcaatggttgcctccaaaaaaagcaaataaaaatcctgggcctgctggttaaaaaccatttgctctaatggttcctggttttcccgaatttttaagttttcttactgttgcatctgctaataaggctaaccatggcctgaagtgtcctaactccccttggccacataaggccttcctaagttaatataaccatccttcaacccgt

SEQ ID NO: 110594 - DNA, 244 bp, Arabidopsis thaliana columbia
  unsure (1)..(244): unsure at all n locations
ccccaaaaccncccacaaaggaaagaacctttttccaaaaaagaaagcccccccaacccccccnannccccaatcttaactgctcaagcccaccccgtccaatcaaagaaccccgggaaccaaaaaaatgaaatgcctcccgtggacccctaaagccattccgataccgttgcctgtaaaaaccttcctcctgctttaaaaaaacctaacccaaaatttaatccgcctggggttaaataaaaac

SEQ ID NO: 110595 - DNA, 421 bp, Arabidopsis thaliana columbia
  unsure (1)..(421): unsure at all n locations
ggttttcttttaaatnnatttaattcatcttttggtgtccgggggaccccacgaaaccacaaacgaactcctccaaggcaaagaggacggacccccaatttccaaagctattgaaaaaggccttgggaccagccttccattttctccaaggaaaaggcctttgcctaatccccatctggttagcaacaacaatttcaaccgccacttgtccttttggtacccccttctttaaaaataccggctttcctttgtttcctaaccaatccactccaatagttgctaacggtattggctaatcgttggccaccgttaaaaaccctccctccgtttccaagccttaataacggccattggtccatttaatttccccttttttggggggaaaagaaagaaaaaagtttaaagaacaaaaccaagtgga

SEQ ID NO: 110596 - DNA, 358 bp, Arabidopsis thaliana columbia
  unsure (1)..(358): unsure at all n locations
ccaagccggcccacacccttccggttggccagcccattcgttattttaaggatttattttcccgggggggaattttaatccagagaaggtgtccaccgaaaataagtgaaaaggatccnccttggcttacaaccccatcccaaacttcgttttttttaaaaagggtccaaaacctaaacctggccatttaaaaaacactcgaatggtaattccaagttttattccaggccttccgtttttagccaaaactaaaaatccacttaattaaaacaactttcctgttaaccttaaaggcctccaacctaaaaagccacttgctttcagccaagcgaaaccaaatcctaaaaaaatggaagtt

SEQ ID NO: 110597 - DNA, 377 bp, Arabidopsis thaliana columbia
gcccaagccttcctacataccctatttagccgtaattggccgtttctttttccgttgttgaagttgttttttggtgggggttcctcggttggtggcgggtttccatcccggttaaggtcggttaacagccgttttcgttttcgaaaaaaaaaaggcacttcccaaaaaaagtgccaaaaagacggtgactccggcccggcctttttgttcccaaggccccttttttcctaactggcttaatggttccttggttgaaaattacggttttaatcccttcggtttaggcaaaccggccaagttttttaaattcattttcaattaactaaaccagattctggctaaaaacttggccgaagacttgttcggaacccgtccgg

SEQ ID NO: 110598 - DNA, 255 bp, Arabidopsis thaliana columbia
aattgtccttccatccaaaattgccaaattttccaaaaaacctgtggaatttcctaaaaaaaaccaccacctttttttccttgtgtggccttaagggtttgaaaaaggttttcgttgcctttttggccccccttcctgctaaaaatggaatcaattggttgtagtccaaaatccatttaaaaagatattaccagggaaattttaaattctactaaaaaagcttctaaggaattaattttttattgtaaataaaaa

SEQ ID NO: 110599 - DNA, 345 bp, Arabidopsis thaliana columbia
cccgacctgtccgcctttattccatttcccaaggccaattgcttgattaattaatcatatcccattatttttttgttacccaacctgccctaccaagttcaaaacccttttttaccccgtccccaaaaccacctaaaaccacaattgttcctcaccatgaatgaacccaccccaattgctaaaaatattgtcctcaacctgctaccctatggccgtaaaatcccaacccctaaactctttgctagaaccaatcctgttaatcccaccccggtaaaacttgttcccaacaaattattcttttccaaagacatttcaatctaaccttttggcccaacccaaatttcc

SEQ ID NO: 110600 - DNA, 375 bp, Arabidopsis thaliana columbia
tttccaagctgcctatcctttaggacgttttcccatttaaatcggaaaggaggccaattccatggcttttttaaaggaaacaacttttacgggtccttaatttcaaacccatcttaaagctgaaaagatttccaccctgttgcccttcaaggaccagggaggccggaacccgcgtttttccaccggttttcgggcccagccagttccagcccccccgccggcaaacaaagcttcgccggaccaaaaaaaaactgaaagaaaaggccctgcagggaccactggaccttcgcctggtttaggtttagctccggccaaagctttagcagccccagggaaatggcttgtgaccatggcttgcaggaccttcttaaaggc

SEQ ID NO: 110601 - DNA, 346 bp, Arabidopsis thaliana columbia
cgaaccacctccaataagaactttttaaactagccagggagcccccaataaccccaccggcccgtttccagcttccaaaacctaacctggcccctatgtgggtaaacaccacctccttcaactttgtctgggctcaaaacaatatcctggcagctccggtgggggctaagccgtgggtcaaaaaggcttaaaaacctaataaaaccgtcctcaacataataccggttaggaaacctaattccccaatgcaggctgggtcctaattgcatccttggcctccagcattaattgaggccaaggctttgcttaattccaatgggttatcgaaaggtaaagtccccgtttt

SEQ ID NO: 110602 - DNA, 261 bp, Arabidopsis thaliana columbia
  unsure (1)..(261): unsure at all n locations
accccaatncattataggaaaatgttttttttattgaaaagcccaaccaccttttnnngttaaaaaaatattaagtttccttttttgaccaaccaatttttttttacttctccctttcctttatttttattatttccaaaaaaaataatttgatccacccccaacccttttttattgtaccaaccaccaccgttcctaaaaaattattgtgtttccaattattagaacctataattccccattttcctcttttggttacct

SEQ ID NO: 110603 - DNA, 209 bp, Arabidopsis thaliana columbia
  unsure (1)..(209): unsure at all n locations
aaccccgaaaaaccanngaaaggaaaattttttacataaagagaaaacctacccccaccacctttccttacccaaactaaaccctaaaccttaaaccccctcctaaatgtagcctctcccgaacctcctaattccactatccaaaataacacataatatgtaccttcctttttaatatcatagcacctttttcattacaaattccatat

SEQ ID NO: 110604 - DNA, 312 bp, Arabidopsis thaliana columbia
  unsure (1)..(312): unsure at all n locations
caacccacctaaggaccacctatgacaccgtttttttttttaaggaggtccccnccccaaaggccttttccgggcctccttccggggttcctccacccaaaaaagccttttccttaactgtccaaccttttaattccgccaggccaccatcccaagtagttaacccaatcaacgttaacccatccatcgaaggtttgaaacctccgttaccaccaaccccattatccgcttggtcccttcccaccctccctgattcccttcccgccgtaaaccttttcttccgagtgtggaaagaagcccttccccatgttt

SEQ ID NO: 110605 - DNA, 391 bp, Arabidopsis thaliana columbia
cccttccgttcttttcttaaaaaaccttggccaatcctttgtttcttttgggaatcccaaaaagccagggggggcaattcctaaatccaaagcttctcaaccaaaaccaacctttttaacctttccagaaccaaaaagctttccccggttccttaccaaaaagtaatgtcctcttaccagggctcgtaaccccattattattttcccacccttggttaaaaaaagaaggggtgggttccttacccttgaccctgggcccagccctattgccctaaagaaaaaggcaccccttaaggcttccttaaaggaacctggggatccaaaaaaaattgctgaaaataaggctgccccactgagaaaaaaaatgatggtattggaggaaagccaaaaa

SEQ ID NO: 110606 - DNA, 318 bp, Arabidopsis thaliana columbia
ccttatttttaaaggaatgacctttaacctcccacatgtattcaaaaatcctccttctaatcctggttttaaccatgttgaagaaaatatgttggtaagtttccctaaaggtaatcccatatccataaagggattttgccataactgaagtgccaaccattgcttaaaattcttgaaaaactgctccaagccacttccaaaggttggaaaagtgtttttaccaaagtgtttccttccaaaaccaccaaactaaagcctttaaaccaaccaagtagcccatgtcaattgcattatgttgcctaacaatcccgaaggcaa

SEQ ID NO: 110607 - DNA, 387 bp, Arabidopsis thaliana columbia
  unsure (1)..(387): unsure at all n locations
caagaaaaccagaaacgagaagaggttttcctccgccgaggttttcctctccntacccccctcctccgaattttttgccgaaccttaaaaacccaccaaaaaccaacctttatcccctccgcttaaccccttcctaaaaccctaatccagttccaccctttcccctaacctctttttctttgccgtgttacctgccgccggcttcaacctaccgtcccaaaaaaattccttcaagccttcgttaaccctaccattacccgccgagaaccccatttccttaaccggaaaaaacctatccaaaaaaagaaaagacctacacccccccaaaaaaacgccccttaataactgtttgaaaacttttattaaacccctgaccaacctccataa

SEQ ID NO: 110608 - DNA, 304 bp, Arabidopsis thaliana columbia
ttgttcctaactaaacctaattataccaaagaaggaaccacttttcctccaaaagaaagccttttccaagtgaaatatcccattaaacctatcaaccttggtcctactgcattggaagtaaaaccaaaaaaagaagttgtcctaccttccaaaaaccgtttaacttccccattgctgaacccaaccagggggaaaaaaatttcgaaaattgttacccattttgttggtcctataaccgttttaattcctgacccccccccactttttaacaacctaaagtaaaactcaaaccctaaattctttt

SEQ ID NO: 110609 - DNA, 404 bp, Arabidopsis thaliana columbia
  unsure (1)..(404): unsure at all n locations
ttttcctttctttcctagattttctttcncctttacttttttccaccaaggcccccccnnccnaaggtngccntttaaaaattagggagcccccaccacctccttcctaaaattcccttccactcttcccctgctaaagcctcttcctttagcctaaaagccgcttatttttcttttctccttttaagtagaatcggggggaaacctcctttcttcaatcctttacctgcccaaatattccctaagcctgtaccaccttcacctccttttaaagaaaaacctgctccaaacctaaaatttccaattaacgtttttgaaagaatttttagaaccttttttaggcttcgccttttccaaaaaacctttcctttcaaatttgtttaccttaactccagtgttgtttt

SEQ ID NO: 110610 - DNA, 287 bp, Arabidopsis thaliana columbia
  unsure (1)..(287): unsure at all n locations
cttaaaattcttaancctttaattctatatcccaaaaaccnncccccaaacgaacgctctttaaacatgggagaaggcccaccccatcanncgccctttcaccctaccccactaaaacctctcctccctaatcttaccccaactttaatcttctttttctccaccccagcccccaaaataccttccaccaaaaccactaccaaaaaaccacccactcttcccacccctttccccgttgcctaacctaatcctcccaaactatttacccccccctttgtttcccctaa

SEQ ID NO: 110611 - DNA, 408 bp, Arabidopsis thaliana columbia
cctacccctataatacctccataagaaaattttaaagttcttgaagccaccaaaacctctccacctcctgtccaaggcctgccattttttcaccccttaaaacccaaggaaaatgaacctttggttccaaattttaactccatcggtcaataaccaaatctattattggtaccttcaccacccctatttttgttcccgggaaaattcgaccttcccccttcacccattagaaaggcaacagctgtccttagtttgaagccccttacctcagtcttccaaacggttaacccgcccggttcaacccttgcgaccactttgccttgtgccaccgtggtccttttaatcggtgtagaagtttcccttgcccttaaaaccattgttcctttttgaagtccctaaacctttttt

SEQ ID NO: 110612 - DNA, 305 bp, Arabidopsis thaliana columbia
ccaatcccctttgggttaatcaccccaacaaccataattttcctcctaatccaaccttaacttttcgttctcaaaacctgtcaaaacaatctgtaaagctaaccagcctaataaaaacaataactccgccttttcccgccgttttgttttaactttcctggtaggccccgttgttgttgtttccaaagattttcctgctaatcccgcctacggtaaacctgcaaacttgtttggaaagccaaaaacaaacacaaactttttgccatccaatgaaaatggttccaaagtccagtttccaccaaatt

SEQ ID NO: 110613 - DNA, 461 bp, Arabidopsis thaliana columbia
ttaaccaagccggcccaacccttccgcaatttatcttcaccaccatttccttcaccttttttttcgaaaccccgccaatttgccttaaaagaaatgtttccaaacccaggtaaggtttcccacctaccactttttccaccctccaaccccaccaccacctgcacctccaccaccaccaccaccaccaccagcctcaccatgcaccggaaggttttcgccaacctcaccaccaccacctttttgatcctattgattccccaattttttttcagcctaaacccaaaatgtcactcaacccccaccaccaaacccctaggaatggtcctggtcctaagcctggccaaccgccaattcattttcaccaccacctctgccaaacctcttcctaattaaaaaagaaaagtggttttttcaagctcctttctttccctattaaaggtttgtgtgccaatcctaaaaag

SEQ ID NO: 110614 - DNA, 318 bp, Arabidopsis thaliana columbia
  unsure (1)..(318): unsure at all n locations
aggaaggccccccnccncctcacccgtcccttccctttccccggaaaacccagttccttcctctcaaccattgccaccaatccctttgtttttaaaccgttggtccataccctcccttggggtttctttaataagccttgggtccaccccttcctcctggtggttccccgttgttttaaccgaaccttccaatttccaaaccttgtttcccccttcctcctcaatgtttgtaatttccgtcctttttttgggtgtccttgttaccttacctccttgttgccatttacctagtgtagcccctgtccttaacccattttc

SEQ ID NO: 110615 - DNA, 311 bp, Arabidopsis thaliana columbia
  unsure (1)..(311): unsure at all n locations
ctaaanccctcccctcccttcccagccacccccaaggctaccaccacctttccttccatcccaaccaccgccggaaaatttttctccatccagttttgccctccaattgaaaaaaaaaagtttaaaactctctcttaccttcctacccttcccatttccaaatggcctaagaaagttacctcccttatccccaccaagagaatcccttgtagtaaatccaagttgaaccacgattttgtttccctgtaccactttaccccacctgattcctataatgaccgttcctgaccattttgaaaccttcccttttt

SEQ ID NO: 110616 - DNA, 351 bp, Arabidopsis thaliana columbia
tggaaaaatccaagaaatgtaacgacattcttattcttggtgtcgggcctttgaaaaatgaacctcggtaggctgccaagcctccaccgcaggtaaaaaaaacccacaaaatggggtggtttttgaagaaagagggttcaatccatggcctcttcctggggttttgaaaccaccacctttattaggggccggttttttattaatcggtttggccgaccgattaatttttagttctggaaccgcaatgattctccggctgggctgggctgggtattttgttggatccgtggtttcatggtttttatttcggtggtattaaggtccagccatggtaagtcttttttttgtttt

SEQ ID NO: 110617 - DNA, 353 bp, Arabidopsis thaliana columbia
gaaacccgcccgccccccttccgaatttaaaaaaacctttccagtttttttagatcgggaaccacctaaagaaagactcccctttttcagccggggcctaatcaaagggcctccaacccaccaaattttttgcagttcctgtccaaggcctgccaggggtccaccccttgaaccccaaggaaatgggaccttgggggccaaagggtaacttattcggttaatcaccaaatctattattggtaccgtcaccacccctgttgttgttcgcgggaagattcgaccttgccccttcagccattaggaaggcaccagctgaccttaggttgaaggcccgtacctcaggtctccaaacg

SEQ ID NO: 110618 - DNA, 366 bp, Arabidopsis thaliana columbia
  unsure (1)..(366): unsure at all n locations
ccaagccttcctatttttaaaaccaatattttcccatttttttattaaggcccctnaaaaaanngcagaaagaaggttttgaagcctaaggtggggccaaagncgcccccaaccttattagaaaggtcctaaaatccaccttccaagtattcactaacccgccatttcgaaattttttttttaaaggaggggttaacctttttaggggtttaacctacaagaaaccactttcctttttaaaaatctttttgaaaatttttttcctttcccccgttccttccacttacccccttcgaagaaaaacgttacctgttttgttttttttttttcctcttaaaaaccaagaatatactcttttttatttcg

SEQ ID NO: 110619 - DNA, 390 bp, Arabidopsis thaliana columbia
  unsure (1)..(390): unsure at all n locations
aaataaattcttattcccatccttttaaaggccngccaaaacctccctaaaagaagcctctttttattcagaacaatcnccncctttccagcaaatccaaatgaccctttttgcccgccgccaaccaaactaacccggccaagttcccctaaaggttttttatttgccccggttcctgcggattaccaggtcgaaggtccaattataaaaccttgccgggacccacccttatggaccatctactgtaaagaatttccaaaaaggtccattacctttaccgccattgtggccgttattttcttccatcgttataagagaaatttccacctaatgataattctaacaacaaccccctttaaattgcttttccaatgaccaatatttttccct

SEQ ID NO: 110620 - DNA, 364 bp, Arabidopsis thaliana columbia
  unsure (1)..(364): unsure at all n locations
ttttccataaattnaaaaaagaaagaacttattttttaatgtgagacccgaacttttctccaaaaaattcccttccctaaatttttaacctaaagggccggttttaccttttttccctcctaatttttgttgccttaccgtttcctaattcaacaatttctgaatttgggaattcaaaaaccataagaaaaaacctcattcctcggttcccacctgctcgttttaaaaaaatattccaacctaataagaatgttgccaaaatacctttgcacatccctgccttagcctaaaaacctttgaagttttttttgcaaaacctttgtaaccgtccatataaaattacccttaaaaaaggtcccaaaac

SEQ ID NO: 110621 - DNA, 358 bp, Arabidopsis thaliana columbia
  unsure (1)..(358): unsure at all n locations
ggccggcccaagccttccgtcctgccaccgcctttttttaaactttaactctttttaaggtttaaccctttggagaaggaccattcttgccggtggtggagccaacnntncctcctcctgaatttcccaaaaaaagaccgtttaaaaagtttccctcaaaagaatttaacctcaatcctcttttcattttgcctcctaataacctaacaaacctctttttttttcgattccataaaaggtcctctaaaggtttaccaagaaacccaatgcctctaattaaaaacctgaggaaaccaaaaaggaagcccccccaaggtaaaaacccaaacccaataaaaccccacttaagaaccataac

SEQ ID NO: 110622 - DNA, 414 bp, Arabidopsis thaliana columbia
  unsure (1)..(414): unsure at all n locations
ccttaaccttttttttttaaggcgggccnccgnaccacaaaagaaattgttattacaataagaaagaccattaatcaacccacaattttgtttttgaaaaaaataaaacatttaaatttccaaaattaggtttgaaatctaaaagcaatcctaaaactaataaaaggcctccttaagcctaaataccaaaattgtttttgaaaaaaccaaacggttttccaaaacttaaaccatgaaaaattaaccactaattaagaaaagttaataatttaagggtcaaaaaaaaaacctaaaatttaaaaataatatgttaagagccttaatatgttaaggaccactaaccatataatttaaaaaaattgaattccctcttaaaaactaaaattaaaaccttaactaaaaattgtccaattt

SEQ ID NO: 110623 - DNA, 381 bp, Arabidopsis thaliana columbia
gtccgaagatctcctattctctttcactttaacattgggttttccctttaaggttcctctcaaacgagagataacctttccggcttggggattcctccccccccttcctaatttttttccacggtggcctaaaggggggccttgaatcgacctgatccaaaaaacctccgttcaaatttcctcggccagatgggttccaaaaaccggggccaggtaaaacccagttcctgtaaaacctaattacctggaaaaatgccggggaacggcccttttgcttccgccaagtggaccatccaaggaaaaaccctcaagttttcaaacccatttaaccaccatgttgaaaaaaaagtaggcaattctgtccaaaaccccagccatctt

SEQ ID NO: 110624 - DNA, 188 bp, Arabidopsis thaliana columbia
  unsure (1)..(188): unsure at all n locations
ccccanaaccgcccatgtaccattaagaaaaccggtgcccaacccaaagggcccacaagccaccccttgttccgtacccgcccaaacaaaacccttgggcccatccccggccaagcaaccaaccaccctacccgaaaagtcccccgaaacctccgaagggaccaccgctgaccttcacactaacccca

SEQ ID NO: 110625 - DNA, 199 bp, Arabidopsis thaliana columbia
ctggccaaaaaaccacccaagggaaccgccaggaccccaaaaaaccaaattcccacctttgggcccgcttgtccttcccttatccaaaaactcccactcctttggacaggtccgtaaaaaagaatttccccacccccaacctaatccttacctttccgaatttaaacctcccttccaaccatttctggtaccatccggc

SEQ ID NO: 110626 - DNA, 371 bp, Arabidopsis thaliana columbia
  unsure (1)..(371): unsure at all n locations
ccgtccgnaactccacttgtggaggttgtttccccttttaaattaaggaggaacctaaaaaacgaaagaaagtttttatcaatccaaggggaaggatgcctccattaatggctccaactaccaaagcatactaaggggtgggcctgggccctctgccttcctgaccaaagttaaaagtcccacatccagaaaaagtagggggtaaatcctccgtgaccatggctatcccaccaatcctgaactgggccctggaaggtaccaggaaaaaactccaagaaaggccacctagttccaaactaactaccaaagccaataaccgcctccaaaagaggttgaaaaataacaatcctctgaacacgcctttaaaggga

SEQ ID NO: 110627 - DNA, 307 bp, Arabidopsis thaliana columbia
  unsure (1)..(307): unsure at all n locations
ccaaaaggaacctccacggaaaaagaaagcctaactttacccggtggaaaaanccaatttcccaaaatccaaccctttttccaccaatattctccaacctaaacccaatgccaaaaaacccagtccttttcctctttcctgaacctccagaacaaatcgaatatcctcttgtccctataattccaaggggtttaatccttgttcctacccaacctgtattcctccacattttgaatatccctccacctcctaaacctttaaccggttttaaaatgaatttaaccattcctccttccccttttcttaa

SEQ ID NO: 110628 - DNA, 432 bp, Arabidopsis thaliana columbia
caggcgtccgttttcttaagttaactaattaatttccaattttattgttcaaaaagggaaaccagggggggggaggggagtaccttattgggaggagggttccccccatgcctttagaaaggtccttttaggccaaggccaaaatggtgtgtcttttttaaacgccggttttccaaaggactctaaggttgttgaaggaggtgaccccggaaggaaaccgttccttgattttaaaccgtttaaggttgttccaaccaactccttattaccattgcaggtgacctacaacaccgtgtttggccaaaactttgacatattaacattttttaccttcattccattcaagggaaaaccatttcccccctttggtttggaaacccaaaaaaagtttgtcctcaaggccaaaaacgggggtaaacttgttgccttcca

SEQ ID NO: 110629 - DNA, 284 bp, Arabidopsis thaliana columbia
  unsure (1)..(284): unsure at all n locations
ccacccttnccttttttttaaaccttcccaaaaattttaacccccatttggacccataaaaattttcccattcttaccataccgccccaaaaccaaaaccacctccccacctcaccattccccccttttacctatctccaaaccaaatgttcccccccttatttccaccctcaaaaataaccaaataaccctcgataataaatttagtaatcaaaaccctatccctaaattaaaaaccaataccaacccccctaataccaccccttctacccattttaattttt

SEQ ID NO: 110630 - DNA, 288 bp, Arabidopsis thaliana columbia
  unsure (1)..(288): unsure at all n locations
cgaaccacggacncggagcgcagnccncgagacgnnggaancgcccncnncaananncaancccgnacaaggggnnacggagnaggagnagaagannaggacccgncgncagggcngnnncagcncccaacgnngagcnccgnaccggaccngangancncannncnacccnccncncnaagggggcgaanagnganggaggggngacgcnaagcccngagcagcacaaggaggnggcacaaggggccggagagcnncaaaaggacgggggcaaggagccngncaaaa

SEQ ID NO: 110631 - DNA, 370 bp, Arabidopsis thaliana columbia
  unsure (1)..(370): unsure at all n locations
gaccgacccacgcgnncgcgcaaaacccaaaggcgaaccgacngacattttttttttacgaactaaccacgaggaaagaggagggggacattaacatcgggaccggtgcccacggacacaatggaaaggcgcccgcacctatacacgcaagggacatgatgcgtggtgctgaccaacctgtcatccccaccacccagaatggagccacagacacccacaataggaacgagaagaacacataggagatcgacacacgctaacgcctagcgtaaacgtggtatcaccacaaacaatgccctcgggggatgcacaccacccaatgctactgcactggcagtgatgctcctgaccaacgaaagtacataaagaa

SEQ ID NO: 110632 - DNA, 453 bp, Arabidopsis thaliana columbia
tcgataaaaatggaatctttgaaacgttttctctgctctattgcgcttcttcttatctcccttcttctaccttcaagcttagctcaacaacaacaacatgaatcaatcagaacaatggaagatttttccggatacccaattcacgaaccgggtcaattcggttccatcaatctcgcttcttcactctccgttgatgctccaggactgcaaaaccagatagatgagctatctagtttctctgatgctccttctccatcagtcaccagagttctttatactgacaaagatgtctcggctcgaaggtatgtgaagaatttgatggcacttgctggtcttactgttagagaagatgctgttggtaacatatttggcaaatgggatggtttagagccaaatctgcctgctgtagccactgggtctcacatcgatgctattccatattccgggaaatat

SEQ ID NO: 110633 - DNA, 459 bp, Arabidopsis thaliana columbia
ccaagaacaagaacaagaagaagaagaacaatacatgaagaacaaagtacccaagaaaacacacaagaaggaaacacaaagattgatattgatccaaaagcaatggcgtacgagaaagtcaacgagcttaaccttaaggacacagagctatgtcttggattacccggaagaacagagaagatcaaagaagaacaagaggtttcttgcgttaaaagtaacaacaagcatggcatggagtcgtctacggtcacatggttgaacctagaatgaaaacccttgaaggaatcttcgaatgcacggaatcgcttacgcccatgcgaaaagccttcaaaggtacgttcatagtagcaggaggatattctagagaagacgggaacaaggcggtggaagaaggaagaaccgatcttgtggcttatgtgacggccgtcttggcgaatccggatctgacgaggagattcg

SEQ ID NO: 110634 - DNA, 450 bp, Arabidopsis thaliana columbia
gttttctttttaattttattgaacattttcatgatgtcggtggatcccacgaaaacacctgctccgccggcgaggcgaagatgacggagcaccaagttgcaaagctaatggaagaggacatgggatcagccatgcaatatctacaaggcaaaggtctttgcctcatgcccatctcgttagccaccaccatctccaccgccacgtgtccttctcgtagccccttcgttaaagataccggcgttcctttgtctcctaacctatccactacaatagttgctaacggtaatggctcatcgttggtcaccgttaaagacgctccctccgtttccaagccgtgataacggccatttgtccatttcattttcccttttttgggtgggaaagagagaaaaaagtttagaagacaaagacaagtgggataggtggttttggtcaaagtttagaaagaat

SEQ ID NO: 110635 - DNA, 180 bp, Arabidopsis thaliana columbia
atcggagtaacatcttctccgcttcatatgactctgtagaacactaggacttacttttgctctcaggcggagctttcaatttacgacatttgtttaacggataaagatttcttcaagtcttcttcgaacttcttacaaacagaacccgtgattgttcattagatctgcaagaccaaaact

SEQ ID NO: 110636 - DNA, 438 bp, Arabidopsis thaliana columbia
  unsure (1)..(438): unsure at all n locations
gnnngagaagaagaaggaaaagaatttatttttcttcaggctggactttgcggtgggctcgtggcatacgaacgagaggggggagaaaatgtacattcagacaagaatggcagagtatgcacaagagctgtgggagttgctgaagaaagacaacacctttgtttacatgtgtggtcttaagggtatggagaagggtatcgatgacattatggtctcgcttgctgctaaagatgggatcgattggttggagtacaagaagcaattgaagaggagtgaacagtggaatgttgaagtctactaaggaagcttctgagggagtaattatataatgtaaataaaaagcttctgatgcaattggaaatcttcatatctgctacttttttttttctcaaggatttttcaatcaaaatttttaaaatgagaccttttataccccca

SEQ ID NO: 110637 - DNA, 334 bp, Arabidopsis thaliana columbia
  unsure (1)..(334): unsure at all n locations
aaagaaaggannataaagaggggtggtgtgttttaaaaaatacgtatggagatnnaaatgattatttagagatttttgaacaattgntattttaggaagttaaagattaaattttgtagaataaagatggtgaagaagtatnggtgtgtaaaatgagattggtaatgtagtttaatgagggtgaaaggttttaatttntgttagtaatatatgaatatgaggaggatgaatatgttgatgaaaatgaatttttatttntataaaaagaagaggtgaaagggaattaattttattaatattattattttgtttgtaatgtaatataataaaaata

SEQ ID NO: 110638 - DNA, 295 bp, Arabidopsis thaliana columbia
  unsure (1)..(295): unsure at all n locations
cgacccacgcgtgccgctcgaatcaaagcagggnnttttgacactatattatttcttatctcgngaagnagtgttatngcatgcggatcgtttaatatatgaaagatgggaggatcataccaagatcgtcgagtcaaccaagagcagcattgaactagatttatcatcaaaactagtcacttttggttcctttcaaccttcgccaaattcgtttgattcttgaagctttcctgggacaatggatcnaactgggatgattgtgttgcatttggatcagcgcaacgtagattggttt

SEQ ID NO: 110639 - DNA, 435 bp, Arabidopsis thaliana columbia
  unsure (1)..(435): unsure at all n locations
ggaaaacccgggnccgacccacgcgnnccgacaaganaaaacaagaacaacgangaagncaacacaagcaaaggggaatgcacgaatacataaggggcggcgacaaccgacacacaggcgcggtatgacccaaaacgcatataagacagatgtaagcggcggaaaaaacttgaagaaaaaggtggggcatacccaaagccaaagatggaggaaaacaagaagagatggataatgggaaaggactgcggctcaaacacgaacgttcggtttcatgtgatcgcgcataaatgcagtagctgtggttcctacaatacaagacagaccacanaaaggctctgataggcacgctggctcctctggaatgcctcaggttggtgggtcaaccggntaatttttaaccagagctggttttggtgtccgaaattcccacgagga

SEQ ID NO: 110640 - DNA, 256 bp, Arabidopsis thaliana columbia
cgaagaacacaccaacaaaatttttttagccaagaacaaggggaggttacttgctaagcgggtctaccccaacaacattcttggccagactaaagcctaagcttaaccccttggagtgctcttgatctcaagtcactatggaaagacttgatggaccacaaggagacttaggaccctttcgtaaactcgctacctaccgaaatccgcatatgttggacaccgcgttatcgagacgcgagcttgcaaaacaactttg

SEQ ID NO: 110641 - DNA, 449 bp, Arabidopsis thaliana columbia
ctcgtgtcctaaaagaacagtggcgattccttgttgtattttggaataccgaagaggcacaggctgcaagtgctagatgcaaagcttctcgagcaaaatcaacctatatcagctctacaggatcgaagagctttgcacggatacttgacgaagagtcatgttctcgtgacaaggctcgtaagcgcagtgatgatgtcacagccatgggtgaaaagaggaggggtaggatgcataaccatgaacctggggccagccctagtggcctgaaggaaaaggcagcccttaaggcatccttcaaggaagctgtggatgcaaaagagattgctgaaaatgaggctgccacactgaggaagaagatgatggtaatggaggaaagtcagaaaaagctgcaggaggatttggctaacatgaagaatacagtgagcgccatgcagaaaatgatgtcaaat

SEQ ID NO: 110642 - DNA, 495 bp, Arabidopsis thaliana columbia
  unsure (1)..(495): unsure at all n locations
tcgacgccacgcccgtccgannaagcttctgtttatgtctactcgattcgcaagattatattattgctgggttttgaaattccgttgtcgcggaaggagctttaatgagcgttttgcgagatccgaacatcggaaggagaacgaagaacgattgtttctcactttagaactgagtatgacnagaggagtgaacaactttttctccagaaggaaggctatttcaagtggaatatgccattgaagctatcaagcttggttctactgcaattggagtaaagacaaaagaaggagttgtgcttgctgtcgagaagcgtatcacgtcgccattgctggaaccgaccantgtggagaagattatggaaattgatgaccatattggttgtgctatgagcggnttaattgctgacgcgcgcacacttgttgagcatgctagagttgaaactcaaaaccatagattctcgtatggtgagccgatgacttgagaggtcacaacac

SEQ ID NO: 110643 - DNA, 461 bp, Arabidopsis thaliana columbia
aacccgggcgcgagccgcacgcgtcacgcattcacttctcttctaatacaaaaagactttttatttttttattccgttaaatctattctctcgagcatgcgcgaccagtaaacatacggcattggtgcgagtccaagaatgaggtctatcaccccaacgcacttagggcggcgctcgctgagtttatctcgactttgatcttcgtcttcgccggctcaggctccggaattgctttcaacaagatcactgacaatggagcaaccactccttccggcctcgtcgccgctgccttagctcatgctttcggtctctttgacgctgtctctgttggcgctaacatttccggtggccacgtgaaccctgccgttaccttcggagtcttactcggaggtaacattactctccttcgagggtttttcctactggattgctcaactttttggctccgtcgccgcttgttt

SEQ ID NO: 110644 - DNA, 266 bp, Arabidopsis thaliana columbia
ctggccccggaggtgatcccatcataaacccaaaggtcttaccaaccggtaaaaacatccatgccttatatcctcatgctattcccacaacatcaacaatgtcaagtgccaagattgtgtttgagatgttggtagagagacaaaatctataaaactaagggaaatattctgagacaatcacgctatttctttaaaaaactgacagcgtgggggcatattaaaagatttatgaacaaaattattattattattttattgagaccaat

SEQ ID NO: 110645 - DNA, 202 bp, Arabidopsis thaliana columbia
  unsure (1)..(202): unsure at all n locations
cggaancccgggccgacccacgcggccgagaagnncgaagacccagcagaaggggaggatacatttttggaaaaaancaagaaannggacgacgggcncaangcnnggagccgggcgnnggaagangaaaccccggaagcngncgagncnccaccgcaaggaaaaaaaanccacagaanngggncgnnnncggagaaagagg

SEQ ID NO: 110646 - DNA, 412 bp, Arabidopsis thaliana columbia
aatcttcaaatcgaaaagtttccgattaatattttatgttcctttagaaaatgtcaggtcgtggaaagggaggcaaaggtttgggcaaaggtggagccaaacgtcataggaaggttctgagagacaacatccaaggaatcactaaaccggcgattcggagattggctcgtagaggtggtgttaaacgtattagtggtttgatctacgaggagacacgtggcgttctcaagatctttttggaaaatgttatccgtgacgccgttacttacactgagcacgctcggaggaagacagtgactgctatggatgttgtttatgctcttaagagacaaggaaaaactctctatggattcggtggttgaggattttagtgtcttagagtgttgctacgattgtctttaatgatttcatt

SEQ ID NO: 110647 - DNA, 352 bp, Arabidopsis thaliana columbia
  unsure (1)..(352): unsure at all n locations
aaaaaaaaggaagcaaagaaaccntttcattttttcataaaaacaaaaaacaaaacggggcgggtataccttaaagacggggcgcaacaacaacaacacgaaacaancaaaacaatggaagatagacacggatacccaaatcacgaaccgggtcaattcgagaccatcaagctcagctggtcactcaccgatgatgctccaggactgcaaaaccacacagatgagctatcaaaactctctgaagctccttctccatcacccaccagagtacactatactcacaaagatgacaaccctcgaagggatgggaggaagctgatggcacaagctgcacttacagacagagaaaaag

SEQ ID NO: 110648 - DNA, 323 bp, Arabidopsis thaliana columbia
  unsure (1)..(323): unsure at all n locations
taaaaaaagttttgttttagaaaaagaaaaaaaaagatggtatgggtaaaaataaaaaagggatgggttaaaaaaaatatttaganttagggaagntaggaggaggaggagtaataagaagtataatatgtaaattaatgatgnnaagaaaagataatttttgtagagaaagaaattaaagtataaaggttagggagaagaaatttaagagagatattagtggagganttggtgttatatgaaaaggtggtgaaaagaatattgagagaatnaaggtgaaatgggaggggggggtaatagaaatgattatgaaaaggggatta

SEQ ID NO: 110649 - DNA, 274 bp, Arabidopsis thaliana columbia
aatcgaaaccaattttagggttcgcgaatctaattgcggtgaaaatgggaatcaaatcatcctaacttaaggctaattttgggacctttttcgattgcttcccgtaggatcctaccagatatgggatcccaatcaactctaatgagtcctaatattgaggagaaaagcatcctcagggagaaacctgaaaagttggtttgggcttaacctgaggcaaaggctgttcctattgggtcaaacctccaaattagtgattgtgaaaatgaggaccacc

SEQ ID NO: 110650 - DNA, 320 bp, Arabidopsis thaliana columbia
aaggggaaaaacctaagggaccaagaaaacccaaacaacaacctccaaaacctgggggttccaaaccatttgaaaatacaaataaagaaacctccaccaaaccttacacctaaaaatggaaaaaaatccctgaaaaggtaccaagaacaaccaattccagccaccccacctcaaatcccaacttctaaaccaccaaaattctaatgccccaaaaaaaaaattccaagtaaccaccgcccaaaaaaaaagtaaaccgtccaaaaccaccaaaaaaaaccgacccattcctttgacccaaccgacccaccttcccacaaaac

SEQ ID NO: 110651 - DNA, 197 bp, Arabidopsis thaliana columbia
ttgggattcccatggcaccaaaaaatgctttgaaaattgggtctcgaaggtcctttagtgccaaagttctaaccaaaaaggaaaaaccccttaaaaatgtttccattaaaaaaatggaccaggaaaaccttaaaaagttacctcaccagggccctgaaaaccaaccaccaggttcagcaagcaaaccaaaggttgct

SEQ ID NO: 110652 - DNA, 240 bp, Arabidopsis thaliana columbia
ccttgcgccaaaggtaatgtggttaaggaattaaaaccaacaaaccacggccgtggttgcggattcggcattggctgggaataatcaatcctgggtttttttttcgttttgccctggaccatcggttttttccttcaataattctttaggaacccccttaaaaaaccagaatttttagcttgcccagttggggctgtttttgctaccataatcgcaatctttggacaccgaaaaggatca

SEQ ID NO: 110653 - DNA, 328 bp, Arabidopsis thaliana columbia
tccaaacctttccaatcctctttttacatttttcccacttttccttcctttagaaccccgtgggcatgaaaaatgggcggaggattccaccaccatcgacttcggcaggccaggccctgttcccaaaggttaaggccttgtcgtaagggccccgaaaaaaaagggttttggggcagtcgcctaaggaggtggggccaagagaggttggcttttattcgatttcctcctccgtttggcggccatagcaggaactattggggctgcctttgtcttgtccaccgccggggaaacttttcctttttttactcagttcctccagttccaagcc

SEQ ID NO: 110654 - DNA, 258 bp, Arabidopsis thaliana columbia
aaaccaccccaaagaagggggcagccggggatgtaccaaaggtttaggggaaaacaccccaaggaaaagagaaattggggggaaaacctgatgtttcaattgggaatataccaaatcctgaaaccataacccctccgttcaaaggaaccaatcccctggtaatcctaactagtcctggcccaaaaatgaaccctggttttgaccccactaaagggggaaaacctgagtccatttccaaagatgaccagattcctgacc

SEQ ID NO: 110655 - DNA, 242 bp, Arabidopsis thaliana columbia
  unsure (1)..(242): unsure at all n locations
gaagccaggaacgccttgatattaaaggtaccccgctttccaaaaaccntnaaattnaaaaaaaaataaaacccaaaaanaccacttaaagaatcctgttggggcccggctaccctttattaaccccaccaatcaaaaccattccaaagggagttttcccaaaaaactgtcctttaaccataaaaattccaacataacctcaataaaccaaggttttaaaggtaccaaaccaaaccattttg

SEQ ID NO: 110656 - DNA, 278 bp, Arabidopsis thaliana columbia
  unsure (1)..(278): unsure at all n locations
aacctcctaaaacctgaccatgtgaaaaaaaataagtgtgtgggggcctncccccatcgaacctgccaaaaaaaaactccccgaaaatgaaccatcccaaagtttcgaaagcgccgttttaataatcgccgttcctggaaccgtcgaaaccaccttgccggaaattttccttttttctcccccacccgttgttccatgaaaagattactgtgccctttcttgtcctctccctacctggaacccccgccatccatccagatccttccatgccaattttt

SEQ ID NO: 110657 - DNA, 210 bp, Arabidopsis thaliana columbia
caaaaattctaccctaatttcttttaaaaaccataatataactccccagggaaaattttcctttccaaattcaaaaataaaaaaaattaatggaatccattaaatttgtattcctccaccaaccaaccttaaatccttatcgtacccagaaatttaggaatttccctccaattcctaccaaaatccatcactgtcctttaaaccaaaata

SEQ ID NO: 110658 - DNA, 323 bp, Arabidopsis thaliana columbia
  unsure (1)..(323): unsure at all n locations
aaaaaaaaaaaaaatttcncccattgttttttaattccccaccgccggacctcaatggatccggggttcccaacttccagtcaggctccgtccccttccataagccaacacacaatcctttttgggcttaaaataaggcaccgttcgtggggaccgtgtaacagccatggttccatccaaggtaaagttcataacaccaaaaggtaacctaaaggttgagtgtaacaacaacgtttacgttcttgatcctgctaaggaacctgaaatcaattggcctaactctggccggcctggttcttgttcaacctggcctggtaaagttg

SEQ ID NO: 110659 - DNA, 381 bp, Arabidopsis thaliana columbia
  unsure (1)..(381): unsure at all n locations
gatcagcggatgttgcttatangactctttttgtaccttatgagaaatcaaagttttgggggtccttttgagtatggtcgcggggctgaaacttaaagggaaagacgctaaggacttaaaagatgggaaacctgcagatccaaaggtgacagaggaaaaacgtccttcacctgccaaagacgcaagtgttgaaacagcgaaacctgatgctgctgcctcgggagagggagagaaacctgtagctgtgactgaggccgagggaaccaaggcggagtgaagggtctttagtattactgttgggggattatttgatattgatgaagtcacaatagctgcgggcgaaaataataagaggtaagttatgtgcacatagaagctctt

SEQ ID NO: 110660 - DNA, 205 bp, Arabidopsis thaliana columbia
ggccgaccaggcgtccgacaaaacaaaaaataatgtttctcaccacttctttaacgccatacccggaacacacacatgatttttttccaactacaagcactctcccttccatcccataaaccaacaaacaatctctccatgatctcaaatcactcaccactcgtggctgacgtttcacatccatcactacatacaaagacaagtt

SEQ ID NO: 110661 - DNA, 337 bp, Arabidopsis thaliana columbia
aaagttatatcaatgtcaatcatactatacattttttatgtatctcacctaaaaccttcacggcggctgatacttgagccacggacgacactcatatgctcagtcacagagactatcttgaaatttcaccattattctctatcaccaggggttttatgcttgatcaattcacagaattgaaaaagctgcaagatgaatgtactccttattttgtggatgatgttgttactctcttctttgaagactgtgagaagcttatcagacatatggctagagctttagatcagacatgaaaagtacatttcaaacaggacggtgctagtgttcatcaactcaa

SEQ ID NO: 110662 - DNA, 337 bp, Arabidopsis thaliana columbia
  unsure (1)..(337): unsure at all n locations
ggccgggcccacgggaactgaattttacgtccccaccttactactttcgttattacaaccgaccactacaagnatggcccgtcgccatattaatatagcttgcgacccctaccataggattcatctcctccaaagttttactacaagtctgcaacactaccatacatttacatctacccaccctcactatattactctttttattcaattgttcattacaaatctccaccactaccatacgtgtataactctgcacctacactatactattctccttttataaagattacttacatgtcatcaccacccccatatctttacaaaagcgccttactat

SEQ ID NO: 110663 - DNA, 457 bp, Arabidopsis thaliana columbia
  unsure (1)..(457): unsure at all n locations
acaatggcgtcttcgctgttntatcatatttttacaatctgccctctgcctaatggagtgtggttattctttgctatcattctgccactctctcangccattcatttccaattctaaacctatgttttccttgatacagaatagttatggctctcaatttgttgtgaaatcttcattctcctcgacaacattgttacttatttttgcaattttatatcttttcaaattcaaattatgtattttgttttttggtacattattcttttgaaattgatgtcattacattaacaaattataaagtctgtttatggagtcaacacttgataaaaacctaaataaaatgcttttaatgatgaaagatgtaccaattaccttaacctgttgtttattccttcaccccaagtgatttcttttcttacagaataaaactctgaaaccaatttatcctcacagacca

SEQ ID NO: 110664 - DNA, 356 bp, Arabidopsis thaliana columbia
  unsure (1)..(356): unsure at all n locations
cggccgnaaacgacagcncaaagtgcactccaattcatttttttttcatttcactctacaccgaacagaacgatctttattaaacctggcctggacgtctaataagagttgaaacaacaatggacccaaatctcactcgtgcatatctattagatgatcaagtcctagaagaaatcgtttcacttactgatgtatttgctgaactctatgtgaacttatttcttctaccacttttgattagagtgataacaaatgcttcagagaaacaatgtaaagtgtcaaacctaaccaaaagatatattcttctgctcaacattggtttgatctccactgaatccaaagttttatgattttaa

SEQ ID NO: 110665 - DNA, 289 bp, Arabidopsis thaliana columbia
aactcacttttcctagcttttccttccagtttttttttcaacccagagagatatagatgcgtgtggcgttttcaaagaccaacaccggccatccaacaacaagaatcctcctctatagatctatacactaccctaatagtactactgaacaaatccagaacaactaccaaaagcacaaaaggaaccttacaaacaatcaaaacctatgtgttctagcattgaacagatccaaccaatcgataaaaatatcaagcttacacctattaaaaccttaagatgagcacacatg

SEQ ID NO: 110666 - DNA, 337 bp, Arabidopsis thaliana columbia
agaacaagggctaaccgtatgcgctcaagcgctactatggttgaacatccctctcaggccactaggggaactgcttcaaacggacggaaggcctccgccagcttgcaaaccacccgcagggctaccaacgacactactttcatcacaagcaactgacacagagataactggatgcaggtctgcactgcgattgaaaaaaacaagtttgagactctcttttacctgttctgacactaccgaccacaaagcggcaataaaaactgactaccatatcctcaacacgtcgatagctagtgttgaattcaaatgggaacaaacatttgtgtacctggtgcac

SEQ ID NO: 110667 - DNA, 465 bp, Arabidopsis thaliana columbia
cgcgtccgggaaaaaaaaaaaaattctttgatatgagacttgttttctctggtgcctcttctttcacctgggaggcttttttgttcctcccaacaggtcaatggaagaggaaaagaactgaaaaacccaatttctctaaaccacaacaaagatttggactttctgttaaagaagttagctccgccactcacggcggttttacttgctgtttcacccatctgtttccctccagaatctcttgggcagactttggatatacagagaggagctacattgtttaatagagcttgtatcgggtgtcatgatacaggtggaaacattattcaacctggtgcaacgcttttcacaaaagacctcgaaagaaatggagttgatactgaggaagaaatatatcgtgttacctactttggaaagggaagaatgccgggatttggtgagaaatgcacaccgagaggacaatgtacc

SEQ ID NO: 110668 - DNA, 318 bp, Arabidopsis thaliana columbia
  unsure (1)..(318): unsure at all n locations
tttttatgcaatggagtcaatnggcattttttttccnggaaacgagtgttttcatgggcgggttattattcatggaagtgccatccacaaaagttctactctgatgtcgtttgaagatcatgatatgactacccatgggagattttcctttgccaattctaagattaagaagattgatgggatcctctgaatcagttgttgctccatcgtacaagcttgaaatacagccggttcctcattgaatgggagctccctgccatgactaaccaaatctgctgtggcccgtaaaacaaaagtttctacagcccactgccttca

SEQ ID NO: 110669 - DNA, 287 bp, Arabidopsis thaliana columbia
  unsure (1)..(287): unsure at all n locations
gggcgggcccacacgtacggagtaaacctggttcagctacaccatttatttcttccactcacacatnnaaatccaggcgcgtttttttatataaacatcacacccccccaaacacccctcanactccaccatctttatcatcaccaaattcacctccaccaacacatccaccaccacctacacctacacctacaccttaacctatatctaacaactaaactcaaacaacccctataccataacccttaccttctactataatcatcaaacactcctacaccatactc

SEQ ID NO: 110670 - DNA, 382 bp, Arabidopsis thaliana columbia
accacgcgtccgctctcctaatctgtcaagtccatacctcaattgagtctcagcaattaatacaaatatacctgctgatgtggacttttcatcccatgctagaagagttgatccttcaccaaactcgctctccttgcaggccacaaatatgcctttgatgcaaggaatgatcaagtctgagactgcatatcaaaactgtgctccatacatgtatggtggtgaagcacagtccacagttggagatgtcaccatcgcatctttcagcaatgattccagcaaccaatccctgaatgatcctcttgtcgatccagatgctcctacatttggctcgttaggacaaattcctcagaacttcagcctctctgatctgacagctgatttt

SEQ ID NO: 110671 - DNA, 253 bp, Arabidopsis thaliana columbia
  unsure (1)..(253): unsure at all n locations
gaagaattgattgaagtacacacccatcttataattattacacagacanngaacatcaatcgacttttttatattaatatggggtctcccccacaaaaagactctgcttcttctatattgaatccattacaataccatatctctaatcattcctttgatactccatattatctttttaacattcctaatcttcctgttgaaaccttacattctctactctctctcttctacaatctgcttaaatctaacagct

SEQ ID NO: 110672 - DNA, 342 bp, Arabidopsis thaliana columbia
  unsure (1)..(342): unsure at all n locations
ggccaggcggcgctaacttttccagaaatggcaaaactttttttctattggnggcaacctaaggcatgattgttatcaaactccgctgcacactncatcacatgtttgccgggaagccacaccatgtctccaaagcatgtccagtcaacattcatagctgtgatctgcactaatgcaactgtttcactgtcccctctttcgtcttctggaattactttcacttattctaggcaaatgttgttaatgataaaatctatgactttgacccatttaataacttcatcatcttttatgtttatcacaacgttatccttaatatatcattacaaatatcttttttta

SEQ ID NO: 110673 - DNA, 291 bp, Arabidopsis thaliana columbia
  unsure (1)..(291): unsure at all n locations
cgancacnaaaaccaaaggaatgncccaancagttttattcctcaccgacgncacagctcttcacgcccttgctttaaaattcgcgcgcgcccccaaaccacaccgtaacaccgctgtgccagttccggatcaagacgatgagaagactatttgtaagtacagaactgaagcgtctacagtgcacggaatgacaccgtttggggagcttattgacagccaaacccaggataacagtgatactaattgtctctgttttgcgaaagggtcttgttactgatacctcttacact

SEQ ID NO: 110674 - DNA, 323 bp, Arabidopsis thaliana columbia
  unsure (1)..(323): unsure at all n locations
attttggataaaccttccnnntctactttttggggcacgacggataacatcggggaggtctgttctacatttgcctcacgtccattnnatttaccagaaccactgaaaacaacgcatcagattgataactgtacagaatgctgtgtcttctttgctagaacaaaagagtactgctcggtcttccacacaaaaataagaaataaagaagtgaagaaactatatcttgctcttgctgcggcacctctttccattggaattatctcacattatatgcgcccaaaaaatatggcttcaagactcgtatccgaagattcaattcaagg

SEQ ID NO: 110675 - DNA, 351 bp, Arabidopsis thaliana columbia
  unsure (1)..(351): unsure at all n locations
cacgcgnncggcgaggaaacggggaagaaaccannntttctttatcccaccagcanngccaannaggcggggggtttttctttccaactgtatgacccaannatatttgatggaagttgtggaacacaactataccacttaaattaggcacctgtatatctaactgtgaacggcaaatgttacatacaaggtcaaatctcatgnggtaaaatcttttttgatagttgatacctaatgattttcctttacactttattcttatcaagaaactgtaatatatttatcttacttttacaccccctatatctttgtcgaacttttctttaaacaattacctttacattctattta

SEQ ID NO: 110676 - DNA, 312 bp, Arabidopsis thaliana columbia
ggggggggatcttccagggtgcctatcctaaaaggatcccaccataagtccttgggggttatttggccttatggccatcgaaggctaacccggaacccaattttgggaaagaatttaacttttgttaaccgccccaggtcgccgtttaagggttctggaaaataaccacccgacattcggggaaaccgtcccattaaaaacaatggcaaggttaacttttttccaaacaactaatctttggatctgtttgggtttaacatggatcccaatcgcaggagtcatgttcccttaaaggaccatgttcttaatccc

SEQ ID NO: 110677 - DNA, 426 bp, Arabidopsis thaliana columbia
cgcccgaaggtttcctttttttttttagccgtttttttttttccggaataaaatgccaacgggggcggtgaacttaatcggttaatggccaatttttaacttaatgaggccaaggatcgttttcaacttaaaatttattacttccaaattctttaaggaaacttttggttaaaaaagcaaattgttcttaaaataaaacccggttaacaaaaaaaggccggttttgattaaccttgccaaaccgttttgcaagtccaacataatcgttaattatatcgacaaggtttgaaacttttttgaactttcaattttcccgtccaatcaatacaaccgggccattgttcggttttggcctgcctacataaacaatcaggggttaatttttgtgagaagtttcctaacagttcaaggagaccaaaagaaaaa

SEQ ID NO: 110678 - DNA, 340 bp, Arabidopsis thaliana columbia
tggaactttcgagctttttttttgccggttttttaaagcttaatacggatcttcaatttgggaggggacttaaaaccctgggtttttcaaaaatcaccaaccttgttttttcctgccaatttttatacctaatttccacctatacccaaggttaatggaccgttggccttttcaactccagaacccacccagctggcctaagtggctcccgtccacattgtttaaattcctgacctgtgcctaaaccagttccagatctggaggctgttaccaaacttgtttttccttcggggttttttttatcaattttggaatccgttttttgatgatagcaagaatt

SEQ ID NO: 110679 - DNA, 300 bp, Arabidopsis thaliana columbia
  unsure (1)..(300): unsure at all n locations
cccagagggtgcgtgaaaaatttttttagttccaataaccaaccggtttaacaacctttttcttgaaaaagtaataattaatgccaaaaccatcccccccttaaacctgaaatctttaagcctaaaaatcggcctttttaaacaaaaaccagctcccnnggaagaaacaaccttcaccaccatctcctttggaaaaaatgggccaactaaatccaaggaaatggagccagcccgaccccaaattgttaacggtttaataaagggntaactctaaggtaccaaaactccattagccaaaaa

SEQ ID NO: 110680 - DNA, 360 bp, Arabidopsis thaliana columbia
  unsure (1)..(360): unsure at all n locations
aaccgccagggcgggcaccaatccccaaccgcggtttgagccgccagaaaatggcggatttgccatggccccaaaggaacttttgggccaataactatggccatgacccgaaaggagaccatccccaaccaccagatggtnaaaccaaccaaccaaaggaagggttttattattttaatttggcataataaaccatccatgaataatgggaggttttgggacgggtccaaactggaaactatattgaagcagttgagcgtccggccctctttgatttgggattaaaaagaaaaggttttgtttttcaatacttggaaaggttcccatttggaatctttctaataatggaaaaattggggg

SEQ ID NO: 110681 - DNA, 415 bp, Arabidopsis thaliana columbia
acccttccgttgaaggtttaaaatcccttttacccaaatttattttttgttccattccaagaattttccgagggggttcaatccttttgggttgggaccaccattaaaggaacctaaaaacccaaataacttttactgcaaaaagtgttcccaacaccaccaaaatttccccaactttaattaaacttccaataccaaaaatcctaaggtaaatggaaagcccaccctgaaggtaactaaatcgaaaaacaaccccactaaccgaccagtttaacataaacttgtaaaggttataaatatctggttggtaagtctgagattaaaccgggtaatctacaaagggggttggtttcctttcccttcttagtttttcctttctaaaaaaataagggttaaggtttgttgctttaattgt

SEQ ID NO: 110682 - DNA, 320 bp, Arabidopsis thaliana columbia
  unsure (1)..(320): unsure at all n locations
cgttcaatttgttaaatccaatttccccncaattgttttctctcccaatacaaaaatgggccccgctagttaagaaggaaaaggggcgccttaccctcgtcctgttgttgaacccagccaagttcttaaacctgtccacggggcacttcttccagttccagttaaggccagcggggggggggggggcatgtcctaaggcatgggttaaaccatggctcagggaagggctttgggtcctggaagtgcatttttccacaggcctgnggaataagggaggggcccacaaacaatccagcagggggcggtggaggttgattctg

SEQ ID NO: 110683 - DNA, 343 bp, Arabidopsis thaliana columbia
accgtcaataacttaatcaaccgtcgttccaaaattccggattaattcttcaaacttgacccgaaaactaccgatttcaaacttgtgggggtttccgatgtttcggaggttactgaggaaaaagttaaacaagaaaaaattttccttgtaataatggtggggggcccccaaaacaaagggtttccaggtagttttttttccactaaaaggttaaaaaagccaaaggtggatgaccaaatggtcctaaacaaagggttgttggttgaaccaaaaccaaacacttccattgccaagccgtttgtaaccaaagcccctgaacaacctgttttggaaggtaaaggtt

SEQ ID NO: 110684 - DNA, 445 bp, Arabidopsis thaliana columbia
  unsure (1)..(445): unsure at all n locations
caaggggnccgnaaaaacccaaaaaaccgttattataaacctttgtttgtccaccaaccggagaaccaaacctccgggttttaaggaactttttggcctcttcaccaaaaatggaaatggttgcataaccccaaaggacctggaaccagtgttccggtaactagggcaaaacccaccaaaacctgacctccaggacaggaccaacaaggttgcccctgttggaaacgtaacctattcctccccggagtnctaaaaccaaagggctaaaaagagaaaggatccaaactcggaggaagagctgaaaaaagctttaagggggttcgccaaaaaccaaaccggtttaatatccgttgcaaagcttcgccatgtgatgccaaatttaggtgaaaaacttcctgataaaaaggtcaaggagataattcttgaaccaaattttgttggaaat

SEQ ID NO: 110685 - DNA, 264 bp, Arabidopsis thaliana columbia
cccaccaaaaaactcaatcaaccggtttaaaccaatccgttccattcccgacaacccccaaaaccaacaagaacataacttccatctaagccatcttggaaaaaataacctccataaagttttgcccaccaatcgaaaaaaaaaatttgaaaacccaacctaacctcccaaacctaaagaacgccaaatggcttaagaaagttgactaccttccccgaaacaagtgaataccttgtttctaatccaaattaaaccccgaatttt

SEQ ID NO: 110686 - DNA, 441 bp, Arabidopsis thaliana columbia
  unsure (1)..(441): unsure at all n locations
cggccccgcccaaggcgncggggacccccggggttttttttttccttttcttataaacccctgaaaaaaaanaggccggccttattctaacaatggcgagctttttttaaaccaatanccccccntttaatcaaccctggcccttttaattatttcctaccaccaaaaacaatgccgtttcccccccccggggcccgacccaaccccagggtataaatatctaccaaccatggttgttaaaacacggcaaggctcaaaaccaaaactctttttttaaaaaaaaccaccggtccaaaatcttaaaaaacaatcttcttttctccgattaccatacccaaaaaaaccttatttttaaattgggtttcactctttttccgcaccttactaaccataagattaaacccaagtttttttgacctaaaattaaaaaaaaagctaaaa

SEQ ID NO: 110687 - DNA, 436 bp, Arabidopsis thaliana columbia
  unsure (1)..(436): unsure at all n locations
cggcatgaaaaacccgggccgaccaaggcttccggttttttaatttactactttttgnttttcctctttcctcctctaaaaaatgccaaaaagaccgaaaaaggtagaaatggcggccaaaaccgaaccacttattgttccaagtttcaggaaccaaattaaaaaaatggaggtcacccaccccacaaggaccttctggaagtcctgggccaagtccggagtaaaccaaaaggctgtgggaatctggggtggcaaggattgtgccaaggtcaaggcagttgttcctaccacaataaccaccgccagtccggcaactgtaaaaaccccaaccaaaaggttaaggaaccaaaccaaggttaaaaagcctgttgccttttattatttggttcccttgtttggccaattaaagttttccaaactttttccttgtgatttt

SEQ ID NO: 110688 - DNA, 387 bp, Arabidopsis thaliana columbia
  unsure (1)..(387): unsure at all n locations
tgggtaatcaccctcccatgttntcttaggattttcccggtccggggtcaattaatggcccccggaaaggcctcggccagcgccagcggaatttgaaaaaggaatggaccgggattttgaccctgttctttccatgcctcctttaacctaaagtagtaggtaaaccaaataggtccatataaaaaagtcttcttggttcttttcaatccaatctaaaatatttcgcctcggctttcctatccacccagcccaaaaaaattaatttttcatcctaaaaattaaaaaagcccaaaaaaaaaaaaaagggccggccgttttaaaggacccaggtttccttcccctgccatccaacgtcatagctttattatagggcaccctaaatccaat

SEQ ID NO: 110689 - DNA, 256 bp, Arabidopsis thaliana columbia
  unsure (1)..(256): unsure at all n locations
aaaaaaaaaanntaatttaccttttccccaccttaatctaaaacttttctctcaaaccaacccacccnttaaaaaaattaaaattttcctttttttttttccacattcaaagccaaaaaccctaacgataggccttaccttaactcacttttcatttaaatacttaacctaagatttttttattttccccctccttaactattattccattttcttttaaaattctcatttttttttttacttttatttttatttt

SEQ ID NO: 110690 - DNA, 444 bp, Arabidopsis thaliana columbia
caacccgtccggaatttttaaaatggattttaattaataattttttttttatggttaccttaaccgacctagtaagatgaattttccagcttccgtttaccaaaaccccaattgataattaatttttaatattttaataatacctacttttatattttccaaaattttgataaaacctttttaaaaaaaattgaaccaggccaatctaaaactgttgttcaattcaattccaattattttttattttatttcaaattttgttgactttttaccaaaaaacaattaaaaaacctgatttgaaaaaaaaaagggattgttaaaaaaaaacccggaattgggttaatttgccctatttgtccaaataaaaatcggccaaatttttctttttactcggggtaaaccttaaacttaaaaattggattaaaaaagggaagaacccctttc

SEQ ID NO: 110691 - DNA, 412 bp, Arabidopsis thaliana columbia
ggggattaactcccagtggatttcaaaaaccttttgttatgcacctggtttaagcctacaatggtggggggatgcgttgcagtgttgcctatcctaaaaaggatcccaacataagtccttgggggttatttggccttaatggccatggaaggctaacccggaaaccaattttgggaaggaatttaactttggttaaccgccccaggtggccgtttaagggttttggaagattaccacccgacattcggggaaaccgttccattaaagacaatggcaaggtttacttttttccaaacaactaatttttggatctgtttgggcctaacatggttcccaatcgcaggagtaaggttccttttaaggatcatgttctaaatccccgaccgacaatttttcttccttagatttttaa

SEQ ID NO: 110692 - DNA, 423 bp, Arabidopsis thaliana columbia
ccaaggcgtccaaaacaaaggatcttccagggccaaccgctgttaattccgcaggaccaaaaccataaaattccggagaataggaatttaattggatggttaatttaaccccttgatctggtttttaatttggggaaggttttgaaagggggctggatttggcatggggggacccccaggaccccaataaagcggttgatctacctcctaagtcaaaatcaatgctggttcctgggaagatccaacacataatttgcactggaaatctttgcataaaaaaaatccatgactccttgaagactatctgcccctgattggcatatagttcagggggggttggccaaaaatccccgaacccttgggaataaaaccttgccttttgggcaattaaagctgggattgggtcatggccaccaggggatc

SEQ ID NO: 110693 - DNA, 358 bp, Arabidopsis thaliana columbia
cggcaaaaatcccaaccaaaaaaaatatataattgtctcccctggcccttcctttcccccagcccttaattaatcccttggcggttccaaaatccaaaccattaaccctttctttccccgaatcctaaaccttttcaatccccccttttaccaaacccccaaccgctttaacaacccgcccttctaacaccccaaccccgccaactaaccccggaatttcaatagcgtcgacccccctcccttttttaaattttttccattccggccgtttccttttcccccataacccaagcttggaattgctgttcaacccaatcttcccaatcctaaacctttccaaatcgttcccgaccccaac

SEQ ID NO: 110694 - DNA, 358 bp, Arabidopsis thaliana columbia
aaaaattggttcccccaacaaacaaaccctatacctttcaatacccttaaccttaatctttatccccctccccttttacatccccatcaaccaatttttcatcccagtcttccaaaacctcaaaacacccaaccgaaaccccaaaaaaaaaacccaagccccaagcccgattttaacctgtttatctaacctttttttattccacttcgaacccccaaaaccccacttccgtttcttccaaacgtacaattaacctacctgcccaattcctaaccaacccccaaaattttaattatcttatccttcaacatcaacttttttaattctcctatccttccttatgaaacaatttttttct

SEQ ID NO: 110695 - DNA, 388 bp, Arabidopsis thaliana columbia
ccaggggccgggaaattttccataatctccaaaaagctcggtattttggcgaacccggttttaaggcgaggggttggttcttgaacggttgggttttaaacaatatcaaagatgttaaaggtgagaaccagaaccacctcctgagggttggtttgcagggccagtcggatcataaaaccaggtttgggggtaccataaactcccatttgcagaggttaacccggggaaaaaggtaatcgaaggcaaggggatctggtattccatagaccgatggatgaatccgtggtccgacctggcaattggcctttgggtccttggaggattgtaaaaaaagaactttggccacattgttaatcgaaagaaaggataatgggttttttggttttgc

SEQ ID NO: 110696 - DNA, 409 bp, Arabidopsis thaliana columbia
cggcctggaaaccccgggccgccccacccgtccgttcccatatttataaaatttcctttttttgtttcccctaaaagccaaaaaaataagggtcgaaccattaaaaaaaaagggtttcctttccacctattcctcctggaaggtttttttccttttcctttgggttcctaatggaaatggtggattttttgttgccttttttctaataatatcaccaagtttttttaaaaaaaaaaaaaaaaagggccgcccgttttaaaggacccaaccttccttccccttccttccaacgtcttaccttttttttagggccccctaaatccaattccctgcccgccgttttccaccgtcgggcctggaaaacccctgccgttccccaccttaatccccttgcagaccatcccccttt

SEQ ID NO: 110697 - DNA, 437 bp, Arabidopsis thaliana columbia
ccgggccggcccacagccgtccgaaaaaaaaatgttgtggccatccaatcctttttttttccctcctcaaaaaaaacctttgctgccattgttgaaaaaggaaggttcattcaaaactgccaatgtcaacctaataaaaggaaaccaaaaccagcctgagtttttcccgattaaccctttcggtaaaatcccagtcctcgtcaccggaaactccaaaatcttcaagtcccttccaaccatgaggtttttaccaaaaaagtttagatcccagggccctgatcttttggggaaaacttttgaaaaaagaggccaggtaaaccattgtttaaccgttgaggctccaagttcccatccaccactatggccttaaaccctcaccattgcttttgcaccactaatggttttccctgttgatgagaaagtatttaaggaaaggg

SEQ ID NO: 110698 - DNA, 419 bp, Arabidopsis thaliana columbia
aaaaaatgccaaaatcactcttttgtcaattatctttaaacctttttttttccaccatttgttcgtttttaaaaaaaaaccaaattgcttcctcggaaaccaccaaaacccaaccatcgtcttttttgttttggaaaaaaagggaactgtcctttgaattaataaccactttatttccaattggtttcgtaggtaatgccagaaaaagccccgccccaaatccaccaatttttgaacctgataacaataaaaaccttttcaaaaaagtgaaccaggatcggaaaaaaaggattgaaagacaagctgtttttaattttgttgccaaggaaaagggttttttgcaggatcttgtttccaagttgaccaaggtaggacaagcctttgaaaccattgatctaccacttgcaggtttggttttg

SEQ ID NO: 110699 - DNA, 387 bp, Arabidopsis thaliana columbia
  unsure (1)..(387): unsure at all n locations
ggggncggtttttggaatccaaaccggtaaaccaacctttttttctgcccatccatctcggttttcccggcggccttcactttttaaaggggattttttaataatcccatcggtttttggctaatttcctttaacctttttttggttccgtccaaggcaaccccagaaccggaagcgtttggttcaatttggggctccttacggggccggggggggttccaccgatgaagaatggttcgaaggatacggacctcagcaaattcaacctatggtcaaggttaaattagatccagttgagtttgaagcttggtttaagggaggcgaccaggggacttccgttcttgaggaaaggattcccctttgggaggatttgaggatgaatgaagc

SEQ ID NO: 110700 - DNA, 365 bp, Arabidopsis thaliana columbia
  unsure (1)..(365): unsure at all n locations
gggnccgggcaaaaatttttcaaccataaaattgctnggtaaatttttttggcctctaaggtttcctccgcccctaagaacctccatggctcacccatgctttccttccgnggttttaaagaatttaaattatcctgttccacataaatggcaaaaaatgcccggaaataaaccatcttttttaataccggaccaccccccgaaccattaaggaaatccgccctttaggaatttacctaaggtagcccatccggggtaacaaggaaaaagttcagaaccaattaaaatcctcaaaccaattacccttttcaaaattccagcctccattaagctgcttaaattaaaaaaagaatcccccttttccc

SEQ ID NO: 110701 - DNA, 412 bp, Arabidopsis thaliana columbia
caagccgtccaaccaaattcaaaaaaggttttttcaacccttttattttgaaactaaagtccggaaccagcggaaggggttttgtccaatagaggatattgaacccaaatattgaggaaaatgtttttttggccaagtttaaataatccgaccttaaaatggtttttgaatttttaacaaatgggttgcttttttaatttaaaaatttttgaaacaactgtgttaatgttttttccaatcaaatccgttttttaaacccaaaccattgtattaatggaaaagtaaaagcggtttttggttaaatggtggataacatgaaatttgaaaaagttaataccatgaaatttagaaaagttgttaccaagatgaccattattaataacgggaagttggggtttttaactaattaaaa

SEQ ID NO: 110702 - DNA, 443 bp, Arabidopsis thaliana columbia
  unsure (1)..(443): unsure at all n locations
accaaggcttccaaaaacccaacctcccacaatttaaaatttttctcacctaaccttcccccaaaacccaccgttngttgttttgaaaccagaggttccacaacaagaatttccaaaaaaaaaacctttcaaaaaattccccttaaaagaagccaacctcaatctttttttcaccatgtttaccaataatcttgcaaacctctttttttcccgaattcccaaaaggttttttaaagaattaacaaaaaaccctatgcttttaattaaaaaactccccaggccaaaaaaaaagccaccacttgttaaaaacccaaacccagtaaaaaccaacttgaggaccataatcattgtccctgaaataattgaaaccataattgttttgtccaatgaaaaaactttaaaccaattgaaaatcaaccctgaaataattggacatttccttt

SEQ ID NO: 110703 - DNA, 366 bp, Arabidopsis thaliana columbia
  unsure (1)..(366): unsure at all n locations
tttttaacaagagcttccaaaaacaaaagnntaaaaaatttaacaaaccttcatttccaaaactaaaaccaccnggnctggccaatattttaatttatcatcttttaacaaaaaaaaaaaggaaaaaaaaaaaaaacctgaccaaacccaacccaaaaaacaaaatattcttaaatattccaaacctcaaccacccaacattaataatattgctcaaaccttaacaaatttttccacttgtaaatatcacaataaactttaaaacttttttttaaataatttaaaaactcttttattaaaaataactttcctaaattttaacttcaaaaaacctaaaaatttattcaaattttttaaaattttttt

SEQ ID NO: 110704 - DNA, 353 bp, Arabidopsis thaliana columbia
  unsure (1)..(353): unsure at all n locations
gtttcttccctttttttccccaaggtgttctttaaaccaaccaaaaagggcaacgatttggttttttttcgtttttaaggacgttaaaaatcctcccgacctgaaaatccgatccgaattttaaacgaattggtagatctgatctgggattccatcgtggccgacggatcttggttaccatggttggacctgccgcaaatctgccgttttttatagatctagatcgggatcgtccttgggggttttttaacatgcaagatcttgggaatggtcaaggtgggggcataattncgggataactgggagacgaatctgttgcaaacggatgtttgggtgttgatttgaatggaaat

SEQ ID NO: 110705 - DNA, 414 bp, Arabidopsis thaliana columbia
tcctttctttgaattgaattaaaccttagtttccaattttggccacataacttttccgccattcttctttggccgggcaaacggttttaaagccttccagggacctaatccaaaggggggccgtttgggccgggggccgggtgaccatccgtcgacccgtcaagtttactccccaaagcatttggtttggcccaaaccgtcccaggtccttgggaccattttcggggaccccaccgttttacttaactggggaatcccccggggactacggttgggccaccgttggactttcggttgacccggggccattcgttaaaacccgtgggcttgaagtaatccacagaagatgggctttgtggggggctttcggatgcccattccctgaaattttttccaaaaccgggggtaaattcg

SEQ ID NO: 110706 - DNA, 415 bp, Arabidopsis thaliana columbia
tcttaacaaaaaaatttctacttcttactaattccgcaattctaaaattcccgattccgacccttaacaaataatggttcccccaaaaagccggtttttaaacccaaagaattaaaccctgaatggaaaggcctgcttgtaattgaaggcttgtttgtaacatttttaatacccaataccgttatgaccatgaatcctaaaaaaaatttacctccaaggaaaaaaaaccctttttccaaaaaaaacttaaaccttaaaaacttaaaccaggaattccttttccccgccaattaaattccacttttttaaacatcttgtttttttaacctgtaataacaatttaattgaaacttttgattggaaaagtaccaaacttcctttgttttgttttggtaaaactacaaaaattaaaatt

SEQ ID NO: 110707 - DNA, 310 bp, Arabidopsis thaliana columbia
aaaaaaaaaatttccataccaaattttttccctgtaaagggggttcccatgggatggccggggtattgggtccatcttgatgaatcaatggatcccggcccttaactggcgggaaaattaaggcttacgggataagtagctggttggccagattcaatgtctttataggaattaccagttttggttccttccgcccccgtttttgatccaaggtgtggcaaaggatgtgtctttaaccctttaatgactggttaaggaataaccaattttggggggggtggaaatattctaggggggtctttaaacaaat

SEQ ID NO: 110708 - DNA, 362 bp, Arabidopsis thaliana columbia
  unsure (1)..(362): unsure at all n locations
cggcctgaaanacccgggcggaccacacccttccaaaaaaaaactaaaaaaaaattttgtgttctttgaaacctctttccaaccaaccgttccagccctccattctgaaaaaatcgccacccttccttctcccgaaagttttaacctccaatcaattaaacccgtcgccaaattttttggcttcaaaacttcctcggttcgcttaacttgttccttccagtctgactttaaggacttaaccggaaaatcctccacccctgccaaaatccccgaattcctttttgccacctttgttttcgtcgtttcggaaccaagtccgaagggagctccaaaaaaatggacctatgataaaattcaaacca

SEQ ID NO: 110709 - DNA, 435 bp, Arabidopsis thaliana columbia
ccccttccgaaaaaaccaggtaaaacctttaaaccgggtttttatataaggaattggcgacttcggaaccgggggggacggaggttccgttgaagggatcgccgaaaaaccactccaaaacctggaaaagcaaaacccatgttttcgttgcccccattggccaccacatccaaaatgtctttgttaacaaaggcaaccataattttaacggttttatcaggagttggaactccccatttaatggaaagaaggaaatgttcaaggagaaaagagggttggttgttgagattaaaccattgccaaaaaaaggactggatggccacttgatggaccatttaaaagtttttgatttcatttacaaattaattcccaaatttgaggatagctgcttttgcaaaataactatgatttgggagaagcccaccgataactttc

SEQ ID NO: 110710 - DNA, 381 bp, Arabidopsis thaliana columbia
cccaagaaaaaaaaaagccccgccattttttaaaaaaaggcccggtcctaaaaaaaccgaacctaaaattgggccttccgggaaaaaatgtgccaaaaaaaataataaaaaaaaaacctttaccgaaaataaaaataccgtccccgggtagaaaaagggaccaatgtcaaaccacctttttttcattttttggggacccccaaaagttaaattattctccgccgcaaaaaacccatttgttgttatgacacctcctttggccctgcggcgcttattaacaactctttctacctaaactttcctcccccaatcatttcttccttaagtttatcacatacaatcttctctcttcaacttcttctccttacatttcttccttct

SEQ ID NO: 110711 - DNA, 437 bp, Arabidopsis thaliana columbia
caagaaaacccaaaaaaatcaaaattaaaattctccttccgatccatatatttggctcaccggagcttaaaatcaacctactgcagtttccgaaccgggttttttttttccttccaatcaccggggaattaatctcgggggaagaaaaagggatcctttaccggcggaggatctgccaccaaccggcggaataccaccggaatcgctccttaactcgttaattccgccccatgggctacctttttccatcgccggccgtccccaaaaatggcccctttcaagaccactcctcgcaactgcattggaggcagcccaccatgtaatatccacttttttcctgggattaccagcaatcccaagggcgaatcccatcgttggtgaaaagactgttaacaaactggcttccctttggctggaattccccgggggaagctttg

SEQ ID NO: 110712 - DNA, 437 bp, Arabidopsis thaliana columbia
  unsure (1)..(437): unsure at all n locations
caaggggtccgaattgggccacaaacaagtatttttaatggaatcctttaaaggctacaaancccaanaaaatcgcccattgtaaaagcccaaggactggcttaaccccgggggaagtttcaaccaatggggttgggttaccgacccaaaggcattcgttgggttaaaggtaaaggacctaaaaaacggaaaatgggctatgtcctttatgttggaattcttcgttaaagccatcgcaactgttaaggaaccgataaaaaaccttgttgaccatttggccgatccagttaaaaacacccaatggcccttcgcaaccaactttgttcccggaaaggaacccaagtttaatctgattttggcttaagcctttgtctttgaagtttgaaaggagaaaaaaagcttgttaaaatttaaaaacttcaggatttttttttttt

SEQ ID NO: 110713 - DNA, 343 bp, Arabidopsis thaliana columbia
  unsure (1)..(343): unsure at all n locations
aaaaaacctctcggcaaccagttccccaaaggtaaaccctcctttgaattcaaaaattngggaaacatttgttactgtaccaccgtttggcaggctcttaatttcggggncccttcccggaaccaactgttcaaatcctatcccagtaataaaaccttgcccgatcctgaaaaaaatttaataacctgcctgccaaacttgttttaataagttcccagaaaaaaaaaccaggttttattccccctaaccaattggtccaaaggttgaaaaaccaaaataaccttttttgaagttatttccccagaattcccataaattcctgaaatatttcttgaataaattt

SEQ ID NO: 110714 - DNA, 379 bp, Arabidopsis thaliana columbia
ggcgtccaaaaaattccattgttgaatttttttcactgatcttttcctaaaccaccattgccaacaccccgtcccttaaaatctttaaccggccttcttaaataataaacggaccaaacaaacttcgtttttaatttcccgcaataattttttttccttaaacaacggacctttttccaagtaaccgaagccaaagccattccaaaactttccaaccgtaaactccgtttccccgtaatcggtggtgaaccaccagccgggccacttccaaaaactttaccccaaggaggaatcgaaacaattttaatcgaccgtaaaatgaccaattgcaacccttccggtgccccaattcctttttttttggccgaaaaattcaact

SEQ ID NO: 110715 - DNA, 211 bp, Arabidopsis thaliana columbia
  unsure (1)..(211): unsure at all n locations
gggcccacaaaaaaaaaaaaaatntcttaaaaaatggctaattcataataaaatacccttttgtttccctattcaatttcgccattgttggcaatcccatgggtacctaatccattggggaggttaagccgggctttttttaggaaacaccgggttttccatggccatggccttgggggggaccgttcagggaagaccaggaaacccattt

SEQ ID NO: 110716 - DNA, 323 bp, Arabidopsis thaliana columbia
  unsure (1)..(323): unsure at all n locations
gggnaaggaaaaaaaaanccaattcttttgccaatgatttattaancccccaacaaaccnaaaccggccctttttttttaaacccggcccacataaaaaaaactttacaaaaacaccacaaaagtaatttaaaattcttaatttgccatccctttaattgttaactcctaattaacctccacgaaaaatgttttccacaaattttaccatttttaacaaccttaaaaactttaattacctgtaaaataataataataaaccaaacctcttgaattgcccattattaaaaatctctaattctctaaaaaattttttaattttta

SEQ ID NO: 110717 - DNA, 424 bp, Arabidopsis thaliana columbia
aaccaccaccaaacccttaatttttccactctttttaagaaaaaaccaaaccaggtttttggagaatttaatgccaatggcggcttccgaaccttccctaaggggcctgggtttttctttcctaaccgaagccaaaaaaggtcccaccgaattgccaaccgccttagccactgaacctaaaaaagttgccagaaaaactttaattgcccttgttgcggttgttaaccctaaaaaattttgaatccttgccgttaaaggtggggccaactcccttgaccttaaatggttcaatgcctccttaccagaaaatttcggtttcaaccaatgggttttgggaaaaaacccgctttttttaaaatgtaccaaaaaggctaacctaatccatgcccaatggccaatggcaccggtttttggaatcttcttc

SEQ ID NO: 110718 - DNA, 400 bp, Arabidopsis thaliana columbia
tccaaaaaattaaaaaaacctcccttttcctcaatttgattaaaaaaaaaaaccaaatttttgatgaaagttataaacaatgaattaataaattttgaaaaaaaaaacaataaaattagtgataggaccaaaaaacctaaaagtgtggatgataaagtgagacaaaaggaaatgaaaaagggttttgatctacttactacactcaaacgtttcaaaaaaaatttcgtaataactgatcctaggtttcccaataatccaataattttggaatcgaaaagttcttggaacctaacggaatatacccggaaaaaaatttttgaaaaaaattgcaggttttaacaaggcccaaaaactgatttaaccacattgaaaaaaattcgaaatgctattgataaccaaa

SEQ ID NO: 110719 - DNA, 435 bp, Arabidopsis thaliana columbia
caaaagaccactttttggatttttttctccttctatttaaccccctttccctaactaactgctgcagggtcttattaagcccgaatcttaatcattttaactcaaacattttccgccattaagccaatctttcccccacccctgccggtgcccttgcctctaatccaactattgtccgtaaccgttcttccccaattccaaccaaccctcctccttttttaactgccttaaccccaattctttggggtaccacaagggtcaaaggattccaaaataaaatgaaaaacaacatctaaatccgtcctaagcctgccaaaagcttctccaacccagcggtcttcaacggccaccctggtccgtcctttttcaaattcctaaggaaaaaccttattaaaaagttgtttgttccattccaacctgaatcgtttttaaatg

SEQ ID NO: 110720 - DNA, 245 bp, Arabidopsis thaliana columbia
  unsure (1)..(245): unsure at all n locations
ttttattccctggccggccccaaaaagcccncaaagctttcccccccggaatttgaagtcctgggaagcggccgtttgccattgaggaaaactgttgccaatccaaagggccaataaggcagcccatggtccggtatctgaccgtgtaaagaccttgggtccattttttggcaaataaccaacctacctaaccggaaagttccccggaaactacggttggaacaccgccgaactttcagttgacc

SEQ ID NO: 110721 - DNA, 414 bp, Arabidopsis thaliana columbia
ccaccccgcccggtggttttgggcctcgaaaaccaataacaattttttgtttaataaccacctacccgaaggggcgggtttacggagaaccgaagccgcaaaactcaaataaaaaagggactttgccccaattgaaacaaaaccatcgaaaaggtaagccgataacaatggcaaccgcctacaataacccttttgccgttaacatcaatccagttggaatcaatgtttgtttcgtcggaaattaagcggccagggtggtccatggttataacaccacttttcttatttcctaaaagaaaatgcttgttaactgtccgcccgttgttcgcggagccaaaaaaccactttttgtcggcgatttgccgtttggtcctaatgaatttagcaccaatcaggcggttgatactgcaatta

SEQ ID NO: 110722 - DNA, 427 bp, Arabidopsis thaliana columbia
  unsure (1)..(427): unsure at all n locations
caaccggaaggccanggccaccccttcccaggtttatatcatttaaaccanccnggggttcccttgtaaataatccattctgggcggggattaaataattggaggaaaaaagagtccattaccaagacttaaaacctcctttaatctcaggggttaataagcctgggataatttaaaaaagaataccctaagttactggggcatggttagaactttcaaccctggcgnnncttttaagtagttattttcctaaaccgaccccaagttcttccttgggagcctggcaaccctaaggcccactcctggttctgcattaaacggaattaagaaccatgtttcccaaaaaaaaaaaaaaataaaaaaaaaggggcggcccttttaaaggatccaagtttacttccccgtgcttgcaaacgaaaaacttttt

SEQ ID NO: 110723 - DNA, 433 bp, Arabidopsis thaliana columbia
  unsure (1)..(433): unsure at all n locations
ggaaaaccaaatttaaaccgtttaatttngttttgatttactaaacccaaaggcccgcctcggcaggggttttttcttccctggccttccccaaaaaggccgcaaacctttcccccgcggaatttaaagtccttgaaaccgcccttttaacaataagaaaaactgttgccaacccaaaggcccaataagccaccccatggaccggatctaaccggttaaagaacttggttccatcttttgccaaataaccaacctacctaaccgaaaagttccccgaaaactacgaatggaacaccgccgaactttaagttaaccccaaaacattccaaaggacacctaaactaaaagtattccacagaaggtggcccatcctcgaagccctaggctgcgttttccctgagctttgggctaaaaacggagtcaagttcgaaaa

SEQ ID NO: 110724 - DNA, 217 bp, Arabidopsis thaliana columbia
  unsure (1)..(217): unsure at all n locations
ccaaaaaagnaaccgacganncgcatacccaaccatttaaaaccctcccnnaaccctccaccacttccttttttcaacatggttaacctaaaatcctgtccttttaacaaacctttaatccttaatttaatccttccactccttttcctttacttaaccgtccttacttcaatctcccacaaaaaccaaaccttcccttttaacgcctttgtttaac

SEQ ID NO: 110725 - DNA, 194 bp, Arabidopsis thaliana columbia
  unsure (1)..(194): unsure at all n locations
atgaactgtttttttttatccgaananganccnncaagggcccgatttttatatacacaggcacgcatccctactaaatttnttcacattttcagctcaaaagcctcgatttctcccatatgtctcaatttctctacttcttcttcttccacaattcccacgaagcctctaactctattatcttcaaaatcttc

SEQ ID NO: 110726 - DNA, 374 bp, Arabidopsis thaliana columbia
  unsure (1)..(374): unsure at all n locations
gcgtacgcctgaagctttcctctctcttcgagtcggttcttaatctccgggataaaatggcgaccgaggacgtgaagctgatcggctgatgggcgagtgtttacgtcatgagggcgaggatcgctctccacctcaaatctattagctacgaattccttcaggagacgtatggttcaaagagcgaattgctcctcaaatcaaacccggttcacaagaagatgccggttctgattcacgctgacaaaccggtgtgcgagtccaacatcatcgttcattatatcgacgaggcttggaactcttctggaccttccattctnccgtcccatccatacgaccgggccattgctcggnttgggctgctacatagacgatca

SEQ ID NO: 110727 - DNA, 346 bp, Arabidopsis thaliana columbia
  unsure (1)..(346): unsure at all n locations
ctcatatcctccgctacgctgattttgatgcctgcttcgcgacccccttttctaaacnctatttcctcnacgacgtaaccgccttgactttcaatttccatgagaatcgtttgaatcttctttctcgagaatctcccgctgcgctcagaggaggactcgtccgtgctgtctatttctataagaattcacggcggctagaccaattgtctgctctagttcttttccccaccgactatgatactcactcacatactgacattttctataaacaagtcactcattatgcagcctcagactcgcatatttatatggaaaatatgcatgttcaatttacccaacatacctc

SEQ ID NO: 110728 - DNA, 372 bp, Arabidopsis thaliana columbia
  unsure (1)..(372): unsure at all n locations
ctgcaagtgtgagatgccgtataacccagatgacttgatggtgcaatgcgaggagtgttgtgagtggtttcatccttcttggataggaacaacaatagaggaagctaaaaagccagataacttctactgcgaagagtgttccccacaacagcagaatttgcacaactctaattcaacttccaataacagagatgctaaggtgaatggaaagcgcagcctggaggtaactaaatcgaagaacaaacacactaagcgaccaggttaacataaacttgtaaaggctatagatatctggttggtgagtctgagtatcaatcgtgtaatctacaaaagtggntttgttttctttccctctctagttttttctttctt

SEQ ID NO: 110729 - DNA, 352 bp, Arabidopsis thaliana columbia
ctccctatatgctctctcccgttactaggggtgcctctccggttcaggccgctatggtcgctcctttcagcggactaaaatcctccgttgccttccagccacccgaaggctaaaccgacatactccatacagcaacgcgaagagtactgatcagggtgcctcgatgaagagagttgaacttttacctctcctaccaccatgctagagtactctatcacaggatctggtgatcggtgacacgtggcctaccgactacgtcatagcgctgcaggactctgtgtgcctctagtgagggaagcaagaccactatgatgtcccccagcactatatccaccactacgatctgtggact

SEQ ID NO: 110730 - DNA, 305 bp, Arabidopsis thaliana columbia
  unsure (1)..(305): unsure at all n locations
actccctccaaaagattatgattctaataatcaacatggggcanctanaaccggcccgcgactatanaaaaaccggccgccaccactaanatcatctattaccttcaacgacgttaggcttgttctttattcccctactattttacatgcacattgtacaaattgttatagtacgtctgcatcatatgaaaaatctctatctgaaacccattataataagcctatgccttatttccgtatttaacctctatatctaaacgttttttcaggcaggtcggaacaccaataacacacagacgatttct

SEQ ID NO: 110731 - DNA, 187 bp, Arabidopsis thaliana columbia
  unsure (1)..(187): unsure at all n locations
ctggaaatttgtacataaactccgaaaaagtctcgggtatatttggcgaaacccgtgtattgaagcggaaatggtatctgtatcttggagacggggatcgnggctcttaacatanntatcaaanngatgatannaatgtganngaaacacgnnaagcaactttctctcgagtgggtttgtatttgca

SEQ ID NO: 110732 - DNA, 330 bp, Arabidopsis thaliana columbia
gaatcccgtcgacccacctcgtccatatatataaaatatgctttgttatcgccttaaagcgaaagatggagagcaacataaaaaaaagggggtcttttcactatttcttcttgaatgtttttttctttctttggttcttattgaaattgtgatttttgtgcttttttctaataatatcagcagtttttctaaaaaaaaaaaaaaaaaaggcggcgtctaagaccaacttactacctcatgcactatacttttatggtacctaaatcaattcactgccgcgtttacactctgacggaaacccgcttcccactaatccctgcgacatccctt

SEQ ID NO: 110733 - DNA, 330 bp, Arabidopsis thaliana columbia
  unsure (1)..(330): unsure at all n locations
cgacccacgcaaccggnaagagtttatagtggtttgcttctaacttgtcaaaccgtacgtntactangagcggggcattcattttaggatgcggcggacattactataaaataantnacnaatctatggatatatcaagctaggtatagaataccagtaagcagtgcccctcccggttcctgcgttttaattgaaggtgtcgatgcatccatcatgaaaactgcgactctctgtaatgcaagctatcatgaatatgtctacatattccgcgctctccaatttaataccctcccaattattaaaacttcaactgagcctttaatcctattt

SEQ ID NO: 110734 - DNA, 394 bp, Arabidopsis thaliana columbia
aacgaactcgagaaaagtttgttcgatccgtacaaactgaaactaaagtacggaaacagcgagatttggtttgtgcgatagaggataatggaaccaaattatgaggaagatgtttttctcgccaagtatcaatcatccgaacttaagattgcttctgaatttcttacgaattggttgcctttcttatctagagatctctgcaacgactgtgctcatgttctctccgatcgaatccgttctctagacccagagcattgtagtaatggagaagttaaagcgggttctggttcaatggtggataacatggaatctgaagaagttgataacatggaatctgaagaagttgataacaagatggacaatatttatgacgggaagttgcgtgtttctcact

SEQ ID NO: 110735 - DNA, 237 bp, Arabidopsis thaliana columbia
taaagatatgaaagccgatgttttttatgttttttatcttgatgaagcttccagggctcgttttctttagtctgtgcgaaggctctcttaacttatgggttacatattatacaaaccgtcgttggcaagactggttcctacttgtcttctccatgatttcattgaacatgctttgacaagagataatatggaatagaagagagaactgatcaaacccataccaatagacagaataat

SEQ ID NO: 110736 - DNA, 242 bp, Arabidopsis thaliana columbia
  unsure (1)..(242): unsure at all n locations
aaaatatntcanaatcacaatataatancnttttntttcccattttcattttnacaatctatccaattccattccttccttatacatttttcaacctaatcccctctttttctaataaacaaccnattatacattctcaatttcttcaatctcatcttttacccaattacattatatccatttctcaaagtatccttagcttcacttttttntatcaactttacacttcctctactttttat

SEQ ID NO: 110737 - DNA, 504 bp, Arabidopsis thaliana columbia
  unsure (1)..(504): unsure at all n locations
cgcgtccggaaaaagaaaagcgaattcaattgcatagtttacttcttttttctacatatctgcggccgggtctttcgcttgagagcgagggcacatgattgacactctacagagacaacacaagaggaatatgagattctttatttgtcaggtctgttattggtaactgcttatggagctgcagggaagatggtgtacacagatcttgacattcttgacgagcttgagaactttgatgtactggtagatgatgatgatgatacaaagctcttggattggccatcattcacaagccggcattctggtaaaaatctggtgaatgttgatacattcggtgcagctggagatggagtttctgatgatactcaggcattcgtaagcgcatggagcaaagcctgcagtacatcaaaatctgtggttctggttccagaaggacgtcgatattaagtaacgcacanagtcaatggtcatgtgaccaaaagtgtcattagatggacgacatag

SEQ ID NO: 110738 - DNA, 352 bp, Arabidopsis thaliana columbia
  unsure (1)..(352): unsure at all n locations
gacccgcgcgaccgaaagaacactctttngatttttctcttcttttacttaactcactaagcctgactcactgggtcagcgcgcttctgaggccgcgtcgtcatcnctttcactccaacactctccnccactcaacctatccttccgccgacgctggcggtggccttgtcgtctatcccacgtatggtcgtcaccgttgctccgcgattgcgatcgacgctccgtcgtctctgactggcgtgacaccgattcgttggggttacacgagtgttcaaggattccgagatgagatcgaaaaccacatcgtaatccgctctgatgctgtcgatagcttcttctacgcagcggtctt

SEQ ID NO: 110739 - DNA, 334 bp, Arabidopsis thaliana columbia
  unsure (1)..(334): unsure at all n locations
ccacgcgaacgcaacaacaaatcttaaacgttntactttgtttttcactactcaaccacaatnnccnccccgacacggtctatttactgcccggcctgcgccantaaagccttcaagctttcccccgcatcatctgaagtccttgcaaacggccgtgtcacaatgaggaatactgttgccaatccaaacggcccatcacgcaacccatggtacagatctgaccgtgtcaagtacttgcgtccattctctggcgaatcacccagctaccttacaccagagtttcccacagactactcattgtacaccctcggactttcagctgaccccgagacat

SEQ ID NO: 110740 - DNA, 378 bp, Arabidopsis thaliana columbia
  unsure (1)..(378): unsure at all n locations
ggaacaacaacactaagcataaaagtaaagttttatgttttttgagagacaanggcatcaacagggcacgcgctcaatcaatgttcggacccgaacaacattccttggccagactaaagcctcaagctttaacccccttcgtgatgttgtctctctcggatctcccaagtacactatgggaaatgatctttggtatggacctgacagagtgaagtacttaggacccttttccgttcaaactccgtcttacctcaccggagaattccctggcgattatggttgggacaccgccggtttatccgcagaccctgaagcctttgccaaaaacagagctcttgaggtgatccatgggagatgggcaatgttgggagcttttgt

SEQ ID NO: 110741 - DNA, 365 bp, Arabidopsis thaliana columbia
tttttggcccttttttttttttttataactcggcctcctcggttccggcaatgtgccaacaggcgcctttttcaattgccttaataataattttccttttaacaattttataacccgtttaacctgaaccggcaacagtccagcctttccgggtaaaataatcccaacccgaaaccataccggttttccgggagcaatccgatttttccggttgccaactcgattaaccagaggaccttttcaacggaataaagtaagttggcaggggcaaaaagttcaacaagggaaaaggtggcccggaactaggggcggggttttactttgttaactaaaccattgttttaagccgttcgatttccgccgcc

SEQ ID NO: 110742 - DNA, 291 bp, Arabidopsis thaliana columbia
acacccttccggacaatttgaaaaaaaatgaaattgattaacttgaaaatggggatgtttgggggattttggatctacaaccaaatgatccttgggttaaaccagtttttgcccttaaaattgaaaccaggatccaaaacctaaggaaaaagccaggtttggaaccaacaaactttggggaagggtccttccaataattgaacaagaataattttgtttttaaccaagttttagtttttaaggaccaaaccatcagggattaatttgcctcaattttacttttgcctattt

SEQ ID NO: 110743 - DNA, 229 bp, Arabidopsis thaliana columbia
aaggaatcggtaattttcgtggccggcagcaccggaggggccgggccttaacccggcataaagggcggaaaatattccgtggttgggattaagaaggaacctgaggaaggcagaaaaggaagcgggggaaaccgggaaagagggctttgggccggcggaaaagggctttattccggcggaaaagggataaaaaccgccggaaggggggtttaaaccggtaaaaaaggaa

SEQ ID NO: 110744 - DNA, 392 bp, Arabidopsis thaliana columbia
gcgcagttccgggtttgccgccccgccccgccttaaaaaaaacattggcccattgtaaattaaaaccctttgtcggattaaactaaaaaattggttggcattttattgactccattgcctaagttaaagggttttcagcccaccaaaatttttgcagttcctgtccaaggcctggcaggggttcagcccatgaaacgcaggggaaagggagctttgggggcaaagggggacttaatgggttaataaacaaatttgatattggtaacgtcgacaaccttgatgttgttcgcggggggattcggacttgcgccatcagccaataggaaggcgacagttggacttaggttggaggcacgtgactaaggtttacaaacggttgacccggccgggtt

SEQ ID NO: 110745 - DNA, 392 bp, Arabidopsis thaliana columbia
gggccgcagttccgggttggccccacccgtccggcggaggagagaaaaccaaaaagggcggtttttggttcgctttcgccggggatccttttttttttttccgggaaatcctccggaggggggagaaggtttccgtttttggggttttttttaccggttttttcgaacccgccggtccaggtcggcttttttgcgaattcgaaagggggattgcaggtgaagggtgaagttgacccgccaccaacaacttttttggttccggcgaatcaccgatggatgttcgccgaaaaaaaagctaatggccctgccatttggaccacgacatggtttccaaaggcttcagaccatgtgaccacggccaagccctggttgggggttgatgcacctgccaa

SEQ ID NO: 110746 - DNA, 370 bp, Arabidopsis thaliana columbia
  unsure (1)..(370): unsure at all n locations
cggaantccggggaggaccacaggcgtccgagctgccaggatttgggggcgggccatttaaaatgttatttccaaagctggttaatatcctggaatgaacattattggacctaagggggaagtattccctgaccagggggagttccaagttggcccaaccgtaggaattgatgcaggtgaccatgttgggggggctagatacttttttgggagaataccaaaccaagctggtgttgtcctaccacttgatcccaaaccgttagagggtgactggaccggtgctggttgccccaccaattccatgcccaagagcattaaaaaggaaggaggttttgaagtgttcaagaaggtttttttgatccttttcttt

SEQ ID NO: 110747 - DNA, 377 bp, Arabidopsis thaliana columbia
gcccggcccggaatcccggggtggaccacaggcgtccgaccaggcgtccaagctttcttttatgcctttttcccttaactaaacgccaagccggagaccagggtaattacccttttaattgccccgggttttttccccggtttccgcagaattgatccaaagttggacgttgccgccgattcttcctacaaatcctttttcaaccgggccaattccgtaacccgctcggttttttccaatggttctccaaaagggtccccaaaaggggttgttgccaggatggattccggaaggggaatcgtgggaggaaacgggaattggaacggaattaaggacttaatcgccaagttaatcacggaactcaacagggcaacttt

SEQ ID NO: 110748 - DNA, 249 bp, Arabidopsis thaliana columbia
aaaccttagtcggggaagaccttacccctgggggtggaataatccacaaccttggccaaggtgaaggcaataatccaaaccagggaaggattcccaccggaccagcagggatggattttggccgggaaacagtttgaaaacggccgaaccttggccgattacaacatccagaaggaatcgacgcttaatttggtcctccgtctccgggggggggttaagaagaggaagaagaagacttccaccaagccg

SEQ ID NO: 110749 - DNA, 205 bp, Arabidopsis thaliana columbia
tccgaaaaaaaaatgaagcgaacctttttgggtttcccttaaccaaaggaacctgaacctggggtggagcctaacacgggcttttggcttgtccatcagctggtgccaaatgttaataaggcaccggttctgtgaaaggaggccttgtccaatttttgtttcaggcctttaaacctcattaccccaagcttgggtgattggaccc

SEQ ID NO: 110750 - DNA, 284 bp, Arabidopsis thaliana columbia
ttcagaaggatcaatttagggggaccaaaaggggatcggaggagagggtttttacctccgggaggtaatgggtaacaccatttaaccagacccgttggtttcttttctttaagccattacttttgaaaccatccagggtttgggtggcaactgggggcagagaacaaaggtttaaggttaaggccttaaagagggacagggttttgaccggtttttccggggttgttttaactgtttggagggggattccggaaatagctgaagctgctggttctggaattttt

SEQ ID NO: 110751 - DNA, 305 bp, Arabidopsis thaliana columbia
cgtccggacctaattaacgacgccggagatggccgccatttaaaccgccgttgttgttttttaaataatgggtccccggggggtttccgccattagttccaattaaggccggttaacagcccggttcggattcggaaccaaaaaagcatttccaaaaagggttaaaacggttttttaaaaccggcctttatggttcccaggcgcaaaataacccgaatttttggacggttaatttgtcggggactacgggttcgatcctttgggtttaggcaaaccgggggagattttccaattcgattgggatt

SEQ ID NO: 110752 - DNA, 335 bp, Arabidopsis thaliana columbia
ttaattcattgagaaaaagggggacccttttttcccttggggcgctttttcttcttttaaatccaaaaccttggtcctttaaccagaccaaaccaatttaacattaatggtttttttaaaaaccaaccaccttttccggtcttaaacacttttcaacccggttaactaaaccggaataaagaaactggttaatagatgcaaagcagggactagctgctttagcttaatttttaactttaactttttaacctgttggcactgtttagcctttgagttaaatatcctaaacgatggtccacctaaggaaacttacgtagtcgatgacgctggggttc

SEQ ID NO: 110753 - DNA, 383 bp, Arabidopsis thaliana columbia
attccttaactaactctttttttttttttaaaaccatagctcaccattaaggacccactaaaaaggatcctttttccttttgttctccggggattaacttcctaaccaatcatggcgtcgccggggggataagcaggcgtggaccctgggccattccgtcaaaccttaaccatcgattcggggttcctttttgattccttttaccacgacagggatttcctcgttaaagcttttaacagatccatttccacttccaccgaatcatctccttttcctccttcatctttcttggacttttaaaccgccgccgcggatttttttcttcctaaaactttttccaccgtttttttgggttaagatccagaaatcccggccgttggggc

SEQ ID NO: 110754 - DNA, 334 bp, Arabidopsis thaliana columbia
aatgggccaaataatggcaggtcctggggttaggttttaacccgggggggggcttggccgaaatcagaaaggcaggagggattaattccaatggaaccatgaaaccggggttggccattgcgatgaaccaatccaggtttttttggactaaatttgttgttaccgaaagggagttggggcagatgtgcatttttggcttttaaggagggaccgttgaaaccaaccaacccggaagggggaaaaattggggggaggaggtaacctcggatcgatgggttttggtttttttgggctttctttaactgaggatccgttatttttaatttagggttcc

SEQ ID NO: 110755 - DNA, 377 bp, Arabidopsis thaliana columbia
caaaaatccaaaaccgcccaagggatcccattacccataacccacctccttccgccgccggaatccttcttcaaccacctggaaccaccatttccgccgaaggagggggggttttttaccaccaccttttcaaccaccaccaccaccagttccaacttttttggccctaccaacgccaggagatcgaccaggttaccgatttaaaaaaccatcagtttccactagctgggataaaaaggatcatgaaagccggtgaagatgttcgtttgacctccgcaaaagcaccgttttttttggggaaagctggggagcttttaattttgaggctaacgaccagatctgggtttaacgctggggagattaaacgtcgtccgctt

SEQ ID NO: 110756 - DNA, 411 bp, Arabidopsis thaliana columbia
aaaaaaaagccagttcctgttaagtccaaggttgcttttgaaactagcgatgagctcgccagggggtttggtcctgccaggaaaattttttggcctgagggtctttgggatagatcagagatcccagagtccttaaacggggaagttgttggagataatggttatgacccattgggccttggaaggaagcctgaaaactttgttaaatcccaagcttttgaatggatccatccaagagggcctttgttaggagcagttggtttaataattcctgaagctttaaacaaaaatggcgttaactggggccttgaagctgtttggttaaagactgtggctttgcttttggatggaaccacattgacctcctttggcaagaccatcctttataaccttgttttggccgtaattgct

SEQ ID NO: 110757 - DNA, 282 bp, Arabidopsis thaliana columbia
  unsure (1)..(282): unsure at all n locations
ggnccggaatcccggggcggaccacacccgtccggccaataaccaactgggtccgcttggaactgttccgttggaaccaccgggaatggttgacctaggcgttgttttggcccaggtaccatttgggtaaagggagcatgtccctcctggagcctcgcttccaatggcctacggaaatatttaatccccattttacagcaacagtttcctggtttttgggagggttccacctttaaaaagtttttgggaaaaattccaaatctaatttaattttacagggga

SEQ ID NO: 110758 - DNA, 281 bp, Arabidopsis thaliana columbia
cctgttttcttgttcccaacctttttttcttcttaaaccggaattgcaaagctttgccaggttcggaaaactttgggtccttccaaaatttccttaccatcaacgggcgttggacccttaaagctttcccttttaaaaacctaggcgggtaacgtttccttaagagccattattggtgaagtttatggcggaaatcccgtgaaaaaaaagcgcataccttaatctggatttggaccatcctattggaaaatttacggtttattaatccattactgggcctt

SEQ ID NO: 110759 - DNA, 272 bp, Arabidopsis thaliana columbia
cccggcctggaattccggggccgccccacccgtccgggggttttggtttaagcgcatggaaccgtttccgaacttttgattgggattttggttccaaatattgggggatcaaggtcaatcctcaggagggggattcctataatggtggttcgggaccgggaggggtttgggggggggggttccactagagcgttttgtttggttgaatttgagagagaatggtttggccattaatcggacctgcctaatttggttgggcccccagggatttt

SEQ ID NO: 110760 - DNA, 373 bp, Arabidopsis thaliana columbia
aggatctggttaaccgttctaatttcttaatttttccgtccgccgaaaaaccaaatggttcgaaataggggtttttgctgggggaaaatccaagaaatcttagcctttaacatgggccaggctgggacccaggtcggaaattcgggtggggggctttactgtttcgaccatggaatccagccggccggaaggatgccgggggatcctccagtgggggtggaccacaatgcgttcaatacttttttaagcgagactggggctgggaagcaggtccttagggctggtttcgtggatctcgagcctaccgtatccgacaaagttcggccgtggcctaaccgccaacttttccatccagagcagtttatttttggga

SEQ ID NO: 110761 - DNA, 383 bp, Arabidopsis thaliana columbia
ccggcggacccggcccggaattccggggcggaccacacccgtccggggatggttttttttttaacaatggggtggtatttctccgaacaacggcttaagatccattcttggggacgttggaatttcccttttaaatattaaatcccgtccagggggttccggattaggagtggaaaattaggactcgtggtcggttttgtttaagttcccaacgttgagttccgaccgggacctgaggacttaatttttaccttcttttttaaggtggcaaatagggatgggggtttgacgttaagccttgagcagaacaggggggtgtgccaggtggccggggggtttaaaaggtcctgggtcagggagcctgccaaaaatcctttaatttt

SEQ ID NO: 110762 - DNA, 236 bp, Arabidopsis thaliana columbia
  unsure (1)..(236): unsure at all n locations
cggccgacccggcccggaancccggggcggaccacacccgtccggtggtttgaactttgcccaaacttgtcctttgttgggaggaggtccatccttccaaacctgaattaaacaagccggtgcggcggcctttgttaataatggtttttattttgcaacttggcaaatttcttgtttttctacaccctattgataatgatccttatgtccggatattgtggggaaataaaactgtt

SEQ ID NO: 110763 - DNA, 388 bp, Arabidopsis thaliana columbia
cggccccgtgggggggttaaaaaccatttagcaaaggattttgtgagggcttaaatattgtcctaaggtccatgaaggttgggggtaaacccaaagggatggttcaaccatcgttgggattgggggtaaacggggctgaattggaatcggtttggcagattcctcctaaggcttcgtgggaatatatagttgaaatggatggagtttaaatggcaccagtttgagtggtggtccgtccagttttggtttaattcccaaatccttaaaattttgggtgtgttaaggttgaggggaaaccaaagggtaaatttttgtttttttgggggtcgttgtgattgaaccggaataaaccggatcaaaatcttcggtttgattaatttattttttt

SEQ ID NO: 110764 - DNA, 373 bp, Arabidopsis thaliana columbia
atctttccggaaatggggtttaaggggtgggtcccggttaaaaaaattggccacatttagactggtcgggctgaaccataaccgagttcccgaggttaattaaggacttacaaagattttgggggttggccatttccattattggaattaagggaaaggggcctgagtggtaatggactttgcctttaatgctcaatgtaaatttttaacgcacctcctttgattcctgggagggtccgccaaaaataatcttaaattcgccgatttcggagttggattggagttcaaaggccttcaagggatcttttcttattattccaccttatgtaaacataatggttgcataaaataactatttaactggaggcatacc

SEQ ID NO: 110765 - DNA, 307 bp, Arabidopsis thaliana columbia
ggggcgcttggcctcttaggaaggatctttttggttccataaaagggcctaagtaaatccgttttaaagggcaaaagcgtttccttaaccaaaggttgaaggttcctccagtttttaaccagttaaccaagacctttgttaagaatttggccaccagccttttaaagatttttttgaagtttaggccaaaggccaaagccgaaaagaaggaccgccttttgaccaaggttaaagctgaggcaaaaggaaagcctgttgaatccaaaaagcccatggttgttaagtttggcctaaaccatgtgactta

SEQ ID NO: 110766 - DNA, 427 bp, Arabidopsis thaliana columbia
ttggtggttaaagggttgaggttatcctccctaggaagagggaaattttaaaccatttttaaaagttgggataaccggttccttttaatgttttggccgtcgacaccagtaacgttgaccgtaaatcaatcggccgttggttaaaagtttcttttggcaaagttactgtggtggatggggcaccaggagctctccaatccctgggttgggatgttggggaaaaatcattcggtttgggggattggaaggttaatttaattatgactgattcctcaaggcccggtttgactggatatgaacttttgaggaaaatcaaagaatcctaagtttttaaagaagtcccgggggtatttatgtcctccgggaccatttggcctcttatggaaagatgtcttgaaaaaggggctgaaaattttttactgaagcc

SEQ ID NO: 110767 - DNA, 352 bp, Arabidopsis thaliana columbia
aaaaaaaagccagctccggttaggtccaaggttgcttttgaaactagcgataagctggccagggggattggcccggccggggaaattttctggcctgagggcctttgggatggacaagagatcccagagtccttaaacggggaagttgctggaaattttggttatgacccatttggccttggaaggaaccctgagaacttggctaattcccaagctttggaattgacccatgcaagaggggttatgttagaagcacctggttgaataattcctgaagctttaaacaaatatggcgttaacgttggccccgaacctgtttgtttaaaaactggggctttgcttcttgttggaa

SEQ ID NO: 110768 - DNA, 440 bp, Arabidopsis thaliana columbia
cggggcggaccaacccgtccgaatccaggtaccattttaaaccttttccatttttatttagaaccattagttgggagtggggaaactctgaagtagggaggaacccccaccattggcgtgtttttccccgccaatttttttttaattttttcaaaatcccaatttaattcccaatttttaattctccctcctttcaagaacccgcttttttctctttttccgaactctggcttcctccaccggtggattaacctttccaaccgcctctcgtttcttgaaggctcctgtccctctggaagtattagttaaagagctttcgtattcaacaccgccgtttaaaagggataaaccttctcccgctaaaaattttccctttcaaagttaaaaagatttaaactatcgtagggtgttttaaattccaggtttcatgatgtattaat

SEQ ID NO: 110769 - DNA, 416 bp, Arabidopsis thaliana columbia
ccggccggttcgggcccggattcccggggcggacccagccgtccggccgaagcaaatccaacccaaggttttcctttttggaggctccttaaagcttttgaggaataataaagccactttggttttttggataaaaaagggtttaagctgtaccttttttttaaacggcaacttttggaccgggtttttttggtttgggagttctttttgaattaaaggctcttaaaatatgttcgattgggtaattggatcaaacccatttgtttaaaagccgttcctttatgaaacctttaaacgttgagtaacattaacgaggcgaatctggggtaacttgggcttaaacttaaatggctcctgaagttgaagagaaggggggagaagttgaagactttgggcacctggttaaaaagctggaa

SEQ ID NO: 110770 - DNA, 409 bp, Arabidopsis thaliana columbia
  unsure (1)..(409): unsure at all n locations
gcccggaattccggggcggaccacaggcgtccgttttttcttttttttaaggttggaaaaccataaaaaccaaantggttggaaaaaattggggggaaccggaggaaccataaaagtattggggcctttgacctttaaaccaccatggttggatgttgttggacatgcaaaattagtggaataattggggattaaccgccggccgttttcgccggggaattaacgggggccgaacttattcgggggtctggcgggaaggttgggcctaatagccttggttttactaatcctagccggctttaactggggcttggaaacctcgggggttaactccggcaaaggagtgtacgaggaaaaaaagagtcgtttttgttgggaaggcggtttgcgggtcttgcaagtaaaaggt

SEQ ID NO: 110771 - DNA, 379 bp, Arabidopsis thaliana columbia
ccggcccggaattccgggtccgcccacagccgtccgggtggatgttttttgggattaagttgtttttggtgggaatacggtggaaagagaagggatttcattttttaacccggcggggttaatttggatcggttaaggaaatccggaaaaaggagagtttaggccacagttttttgatcggttgggtttgcttgcccaagtggggccggttggagatgctgttttacgggcaaagattgttgaaaagggagctcgtttggttggtaacccaaaggatttccgtgccattaacaaaaccgggcaggacaggtctaaaaaccagatttaaactgttagggcaaacctttcctcggttcaaatggatagggaattgaaggtt

SEQ ID NO: 110772 - DNA, 357 bp, Arabidopsis thaliana columbia
ccggcccggaattcccgggccgcccacacccgtccgcgggaattagcttaagattccatggccggattaccctaaaagggctctgaccaaggtttggggggtggcatttgagggaggagaggtttccggttcaccttaaaatccataaggggaaggggggggacctttctgaatgggataaccaagttgctcaggctttttttgatttggggacccccaatcaaaatttgaaaggtgacctgaaggattaatccgtcacctcggttgtccaagttgttttctttggaggccccagggcaattgtggccaatgttccttccaacctgagaaaagcttaccggaaaatccatgttaggc

SEQ ID NO: 110773 - DNA, 357 bp, Arabidopsis thaliana columbia
ttcaggggagggcaaaaccaccggatggcctttgttggggccatccttagggatcctagaatcctaatcctcgatgaagccccaggtgccctcgttgcaaagggcgaccccattgttaggggcgtccttggttttatcggaaccgcctcaccaccaaagggaggcgtcttagtgttggcccacaaactttttccaattaaggctgcggttggattagtggttttggccaggggccaagtcgtcaggatgggcagtaccaaagaacttttgggcaaagatggctattacccgggattgacgaaaggccaaaccgatgccgcttaatgatggatcctacccatgctaaactgttcatga

SEQ ID NO: 110774 - DNA, 332 bp, Arabidopsis thaliana columbia
attcgcggcggacaacccgtccgaaagaagcgttggtggagatgtgtaaggatgagtttgttcagaagatgacattcattggttttttgtccaagcgggtggggcgggttggccctttggaggatttaaagtgggttgggaacaccatgggaggtttggttggggtaattgctttaaggaaagagatggataagctttatggtttaatatccaattattgtggcttttctgcattatttaatttgttatcatctttttttttgtctgttaatattaattttaccttatatgtttggtttcttctataaaattttattttattttttttttta

SEQ ID NO: 110775 - DNA, 463 bp, Arabidopsis thaliana columbia
cggccggtcgggcccggaatcccggggcggaccacacccgcccggggaaggtggcagtcctgcgttttcttggttcctccgggccatgaggcatttggggcattgagagttcggggggggggggtaactgccattgcattcatgggggtggcggctgtggagggaattcgccctaaaccaaaggaggcattacttaacccaagggctgttgttgacccaatggtattggttttaattaggataaagagggagctagtccaaatggagggatgcaggacctttcttaattgggttggttccctgaaaatgggggtggggatgttccaagggttcaaaccagggctttgaagggggaaattgtcattgatctgtgggaaacctgtatgcttgttgctgagctttaagaatttgaaagcaaattccccacaaaattgccaagggctttgtaatctgggctgtcttt

SEQ ID NO: 110776 - DNA, 354 bp, Arabidopsis thaliana columbia
cgggcccggaatcccggggcggacccacccgtccgaattcctctttttctccttctccttccttttacccgttaagggcggttttgtgggaactaacaagtttaattgggggaatttaaccattcaaatttaaacctaaacctacaccaccaccaaatttaactctcccttctcaaccattttcccaaaggcgaagaaaggttctggttatcaaataatgggcggtggaagaaacttcttaaaccgttttttaattttcctttgagctggtttccgggattggtccctggttggttaactccaccacattttttttaagttcggagtccatggggcaggtgtttgtggaaaata

SEQ ID NO: 110777 - DNA, 335 bp, Arabidopsis thaliana columbia
aattccggggcggaccacaggcgtccgttggtggattatggcagtaacagaaaaccgtaaggtttttactggatctaagggttagttaaatagttggcagccttaaaccggcctccatggggttttttggggtaatatcccgggggcaagaagctgcgggtggttaaggggtagataaggggcctaattccgggaaaccgaaccaaatgaatgggctggatgttggaggggtttttggcaaatccaataaggccaatgttgggattgcaggtcaattagacgaagaagcgttttcagttttggggaacagatccgggaaagcatgggaattactt

SEQ ID NO: 110778 - DNA, 284 bp, Arabidopsis thaliana columbia
ctttttcttttttttaaggtgggaaaaccataaaaaccaaaccggttggaaaaaggcggggggaaccagaagaaccgtgaaaaaattgcggcctttgggctttaaacaaacatggttggatgaagttggccttgccaaataagtaaaatatttggggattaaccgaccgccattttggccggggcattaaccgtggccgacctaattggggggcctggcggcgatgttaggcttaatagccttggcttaactaatcctacctggttttaattgggcctggcaaa

SEQ ID NO: 110779 - DNA, 382 bp, Arabidopsis thaliana columbia
  unsure (1)..(382): unsure at all n locations
ccggcccggaancccggggcggaccacacccgtccggggggttttttttttgtatccagctaaaaccgggggaagaacgtttggaggaaaggggattctttttcttaaccggggggggttaaaccagatcgttgcaggaaatccctacaacggggagtttaagccacgggttttgggccggttaggcttcattcccaaagtaggaccggtcggatatcctggtttaacggttaagaattagctaacggggactttttttccatgctaacccaagggtttacggcaccctttccaaaaccgttcaggacatttcttaaaaccaaatttaacttgttggggcaaacctttctttggtcaaaattgatagggaatggaaggtaaa

SEQ ID NO: 110780 - DNA, 391 bp, Arabidopsis thaliana columbia
ccggacctgaagggttcctgggaaggctgggggatcaccggggaagttaacaccatcaaaaggttcgttggggggcctaaggagggggtttcgcccattagggattccatgccgtcttcgcagtccagggttgacttggcaggacccgttgttgaggtcatttttaatttcgggggcttgtcctgtaccaggtttaagtgtgccggcttggcccctgggatctttgttttcgatgacccgcttttttttaccatcctttaccacaggaaaaatggttttttcgggggggagaaattgacctcaccgaaattcggggtttggttccagaagaagaaagccccagcagtgccccccatgaagaaatgtgcccacgccttcagagaagggggct

SEQ ID NO: 110781 - DNA, 350 bp, Arabidopsis thaliana columbia
gggaactaaaagtaatccacagcaggggggccttgctcggagccttaggctgcgttttccttgacctttgggttaaaaccggggtcaagttcggaaaggcggttgggttaagggccggttaacaaatcttaagcgagggagggctcgattcctggggaaaccttacttgggttaaccctcaaagcattttggccattgggcccacacaggtaattttgatgggagccgttgaaggctccaaagtcgcaggaaagggcccattggaagaggccggggacttgttttaccccgggggcagcttcaacccatggggttgggttaccgacccaaaggcattcgttgggttgaag

SEQ ID NO: 110782 - DNA, 378 bp, Arabidopsis thaliana columbia
cgtggaacaccatttgaggttccttccttttgttctttaggacaggttttccaatgtttccaccgccatttggaaacccgccaccggggttagaattttggttgagggaaaggagaaaaaaaaggccattttactttttggggaagactttgagcctgcattgatccttgccaggaccatccttgaccttgaggacaggaaaccagaggatggggccgaaggagccaagattcctgatccaaatgccgggaagcctgaggactgggatggggatgcacctttggagattgaaaatgaggaagctgaaaaacccgaaggatggttagatgatgagcctggggaggtcgacaaccccgaagcgaccaagcctgaaaattg

SEQ ID NO: 110783 - DNA, 348 bp, Arabidopsis thaliana columbia
agaaattcaacctaaaaagggccgggaggatctcgcccatggaggaatggaccctttccctggttttactaagtttcggccagggtggttttggccggcttcgcctcggtttttccagccaaaatggccaaaccgtcgaaaccatcgattttaaggtggtggggggggcattcatcagggattcatcgatggcccccgcatggatccgcctttattttaacgatggttttaccaccgggggggaggcatcgtttcttttagatggttcgaccggggggaaaagggcgtaaccaaatttaagggtccgcggttccaaagggttggatgccattaagtttgcggccgaaa

SEQ ID NO: 110784 - DNA, 399 bp, Arabidopsis thaliana columbia
aaatttttaattaagactaagacggagccataaccattggcgaaatttccaaaaccagagcttccgaccaaagttttgggtgggggggctagaaccaaatccggggttttttttccttttaacttttttagaaaagccaatggggaaaatgatgggccagggaaaattttgttttggggggttggccccactgtttaccacaccatcaaaaacgactggggttcctcgtattacccagtagttccagggcatgaaattgtggggatcgttccaaaagttggtaggaccgtgactaatttcaaagaaggagatcgggtcggattagaagggatcagggcctcgggccaatttggcgaattttgtgcccaggattttgaaatctcctgtcctaaaatgttt

SEQ ID NO: 110785 - DNA, 221 bp, Arabidopsis thaliana columbia
acacccttccgatcacaaaaggttaccgttaacgaatgcgaacttgattttaacggttttataaggggtgggaactacacatggaatggaagggaggaggttttaaaggagagatgagggtttgccgatgggaccaaatctttgcctttaaaaggactggaggtcaactggttggaccagttaaaagtgaacgacgtttttttccaatttattcccaattt

SEQ ID NO: 110786 - DNA, 249 bp, Arabidopsis thaliana columbia
aaacctttaactaaaattaagacagggtcttaaccattggcgaattttccagaaccggagaatccgaccaaagtttttggtggggtggttagaaccaaatccggggttttttttccttttaatttttttaaaaaggccaagggggaaaatgttgagccagggaagatctggttttggggagtttgcccaactgttttccccaccattaaaaacacctgggaatcctcaatttacccagaagttccaggg

SEQ ID NO: 110787 - DNA, 243 bp, Arabidopsis thaliana columbia
gacagggacttcaagggctggttatacggggagcatttaaggctgtccttgaaggaagttaacggatcaacggttaaaaccgttggaccatttaaggagtttgggtggggtttaaaagaaccggcctggggatcagggttaacaaaaacgggtaagtcccaaaaagtagtcgccggccatggattggactcgtggcggttgtttaagccgggggttcatccgttaaagttgtttttgcctaat

SEQ ID NO: 110788 - DNA, 273 bp, Arabidopsis thaliana columbia
  unsure (1)..(273): unsure at all n locations
ggggnggaccaaaacgnccgaggggaatctatttgatgccgcattgccccctccaaggcccccttccgccgtgggggttccatccctgccccagggcaccaggttccttccattaaccgtttgtaagtcatcctgtggaattccgggtaaccgtaaggaccaacagggccttaacttctatccaaggcatcggtttaggagtttgttcaataaaggtgggcccactaatgggtaggaaatattttaatattctatcttcccacccgtgcctaa

SEQ ID NO: 110789 - DNA, 366 bp, Arabidopsis thaliana columbia
ttggtttagaaaaagcatgggccatttaagaattccaccatttttttttggttggccaaacgaccttaaggccatccaacgatttcttccgaaaaatcggagcctccaagggggggggccgaataataatgcgtggtcccgtaaggtttactcttaaaagcatttggtccggaccaaaccgtccaaaatacttaggaccattttccgaaaccacaccttcttacttaaccggggaataccctggagactacggtggggacaccgttggtttttaagccgatccagaaccattcgaaaggaatcgggagctcgaagggatccacagtagatgggcaaggttggaagttttaggctgaaccttccttg

SEQ ID NO: 110790 - DNA, 382 bp, Arabidopsis thaliana columbia
cccggcccggaattccgcgggccgccccacccgtccgcaaggggaggaaccagaggaaatcaatcttttttttagttccagcccctaaatcctaggtttggaggtttggttcctttagtaatttggccaggtttggggcctggggtggggattttccggacctgggtttctggacccagctccattttttaaaaattccttctttaaatccccatggtggtaggtcttaaagaaaaaggaggatgcctggtggtttctctggttggaatcctcgacccagggccataaaagccgccattgataccgctcgatgcacctttggttcccaacccgattcatcagttcatggaggggatccaccaggaccagagccgattccggg

SEQ ID NO: 110791 - DNA, 381 bp, Arabidopsis thaliana columbia
ggggggcccagcgtccggaggaccggcttctgaaaaaacctaatcctgctttggctcccacttcggccggttctttaccaaatccttttttggtttttccggccaaggcacctcctccttcgccggttaaccatccccttttcggaggtcgaaggggtggtcttagaatcaaagcgatttccactaaaggggacccgccaagggtggttcctaaggcagccagagtcctggtccgtctggaagaccttcctattaaatcctcagggggggattggtggcctaaggcagctgggaagttggggggatccctaccaggggggattttatctgtgggtcctggggtgggccaccaggttggccctggaaggggggttttgttct

SEQ ID NO: 110792 - DNA, 312 bp, Arabidopsis thaliana columbia
gaccgccagagacagcgggtttaaaatcaaagatgtcggcaacctttacaggatcggaaccggttttggggttttggggttcttcgaaaatttcaaaaggggtttttttttaaccagtttttaaccgatgctgaataaagatgtttgtttccgccgacaagaaaaaaaaaggtttaagctttaaaaaatttgaggaagctttaaaggttgttaaaaatttaatgcctgaaggggggaattccccggttcgggcattaaaatccgtggggggccaacctgtttggatggattttgttaaaggctaaaaattgt

SEQ ID NO: 110793 - DNA, 364 bp, Arabidopsis thaliana columbia
gaggaccaccaccattaggcaaaaatgaaaggttaaggccgggggggccatgggcttaaacattaacgggctaaggcggggttttaacccaaccaccattcttgggccggactaaagcctaaggcttaaacccccttggggaggtggtttttttgggatctccaaggtccactttgggaaaggatctttggtttggacctgccagagggaagtactaaggacctttttcggttaaaactccgttttacttaaccggggaattccttggcgattttggttgggcaaccgccggtttttccggagaccctgaagccttggccaaaaccagagttttggaggggatccatgggagatggccattgtt

SEQ ID NO: 110794 - DNA, 274 bp, Arabidopsis thaliana columbia
gtccgaattatcttaaaccaaagaggaacctgttttttttttagatccgatccaatccaatcaacgaggggttccgattgatcggggaaaatccaccaaatttttaaggatcgaaccatataattgaggatgagcgacgtttttgaggggtccaagcgtaaatactgcaggctttaaaccaatctttttagaaaatgtaactttgaatcggttttttccaacggaaaggagaagaaggggaggattgctgaaatcaagtttggaatagacaaac

SEQ ID NO: 110795 - DNA, 409 bp, Arabidopsis thaliana columbia
  unsure (1)..(409): unsure at all n locations
gggnatggaaacccggggcggaccaacccttccgccccgtttccttttaaactccatttcttgattccgttctcctttacctcgcaggggcgagaccatggtttaactgagccggcaaaccgaaaataatccaagtttaaagctggtaattgtgggggatggaggcccaggaaaaactactttggttaaaagacattttactggggggttggagaagaagattgaacctactatggggggggaggtcaatccattaaattttttaacaaactggggcaggatccgttttaactgttggaccactgttgaccaggaaaaatttgtgggcctaagggtgggatactacatccatggccaaggggctataatatggttggacgtaacagaacggttaaaatacaagattgtt

SEQ ID NO: 110796 - DNA, 213 bp, Arabidopsis thaliana columbia
  unsure (1)..(213): unsure at all n locations
aaccaacaacaaaaagtnaaagaaccttttcatcatcttaaccataatcaggaacccccaagcttaaacctttccatgtgccgttctttttaatatcaacatttcaccaactttgatcgtttaaaaaaaatattggccagccaccaaattttgaaaatagcgatgaaggttaaagcttacccttgggaagctaaaaaaaaaaccaaaaggcac

SEQ ID NO: 110797 - DNA, 300 bp, Arabidopsis thaliana columbia
  unsure (1)..(300): unsure at all n locations
cggccaaggtttttttttttttaaaaatttctttttcttttttttccatcctctcgaaaggagcgtgggttgaatctttgaagagttttggacctnccatctttgttccatttttacctcccccaattaatcgaatccggtttgatttttccttttcccaaatttacccttccttaatcttaccacccatttcttttgccccacttttttggaacctttgcttaatcgttgcccaaatattttccctccaatcctctaactatttaacttttgaccttttaaccatggccttttttgccc

SEQ ID NO: 110798 - DNA, 191 bp, Arabidopsis thaliana columbia
ctcccaagggaatgggtaaacaattaaacgggggggtgcgttcttttctttaagcaattacttttgaaaccatcaaaggttttggttgcaactggaggcaaagaacaaaggttaaatttaaggccttaaaatgccaaggttttaccggttttccgcggttgttttaactgttaatggtaattccgaaaata

SEQ ID NO: 110799 - DNA, 379 bp, Arabidopsis thaliana columbia
  unsure (1)..(379): unsure at all n locations
acgggccgggcccacggnccaaccaaatttaaaaaaaaccttttcaataaactttccttttcctcctcccttgcaaaccaattgcctagatcttttttttttcggggaagcgccaataaaaaattccatttcaacccacattgtccagcctgtatttaaagtcgaaaatcctggctggaaccttaactgttttgaccatggcatcaaccctgatggccaaatccctggtaccaaaactgttgtgggaggtaataatcctttcaccacctttttaagggaaaccggtccagtaaaccacgtccaacgtcctgcttttgttgatcttaacccaactgtaatcgacaaggtcagaactgttcctacaccgaagtttttccac

SEQ ID NO: 110800 - DNA, 384 bp, Arabidopsis thaliana columbia
gcccaaccgtccgaaaaaaagaaaaccccaaaaccattttttttattgcttccctaaaccatgcttttgccctcgcttacatttcgccgagagggttaaaaaccctccccattaaaatgccctcgaagccgcccttttacccataagaaaaactttctccaacccaaaggtcccattttccttccaatggtccgaatctacccaagcaaataccttggttccattttccgccaagcccccaatttccctacaccttaagtcccccgggacctccgaatggaccacctttgttttatcccccacccaaaaaacttttcccagaacacctaatttaaaagttttccacagaaaatggccaatcctcgaaccctaaggtttcttttt

SEQ ID NO: 110801 - DNA, 421 bp, Arabidopsis thaliana columbia
  unsure (1)..(421): unsure at all n locations
ggggccgcccacacccgtccacccctaaaataattccttttcccctttttttttttttcctccccgccncaacttgtttttgtttcttaacaacaatggatggttcttttaattttttatcaattcaacttaaaacaaacttcctcaacttcttttaatttttccaccaaccacaaactatcttttaatttaacccgattggttcttaattaacaaccaccaaacccaaatccttatccaccccgttttttttaaattaattttaaccattatttttaaaccttaattttcaaaacactttcttcccttaccaccccaaaaactccaaaaccttaccattaattcaattcaaccccaactaatcccaagtccccgaaatcttcccaagaatccttttccccttcaaaggattcaataaatc

SEQ ID NO: 110802 - DNA, 431 bp, Arabidopsis thaliana columbia
cgaaaaaaaaaaaaagggggcttaccctaaaattttttttttccgattccgctcctgggaaataaccaggtccgaaaaaaaagaggggacggcccccaaactaaagaccggggatgggttttggagggcaaagggctaaatgaacggggaagttttttggattctgggccacaggtttgaccagtttcagcaaatttaaagggatcctttgaataaggtttttaaggggttggagaggtcctggcattatgtgaagcgattaacccgttccaggaatccaaatgctgttagccaggtccgggaattcctaagcagccatcaactaactgggttggggctttgggttctgggcaatttttgccctgaaactgttgaagaagcaggggcaatggttcctttttttaagccaaagggaagggctcatgatgttg

SEQ ID NO: 110803 - DNA, 217 bp, Arabidopsis thaliana columbia
  unsure (1)..(217): unsure at all n locations
cctcaactgtttaccttgccttttaagttcccaacctaaantaaagaattgggcttagggcaaaatgttaagagtcagggtcctaaacaatcctttaaaaaccatgtccaatcctaaaaaacaagccaagagccaggtcatgaccagcccttcctccaaagtgattttcaagtttctgattgtaatccaaaaccccggttccattggtaagtttaag

SEQ ID NO: 110804 - DNA, 397 bp, Arabidopsis thaliana columbia
  unsure (1)..(397): unsure at all n locations
atgaccattttttccttaaaagtgccttttttgtttaaggaggcctgaanttccaaagggcccgggaaggaacccaattggaaggggatccaagatttactggatcgcagtaccgttgaaataaaaaccaaattttttaagtttacagggagacgtgattaaagtgcccgacttgcaaagaacctggattacttaaattttaagttgagtgccaaaaaggatcagcttccaattagttaatttaaaagtgaggaaaataaggttggttccaggaccccccagattaaaaggctccaccaaattaaaattatttttttgattgttcgaaccattgttacttaagcgtaacgctcggaagccaaggtttttactttaagtgctgttaggcggaaagggc

SEQ ID NO: 110805 - DNA, 321 bp, Arabidopsis thaliana columbia
ccccctcccccgccgaaccggttttaattccatccaaggactgcctcccaaaggttgttttttccgttggtgcccttttacccttccttcgtcccgtcaagtttattcttaaaagcttttgttccgttcctacccgcccaaagtcctaagacccattttcggagattccaccttcctacttaaccggaaattcccccgaaacctacggttggaccaccgttgaactttcgcttgacccgaaacctttcgttaagacccgtggccttgaattattccacaccaattggcctttgttggttcctctcggttccccattccttg

SEQ ID NO: 110806 - DNA, 280 bp, Arabidopsis thaliana columbia
  unsure (1)..(280): unsure at all n locations
aaaaactctntttttaaccggttttccttgcccccataattttcaattcctgccctaatattggaaccaattccttttcctttaattaccattggggtttttccattttttggccttaacaaaaccccacccttaattttaaatttattcgtttctgaagccaaaaccatccccccggaaccctttttttccttaccttttaaaattgggaattttcctgcctttttaaaaatttccaacttttttaatttaatttcatgtaccattgaacttgaatttt

SEQ ID NO: 110807 - DNA, 309 bp, Arabidopsis thaliana columbia
  unsure (1)..(309): unsure at all n locations
gacgatttgaaagagaatgtgattcgattcatttggagatcgcgatcgttttggagagcctgcctctactatcaaaagaggctgcgcgcataaacanactttgccccanagaatgaaaacaggatccagaaactaacgcaaaagtcacgtctggaaccaacagactttgtggaagtgccctaccaattattgcacgacgatgcatctgctccgaaacaccacccaatctaccaggaacccttcatcacggcttcaagtcgactcgcagcacctaaaagctccacaaaggcataacatgcccggggcggg

SEQ ID NO: 110808 - DNA, 307 bp, Arabidopsis thaliana columbia
  unsure (1)..(307): unsure at all n locations
acgccaaacccnacaccggtgggattatcaatataactggcggtccaaaaaactccattcttccccacatttatcctaagctcgactcttccgaccaatccttctaccaatccttcttttaccgcatcaattcctctacccatctcgtttcttcctattcttcttctaaacgctcccccacaagtgttgtatccatgactttatccggaaagggaaactacgaaggaaactggaattataacttcactaacgacttcatcggcaagcttatctccgaactcaacaacgcaaccttggaagcagatgt

SEQ ID NO: 110809 - DNA, 273 bp, Arabidopsis thaliana columbia
  unsure (1)..(273): unsure at all n locations
cggcccgacccacgcgtacgtaaaacacataaattttacttactactttttctttgcaccacatgaaccttatcctgggggggtgccatacaacgctcctgtgtatatccatcanccaagacagaaagcaatcaacgcatccatcttgacaatgaggccttctaccatctactcttcaacactcttaaactcactaccccaacttacatgatttgcaccacttcatatctgctactatgtccggcgtgactctctgactgaggttaacaagac

SEQ ID NO: 110810 - DNA, 457 bp, Arabidopsis thaliana columbia
  unsure (1)..(457): unsure at all n locations
ccgggcgcgagcccacgcgtcacggcacaattacccgcactttggttcttcttggtttctttatccgatgcgaaacaacggnnnattgggtgccgtgggcttatacttatgcgcgggtgacattaaagacaagtgagcattttccttctgagtactcgcgtacgattgcctacggaaatatttcatacacaatctacagtcacagcttcctcgattatgggaaggatgcagcactaaaaaagttattggaaaaacttcaaaactcagctaactctacaatggatggagtagttgaagacccttgtacttctaaagggtacatttacgacacaaattcaaagaattattcatcccgattcttagctgatgaaaacaaacttaaaagcttcctttaagcttcttgttattttttaaaaatgcccattcgcttccttttcccttttgaaaaaaaggaaaa

SEQ ID NO: 110811 - DNA, 163 bp, Arabidopsis thaliana columbia
  unsure (1)..(163): unsure at all n locations
caaagtcggtgcgcatgaaaaacattactattattgttgttcgtgatcgtgatgtgtctcgtgaggtgagttccactagagcgttatgtctngncgaattngagaagtcattgttttgccattaatctgtactgtcttattttgtttggaccccagtgattct

SEQ ID NO: 110812 - DNA, 435 bp, Arabidopsis thaliana columbia
  unsure (1)..(435): unsure at all n locations
gcgaccggngcttgcacgtgaccatacttgttttatgttggaagaggttcagacttccagcccgtcggttttcaagacagggggggaggcttagctaatcatggtttctattttgcaacttgggcaatctcctgtttctccacaccctattgataatgattcgtatgagcggattatgttgtgcataaaattgctttgccataggaatgttgagatgaaaaagatatggttggaatcctgccgccagagttttgtcaagatgatttctgaaaaacagcttatagagatggaggaactgaaggcgaagacccaaacaactcatgctcaaccggatgatctaattgacttcttccatctaaagagtcggaagggaatgagtcaacttgggttggaagaccaggtacaagatgacctaaagcgtgccactggagaatt

SEQ ID NO: 110813 - DNA, 410 bp, Arabidopsis thaliana columbia
  unsure (1)..(410): unsure at all n locations
ccgggccgacccacgcgtaccgggacctcttgggtgggttttaaaccatatattatttgattatgtgaaggcatagattatgtgctggggtccatgaaggctggaggtaaacgcanagtgattgttccaccatcgttaggatttggtgtagacggtgctgaattggaatcgggtttgcagattcctcctaatgcttcgttggaatatatagttgagattgatagagtctcaattgcaccagcttgagttgttgtacgtacagctttggtttcattcccaaatccttcaaatatttggttgtataagtatgagtggaaaacaaagtgtaaatttttgtttcttttggggtcgatgtgattgaaccgagataaaccggatcaaaatcttcggtttgatttatttatttattt

SEQ ID NO: 110814 - DNA, 237 bp, Arabidopsis thaliana columbia
gaaaaggtaagaaaagccatttttgctaagttttggctggctctgagactagcgatgatctgtctgtttttttatagacctggcgggacacaaaaaacagcctgatggtcttttggatagatcagagatcccagagtacttaaacggtgaagttgctggagattatggttatgacccatttggtcttggaaagaagcccgagaactttgtttaattctaagctttttggattgattc

SEQ ID NO: 110815 - DNA, 445 bp, Arabidopsis thaliana columbia
  unsure (1)..(445): unsure at all n locations
aaaaccgggcggggcgggcgaacgatacataaacattttaatacaaattgtttacccagaaccactagttgngagcccgcccggttttaaaaaaagggggggccacaacaanggcgtagnactccccgccaaacacgnggncatctatttaaatatttttttttcattcccaaatnggcaagctccctcctctccagtaaccgcttctctctcctctccgtcactcgagcttcctccgacagtggatcaacctctcccaccgccgtcgtctccgtggaggctcctgagcccggggaagggatagttaaagagcctgccgcgtggacggcgggggttaaaaaggaagaaaccggcaccgcttaaaatggtcgctccgatggtggaggagtgaaaaacaccgggagtggtgcaaattccatgttgcggattgtcaaatggaacctgg

SEQ ID NO: 110816 - DNA, 437 bp, Arabidopsis thaliana columbia
  unsure (1)..(437): unsure at all n locations
gcgaacggacgtatcaaatccaatacctaagctcttctttttacgagccacttaagctaanncgccgcatggatacacaaattgggggggaataaaaatggctttagctgntactnctncttcaactgcaanctctggatcgagtttttttttttttttagcttctncngaatcnaaagctctncaaatatgttcgattaggttatctgatcgaacccatttgtctcagagacgttactctatgaaacctttaaacgctgagtcacattcacgaagcgaatcttgggttactcgtgcttcaactctaattgctcctgaagttgaagagaaaggaggagaagttgaagactttgagcaacttgctaaaaagcttgaagatgcttctccacttgaaatcatggataaagctcttgagagattcggagaccaaatcgcaa

SEQ ID NO: 110817 - DNA, 450 bp, Arabidopsis thaliana columbia
  unsure (1)..(450): unsure at all n locations
gcgaacggggaatgatgcaaacttgtttaaccctttttttttctgcacacgaggcattaggagcacgcatagttttaaaagcacggggcgctcacaaaacaatcattgtggttgctgctgatgatggaattcgnccccaaacaaangaagcaanagcttattttttttttttttttttccaatcgnnanagcnataaataagataaagaaggagctagtccagatagagtgatgcaagagctttcttcaattggtttgatgcctgaagattggggtggtgatgttccaatggttcagatcagtgctttgaaaggggaaaatgtcgatgatctgatggaaactgtcatgcttgttgcagagcttcaagagttgaaagcaaatccacacagaaatgccaagggcattgtaatcgaggctggacttgataaaacaaaaggaccatttgcgacg

SEQ ID NO: 110818 - DNA, 235 bp, Arabidopsis thaliana columbia
  unsure (1)..(235): unsure at all n locations
tttttaaagagggggggccacaaaaaacaaanacgacgaacnctcaacatcccactactctcgaagagacaaaggcgaaaacgaggcgacagngaagagcaaganctgaggagtttttttttttttttttttatcatttgaaacgaccggggacactcttatgactcatttgcccctgggcatgtaatctgngggatcgatacaaaagtggagaaggaccgtgactaaatttttt

SEQ ID NO: 110819 - DNA, 203 bp, Arabidopsis thaliana columbia
acccacgcgtccggggggattgacttttggattcagctacttacttttcaagaacggttgggagagatggggggcgtgattttttaccggggggggctgatacatagcgctgcatgacatgactacgacggtgatctgcaggcacagcttttgagtctgattggcatgcatgcccaagcagagacagttagagatgctggata

SEQ ID NO: 110820 - DNA, 446 bp, Arabidopsis thaliana columbia
caatctataactcaaactatgacagagtttgtatacaatggcgaaatctccagaaacagagcgtcctaacaaagtctatggttggggtgctagaaacaaatccggacgtacatctctccttttcacttatctagaagagacaagggtgaaaatgatgagacagggaatatcttgttatgtttacgctgccgcactgaaatacacaccatcaaaaacgcctggagatactcgaattacccagcaaatgcaggacatgaaaggcgagaagaacatgcaaaacgtcggagaaacgtgactaaaaggaacgatggatatcgagtatgagtacgacggatatgcaggtcagtcgcaaaacagcgaatgttgagaccaaaatcttggaaactactgtccttacatgtgtttgacatacaatgcgattggattccatggaaccaagaattact

SEQ ID NO: 110821 - DNA, 363 bp, Arabidopsis thaliana columbia
  unsure (1)..(363): unsure at all n locations
taaagaagagcgtntttataaacttcctttttcttctaccctacaaatataacttcgtcatctttatatattccgcgcgacgacacaaaaagagtgcatttcgatccacattggtcaggctggtattcaagtcggaaatgcttgctgggagctttactgtcttgaacatggcattcagcctgatggccagatgcctggtgacaagactgtttgttgaggtgatgatgctttcaacaccttcttcagtgaaaccggtgcatgtaagcacgtcccacgtgctgtctttgttgatcttgagccaactgtgatcgacgaggtcaggactggtacttaccgtcagctttttcaccctgaacaacttat

SEQ ID NO: 110822 - DNA, 366 bp, Arabidopsis thaliana columbia
ccaaacttccagaaccttagaattggaaatttccaaggaccccgccaaggggcctggtggttaattatccgggggaatttggttttaaacccgggatttaccaaatttttaattaaatccgaccttaaatcttccgaaggattggtttgttccgatgccaaatcttcttcttccacacttaaatccatgaaggttttttcggccgcggtggcctttttttcaatcctcttttttgttcttatgccagttgtggttgttatttaaggttggactccttgcagggcctcaaaacagttggttaaaggggggaggcaccggatcaggaggctggaatctttttttaagctttacgctcctgaatttgcc

SEQ ID NO: 110823 - DNA, 403 bp, Arabidopsis thaliana columbia
accactggttccaaactgttccaatacttttccacgttgttaaaagaagcaaccgttccgggggttcttgtggtccccccattttggatggaattcccgcaggaggaacctccttttagcaccgatgaacccttaatggccggagggggtttactggttaagggggttaccaccaggggaccaccccaggcttccgggtttttgcctggcaaagaataatggattgacttgggaaacggtaggacttacgttggaggcaggactaacaagatggatgctccaaaggggagatttcttgcgtttaaaagggcaggacccatcatcccagggagggcccggtttaggcaaagttcttttaaaatggccaaggatccttaatccttggggggaggctttgaccagt

SEQ ID NO: 110824 - DNA, 332 bp, Arabidopsis thaliana columbia
ttggtcctccgatttttttccgttccgggaccagaatcgattcctaataaccatgggtttttttttttttttttggggggaggttcgccgcttaaccggaataataaggttggggaatccgcttttttttttttccggtttggtggccctcgattaataaacctagggtttttggattccaaaaggccgccgtttgtgaagttcaggaaactcctcccgtttttaaaggggccaaggactcgccatgggactttttagttctaaaagcaactgggcctgtagtggccgacttttgggcaccatgggggggaccttgcaggatgattgatccg

SEQ ID NO: 110825 - DNA, 231 bp, Arabidopsis thaliana columbia
aacggttatttcttggggcacatgttattttattccgtaacctaccagggttcggggcttctttcttttctgtggttttccccatcgccgtaactgggttaagttttggataacggcgcaggctatataggccggaaaaacctttatgcatttattttggtccttgggagcacttaaacatgggggcttggggtttcaaggctggaggttaactaaccttgggataacgcg

SEQ ID NO: 110826 - DNA, 382 bp, Arabidopsis thaliana columbia
aaatcctctccctccttttttttcttttccttcttcttctccctggggcctttttaaatttccgcttttggtttttccagtttggggcctaaaacccaccgttgtcgggtccaagaccagagtttttttaagggcttacggttggaactttagccatggaggaatgggggggaaggcggttgtttttggcgtggccggggctgaccctgaaggcaggggggacccaaagcctgtggtggttgttgttccaggggataaactaccgtgggaatcgaaggaggctaaggggaaacggttttgggaattgaggctgaagatgaagctggccaaaaggattaggctacgcaggaaccgtttggttcgtaggcttaagatgaggaaa

SEQ ID NO: 110827 - DNA, 378 bp, Arabidopsis thaliana columbia
gggggaaggaaaaaggcgaagattccccagattccatccaatttagggttggggctgcccttaattgggaacccttggcctggtttttgaccggttttccggatccgccttgagggaaggaagacgccgccccattaccaaaaccatgggcccgaattcgtttccaccggttgcaaccttggatctagatgagcggatttggcagttaatgcagggcaggcttttttccgggcaacaggtaagagctttttgggggaaggctaaggggatcttaagggttgaaggcaacgtccagcctgttaaaggccctgtgccattctgcggggtttttaatggccggttccttgatcttgcagggcttttccgtattgggggaag

SEQ ID NO: 110828 - DNA, 429 bp, Arabidopsis thaliana columbia
gggaattccggggcggccccaggcgtccggggccgcgggggctaaaactttttaaccaccaccatgggggttttttaaccaaactttatgtttttttaaatccaaactccaaccatcctctttccaaatggccggatttttcccactccgaaaaaccttcccaatccgaataaccaccgggggaaccgccgccggggcaggatggtaagccaccgaagcttaaagctccgcgagggctttggcggccgtggggaaaggaaccgccccatgggatttaccggtcccggccttggggaggctggaccaggttttttcagatccccaggtcctaaactttttggggaatccaccattaaccgtcgggaggaaccgtcaggtcatcgccgccttagggaaatcgtgcgtttttaaatttaacccatttaactt

SEQ ID NO: 110829 - DNA, 300 bp, Arabidopsis thaliana columbia
gaccattacggaggagggggaggaaattacttaggaggtggaggacattacggaggaggtgttggagaaaacgaaggtggaggaaattacggaggtggtgaaggaggatacgaagttgaaggaggacacaacggaggaggaggcaacggcttaaacaaacttgttaaaattaagccgggttttaaaaattatttaatattttaattacaatgcataatggcttataattatataccctaatgtataatcaatatgcctataataaaacaatgttaagtttttaacgcattgctttaaaaa

SEQ ID NO: 110830 - DNA, 362 bp, Arabidopsis thaliana columbia
gaatcccggggccgaccacagccgtccgaactcccaggacccacccttagaaggaaggttttcaagatgagggaatggactacctgggggttaaccgggtggaaaagcctgggttactttgacctaatagttttggtggcccccttctgaatggcagcggttgccgtaattttggaaggtggggtttgaaggcccacctggcctaatattaatcttaaactttggccgaataaacttaactccctaaattttgagctagcaatttcttgcttaaaaagttgttttaaccccttaaccccaggctttttttccaaaatgaaaactggatttgtaccgacccataatttttggcatcattggaa

SEQ ID NO: 110831 - DNA, 376 bp, Arabidopsis thaliana columbia
cggggccgccccacccgtccgaggaaccaaactcgtcggaaaatcaagtccttgcctattaggaagaaaaaaaaaatgtttgggcaatattccttcaatgataacctaatgggggatgtcaaaggcaaccatttaaccgccgccgaaattttgggccaaaacggaagggtttgggttaaaagcgccaaatttcctaagtggaagcctaaaaaaatcgatggaataaaaaaggactttgaggagcccgggttttttgcccaaaccggcctatttttggggggcgaaaaatccatggttatccaaggtgaacaaggagctgtgatccaagggaagaaggaacctggaggtgtaattttcaaaaagacaaaccaagctt

SEQ ID NO: 110832 - DNA, 315 bp, Arabidopsis thaliana columbia
cagaattatggccccaataaaaaaattattctggggatgggtccggttccgggccaaaaatttagggaaataccctttcttattttggttccagaccctgttcctaataaagaggttcacttcttaaaatatcctatttttgtggggggaaccaggggagggggtcagattattcctgagggtggcaaaggtaccattccagtttttaatgctccggcgggggggttattaggtaaaattttccgaaaggaaagggggggttccgaaatacccataggggtggcttcgattggccgcgaggtaatggtttttttc

SEQ ID NO: 110833 - DNA, 286 bp, Arabidopsis thaliana columbia
gcagttggttctttttaatgggcccaagggttgaatttttgaattgggaggggccagggaaaaagggggttgtttttgaaggcatccatcgttccaaagaggacctccctggctggtttgcttatgaaggccatatttactggccttggaagatccggtcgggggcccgaggatctgtccgatcagttttccagtagggccataaaaagggttttgaccagatggcccagggggggggtggttgcttgaaaccaggggttaaggcgggccagggccctttccttga

SEQ ID NO: 110834 - DNA, 397 bp, Arabidopsis thaliana columbia
gttggccccaggcgtccgggggttccagggggaggccaaggttattagaggcccgaccggggtggggttggtccgccgggggacccatgtcctggtttttttttttttccggttttacggaatttttttggttaatggttccatttaagccttttttggtccgaaattccagtaggacataactgttcccatttggtaaggtttggggaggcttaaaaaccgtaaggggcaccgtggttttttaatatgggggcatggttccaacgttccttcggccgagagttggggaccgcgccaaacgtttaggagttggtccatatgcttccggggaggaaatttgggcctttggtaacttttttttacaggcagccgttggacatgaaagaagcgaagagtt

SEQ ID NO: 110835 - DNA, 377 bp, Arabidopsis thaliana columbia
  unsure (1)..(377): unsure at all n locations
cggaannccggggcggccccacccgtccgtggccccttgggagggaatggaagttgttgtttatgacggggaccaccagggaccgggcttggaaattagagtctggccctagggggatggcaatggtgggaaggggttattttggccttgggttcagggtggttaccccagttttgggaagtggggtaactttattagaagcactggtccagctaatgcctggattgaatcctgaaaccagtaagctggcttatagggttttgttaatcccaagaaggatggcctttaatactgatgcttttgcaggcaaaatacctccggcaggggatgggaaaccagttctagtggtgctatttgatgccaaacccaaggaacct

SEQ ID NO: 110836 - DNA, 157 bp, Arabidopsis thaliana columbia
cgggccggacccaggcgtccgttctaatcctaagaaggatgggctacaaaccttgctttttacttaaggcgcaaccgccggcggtttttttgggaccaggagcggtctgaccaaccccaaagtcaaccatcttttcctcttggtaaactttctggtg

SEQ ID NO: 110837 - DNA, 309 bp, Arabidopsis thaliana columbia
cggacccttggccggccccttggccttagtttttttctttggcctggaaggtcctggattaggccctggaacaacaggcgctgccgaataagtaagtaccatggggccacagggtttttttaacaccattataaaccaagccggtatgggttgaacaggaaaaagattaaccacccgcaattttttaatggacgctgttaataattttcaaaacttggcaggttccgttccaggacgtgaaatggcaggcatgtttgttaatgtaactaacaagaccggacacttttgttccttggaggaattaaggaa

SEQ ID NO: 110838 - DNA, 346 bp, Arabidopsis thaliana columbia
cgggcccggaattccggggcggaccacacccgtccggggcccctggggagggaaccaagctttttttccatatccggggtaggaggcataagagggttgggattgcacaaggtgatttgggccttgttggttggagggattcccaaaaggccaaaccggatgggaccctaaagaccatgtctgaggaggttgggcttttaaaggctaatggggggcttccaaagaatactcgtttaaatgaaggaatggtgggggatctgggggttgaggattgttaatatggttaatgactatgttgggttggaggccgaaaattttgttgggatcaaaggttttgttggttttt

SEQ ID NO: 110839 - DNA, 398 bp, Arabidopsis thaliana columbia
cccggcccggaattccggggcggccccacccgtccggtttaccatcttctccttcttcctttcggattttcttcggggggggattttgggggaaacctttgtgggcaaagagcgggaaaatgaccgggcccggtaggaaaatcggggttggggttttcaaggtttaagggcctatcgatggggagggtttggttaaggtcctggtcccagatgaggctggtggggggttttttacccttcgtggggctttcgatggggttaccacacagttccagaccaaatttagtcaggaccctgaccctatggatggggattcctttaggaggcttttgccagctttgagattccaaagtccgtggccaaagttcctcctgattccaggccaaggttggtggttt

SEQ ID NO: 110840 - DNA, 354 bp, Arabidopsis thaliana columbia
accaaagggggtttaggtttaacattactggttttctttttaataacttccttttccgttgggctaataattaaccaggtaacacagggcaggggattagagtccaccaccttttacagtttaacgtggaattttggagggccaccaggagagttgggggccgggcgcccttcaagtaggatggggccattaccaggcttttttgggattaaggccagaggggacccctttgaatcatttattttgggggctgccggttccaaatggggattagtttgtgccgtgaggggtaatccgaagggcggtttaaataataatatttaactttacgcgaggatggaaaagacagaaact

SEQ ID NO: 110841 - DNA, 366 bp, Arabidopsis thaliana columbia
  unsure (1)..(366): unsure at all n locations
ccgggtccgccccacgcgtccgatcaaatgggaacttgggtagccaaacttgttttttttttaaatggattcctattccgtggggtggcatgttaaacaaggtgaaaaagggctaaggattagttagcactacctcttgcggtttaaggaaaaattttgggtggccgccacggtatttgacggagccgcgaccttcaaggaaggcggggccaaaaacaggctcttttgggattaaggccagcggggaaccttctgaacaacgcatgtaggagcttcganggttaaaaccggggttaaggttggtcctattaggggaggtcccaagggtggaataaaaataattccatactagctgatcccgcggtg

SEQ ID NO: 110842 - DNA, 385 bp, Arabidopsis thaliana columbia
ccttccggaattgaaccacaccatttttttcccaatttttaatttaaaaaggcctggccggatttttgtaaggccttggttaacccagccggccgggaaacccagagaaggaatggcggggcaaaaaagggttgggaaaattttccttggtccaatttttggacctttccgccctgtggggcttggccagccttttaagtccaccatgaaggtcaaacccggtaaaggattaattttggaaaagttaagggttgttgttttccaaaagaagttggcccctccaatgggttttgttgttgaccatcgtcgcaggacccgatttttgaagggttttaaaccaaatgtccaaaggttgaaaacctacaaaaccaagttggtcattttc

SEQ ID NO: 110843 - DNA, 412 bp, Arabidopsis thaliana columbia
gtttccataacagggggctggaccatcctgttccttgcccccagaaggcttggggcttaccaaacctcctatgatctaataaagggtggttgtttggccagtgggggttttgttttaccaaaggctgttgggaaggcgaccttttggccttgcccaaggccaagaccggttcctaggagaggccccattctttaaggccaaaagggttgggttcccagtaccaggacctgccttttaaaatgaagcgaaggatttgtttcgccggggtttaccatttacccaagaggatgggccggttgttttaccattggcccaggatccatatttggcctactttaagaggggggatggggtagtcttaaaaaccaacccagagttgctaaaggaccagatcctagaattttttgggtta

SEQ ID NO: 110844 - DNA, 388 bp, Arabidopsis thaliana columbia
aaccaccccaaaaggcaaggaaaagggccgaattaccttaagttcccgaaaccatcccttttttaaccggcctaaagcttgcggcaggttcaaaacctaggccttgttcccccatggttggtcccatttccgccaccggggcgccaccaaagttggtttggaaggcctttttgagggattccgcgagaaccttgggggaaccaaggggtttcattcgtttgagctggaaatgcaaaggccatggaggtcttttaaggatccggcaacggttccatggcttttttacacatgtgaattaccgggggataaagccaaaaggatcggtttcaagaacaacccagggttccaacataacgtgcttttggacgaaaacaaaatccttattgct

SEQ ID NO: 110845 - DNA, 353 bp, Arabidopsis thaliana columbia
gggttctggtggttgtggaccccaaccggaccaaccaaaaattcaatggaggggtttttcagccgttgggggaggcaaatagagaaagggttggctttactgcctccgtttcaaccgtttccgccgttggtccggttttctttttaaggcctaccgcggccatttttgttccggttttgggttggcctccaaggggtaaaaagaaggggggggggggatgttcattggagccaaagcagggaaccgtttaagtcatgggggctggggtttaagttgcagcaccagctgttttgacggcggtgataagcaatcccccaatggctttggttgatgagaggttgtcaccagaagga

SEQ ID NO: 110846 - DNA, 377 bp, Arabidopsis thaliana columbia
aagcgggtgaaaaaccaacggtatgtttttaccaccaccttggaaagttccccgtcgggtttcccagccaaatcctcaaaccaccgccttatctgtttcggttgggacagcttctgcggttccaccgatttccatcattacgcctcggggaatctgtggtccaaacggtgttgggctgcccaaacctggggggcaggaccgcagggggccggaacccaaggcaggcaggggcttgtaccggttagtacatggggccggaaatgaacgctaaaggaccggtattttggcccggccactttaaaggtcccggggggtagatctgggttttcaaggctggaccaggccattccggctggcctttttggcaggtcaaaaac

SEQ ID NO: 110847 - DNA, 272 bp, Arabidopsis thaliana columbia
gtctattgtatcctgcttaaaaggcggggttttaatttaaaacgaattaagcagagtcgaagttgtttggtgtatccaaaaaaaaaaggcctggctttattgtttcaacttcgaccggaaaagccattattccggacagttttttaaggctgacggaccccatccttggtctttctatgggttggtcctcaggggtaaagaaaaaggtggggggtggacgttaagagaggacaagggatgccacagtttaaatcatgggataaagttaaccg

SEQ ID NO: 110848 - DNA, 375 bp, Arabidopsis thaliana columbia
cttaagtttcacatggccggattagcctaaaagggctctgaccaaggtttggggggtggcatttgagtgaggagatgtttccgcttcaccttaaaatccatagggggaagggggtggacctttctgaatgggatgaccaggtggctcagcctttttttgatttggagacccccaatcaaaaatggaaaggggggctgaaggattaatccgccacctcggttgttaaggttgatatctttggaggccccagggcattcgtggccaatgttcctaccaacctgaaaaaagcttcccggaaaatccattttaggcttgttcttgacctcgaaaagaagtccaggggaaaggatgtgaccctaattgctccaaggggga

SEQ ID NO: 110849 - DNA, 362 bp, Arabidopsis thaliana columbia
aagcggcaataaaactgccctttttttcgaattcctgggggccgccgttggcctggttttttcctgattggaaccagcttccggaacggcaaaaagtgaagttggagttccttcaatggaagtgataaaacctgaactggtattaaaatcaatggttcctgttgcaatggctggggggtaaggaattaatggttggaccatcgttgtaataataagtcctggaattaaccccaaggccaagtttaataaccaattcaagggttatgctaattttttttttggcctagctgggggcctggctggcctttttgctggaatggttatggaaatcgccggggatgctggggttagagcaaatgccc

SEQ ID NO: 110850 - DNA, 379 bp, Arabidopsis thaliana columbia
ttcctaataaaccaggaagctcctaaggctcgccttggttttttaataagcttgggcgactggtaagggggccaggttggttggggaagagaccgggcctttcacatgtaaccaacctaaacttttaaccaggggcaatttcgaaaaaggcttaattttcggggtggcatctttggtttaccaggtggaaggcggtaaaggccggggccttaacgttggggatggcttaactaaccgattcccagagaaggggggggctgttttgggaaatggaaccactcctggggactcatttcctctttggcagaaagatttagacgtgatggacgagctcaactttactggttacagattttccatggcggggtcaagactcctt

SEQ ID NO: 110851 - DNA, 371 bp, Arabidopsis thaliana columbia
cccatttttaaccggcctaaaggcctaacccttaaattaatccgccaccgccggaatccaaacggttgttgtggcataaccgaagctaccagggaggtcatttttaaggaacttgggggtcgcggccgaagcggttgcagtttaaatggtttgggccggaaccgccagggcattagaggttctttggggggggggggtggggccgttggctttaattcccaacgacttttttttagctaagggagggaagatggggttcaagaccaccgttggttccccccccatggttgtttttgatgaagccgagatcccaagtggcgtggccgtggccaagatctttttggacgagcaggatttccttaccggggcgg

SEQ ID NO: 110852 - DNA, 391 bp, Arabidopsis thaliana columbia
ggcggaccgggcccggaattccggggcggcccacagccgtccgggccaaagatggccggaaacctggccggactttaggggggctgggggggaccagggggggttccatcctggggggtaaggcagggatcgtcggtccgttcaaatccgccaccttaccacccataaccgatgctttggcagccgcccttaataccactggaccaggggagggttccttggtattctccgcaggagagggggcttttgaagattatatggtggttcccatcaccaaaaagaccttaatgcttttgggggaggggatcaataggacgttttttccggggacccatatggtggtggttggtgggcctccttttaatggttcgggcttcgttgtggttggggg

SEQ ID NO: 110853 - DNA, 410 bp, Arabidopsis thaliana columbia
acacccttccgagatacagatccaagatctgggttgaggagtttggatggaccagggatcttgcaaggaagatttggcttttgggacctgaaaccacagggcctaccatggttgtcgttttgtgtaggggggttaagtcctttaccaaaataaaggtttaagtggtggttggtttccaggggccgtccaaggagggtcctttggttgaaaagaccatgagaggtttttgtttgggggtttgtgatgtggggcttaattttgatgccttcaacagaggagggggtcaggttttcccaccagccagaaggttaatttccccttccaaaataacagttaaccccagacttttggagccggttaacatggttgagatccaggcaccagaggaggcttttgaaggattttacagg

SEQ ID NO: 110854 - DNA, 325 bp, Arabidopsis thaliana columbia
agatgccatcctaaacctggctctttggacctttgggggggatgggttcaccaagggcgattgacctattcgtgggccgggttgctataaccggtttcgttgcatcgtggctggggggggcgtggccggaaaaggggattttacttcagctgaatctggaaccagggttcccgttttccgaagcaaagccatggcttttttctttaatctggtcaactctgtggggggccattgaggctttgggggccagaggaaatttcgtggccaatcctccaaccggcctcgagaaagccgtctttcctccgggcaaaaccgtccgatctgc

SEQ ID NO: 110855 - DNA, 374 bp, Arabidopsis thaliana columbia
gcaggcctttgaccgttgaatggaacgtttattcggggggttttagaagtttgtggaagtccattaaggccaaatccccaaatccggaaattttgatcatggaaaccggttttggggaagaactaggggcctaaaattttgtggttgtgggtcccgttgatcataccaggaaattttattttaaggggcattttttgggtttgcaagaagctgtttgcatcgccaaagggattgttccaggatccttggtttggccattgtgggataacttcgaggggcaggagggttccaaaaccagatttggactttactccgttgattcaaaaaataacctaacacgttccgggaaagattccggcaggttttacagggat

SEQ ID NO: 110856 - DNA, 377 bp, Arabidopsis thaliana columbia
gaggaccaagggccttttaaggagaccagaatcgctttggcaggaatccttttccggcctcggattttgatggaggggaccaaaatggatttggcgactcccgcttgggggttcaggatctcgaggccgaccatggtggctcctactgcctttcaaaagagggttaaccctgatggggaatatgctccggttggggctgcttttgttgttggacccatcatgccacttttttaatgggctacttaaagggttgaagaagttgcttccacagggccgggaatccgattcttccagctttatgtttccaagaccaggaggggggttgagcagttcgtgggaagagccaaaaaagctgggttcaaagccattgttttaac

SEQ ID NO: 110857 - DNA, 459 bp, Arabidopsis thaliana columbia
cggaataccgggtccgccccagccgtccgaaaaaaaaccacaaaaaggtttaaagggccgcttaaacatgggttttttcttcccttgttttggccggaagggttgtgaacctttcccttgcggaataaaaggtcctgggaggcggccggttgccattgaggaaaactgttgccaagccaaagggtccataaggcagcccatggtccggatccgcccgggtaaggtcctggggtccattttttggcgggtaacccagttcctttaccggggggttccttggagactacggatgggacacagttggtttttccgttgcccccaagacattcgcagggaaccgggggctagaagttttccacagcaggggggccatgctcggagccctaggttgggttttccttgagcttttggccaggaacggagtcaagtttggggaggcagtttggttcaaggttggtt

SEQ ID NO: 110858 - DNA, 438 bp, Arabidopsis thaliana columbia
gccaaatggcagggccctttccgccggactttcgttgagttcctggggcggcctggaccggctgggttttttggtttccttctttccagggggctgggtcgaggcctcaagaaaccaacccctgtgggggttgaaacctttttttttttgtttagagatgaaccaggccatgccggttttttgaccaggggatggtttgatttaaactgggttctggattggggtttcctgccaaaggcagggaaatccacttttttaaggccaaatttaattttttacgcgacttacttatccaggaaaatggggtcctggggatccataacattttacagccacctaagggaaaaccctgagttccaaggttccccaattcttaagtcctttgagacctggggtcaagacaggaaccgcaatggggattttttttttgttttgatg

SEQ ID NO: 110859 - DNA, 240 bp, Arabidopsis thaliana columbia
aattaaataggagcgcttaataaacccccttggtctttttccttggaaatctagtttttttcttccacgaaaaggagggagggcttttggatccacattggtcaggctgtattccaggtcggaaaggctggctgggggctgacctgcttggaacatggaattaagcctgatggccagatcccgagtgccaggactgttggtgggggggccaatgttttaaacaccttcttaagtgaaacc

SEQ ID NO: 110860 - DNA, 399 bp, Arabidopsis thaliana columbia
cgggaccggaattccgggtccgcccacacccgtccgattggtttaatttaccaaagagggttttaaaactaatttttttcctccttcttttgtttccacttttaacagcaacaatctggtcgggggtcgagcaggccttggtttccgccagggaactcttggggaccggccgaaccataacggttgacgggggagggtctcaactgggggggaggaagcagaggagggcttaaggttgtacctggttccagggccgagggtggttcgtggctttttaccctttttatgactggtccaagggtcctttaatggccggcgagttggatggtttaaggttcggccgcccggccaaccagttcctaaggtcctctgggcacccggaatcttgcaccatccaag

SEQ ID NO: 110861 - DNA, 255 bp, Arabidopsis thaliana columbia
gaatcccggggcggccccacccttccggttattaaattggatctaactaccttttctttttcataggcggggaaggaccaaagggaattttgtcctgttggtgggaccaaattggtcccctgtcctgtttaataaagtaccatgttaaagaaaggtggtatttttttggacctggcctttttggaagctaccaattggtgggggttggtgtaaaggtattttaataaatttggctgggcctgctttaggggactc

SEQ ID NO: 110862 - DNA, 345 bp, Arabidopsis thaliana columbia
cgacccacccgtccgataataaaaaacctccatttgttattaagtcaacgagaagtggggaacgggcggttcttaccggaggtatggaatgcccttgaagagggcgaggacttcttcacttgaagagaggacctccaccaggaattgcaccacctggggctgtgtgtcaaactgaacatgggggacaaccggaaactgcggagcaaattttacgggttcaaaatggtttttagggatcaaaaattggggaaaaaaagggttcaatgctaaaacattgaggggggggtttggatcaaaaacatgaccggtgcggggcttttgaattatatcaagatcaggcttttt

SEQ ID NO: 110863 - DNA, 257 bp, Arabidopsis thaliana columbia
  unsure (1)..(257): unsure at all n locations
cccccnnnngaaagaaaaaaccaaaaatagggaccccttttaatcgaaattaataattccgcccgaagattttttttttgatcattgacacccttaaaaggggtagggctttcgggaagccaccatgggggggggagctataatctccgattcaatacctccgcgggggtccctcggggtaattaacgggttaattgggccggatctgaaaaccaaagggaaggtttaaaagaggagatcgaatatccgatccgttt

SEQ ID NO: 110864 - DNA, 339 bp, Arabidopsis thaliana columbia
tccagatttggacctaaaggaggggcgttttattaaccccccttcttttttttggcttttttcctggcaaatttagtttttggacctttctttttttccgggaaccgaaaatgggggggggcttttggatccacattggtcgggccggtttccaggtcggaaaggctggttgggggctttactgtttggaccatggctttaagcctgatggccagatgccgggtgccaggactgttggcggaggggacaatgctttaaacacctttttcagggggaccggtgcagggaagcccgtccaccgtgcggtctttgtggatcttgagccacctgtgatcgatg

SEQ ID NO: 110865 - DNA, 383 bp, Arabidopsis thaliana columbia
cggaattccggggccgccccagccgtccggaacccataaaatccttaaaatttcgaacccttttttggttgggtcttaaatgagctggtttaaaccacccaaccaaaccttatttggtacctgggatgtatttagcttttccattgattccgtggttaaatttctttaaggactccaaggtttggaagaactcgttcccaccaccatgttgttccgtaaaagaatcggtttttggggttttaaggtggttgttatgccggcggtttgggttttaagtaagttttggtacctggatgctggggcctcagaaggtgccattccgtttttaatcatttaacccggtggatctattcctgtggggatgggattttatgatgcattga

SEQ ID NO: 110866 - DNA, 269 bp, Arabidopsis thaliana columbia
aatccggggcggacccacccgtccgatcgtcaacggaaaaaaaccaaatttgtttttttcgatgtcctcttccctttctggggcgggttggctacggtctcggccgtaccttctcccaaatatgacccaaactgggattccactttttacttaaaaaccggttctacttgtaaagccgtatccgattctatcataagcccatgaattaactataggtgccttttactacttcggaatctaaaaccttaaagctttggtctggtttaagg

SEQ ID NO: 110867 - DNA, 362 bp, Arabidopsis thaliana columbia
gaaaaccaaaagggtttcaaggggtggattccacgggccatttccggcggttttggaaggaggcttaaagatcattggttccagccgcttgaatggttttggaagagtggcggtggttaaaaggtttagacttgtcgtcagagttaaccaaagtggggggccttttcgccggtccgggatgggccttgtggctgttggttaagctgggggttcgttggttaaggctgtcctcgccgttgctatttcgaccaaagttggccttcttccagttctttccggtggccttcctgggccagttacctcaaaccaagcaggagactttgcttgggcattgaaggacaggttttactaacagccattgc

SEQ ID NO: 110868 - DNA, 346 bp, Arabidopsis thaliana columbia
gttaatcaggttttttgcaaagaaggtttttcttttcctaatggggggtttggtgggggcgggtaagactccaatctggtccaacctaaacctgggagggatcgggcctccaattccaaccattgttttaatgggggaaactggggattccaaaaccattactttaaccgggggggaggtcgggggtaaagacaggatttgtccttggggggggccctatttccagaaaactaagggactaattttggggggggccagcaatgaccgggaccgggtggtggaacccaaagatgaccttaacagaatgttaaccaaaaatgagttgaaagatccttgccttttcgtt

SEQ ID NO: 110869 - DNA, 413 bp, Arabidopsis thaliana columbia
gtcggccccagccgtccgggggggcacaccgcatcttggttggttaaaccggcactggtccaaaccgggaggaagctttgggaaaagatcaacattttttgcctaatcgggaccattttaagccgccccgttgaagatggaaccattctttggggcataatggttgagcgtcctaaactttccatggaggaggtggggcaccttttaatgaagggcctttttgggcattggatcgggggcttaatagaccaggggaccggaccaattaatgtttaaggggcgcacccgagggtcctagggattccacagatcagggttttgggggatcaattagccagtggggtggccaaagttaacaccactttactatttgtggaagcgcggacaccagatctggttgcagcttaggagaa

SEQ ID NO: 110870 - DNA, 426 bp, Arabidopsis thaliana columbia
  unsure (1)..(426): unsure at all n locations
ccgccgccggtccggatccggagttccggcccaggcttaggggtagggggttacacattttttttttaatggtatggattatccaagttncgagaggttgggtctctgccaggaaagaaaataaggtgggttatcaaaaangaaatggtccacagggaatcccaatggttccggggcaggaaggggggaaaccttcaaatggcaaagggggaaaaagaaggcgggacccaggaattactcgtccacacttcttacaccagaactggtttttgcatttgcctaagtcgtggatgctgaagccaatccggagggctagaagatggaagggggagttccctggtcttttttggttaagcctggtttttaaaaaatgatcctttcaagagtttaaaagtgggtggtattgtggaatccaagccttttttt

SEQ ID NO: 110871 - DNA, 284 bp, Arabidopsis thaliana columbia
cgtaattactaatctcctttaagggttcctttttgtattcaaatcggaaaaagggaactttgttggtttttatttgaatccgacaccgtgggacatcccgccaggtttggtgaccagatttccaacgctatcctgaaggctggcctggaccaagaccctggaggcaaagttgcttgtgggactggacccaagactaacagggtcatggttttgggggaaataacaaccaaggttaccgtggataacaggcggatgtgtcgtaaaacatgccgggggatgggatt

SEQ ID NO: 110872 - DNA, 366 bp, Arabidopsis thaliana columbia
ggtaaggttgttttagccttggttatggcggctttttttatccaatcttttccgttttctttaaatagcaccaccgcaaggccccggtttattagttcaggatcgttcggcggattcaaaggccaaattggggtctttccattgggggcggtgggtttaagttcaggcctgggaggtggaaggaaatttttttggatttgtaactcaccctttaccgcgaaatgcagggaaggccaaccccagaccgttactggggggtaaccgcctttaacacaggctctggtccactttagggggaaataaccaggcttagacgatggaggggccggtttccaaccgcaggatgttggaattggtggtggagga

SEQ ID NO: 110873 - DNA, 328 bp, Arabidopsis thaliana columbia
ttaccataaaacggagggggtttaaggattttttccattgaggaattactcgaaaaaggaatttgtagggcaaggcaggcttggacctttcttggtttttgggcctcttaatgagttggttaaagctcctgaaccagcaccaaccacggtacctcttcaacaaacggggttttttccagggccagcaaaaccacttccaccaattgcttaacctccggttccatttaacaggccaacttcggttgtacccatttttccaccaccaccccgggtggcttttcctctttaaaccgtggttctggttccggggctttccgttgaattaact

SEQ ID NO: 110874 - DNA, 360 bp, Arabidopsis thaliana columbia
gggggttctttattggacctgggttggggactttttcttcaacaaaggcggttaggggttaacaaacaagcccaaagcctcttctttaaccgtttcttttccgaaattccaagttttgtcagccaaatttggggattttgatctcagggggggctggattcatgggttttaacctggttgttaagctgttggaaaccgaaaggaatggggggatggtggctgttacctatttaactggttcaagggccacccttaagagggggttgggtcatccaggatttgggctattccgccacgatgtcccggagccccttttgatcggggttgatcagatttaccatctggcatgtccggcttttc

SEQ ID NO: 110875 - DNA, 220 bp, Arabidopsis thaliana columbia
agggttttctttcctggctacattttattttaacctcaacacaaaattcaaggggcgggttttaatttaccttcgagcaggccaaatataaaaaaagtgcctcccaagtaagtaccttgaggaatttggtaaccaaaaatgggggaggcatacttttaattttcaggctggggccaggggaacctaaggtgatgatttgggccacaagcatggaactggc

SEQ ID NO: 110876 - DNA, 250 bp, Arabidopsis thaliana columbia
atcccggggcggccccagccgtccgggaggctccctgttccagcaacaatttttcttataagacattaaagccgccgcctgttaagggttctttaactggcaggatgcgtctaactattaaagattttctgtattggtattaataatataaattcttatcttaatttagccatgggggtaaatttgttttttttgtctactattcttatttattccttcttatttgtaattattatttagtattaattta

SEQ ID NO: 110877 - DNA, 260 bp, Arabidopsis thaliana columbia
  unsure (1)..(260): unsure at all n locations
ctccgntaacttccnactcccccgccattttttatctctttcgccggctccatcaccactacttntctcatctctgagaacggctcaagcttagattgccggagaaaactttatgcaattttctttgtacttgggagcagcttcaacattggagcatcggcgatccaagacggaagttcactcaccttccgataacgcgactctgacctatctcaaatatttcattgacctcatattcagtgtgtctaattgctattctt

SEQ ID NO: 110878 - DNA, 263 bp, Arabidopsis thaliana columbia
  unsure (1)..(263): unsure at all n locations
gngcgaccntaaagctacagaaccctagaatgaggaggcttcaatttacccgacaaagcnacncntttcggctcggttattttaatttaccgctcagccccagatctaacaaatgttttactaaatccgtacctaaatcctgattatgatatcgacctgcgattctcttaaaagcgattatccatggctgcagctggaaacaagagcgttaacgccaaattggtgttgcttcggagatgttggtgctagaaaatcaagttttg

SEQ ID NO: 110879 - DNA, 323 bp, Arabidopsis thaliana columbia
  unsure (1)..(323): unsure at all n locations
ggacactacggaggaggtttaggacactatttttgaggtggaggacactacggaggggggggtgtattatacagaggtggaggacactacaaaagtnttanatgatgatactgatgtttattattacatttttaaaaattatttttttttttaatctaacatgtttatacttttctttttttctaaaattttcttaatattattaatttcaattctattattcttctattatcgtattgtacatttttatattatataatcttatctatattcttattatatttttatttatccctattctaattttataaattctctatata

SEQ ID NO: 110880 - DNA, 387 bp, Arabidopsis thaliana columbia
gcgatctatcaagacccatactcatcaaacggaggctgctatattatgggcttgagaaactacagctgcccgtggttttaaagtcatggttactctcacctaactagcttctggtgctccattctggattgcaaccgctgccctcaattctgaaagtggtcggttgattaccacctgtaagtaggaataaccgtaaactcggccggttaacggtgacccggtctaatctggcgcaggattttcttggcgacttcagagctcgtgacccttacccggaggagatagcgagtcaattcagacataaagtgttgggaggccagagcactgggcactataatttgataccaaacgcatctgttgtgtctctcttccagcttcagtgttccc

SEQ ID NO: 110881 - DNA, 455 bp, Arabidopsis thaliana columbia
cggacgcgtgggcggacgcgtgggcttagtctttttcctttgcctcgtaggtccttgtataggcgctggaaccacaagcgctgccgaatcagtcagtagcattgtgacacaaggtttctttaacaacattatcaaccaagccggtaatggctgcacgagaaaaagattcaacacccgcgactctttcattgacgctgctaataattttccaaactttgcaagttccgttacaagacgtgaaattgcaagcatgtttgctcatgtcactcacgagaccggacacttctgctacatagaagaaataaagaaaaggtcacgtggtaggtgcgacgagaacgtagagcagagaccatgtccatcacagagtaaaggtcactccggtcgtggtcatcagagtcttggtctcgaccttctacgccagcctgagcttgtgggtagcaacccaactgtagctt

SEQ ID NO: 110882 - DNA, 287 bp, Arabidopsis thaliana columbia
gagaatatacaaaacagcatctcattgattaacaatcaccattctcacttaacatcaatctttaactgtctttttactgaactaccgactatctgacccgagacccgattttgatgacatgccgattactggggagcgccacacagacccattacgttgtggacattacacggcagtccgttgtagcagacggttgtccaccgaaaacgggacctcccaccaagggcagccacggtacggataacggattcattggctggtgctggaacagcgttttggcgattaag

SEQ ID NO: 110883 - DNA, 423 bp, Arabidopsis thaliana columbia
gttttacatcttcttcttcttcctcttcgatattcgtcagtgtgtgtattttggggaaaactttgtgagcaaagagcgagaaaatgagcggagccggtaagaaaatcgcggatgtggctttcaaagcttcaaggactatcgattgggatggtatggctaaggtccttgtcacagatgaggctcgtagagagttctctaaccttcgtcgtgctttcgatgaggttaacacacagctccagaccaaatttagtcaggaacctgaacctatagattgggattactataggaagcttatgacagcattgagattccaaagtacgttgacaaagttactcctgaatacaagccaaagtttgttgctttgttggtggaactgtaagaagcagaacagaaattgctcaaggagtctgaactgttggagaa

SEQ ID NO: 110884 - DNA, 200 bp, Arabidopsis thaliana columbia
tcacccggaaactctactccattttattttcgaggtctccaaatagatcggccagcatttttttgtcctatgaagaggaggtaaatacaccatatactcctagttatgttgtaaagctagagacagacgtggagattaaagctttcgctgagaagattcatcacatgttcgccgttaatccacaccatgtctttaaatca

SEQ ID NO: 110885 - DNA, 282 bp, Arabidopsis thaliana columbia
  unsure (1)..(282): unsure at all n locations
ggccggccgacgcgaacgncaagaaccatctgtgaatctacctatttttttttatgctagaactgcttgnccacgagccgactatttttggaaacatgtgggatcatanacattgtggttcttgctggtcattaggtgctgttgaatcactatcagatagactctgtatccaatttggcatgaacatttttttatcagtaaatgatctcctagctagttgcggattccgttgtagtgattgttgttatctactctttttattttattttttttaatctcttt

SEQ ID NO: 110886 - DNA, 449 bp, Arabidopsis thaliana columbia
  unsure (1)..(449): unsure at all n locations
aaaaattcaaagattttgttaccaccaccatagtaatatacgcgccgcccttcttatatgtgatctccatccaacattntatttctttcgttttggttatcttcttcggttccatcgaattccaacaattcccatcgaggaatttggttacgaatcttttgatctgactaaacctagggagcttgatcacaaggagactgaatccaatgctaggaggagtctcttcagtgttgtataatgagttgaaaaagaacggtaaattgcattgttttatgacctgccacttttgatgtggggggggattagttttttttttttcaattctttacattcctattcttctttcccttttatcaatgtttataacttcattttccacttatcatttactacgtgctcttcagtctttgattttttttatataaatctctttttttttatttttttta

SEQ ID NO: 110887 - DNA, 216 bp, Arabidopsis thaliana columbia
  unsure (1)..(216): unsure at all n locations
ananaatatatactatcttaaatacccaattttcttttcacatctattaagcataatttgcgccggctttttcaaccactacacacagcctctaacataatttctcaacctcctacttcaaagccactattcctcaccattctcttattacataccgaacccatactagtttcttacataagaccgcccacactccaaaacaatcatgaacaattt

SEQ ID NO: 110888 - DNA, 449 bp, Arabidopsis thaliana columbia
gacggattcgaaaatggccaagtttcttcaatcctatggatatgatttgattctgggatctgtagctgcaatctatgtggtcatggcaccatatactaaggtggaagagagcttcaacgttcaggtaggttttcaaagtatttagagtcacactctttctccgttttactgaaaccgtttcactcgtctcaagtcaatgcacgacattctttaccatcgccatcatttggactcttatgatcatttggagttccccggtgttgtccctcgaacttttattggagccttcatagtctctgtttttgcatcacctgttgtatcaattatcagctgccttggcttccccaaggtttatagccttgttgcagctcgtttggtgttgggctgcatcatattgtccacactaagatttttccggattcagataaaaaaaaagtttggaaatcaag

SEQ ID NO: 110889 - DNA, 549 bp, Arabidopsis thaliana columbia
  unsure (1)..(549): unsure at all n locations
cccgggctcgaccccacgcccgtccgaatgnnngcttcttcaaaggtttcaaagcggnncgatgataacctgcttgctctttcntttcggattccnnntcggcgcggcgcgcgcgtgcngnnctcgttnnnttctccgtggtatngnnggagcangcnngtacccgggaccggcngnnaagagatggnnagttggacggttgcngtcngnnatgggagtngatgacgaccctcgannacttcgttatgannaatcgattcggttcctcgttcgtcaatggctcggtgggtgttaggtattttaaatggtttgatcaaatcgctgttanttatcaagtaccctgggattataccccaagggccacagtcttaaattacctaaattcgatggctatcgctcaatctctcttctgggctagcgttgtggtcttgcntggtctctctgctggtatggctattggaatcgtcggtgatgctggtgttagagcgaatgcgcaacaaccgaagctgtttgtgggaatgattctgattctcatctttgcggaagcgc

SEQ ID NO: 110890 - DNA, 337 bp, Arabidopsis thaliana columbia
  unsure (1)..(337): unsure at all n locations
nntccgcccatctttcaaccggccctnntaaagcctcaactcatcatatatcatccgccacccgtctagaatccaagcgcgcgtgctgttgctatcactcgaagcgttacacgatgaagtcaatctcttaaagaacccttcggagtcgcggccccgtagcggcnttgcagcttcatnattgctttggcccggaaaccgccatcggctaatagaaagttcttcttgggagcgaggggattgggtccgttagtcttttatttcccaacgactttctctatagtctaaagcgagagaagattgtgtttcaagaacaactgctggatacccacactattgt

SEQ ID NO: 110891 - DNA, 370 bp, Arabidopsis thaliana columbia
aagaagaagaaactacaataggtaatcaatcatacgagaaagtaagagaaatggcagcatactagcggaggatgtggatgactcctgcaggataccacgactctcgcactagagagacgaactacaacatggagtgcagacaactggggctgttgatcaaactgcacatgcgggtgaaactgagactgcagatgaaattattactggttcaaaacatatatatggcacaaaaatcgctggaaatatatagttcatgctaaaacatgtgagggtggggttggaataaagacatgaaccgtgactggcttatcaacgagagccagaacaagctctatcacgctttggatttgactgtggatagacatggtga

SEQ ID NO: 110892 - DNA, 301 bp, Arabidopsis thaliana columbia
cccacctttgggacgtttcgctgttagggacatgatgcagaccgttgctgttggtgttatggagagcgtggacaagaaggacccaactggagccaaggtcaccaaggctgcagtgaagaagggtgccaaatgatgagactttcgttatgatcgactctcttatggttttctttggttcttaaaactttgatggcgtttgagcctttttcttttttctctttatttctgtgactttctctctccctcctttttggatatctctgagactttttattatggttttcaattatgcagtttccgg

SEQ ID NO: 110893 - DNA, 336 bp, Arabidopsis thaliana columbia
  unsure (1)..(336): unsure at all n locations
ggaaaaanggaatntgggggggtatatatgaatttgtggacgagaaacataaanacaaggtttgtgatcagatnttcgacgctatcctcgatgcttgccttgaacaagaccctgagagcaaagttgcttgtgagacttgtaccaagactaacatggtcatggtttttggagaaatcaccaccaaggctaacgttgattacgagcagattgttcgtaaaacatgccgtgagattggattcgtctctgctgacgttggtctagatgctgacaattgcaaggttctggttaacattgagcaacagagtcctgacattgcacaaggtgttcatggtcatt

SEQ ID NO: 110894 - DNA, 239 bp, Arabidopsis thaliana columbia
  unsure (1)..(239): unsure at all n locations
aaaccagaccccccacaaaaaacaacaccgntcccaaaaangancccaccgccgccgaaccgaggaagaaaccncagataaccaaaaacaccggccaggacacatcaaacccgacggagttaattccaagaaaaaactaccaaaatcaaagtctgaaccgacgatcatcgaaaatcaacacccatcgaaacaaccatatctacatctatccacacaatgtcaacaaagcgttgaagaaa

SEQ ID NO: 110895 - DNA, 396 bp, Arabidopsis thaliana columbia
tttttccaaaggcctaagggtttttttgaaaatctttggggactttttttttaaggaggcaatttttggggaaaccactaactggcaggactttaactttggaggtggagggctctgccaccttcgccaatgttaaggcaaagtttcaggccagggaaggctttcctccggatcagcaaagtttatttttggccggtaaccagttggaaaatggccgtcccttggccgtttccacctttaaaaaggatacaccccttaatttggttctccgtttaagaggtggtttgcaatttttggccaggactttgcctggcaggaccattactttggaggtggagggctctgccccttttgccaccgtcaaagcaaagtaccaggccagggagggaatccctc

SEQ ID NO: 110896 - DNA, 237 bp, Arabidopsis thaliana columbia
ctccgggaggggggggtccctcttcaaaaggttcaatttggttgtcattctcagggtattgtgggcggtaccggggggaccaggagacacccaaccgggggcgggccttcacggggaccgacctgggtttttgggcgaacctttaaaataatcttattttcccttaatacaaagccgggggggccgaacctggtccttttcataacctagggctaaccagagattccggcagacttt

SEQ ID NO: 110897 - DNA, 130 bp, Arabidopsis thaliana columbia
agccttccgttttgaggtggtccgttttccaagggaaggagccattttggtggggatgggcctaagtttcaacacagttcctgtggagatgcgtaagaggctggttttacctgaagctgattggccaaaa

SEQ ID NO: 110898 - DNA, 378 bp, Arabidopsis thaliana columbia
cttccgttccggattctccgggttcggcccccgccgtccggggcgttaggggtccattcttaaaccgtgtttttgttcccgttggggtttgggggttcctgggccctgttttttttaactcctttaacattttggccagaaagaaagctatggtggggaatttaggggccttaaaggcattatttcctgcaaaagaagggttgtggtgggttcctttccgtccggaagttcttccattcgtggaacgactaaggcaccagtttcctaaaaggaaggggattgaaaaggcactgcaggcttctgcgaatgtccattctccttttgttccaaaacctgcaaagggtttgcaaagggggcttccttttgggtttaaggtcc

SEQ ID NO: 110899 - DNA, 453 bp, Arabidopsis thaliana columbia
gggggaggcggggtaatttaaggtggaaaggcttttgagccaggcgaagctaagggggttgggaggaaccaccttttttgcggaggggaaggtggaaccaggagactttttaggcggggtccgtaacccaccagggggggggccaggcttggaactggtttaaaataatctttttgggtaccaccttaacttttttttaaaccgcggtggttcggggggggttcttggggtttcccatccacttaagctaaaagggggattggtttttggcggtttcggggtggttattttaatggagtgggtttttaagccgttggggctttttattgtaagttcgagcttaaactgtggggagatattaagctttactacgggccagaggatgttgcttgtttcaaaagtaattgtttttcttttccggttcttctgaaaccggaaaaccaaacttgtttc

SEQ ID NO: 110900 - DNA, 269 bp, Arabidopsis thaliana columbia
aacctccaaacttttttacccataaaccattcttttaaaccgggttacccaaaaaaccgggccattttttaaaaattttaaggaaccctacttaaatgggttcaacgggcggaacccaatttacttcggggcaaggtaccgaccaccaaacttgcctttttgccttgcaacttggccggggtttcggtctttcgatgggtttaaaatcccccttaaagcttgaccctcttgggattttggcccaaaatggtttttccatttttccttcc

SEQ ID NO: 110901 - DNA, 357 bp, Arabidopsis thaliana columbia
cgtccgaaaaaggcctacttttatcctttttccgtttattttgttcgccctaccgcctagggcaactggggcagctcttttcaccggcctgaaaccttcagttcacattccaatctacccgaaggcctaacaccgccattgcttcaatcccaggcaccgccgaaggagttaactgcttccaggggggacctccgctggtaaagaaaacgttggagcctgtttttaaccttcctgacctaaccaattccgaatgggctaagggggttgactccttcacccgtaccaggtggttacctggggtgaaatccagttggagccacggttttgtgttccgggagcacggtacctaacccggtt

SEQ ID NO: 110902 - DNA, 179 bp, Arabidopsis thaliana columbia
  unsure (1)..(179): unsure at all n locations
ccgnattcccgggtcggccccaccctcccgaaaagggaaaaggaaaatccaaatttttggccctttatgacccctattttggggtgggcccctcttttttttttttttcccttcccaaaattgggttccaaggtccttccttttggcctccctggaccatcacaccttaaggggttttc

SEQ ID NO: 110903 - DNA, 219 bp, Arabidopsis thaliana columbia
tccgaaagggaaaaggaaattccaaatttaggtttttctaggaccccaaatgtggggtgggccgcttggtttttttctctttccttacccaaattgggatccaaggtccttccttttggccttcctggaccatcccagcttcaggggttttctgcttccccggctttattgcttgatttcggggccccagggagttaaaagagcaggccttttgggtgg

SEQ ID NO: 110904 - DNA, 242 bp, Arabidopsis thaliana columbia
  unsure (1)..(242): unsure at all n locations
atnccggggcggaccacacccttccgaaatcccaagtctttaccttactctttgtcctttttggatttcaattccccgaagaagcgtttcttatggatatgcttctggacctctgagaagaaagggattggcaaatttgagattccacatttgggtttaagtaagaaccatttctttctgatgaacctaattggcctgttgctgtgggaccagtcccagataatcatcctccctccccctcc

SEQ ID NO: 110905 - DNA, 236 bp, Arabidopsis thaliana columbia
agccgtttaagagctaataattttggggcttcctgcaaatagcttttggctgtggatctttttcctccataaacaaacatgggtaagacacgtggtttgggagctggccgtaggctgaaaagactccgatttaaccagaggtgggctgccaggcagtccaggaagtttaactggggaaaggaggggaagaagcctttggctggttcttttaacgctaaaggaatggttctggagaa

SEQ ID NO: 110906 - DNA, 411 bp, Arabidopsis thaliana columbia
ggggcggacccaggcgtccggttaacccagagtaaagctggaaccttggtcctatatgatgggcgttttgggtggtgccggaaaggcttggtcctccctttaactgaagggcagtttaaagaccgtttgttccgttggcataaagcccatccacgttaaagacggtggcttttttttttaagaaaaagccagttcctgttaagtccaaggttgcttttgagactagcgttaagctcgccaagtggtttggtcctgacaggagaattttctggcctgagggccttttggttagaccaaagatcccagagtccttaaccggggaagtggctgggaatattggttttgacccatttggtcttggaaagaggcctgaaaacttggttaattaccaagcttttgaattgatccatg

SEQ ID NO: 110907 - DNA, 161 bp, Arabidopsis thaliana columbia
cgtccgttcctatatctttcaaatcggttttacctccccttttaaagggcttttattaccggtttggccattttcctaactctttttttggccaccgttggtttttccgccgccggttggttggaggagcacccgttggttatgaaatcccacaccggggt

SEQ ID NO: 110908 - DNA, 188 bp, Arabidopsis thaliana columbia
ttccggggcggaccacagccttccgcataaacaagaaaaggaaaaaaggctttggtcctttggatcgcaaaacaccgggggggggggtttattctccatgggagaggtcccggaaaccggaagtaaaagctccacctttgcgctttaattgagctcactatattgaaggcctcacgccattccaagtt

SEQ ID NO: 110909 - DNA, 245 bp, Arabidopsis thaliana columbia
  unsure (1)..(245): unsure at all n locations
tggaatnccggggcggaccacacccttccgaagttccaaaaaaccgtcctccaatttctataattccgtatccgaaaaaaaattgggaaagggaggggtttttggccatcgtggaaggctttttcattagggaaataacttcctccaggtaattcaaaaggttttttggtccagcaaattaaataaaaacccctttattatttggatttagcctaccttaaaacccattttgtttaataccatct

SEQ ID NO: 110910 - DNA, 450 bp, Arabidopsis thaliana columbia
ttcttaagtctaaacttggtccatccatccaggggaatgggggagggggcaccaatggccaaccaccaagggattcttgagggtggaaattaatagccattcaaattttgcgggggaggggggttccgggggcctttttggtaagccaggcttgaccaaaaccaactgcttttgttaacaaacaattaaccttggttttttccggggtaggattaaccgttctttttcgtggcaccgtcccaggagtttcggggctgcttttttatgggattttcaaccaaagccagcggtttcccttagtcccgttccataaattcatgcttgattccatgacattcccaatgttggtggtaactgtgaattggaccattatatgggggagtaggcttttattttccaccattacccttgattttacgcgttaatcattggcattccaatggtcttatg

SEQ ID NO: 110911 - DNA, 423 bp, Arabidopsis thaliana columbia
tttggatttccgggtcgcgcccacccttccgttggttcactcacaaggggaaccttgggttctcttttattgagccaggggtttcttggcccgctgctcttgccttaggcaaaagggcccctggtcgttgctcttcttacgtaattgctaattgccaggccggccgtccaggttccgaggcttacctggccactaacattctccttttttttaacccataaccagttgaggcttaccggaaatgcgaaaggggtaaaggggggaggatcggatttgcccatagtcctgttgggttcgaaacacatgaccttgttgtttaacaagaacggggcgtccatcgaccgtgcactggactttattttgggatggcttctagacccacctcctttgggggtttttccccagttcatgaaagactttgtt

SEQ ID NO: 110912 - DNA, 285 bp, Arabidopsis thaliana columbia
ggatttccgggtcggacccacccttccgaaaaaggctttaaacctaacccgtaaaatttttttttttccagcccgcccagaaccatcgccatggttggagcccaggaagagggttatcaccccaccccacttaggccggccctggttaagttattctcgactttgatctttgctttggccgcctaaggctccgaaattgcttttaccaggaccactgccaatggaccacccactctttccggccttggggccgttgccttagctaaggctttcggtctttttgtc

SEQ ID NO: 110913 - DNA, 331 bp, Arabidopsis thaliana columbia
attaaacttcccggtcttttttctttgccattttaacccttaaatggccgcccaaacaaccaaaccgatgggggggcccaaccaaaggctttttaacttccgccacaaagttcctttggggaccacattttcctcaaggtttactaatctcaaccgttggaccaggtgggccacccgggtggatgctaatgatgaccaaactggttcaatccgtttaattcgggtaatacacccggccaactataaatttgggtttggacccaaccaatttaacttcggttgtttacttcaaggctcaacctttacctgggttttccttgccctggggctc

SEQ ID NO: 110914 - DNA, 348 bp, Arabidopsis thaliana columbia
aaattccgggtcggacccacccttccgggggagggggggggttccaccccccccactttaggtgttggaggggcctcctccgtggttggaaattcctaacccggaaggggattggagaccgcaccccgcggcggcaaaggttccggagggggagattcatctgtttaaggggggaaaaggcccgaccgatgtgttcaagtcaaatctggccggtattgaccaggtccagctgggggttcgacctattcttgggaaatatggctggaaagcattcttggttttcaacgttgagaaaggtcgggctgttccgatcagatttaaccctaggattggtcggcctgggttgcc

SEQ ID NO: 110915 - DNA, 185 bp, Arabidopsis thaliana columbia
cggggcggccccagccgtccgttgggtcaaaaccaggtcattccgcccttttttgttttaccaaaaggggggtccgtccccaaaagtttccagatttggctggttggttggaacctaccactcccgtggggtgggcgaccatctcttccggatgtttttttgcgtgggcctttgcattaaaggag

SEQ ID NO: 110916 - DNA, 252 bp, Arabidopsis thaliana columbia
gggaattccgggccggaccacacgcgtccgtcaaacaggacggtggcagaagccttttgtgttctctgggcgagaaaccaagagtaaaacctctactgttaatgacggtaagccaagtgatagcccttcagatccagtttttggtccaattattatggggtatgttgttggggttccggaacctgcctttgtacctttaaattgggaacatgcttcaggagatttaaggggcaattgttataaaccccaata

SEQ ID NO: 110917 - DNA, 274 bp, Arabidopsis thaliana columbia
acccttcggccggttttaatcttttaaaattcctttttttgaattggcaaaataggggcggggggttggaccctcctcctttttgggtttgggtaaccgtttttactttacttaagccgaagttggccacccgtggtcgccttcgccgttttttaacggcggcggacctagcagggtggctccaaaggatagaaaggtcaagggggtgttttggggatgtccggtggtgggaaaaggaacttacgctagtagactataaacccttttgggggtt

SEQ ID NO: 110918 - DNA, 225 bp, Arabidopsis thaliana columbia
gccttccgttaatttttaacctccaaccttttaaggtttcaattaccaaggggcttaatcgccggaaaagggcgggggttggtttgggggttggcttggtcaacagattttactatgggagaggcaaagttggtgaataagaagcctttgtttcctaaccttaaccctaatcctttcctccacaggaggggcttaaaaaaagaattcggcaactaaggtgggggg

SEQ ID NO: 110919 - DNA, 374 bp, Arabidopsis thaliana columbia
tccgggtcggccccagccttccggtttttcctggcccggtcattctttctctttcttttgaaattcaagccaccaaaaatttggtccggaagggcttgcaaaggagtaggcttaaacccgaccccatatgccacagacgacccctttttcccaaaacacgccggtttaagttggtaacttaacagccggggagggggggttctggtcggatttttaagttttgtgttaaggagccggccggccgctaggaatttgtcccaacgtttgggagcaggatccgccaaaccgctgcgttttatttcctccaaaagaaatcctactgttggaagaaaaccgtcttggattttgttgcctttttggtcgtcgtttttttt

SEQ ID NO: 110920 - DNA, 122 bp, Arabidopsis thaliana columbia
cttccgggaccgcggggggcctagtccaagaccggttgcgttcgttttagaggacccaggcttacgtccgcgggcttccaacgtaatagtttttttatagggcaacctaaatccaatcaacg

SEQ ID NO: 110921 - DNA, 261 bp, Arabidopsis thaliana columbia
  unsure (1)..(261): unsure at all n locations
gggaatnccggggcggaccacagccgtccgaaggattggaggacctcctcctaagttaatttgggtggttttgatagggaggagaaagctgttggggcttatgaccttgctgaactaaagaccgggggtccttttactaacaccattttttttgcggagatttttcagaaggggatggaggccttgagaaccatgcttggccaggattatgtggaccatttgagaaggaagagcagtggtttctttagggttgcttccatt

SEQ ID NO: 110922 - DNA, 288 bp, Arabidopsis thaliana columbia
acggcgggaatccggcggccacacccgccgagacttttaaggtccggagggacttgatgtcgggcccagaccaccatacacacttaatttttaaaaggggcttttctaagtgtggttcaggcctaaaccatcaaccatggcaatggatgtgtgcaccagcttaagcctctttttttctcctaacttttgtgtgcggctaaatggcgctaagttcaatttccaggccatgccagaggtgggtctaatgcaaaagggggtcttaatgtttaatgttggcgaaaagaaaat

SEQ ID NO: 110923 - DNA, 337 bp, Arabidopsis thaliana columbia
ggaattccggggccgcccacacccgtccgttctttttaatattaatccgtccttttctattctgcaccagcaaaattatcttccggcggaccgaacccctaatgggttcttccgtcctcctttggtcctcttagaatcggggcctctaacttttttttcttcctaataatccttttcggatggattctggaatccatgtatttccccattacccctaaaacccctagttgtcgaatacctttgattactgcagaaaggttataatcgtgttcaatcttttccggtatggaggtttttatttatttggtttggggggagagattccctatccgagtag

SEQ ID NO: 110924 - DNA, 217 bp, Arabidopsis thaliana columbia
cgggtttggatttccgggttggaccacacgcgtccgtttaacagaaggttaggttggttcttaatctttctggaatggggcctgaatttaactctcttcctcttttcctttggtttttcggtaccaataattttttttagaaaccttccaacttaactcggtttagccttcctggcagtttaactggtttttctgatctcctttttgggtggggcct

SEQ ID NO: 110925 - DNA, 442 bp, Arabidopsis thaliana columbia
tggatttccggggcggacccacccttccggaatttcctggagaaaaaggtctggcggtttagttacctgcggttgtggtcctggctgaaggtgcggaaccggtggtgggggtggcaaaaggtcccctgcctggggtttttccggcaggccacccacacctgagactttggtttggggcgtggcaccggcgttgaaaaatcagtccagggcttaaggggagagtaccaccgctgagaacaatgctggcaaggttggacctgactgcaggggtgaccctggcacctgcaggtgagaaaccctttttaaataagcagggataatcaagtctttttatttaattaagttttccaataggtaacccttatatgggagggggttttaaggttgggttcttgggtaataatggcttcaactttttttttaaccctccatggcctttggg

SEQ ID NO: 110926 - DNA, 315 bp, Arabidopsis thaliana columbia
ccttttggatttccgggtccgaccacacccttccgttttttaaatccgggcggcgaaaatgaatttcatcccaagagggccctttcttcccaaaaggaccaggaaggttattttaacagcttcctccaccaggaggcgtgggttattgagctttcctttttcaaccgatcttgtgaggaagtccaatgccagacccatcccattccgtaaggccgccaaggtccaaatcgtccgtggtccttacaagggccttgaaggcaaagtttgttcaggtttcccgccccaaatggttgtttcacatttggggattcacta

SEQ ID NO: 110927 - DNA, 332 bp, Arabidopsis thaliana columbia
tggaattccggggcggaccaacccttccgtaaggttttatatttggaaaaaattttgctccttttcaaaggcctaagggaccgggaggttttgtaaggtgatgaaccaggagcacccccctctgggtaaaatgtggccgtccaagtttcaaaatccagaaaagtgtttgttttgttggtgctaatccggcctttggtaagaggccttacacctggggggggaaggcaatccttagaaggcctactggacctgtaaggatgaggttctttcgtatggtccctgtaagtttaaagaccggtttaagagaggtgccctatgccaatccatggaac

SEQ ID NO: 110928 - DNA, 225 bp, Arabidopsis thaliana columbia
gaaaaccggccgaccaacccttccgaataaacaatttgaagttgagctttgtctatcccagggccccaaaaagggagggaggttccttcataaaaagacctctataaagttaaaaccctttattcgatgtggcctaaccatccgtttggtaggtcttcactcttaaaaaggtcctttttcgtccaatatattcccaattccttcgttttaatgcctaattctttc

SEQ ID NO: 110929 - DNA, 363 bp, Arabidopsis thaliana columbia
gaatcccggggtggcccacacgcgtccgttcctatccttaagggttttaaacccttttttggaacccggatccttaaaacccaagagggttgcaggatttttttattccatgggagtttaagatggcccaaatttccccctttgttggcaggcctttgcccgttgctttgaacgtttactcggggggttttagaagtctgttgaagtcctttatggccaattccccaattccggaatttttgaccatggaaaccggttttggggaagaactaggggcctaagattctgtggctgtgggtcccgttgttcttaacaggaatatttttcttcagaggcattttttgggtttgcaagaagctgttt

SEQ ID NO: 110930 - DNA, 301 bp, Arabidopsis thaliana columbia
  unsure (1)..(301): unsure at all n locations
gaatnccggggcggaccacacgcttccaatctaatataaaattgcaggcggtttatgttgttttggaggaggctgaaaagaagatgggggaggagtattcaagggacgcacctgcttaatttgatgcttaatacaacccatgggttgttgaaggaggggatgtttcctattctgaacctaaggccggggagaccaaattagttttttgcgtggaaccctttgtgaaggaccccacctttaatgattggctataggggaaaggttgaaaatttaatgaccaatattttaatgcattttaatg

SEQ ID NO: 110931 - DNA, 256 bp, Arabidopsis thaliana columbia
gccgccgccccaaagagggggtgtttggtttccatgggcccattggcaatggggttaatggtgggggcaaacatcctggtggccggccctttttcggggggttcattgaaccgggggggttctttgggcccggccgtggccgggggggattccaccaccattgggttctactgggtgggccccttggtgggggggggcttggccggcctggtttaccggtccgtttacatgtgcggggaccacgcccccgtggcca

SEQ ID NO: 110932 - DNA, 272 bp, Arabidopsis thaliana columbia
  unsure (1)..(272): unsure at all n locations
cttccaactggttaaatttcgccgtctttgggggttttattttaaggacccgnaaaggattgtaggggtgggtcctgttcctgggggaagggtttttccacaactttttaaaaaaagctatggaggttccagggttaagttccaaaccaggttttgttaaatacctgttaaacctttttttagaaaacctcctaacctttggtttgaattgttcatttcatggaaagatttcttggggagattgttataccccttacctttttttaattttt

SEQ ID NO: 110933 - DNA, 475 bp, Arabidopsis thaliana columbia
  unsure (1)..(475): unsure at all n locations
ggttgggaatnccggggcggcccacacccttccggaaggacctaactccgtccctggcttaagtgttgctggctttgcggttaaggggatggggttggtgtaaatgggttttggcctaggaaatagtacctggccgccattaacgagggggggggctggggttaccacctggggattttaagctgattggatggctgttaaggctgtttgggccctccagatttctgaaattgctgttgggaccccctttgggtccattgggatgttccggggttgccagaggccacaactggccctaattcggttttaaaataaaccatttgcctcttgcttgcttgggtggaaatgctttgttttttcttttggacgttggaccttatactcggttttggtccgttgtattattaaagacccatttggggtgtgtttaatattccatgttgaagttttttaatacgtgtttgtggcttttctt

SEQ ID NO: 110934 - DNA, 357 bp, Arabidopsis thaliana columbia
  unsure (1)..(357): unsure at all n locations
tggaannccgggccggaccacacccttccgaaaagctttttcggcctgaaatgtttttctgattcggggaatctagggttccgggggagggttattggttggaggaggccatgccgtaggtttaccttacaggggggtaactgtccacactcccaagacttggcccaccgtacccgtaaaaggcttgtcccccgttttggggttctggattctgaccaggccaaaccaggatgtccctgtattaatggaatggaggcccccttggtatggtcatggtaaccacggtcacggatatactaattagtgttaacttaacctttgaggttcatgccgaaaaaaggttctccttttgttttt

SEQ ID NO: 110935 - DNA, 416 bp, Arabidopsis thaliana columbia
cgaagtaccaactaaggttttggtcggggaagggccagggaacccattcgatgaaccaggggaggctcaagttgaaactccgggggttggggggatcaagaaagatgaaaaagctccggttgaaactccggtggttgggggggttgaaagcaaaccaaaggaagttttttaggccaaaaaaggggaagaattttatgaaaagaagccaggggaagctccattggttttgggggaagagaaaaacccataggcctagggggtgaaacccgccggggaagcctccgtgccagctccattggaaaaggctgtttagttaatttgaagaaaaaaactgttttttgaaagacaaaagaagaagaaattgttggcaggtaatttttttgctactttaaagcctttggggcttgttttgtttt

SEQ ID NO: 110936 - DNA, 384 bp, Arabidopsis thaliana columbia
tccgggttggccccacccgtccggttaaggggggtgaaaaatgggcaccggccccgtttttttcacccaaatcgtttccaaaggccactgtttccaaatccggagctggggtttctgtccagaccgccattgccgtaaatggcggcaattccggccggggatggaagttggcgaacctggcctaagcggctggatggtcccagttcgacccagccttcaccgaagccccgtttggccaatccgggcctattagcttggaaagggaagattccaggtttggttattacgatggacctcatccttactatgaaggagaggtccaaaggggaccattttggggagcaattgctgttgacattgctgctggggaccaaactaatgggt

SEQ ID NO: 110937 - DNA, 368 bp, Arabidopsis thaliana columbia
gatttccgggtcggccccaggcgtcggttttttggttaacatcggaatccttcaccttgggccttccggccaggcttggtgatcagatctccgccgctttcctggtggctggcctggaccaggaccctgggggcaaagtggctggggggactggtcccaagactaacatggtcatggttttgggggaaataaccaccaaggttaacgttgtttccaggcagatggttcgtaaaacatgccgggggatgggattcgcttttgctgacgttggtttagatgctgccattggcagggttttggttaccatggagcaccaaagtcctgccattgaccaaggggtcaatggtcttttaaccaagaagccagag

SEQ ID NO: 110938 - DNA, 448 bp, Arabidopsis thaliana columbia
gggtcgggatttccggggcggccccaggcgtccggccgtggatggcggcttctcttacctttaattcgtttggcagaaccaaaggccctattcttttttggacccacctttttccttggtggaaaaacctaaactttgggcccagagctatgggaattggccgcattggcagtttggcggggtttttaaaacaaaacggcctgggatggaggaggcttccgcttatgggtgatggtaggtttttggtgtcgttgtcgaagaggagcaaccgtaggagacggtcttggttccggtccttccttaagacaggccaacaaggtttttccaggctgtgggacctttgaacgaagcagtttttcttaaggttccaggggccttacagagtttggatggagtttccatttataaggttcaggttttttgaaggtgttgccgctgttgagctttt

SEQ ID NO: 110939 - DNA, 245 bp, Arabidopsis thaliana columbia
gccccctcatttgggtctttggttttggccacccccggccaggccaatggcttatttttattggcttacaggcccccaggcttaaccgaggcttaattcctttcttaaaccatccttatgaattttctctgctcattccatttcctatggccggggtccttttcttttttatgggacaatttctatcggatggccaatggcctgttttatgatttgggattttttttaaaaagaagaaaaatatt

SEQ ID NO: 110940 - DNA, 419 bp, Arabidopsis thaliana columbia
attccgggtggaccaggcgtccgggaaaaaccaagaaccgggaggatgaggttttggcggaccagctaactgtggaacagatctttgattttaaggaagcttttagccttttcgccaaagatggagttggtggcttaaccacaaaggagctgggaccagggttgcggccattagggcagaacccaccagaagctgagctccaggacatgttcaacggggttgccgctgttggaaacggacccattgccttccttgggttcttaaacctatgggctaaaaggatgaaggccccagcctcggaggaggagctgaaggaagcttcaagggggttcgacaaagaccagaccggtttattatccgttgcaaagcttggccatgtgttgacgattctaggggagaaactgactgttgaaaaggtc

SEQ ID NO: 110941 - DNA, 239 bp, Arabidopsis thaliana columbia
  unsure (1)..(239): unsure at all n locations
ggannnccggggcggaccacaggcgtccgttgagcggccccagaggtagtgttttctttttttttttaataggatttgttttaggggttgtaattgggaatttcattggggtattggcttcgctatgatgctataggagggccttaacaatttccaaccttgggaaactttttgtgctcaatactggcgggggaatttaacgaaatcaggtttggttaatggagatacctccggacctt

SEQ ID NO: 110942 - DNA, 217 bp, Arabidopsis thaliana columbia
acccttggccacctaaaaatcttcccagttgggggaaggtggccaaaatagacctggcttttgccgcattcctatatttttaaaatggatggtgggggggttggggaaaagggcggcttttttaggcaaatcctgccggaacctgagttttccaagctggagtaacggacctgggagggtttcgccggaacctggaaaaccatggaatctttcctct

SEQ ID NO: 110943 - DNA, 307 bp, Arabidopsis thaliana columbia
ggaggaggggttccttcttaagatgttacatttagaagttcatctccaggtaatgttggcgggaacagtgtgatcaagagacagccaatcaggggcgagccatcacggtgaacgatctgagtcttttgtcgaatctgctagattatcttctttatccttcatacaaagccagtgaggacgaaacttgatcatataatttcctaaagctaaccagagaattccgcagacttttttgtcaaggtttgatttactaaagatcatagtttcttacaaggttttttttttattactttatatttctattttt

SEQ ID NO: 110944 - DNA, 354 bp, Arabidopsis thaliana columbia
tatacacaaaaaaagataaaaaggtctttgcccctattgaacgcataacaacaatggaggcgcggtatccctctttgtagacttggccaaaactaaattcaaagctctacctatcctccttacttcaacttaacaacatcaaaaccttacgacattcccagcttatattctagtattcttcgtctcaaggaattaaaatatacaagttttttcaattaattatactttttttataatccttatttattcacacggctaatcttaaattttctcttatacatcttcttccttatgttcatctcatcttattttatactaatactctcttacatatattatattattctactatcc

SEQ ID NO: 110945 - DNA, 362 bp, Arabidopsis thaliana columbia
accaaaaccaagggcgagcaccaccacaagcatcttcacctccgccacaaagctactatggagaccatctcttcctacaggactacttatctccaccgctcgaacagcttggacaaccgagtggcagatcatgatgacccaactcgctccataccattcatccgggtcatacacccgacccacttcaaaatttcgtctcgacccgacccaattcacttccgctgcttactccgagctccacctctacgttggtcttccttgcccttgggctcaccgcaccctaattgtccgtgctctcaagggtttaaacgacgccgttccggactcaatcgcatcacctggtcaagatggatcatgggaat

SEQ ID NO: 110946 - DNA, 407 bp, Arabidopsis thaliana columbia
ggggggcgttcgctctttttcatcatcaatctatcaaatcaattttcaacagcaaaattatctttctgcagatgttaaccctaattggtgtctggggtctccttatgttcttctagaatcggcgactcttacttttttttctttctaattatccttttctgatggattctggaatccatgtaattccccattagcgctaaaaaccctagctgtcgaagaccttagattactgcagaaatgttataatctgttttcatcttttcccgatttgaggtttttatttattttggttgggtgagagaatccgtatctagagattaaagccttgtgtagttaggatgagctagttttctttggctttgagctgtattttctcttttctgtaatcctttctctgtacatatatt

SEQ ID NO: 110947 - DNA, 313 bp, Arabidopsis thaliana columbia
aagacttttaatgatcggaaggaacaagatgattaggtcccacgaaccaccatacacactgcgagttttaaataagagcttggggtcagttgttgctcatagacttaaccaatcaaccatgtctaagatgatgatgttgcaacagtatcagccttttttttctctccttacttcttttatgtttgacttcaatggcgctaatctccatttacatgttcagtacaagaggaagtgttctttattcaaaattgcgctctctatgttttcattttctttgcttaaattaatatttctttttattactttgtttctt

SEQ ID NO: 110948 - DNA, 199 bp, Arabidopsis thaliana columbia
tctttttcatcatcaatctatcaaaacattctttaacagcaaaattatcctcctgtaaaacccatctcttatatttgtcggcgggcttcatcacacatttacaatccgcaactcctacttttgtttcttactaactaaccttttcttatggattctgtaatccattcctctcacaagaagggctttaaaaaccaattct

SEQ ID NO: 110949 - DNA, 453 bp, Arabidopsis thaliana columbia
gtttctcctcgccctgactctctctatctcttcaccgaaattgcagacaacaaaaaatatgggacgaatagcatgcaaaagagtaagctttaacccgaacccagaagccacagacgaacccatattcccaaaacacgacggtttaagctcgtcacatcacagccggagaagggtggttctcgtcggaattctcagttttggtctaaggagctcgccggccgcgaggaaattgatccaacgtattggagcaagattcgccaaaacgctgcgttttatttccttcagaagaaatactactgatagaagaaaaacgtcatcgtttttgttgccttcgtcgtcgtcgtcttcttcttcgtcagctatttatatgaagaggtcaaagtctgttaactagacagagtcttatcgagcataagctattgaagattgcattgagttcttgaacccttcttt

SEQ ID NO: 110950 - DNA, 504 bp, Arabidopsis thaliana columbia
  unsure (1)..(504): unsure at all n locations
ccgtttcactagaaaggtnntatgtttggttcctaaatacatttnctcgtatcgtggttnctgaatttcacgtcgtccgtcctctctttctccctctgtgtcttgtcgtacccccaatcatttncttcttagaaacccctccaactttcactttcggtttagcccttctctcgctagtctcactttcgtctctctnngatctcctctttcggtaggtgccctcttcgcacccaatcttcgatcanntgtttcatcgcgccggataacccgcttcatgggtttctctcactgacccgggtcagtttatttggcagttttaatggttgtttagtagaagagaaacccagagtctttctttggctgatatncgactcgaggaccctagagagggcttaaagctttgtgttagaggtagaatgtggtgtttttcgtggcgatgattccgttacagataatggttctagtgctggcttgtttgttacattggtattgggttagagagtt

SEQ ID NO: 110951 - DNA, 373 bp, Arabidopsis thaliana columbia
taatgatttatatttgttaaataactctttttctcttcaatgactaatgaaactttaagtggcggatttagaagaaacagggggcacacactctgtgtcagatttggccgttgcattttccacatccataagagtctttgttctgcttgtgcttatcctgtcgctctcatgagttcttacaactgtagtttgaagtcaatccgttgtaatacatactgtaactgtatatgttaggtatcttaccattgttcctcttatgttcaagactcttttcagataggttttcctatcctatccaagtaacaaggtagtcgctttattatcttaaacttttttttgtcatcaaatcatagtgaattcttttctattattt

SEQ ID NO: 110952 - DNA, 440 bp, Arabidopsis thaliana columbia
gtagctatctaatataacattgcaggcgcattttgcggcttacgacgaggctgatcagaagcgggtgcttgtaccacaggcggagccgctcgctacatcagagagcatagagagcttaaagcaaacactaaggaagctacgcggtctaagcgcacgtgatctcgtaaaccacccgaatttcgatgcgattatagcagccggtacacgttacgaggtactcagctcagcttctattggttacatctctttgctagccaaatacaaaaccgtcattaaagaaggactcgaggcttctcagagagtccagattgctcaaacccgagccaaactgctaaaagaaaccgtaatggagaagcagagaaccgtagactcggttttcgcagcagcaaagaccactgctcaaagaggagacgcgttgcacatcagaatcgtagcgatca

SEQ ID NO: 110953 - DNA, 447 bp, Arabidopsis thaliana columbia
cgcgtccggccaccgccgccgaccccaataaggggtctttttttaccatcgcgcccatcgccatcggggtgatggttttcgccaacatccggggcgccggccccttctccggcggctccatgaacccggcgcgctccttcggccccgccgtcgccagcggcgactacaccaacatctggatctactgggtcggccccctcgtcggcggcggcctcgccggcctcgtctaccggtacgtctacatgtgcggcgaccacgcccccgttgccagcagcgagttctaattacccatttcgccatcggcaacacgcataaaaatggtggtcactccatcgtcagaatcttgtgaggatgtgttgtgaaggactgatttggttcagatggggaagaaggcttttgttgcgaggatgtgacacttgggtgatgatcgatccatgtttagtttct

SEQ ID NO: 110954 - DNA, 332 bp, Arabidopsis thaliana columbia
cccacgcgtcgagaattagcgcctgtaaaaaacactatagattggtcgggagagacagaaaggcaatcgaagaaacagaggagctcagttgaaactccggaggttggggatcaagaagatgaaaagctcggtgaactccggggtgtgaggatgagagaaacagagaagtgtgaggcaagaagaggagagtaaagaaagaaacagagagctcagtggtgtggggagagaaaagcagagcagggaggagaaacccgcgggagccttcggcagctcagggagaagctgtgagtaatggaagaaaaaaactgttttgaagacaaagagaagaaatg

SEQ ID NO: 110955 - DNA, 291 bp, Arabidopsis thaliana columbia
accggaattgaaagaccgggccgacccacgcgttcgcttaacctccacctactatatcttcacttttttctacttctaccacttcttctacgtgtgggactttttatactcattggtggtcttctaaccaattattcttatctacgaccttcaccatcttctacctttcgaaactctattttcttcatactttcccgagaaattaacgaaatcatactgtgttaattgagactcctcctgaacataatatgctttgtgatttatcaagagaggcttctccaaaagatgaat

SEQ ID NO: 110956 - DNA, 413 bp, Arabidopsis thaliana columbia
caaagggcaggttccagcaaatgggaccccaaccaaagagatggagtttccaggccaggtccttaggttcgaagacaacttcgatgctcctagcattctaaatgtcttggccactcctcccgccaggaagtccataactgtttccggtcttcccgaaaagttcctttttcaggttaattacctcctagggaaccaggcttacttcggggagactgcctttaaggaaggctttgccaccattgcatgggcaccagcaaccattctggagtcatcatttaaggaagtgggggggaaaccctacttttacttgcctgggtggccaagaacggctgttggagacaaaggtgggaagcttcagctgttcccagcacccgggaatggagggaagctttacatttgcaaagcccaagctg

SEQ ID NO: 110957 - DNA, 341 bp, Arabidopsis thaliana columbia
tttccggggcggccccagccgtccgtaaaacccaaatctaataactccttttaattttttttaataagggcctaagtaacctaagccacggttgcattccattttttaaccggccttaaggcctaaaccatcaattattccgccacggtcggaatccaaactgcggctgtggcttaaccgaagcttccagggaagtcttttttaaggaactttggagccggggccgtagcggttggagtttaattggcttgggccggaaacgccatggcattagaagtcttttgggggggaggggatgggccgttggctttatttccaaccgcctttctttttgctaagtg

SEQ ID NO: 110958 - DNA, 424 bp, Arabidopsis thaliana columbia
tccggatccgcagttccggcccagccgtccgggatgatgaacctcaaagggtttgcagaccgattgtcacagccttcacgggctgttttaatatcctgcaaggttaagggaatccaattcgataaggccttgatttcctgggcgaaccgtcaccatttttctcctgaatccaaagattttaacccattggggaaggttccagcttttgttgatggcaggcttaagctctttgaagagaacccattcctgttttttttttcctcggggtttccaagggtggctgaccatgggtttccaaatgacctttccaaaaaagccaagattcactcagttttggatgggcttaccaccaatttacgtcggggggcacctggatttgtcctgaatagggtcctaggcccagctctcggccttcctttgaatc

SEQ ID NO: 110959 - DNA, 392 bp, Arabidopsis thaliana columbia
cttggtacacctccacaaatggtccaccacctcctcttaaacccccaaaaaccccgaattggcctaggaaggctcctgccgggaaacccactggtcctaccgccccacttaagctgggggttggcgcagacttatggggcctagttaacgtggtggtgggttctccaccaaagactcctggtggtccacttcttaaaggcctggctaatctggaagctgcggttggcctctgcaccgttcttaaagccaaggcctgggggattaatctcaaggttcctatggacctaacctggctgtggaactatgggggcaggaaagttcctaagggttcccaaggttctggaagattggggactttaaaagagaaaaatcccttgggttggctaggtttt

SEQ ID NO: 110960 - DNA, 374 bp, Arabidopsis thaliana columbia
  unsure (1)..(374): unsure at all n locations
gaatnncgggttggccccaggcgtccgttcttttttttaaggttggaaaaccaaaaatttctatttggtcggaaaaatcctgggggaaccggaggaaccttaaaaaaatgggggccattgagctttaaaccaacatggttggatgtggctggacttgcccaataagtggaataattggggattaacggaccgccgttttggcctgggaactaaccggtgccgtacctattcgtgggtttggcggcgatgttaggcctaatagcctcggttttacttatcctagccggtttttactggggctggttaacctccggggttaactccggcaaaggagtcgtcagggaaaaaaaaagccgtcctggagggaaggcggt

SEQ ID NO: 110961 - DNA, 401 bp, Arabidopsis thaliana columbia
gatttccgggttcgccccacccgtccgtccaacgaacccaaagaccttttttaaaagcttccaccaggtttttccgaccactcattctttgtccattcctacttttcctagcgatttaataacaggtttttaaatctttccacttcgaatggcattctggccgaccaaatggtttttgggaggccttaaaaggcattccattgcccgccgggaggtccaccgtcgttaaccctaacgaagctaatccttttcctaattctaacaggacctccatcagagggccttcgggttccgggaccccgtttcttcacccggaggatgtagattcgggccatttcgggttcacggcgggggggtcgggagattccatggctggttccacagctgtggttcttaaacct

SEQ ID NO: 110962 - DNA, 473 bp, Arabidopsis thaliana columbia
gggcccggatttccggggtggaccacacccgtccggtggaacctttaaaccgggggggggggaaggaattggcgccttcgggaccgtccgtgacggaggttccgttgaaaggatcggcggaaaaccactccaggagctggaggagcgggacccatgttttcgttgacgccattggccaccacttccaaaaggtcgtggttaacaaaggcaaacatgactctaacgggtctttcaggagtggggcctccccatttgttggaaggaaggggttgtccaaggagaagaggaagattgtggttgagattaaaccattgccgaaaggaggactggttggtcacgtgttggaccttctaaaagattttgatataatctacaaatttattcccaattctgaggttagctgcgtctgcaaattcactttgttttggaagaggcgcaccgttgcctttcccgaaccaagcggttccttgaat

SEQ ID NO: 110963 - DNA, 460 bp, Arabidopsis thaliana columbia
cgggtcgggatttccggggcggaccacacgcgtccaagaagaagtaagggcttcctttatgttttcttttgccgttggggttacctccccggttaaagccaccatggtggttcaattaactggttggaagcaatccgtttttttccgggtaacccgaaaggccaacaacacctttacttccataacaggcattgggggaggagttagctgcttgaaggtggggccaccaatcggaaggaaaaagttggggactttattttacctccctgaccttactgacgtggaatgggctaaggaagttgactaccttctccgaaccaaagggattcctggggtggaattcgagtgggagcacggttttgggtcccgggagcccggaaccactcccggttcctacattggacggtcctggccaatggggaagcttccattgttcggatgcaccgactccgttcaaggg

SEQ ID NO: 110964 - DNA, 333 bp, Arabidopsis thaliana columbia
tttggcacattggctgttggggtagaacctgctcctggaagaagtaaaggccaaaccagctttttaagaaaccacctggctttagcgtgaagaggggtccaatggagctccccaatcttttggtcgccttaacttactcaacctggggttttggaggggggggaaggatgttccattggggttttgaagaagaggaggaggggttttgaatctcattttaaatttgggtggcaaaaaggcagggggcttcggaaactttatttgtctttgcttgaaggggccaggggtcctactgttagtcctcctcatggtaatcccaaggaggatgttgtt

SEQ ID NO: 110965 - DNA, 227 bp, Arabidopsis thaliana columbia
ttccaaaaaataccaacacctctaaccaaatttttttgttttaacccgaaacatacattggagaaaggatcatttaccttatgcggagttctaaccccaccatcatcctttgtccaaactaaaaccctatactttaacccctttatttttatttatattctctaattcccaatttccactattgaaaataatctcttaatttttacccttcatttcaaattcctaat

SEQ ID NO: 110966 - DNA, 435 bp, Arabidopsis thaliana columbia
gttcgccccacccttccggagaaccctattttcaaatgggggccgaaattggaaagatggaggaggaggaggcgcgaccttcaaccgaagagaccaagattgtgcgaccttcaaccgagaagaacaagtttgtgcgatcttccaccgaacctggtagggaagaaaatcctaacaaggattccgttaccatctttgaaagcggggcgatccacttgcaaattttggaacgctttaaccaaaaatcggtttctgggtaaagcaccggcccattttttggggtttttgacaatggatccaaaggcctgtccagttagattccatctccgccgcaccaggggggaaaaagaagccccgttggttctttctttaaagcaggtggattggcttaatcaagccaggatatctaagagggttcactgcaacggcttgttgttt

SEQ ID NO: 110967 - DNA, 220 bp, Arabidopsis thaliana columbia
  unsure (1)..(220): unsure at all n locations
taattcctttctcaatcttctggctctggttttcttccagaagctttggtggccagcaattcattggtccgtcccgtccatgggcggccttgaagttgaccaggttggccgtggcggccctgttcctggtcgccgtggtgggggcggccntntcnattntttattntcaaattttatttttggttttttttctatatttttattttctttttcacttttt

SEQ ID NO: 110968 - DNA, 426 bp, Arabidopsis thaliana columbia
aaccaataaaaggttcaccttatccaagaggttccttcagtggtggtcctcaaaaaggtggtttagccggtaaccaagtggagggaaataaatccaccccaaaaatgtttatggtaacttacacggcggagcttattaatccagttccaccacaccgtattttttttgccggaggaacacgtaagaaaccttccgttcaacagacgagtaattttccgccgaccacttttggttacttattaatcggttccggggacttaagccgacaaatttgttttgcctgttgaggtccttctaccggggggggattttgtcggatataaaattctttttttttttgtcggtatttttggttagtcttttatttctttatatggtattgggttttggttatccttaatttttcatcctgtattttcatttttt

SEQ ID NO: 110969 - DNA, 331 bp, Arabidopsis thaliana columbia
cgtccggtcagatcaaattcagaatcagaatcaatttttttttttggtcggagtaaataaagccttggtttcgggacccaaatggaaaaaaggggccgttggaagaaaaattgggggaggtcctaagaagaaaccgttttcccgttgggttaaatccggcctccagtttcttgtcggtaggaccggtcggttttttaagaaaggtcgtttttcgaagcgggtcggaaccggggctccggttttttttgccgccgtcctgaagttttttgctgctgaggttttttagctttctgttaaccttgcatgggtttacaaaatgaaccgttttttc

SEQ ID NO: 110970 - DNA, 416 bp, Arabidopsis thaliana columbia
gggtcgggatttccggggtggccccacccgtccaagcttttttttgtttatggccacgttggtttttgaggcgactttgttttgtttcgccaccgccgagtggttgcaaaacggggattcctttccgtttaggttccaggcccaaccggaggctgttatttttttttgcggggccaaaacccagccgattccggggattccgggggggtttttgccattggctggcaaaggagttggggtttggactactcctacctttgatcttggcaaatttttggcctgtttgcacggccttgatgggggaggggggaccaacttaaccgcagttatccaaatcgcccagttggcttttaagcttcgccaaaccaagattcaacgccaaaggattttggttttggctggaagtccattcaagt

SEQ ID NO: 110971 - DNA, 313 bp, Arabidopsis thaliana columbia
gggaattccggggcggccccacccgtccgttacccccaagaccccttatgggtttttcctttcccgatccgtccaatctgctggccagggatgtttgttgctctacgcgtggtttaattttgccggttccaccagcgtccaggaggaagatttgaagcagttccgtcattggggaagcagagatcccggtcatcctttgaatttcgggacccctgaatttgaagtaattactggcccttttgaccaagaaatcgttaatgctgtgggtttagcccttgctgaaaagcttggcctgctaaattaaacaaacctg

SEQ ID NO: 110972 - DNA, 442 bp, Arabidopsis thaliana columbia
atgagctggaaaccaccgccgtccaaatcctaggccagccccgccatgtcctatcctttcttggcttaactaccaggtttgggaagaagtttcaaaggggggaggagatgaagttaaaatcctctgtttttaaggaaaatctggatttaatcagacccactattaaaaaaggcttttcctttaaacttttttttaatcagttggctgcctggccttggcaggagtttcaaagatccaagctgggacctgctcaaaactgtcctgctcctttaaagggtggccccaaaaccactgaacctccagttccagccccaaaaaatgggaaggaagatggttttgttagccctgtgaaagaccagggccattggggttctggttggccatttagcccacctggagcttttgaagcagcttaccatcaagcttttggaaaaggaatttt

SEQ ID NO: 110973 - DNA, 349 bp, Arabidopsis thaliana columbia
gggcggaccaagccttccgaccaccaaacttaccacctcctcctttgtttatgggattataaattggcctgtgggcagagagtttatatccttgccggctgggtaaccttttcctaggaataaagtccttgttgtttccttctttgtttgcaccaatattcctttccagtaggtttttaaccttcacctttttggtttacctccaaattccataaacttttttcaagctttaccacctgaattgcctttttttttttccaactccacaatttcccagctttatggttttttttaggcaccacctttagaaggtccataattttattcctcctgcttgtgaaaccaaaaa

SEQ ID NO: 110974 - DNA, 427 bp, Arabidopsis thaliana columbia
gggtctggatttccgggtccgaccacacccgtccggggttatcctgggcaactctgaaaggagggctttcctaaaggaataaaccaagtcggcgggggccaaggttgcctatgcactggctaaaggttggaaaggaatggctggggtgggggaaactctggaggagcgggaagctggtccgcccttggttgttggggttgcccaaaccaaggttttggccgtccggtggccaaacgggccaaaggtggcattagcctatgacccagggtgggccattggacccggaaaggccgttggcccaccccaagctcaaaaagtccacaatgagctgaggaaatggctggccaaaaacgtaagggctgttgtcgttgttccaacccgaataatttatggaggatcctccaatgggggtaactgcaaggagcta

SEQ ID NO: 110975 - DNA, 391 bp, Arabidopsis thaliana columbia
gggtcgggaattccggggcggaccaacccttccgcaaaaccgtccaaagtccttaggaccttttttggagaatccaccgccctacctaacgggggaataccccggaaactacggttgggccaccgttggactttgggttgacccggaaccattcgttaaaaaccgggggctggaagtaatcaacagcaaatgggctttgtggggggctctgggatgcacattccttaagattttttccaagaacggggttaaatccggagaacccgggtggttaagaggcaggttctaaaattttttaaaaaggaggtcttgattacctggaaaaccctaactggatccacgcgcaaagatttttacccatctgggctgtcaaagttgggctaatggggtt

SEQ ID NO: 110976 - DNA, 456 bp, Arabidopsis thaliana columbia
cccgttccggatttccggggccgccccacccgtccgcggccccggggggaaaaattggtttttggatgcgattcaccaccaccagccgggtccgggaaaaaaaaagattggaccggctaacctgggccgcttccaggtttttcggggagggcctggccatgggcagccgtccctggttccctgccccctggttgggttttggggaggatggcttccttagcattcctggtttctccggggttggggtggcaaatcctggctggggctctgtccattaccggggggccaaggctaagggttttatggtttgggctcctcccaaggcctttgctctttttggggggtccagccagtcctttttttttcaccgggtcagttattagtgggtccattgcacccaagttcttgcctggggcttcaccagttggaagcgtcccgttcccttcgtttctaaac

SEQ ID NO: 110977 - DNA, 445 bp, Arabidopsis thaliana columbia
cgtccgttcagggttcccaccagcaccagatccggagtcccttagtcctcccccatatccgtttccgaggggcttattttccggtttggcgtttttgcccttaatgtccttaaacaaacttttaaaacctttcgagtaaccgtccattgcagcggccaaaggctggctcccattggcgtatttttgcgctttcttagactcccatgtattaagagaatcttgcttccatcttggttttgaaggtccaggttcctccaaagggttggaaaccactgaagtttagtagttgagcccaccgaattcggtggaagcttccagtttggctttctgctcagttgtaaatttaggcaatctttgtccaccaatgcctttcatgacctggggttaatctccaaatgtagtggggcctagatgccatcccaaattaaagtcaagtgcccggtcg

SEQ ID NO: 110978 - DNA, 391 bp, Arabidopsis thaliana columbia
gcttaaccatattacttttataatccacagtgttttcgggggccggccaccattccggcgggaaaggcgttgttcaaacttgtcccggtaccatttgttgcagtcagtccggttcctgtggtcccaccggggactactgttttccgaccaacaactgtaaaagcaattgttggggaagggggcctagcggcccaggggggagcgcgtctaacgtcccccccacctaccttttttttattccggcccaaattaatggggttttgaaagccggaagtgctttttgctccacttggattgctgttaagccgtccccttggcggaccaggtttggttggaccgctttttgcgggccggcaggacctcttgtacaagctttttgcggcaggggttt

SEQ ID NO: 110979 - DNA, 458 bp, Arabidopsis thaliana columbia
gaagccggggccgccccacccttccgattaatactcctgcccctgattttttttctttttcaaaaagccaccttcaaggccggactgtgtttaatatccaaaggaggggaatttgaaaaatttgtcccgaaccctttattaaaggaaatggctgaccaattcgccagtaaaaatctagtaccctttgttccaattttttcgtgtattttaacccaaaaaaaaattcttggaggtgagggtccaggatttttccaaccttctggttcatctgcaggaaaatctggttctcctccaaagtcaaaccttggtattggttgccaggaaaagctttgtaaaaaacatccttcatggtcccaaataggttttgatgcacctactaaagctttggaggatgaccatttgttaaccttaattatcccattccaaggaccatggaacttttcatttttttaagcaat

SEQ ID NO: 110980 - DNA, 298 bp, Arabidopsis thaliana columbia
  unsure (1)..(298): unsure at all n locations
caaccctcccgnttaatcctaatccccttttaagtttttttttttatacaagaccccaaaaaggaaggaagatttttttacattaaaagccgccacctcagtccttccctccaagctatgtaatcaaacctccacccctatcctcattgcttgcctttaacaaaaccctgtaatcaaataatcatgttaagacattttccaaacctaccttgtctatgttatttcgaaaatattcctcaccaattctacaatcttatacattatatattgtctcttaaacaatcccttataaattgat

SEQ ID NO: 110981 - DNA, 464 bp, Arabidopsis thaliana columbia
  unsure (1)..(464): unsure at all n locations
gggaatnccggggcgcgcccacagcgcgtcgcgttcctttcctttaatggtggttacacgaaatgtttcctttatgggcaccttcagttttccagcattcctccttggccggccaaacggttttaaagccctccaacgaactcctccgcagggtgggggtttccgggggtggccgggtgcccttccgtggtcccgccaggtttactcctaaaagcttctggtccggcccaacccgtcccaagtccttaggaccatcctgggggattccaccgtcctacctaaccggggattcccccggggcctccggttgggccaccgttggactttcggttgaccgggagccattcgttaagaaccgggggctggaagtattccacagcagatgggctttgtggggggctttcggatgcccattccctgggattttttccaggaacggggttaattccggagaagccgtgtgg

SEQ ID NO: 110982 - DNA, 432 bp, Arabidopsis thaliana columbia
  unsure (1)..(432): unsure at all n locations
ggaatnccggggccgacccacccttccaaaaaacccggccttgtgaccaggcctttctttatcttgtcagtcccaaaaagtaggggcgggtcagtttttgacctcggggcgcctgtttaacccggtggtccattctttaaagctgttttcgccaaacctttcccaaccaaagttgggggtcctccatttccttccggtggcctacctgtaccagatacctcaacccaaccaggaaactttcaattgcctttaaagaataattttaccatccacccattgtaaccaacaaaaccttcagttaaagccaaaaattctgttaaaaaaatctccaccgtaaagtcttttatctccaaaaaagcttgtccctatttccaaaacaatccccttttaaaacctttttacctcctttccaacctaatcaccgttttttcc

SEQ ID NO: 110983 - DNA, 427 bp, Arabidopsis thaliana columbia
gaattccggggccgcccacacccttccgccaaccctaattcccccaaattgggttttcttttttcgccaatttcctccccaacggaggaaatccatttatgcctctataccggaaaaaaacctttaaaccagtaatggctttgctaaaccccaaaaaccggattcaggacccctatgtggccccaattttaaacccgtttctcttagtcccagaaatcgttgaaccaatcttaaaccccttttttcttataaccggtaccaaaaaccgtgtttgggtaagaatctttgttgctgaccataagttcctaccaaaaattggtcctcattttgaccctccacctggtaaaacaatttcttttgacccaaaaccaagatttgttgttcctcaaaacaaacctggcctccatccaattgtttgtttaacccc

SEQ ID NO: 110984 - DNA, 386 bp, Arabidopsis thaliana columbia
ttcaaatctttttgggtttcgacgaatccgtctatttccccggattcggggccgggtatttttagcggatggggaagaagagaaattcaccagccccaggcctcgatggggtggtccggcctgtttaccctttttttcgaaccgccgttaactttttatttaagctttatcctcagcctttgaatcatcagaggttttcttttcaagccggggaacgccatggttgggaaaaactgtcccatgggttttggggccaccaggagggggggtcaggagggccccctttggtttttgccaattttttccaaaacaagctcgaatgctgcttaaacaagcctccattttccccaagagcgccccccccgcacccaacattgcttgttacg

SEQ ID NO: 110985 - DNA, 419 bp, Arabidopsis thaliana columbia
gcggcccacacccttccgaaaaaaaaatataaaaaaaaaaaaaaaaaattttttttaaaaaaaaaaaaaaaaaaaaaaaaaaaaaagaaataataaaaaaaaaaaaaaaaaaaaaaaaaaaaaaatgggggcgccccttttaaaaaaccaaaattaacttcccctgcattccaacttatttcttttttttttttgcccccaaatttaattcacctgcccccgtttttaaaacccggtaatgggaaaaacctggggttccccaaattaaatgccttgaaaaaaaatcccctttttccaggtgggctaaataccaaaaaggccccacccattggcctttccaaaaattgcccaaccctaatgggaaaatgaacccccccttttatcgccccttaaaacccgtggtttttggtgtttccccc

SEQ ID NO: 110986 - DNA, 376 bp, Arabidopsis thaliana columbia
ggccgacccagccttccttaggaagtttttccagactgtttttccccttttttcttaaaacccggatcaacctgaaaggcgggagccttttctttcataagggcaggattctccattaaggccggtgcctccttcggatccaaaacccttcaacctgggcctgatttaatgggacctgtttccaattccttctaaaggggtatcctcaccattttcagtggaaaagcaccgtgtttccctattcctatcttgcccttaaacctaacctccattggctccggcattcaccatggttggtccgtaattatctttaaaaccacaccggttggtttttacccccattgttctccccaggtttttgttattaaccattgtc

SEQ ID NO: 110987 - DNA, 408 bp, Arabidopsis thaliana columbia
cgtccggttttccaaaaccaggattgtggtggacctcttcttgagaagagctgaaagggctgggtgagaagcctttgttttaactgtggacacccaaaggttgggccgaaaagagtttgttttaaaaaccaaattaattttgcctccaaacctgccattgaaaaactttgaaggacttgccctcggaaggatggacaaggccaatgactttggctgggtttaatatgtggctggtaaaatggaccgtcccttaagctggaaggatgtccaggggttccagacattaaccaagttgccaatttttgtaaaaggtgtttttacaggaaaggatgcagggttggcgtttaaagctggtgcagccggattatattgttaaaaccatggagctggccagctggactttgtcca

SEQ ID NO: 110988 - DNA, 249 bp, Arabidopsis thaliana columbia
gggtcggaccaacccttccttttatccattaccttgtgctaccttttttttttttaaaaaaaggaaaaaaccaaagaaagaaggctttttctttaaagcgcgccaaccaatttcaccccctaaaacctttcttatttaaccattattcaattgaatctccatactccaaacaatcataaccttacaattccctttcttcctaaacctaaacctccctcaaaattatgcttaatcttaattagttcttcc

SEQ ID NO: 110989 - DNA, 353 bp, Arabidopsis thaliana columbia
  unsure (1)..(353): unsure at all n locations
gggnngggaattccggggcggaccacacccttccgaggacccttggccggacccgtggccctcttctaatctaactaacacccccggaaagggcggggacttttaccgccgttgttgtttcttaaataaggggtccccgggtggttcccacctttagctccaattaaagccggttaacagcccggttcgattccggacccaaaaaagcttctcccaaaagggctaaaacggttttttaaaaccggcctttttggtccccaggcccaaaataacccgatattttggacggtcaacttgtcggggcctccgggtccaacctcttgggtttaggcaaaccggcggggtatttccaa

SEQ ID NO: 110990 - DNA, 406 bp, Arabidopsis thaliana columbia
gccaaggccaagcctagttgggttttatcaaaagaggaaggggccaaagcctttagacccaactggcccggttctgggttattttccaaatccgtctgccttttgttgcgtgcccctaaccgggggggctgggggattaacgtttggtcgatctttgggcttaatcgcggtttgttgcccgggggactagcgtttgctggttccaaagggggggttgcccccatgccggggttgttggcttttgagttagctgtttttaagaccagagggaactcgaccgcccctgggtttttcaggtcagagaccacccagggtcttttccagaaggaggggctcgggagggtaccggaaaagatggtccctttaaagatgcaccaaactggggatccggggcttacatttttgg

SEQ ID NO: 110991 - DNA, 454 bp, Arabidopsis thaliana columbia
gtcgggatttccggggcggcccacacccgtccgaaaggaaccatatcccaaagattccctccattgctgtggaaaaacctcggtccagatggccgggttttgcaaaataatcggttgggtttttaaccacaaagctttgaaggaaatttggctctgcctaattcctttaaaatggcaacaccttgcgttgttgccaccggcagggtttttgtttaaacagttcattcaacaaaatttccagggcccggtttccaggggcatcctgggaaaaatgctttcgaggggggatcatttaaaattccacactttgaggacccgacccaggtgactcatcccgccgcaaatcatttattcagggaagctaggaagccactgaccagaccaaagtctaagaaagtgctgagcaatctaatttacaactttaagcctccttactggggttccccagggtttg

SEQ ID NO: 110992 - DNA, 208 bp, Arabidopsis thaliana columbia
ggaattccagggccgaccaacccttccaataagaaatccaaagcatcgaacctttttttgttaattactaaaacccatccaaggggagagtatcctttttacttaacggaaaagcctccataaaacaacgattggaacacatttattcctttcttattaccctaaaaaatccctaagtaaccattacctaaaattaatcaatagttat

SEQ ID NO: 110993 - DNA, 405 bp, Arabidopsis thaliana columbia
gtccgccccacccgtccgatgcgacaccattaaattatgtggggaataggccatttgtcccattggggccagtttttagggtgggaaaggcaggcttggccgcaaattttagattggccgggcaaaagcgggacccggggggggctaagcctaattctccggccacccgacctttagctagagaaggcaaagccgggaaaatggccagagtttccatcggtcctggtccgggggggaagccaaaggattttttggctgcagctaaactttcccacgcagcaggaagaaaggccaaagtcccaactttccttgtcccggctcctcaaaagggggggttggatgggtttgctctcccggtccctggagcaggtggaaggccatgtccccagttctttgaagaagctg

SEQ ID NO: 110994 - DNA, 420 bp, Arabidopsis thaliana columbia
  unsure (1)..(420): unsure at all n locations
gggaatnccggggcggccccaggcgtccgaagcaaagtaccaaattccataaccacatttggttttatgaaggaaccattcttgaaggccaccttttccataactaccatttttttgggggtcgtttgggccgaaccctccttagttggtcctgccaaccatgtcaaggactttgtaggccgtttacttggtccgggtaaaacgtcccaaatggtacctgcaattcccgggacaggagggggttttttttcgaacagggaaaaaatctgccctttggacatcttccagtaaaacaatccgttggactggggcctaccaataaaatttaagtccaggttatggttggttaaggaaatgaatagtttcaccatcgagttggaggctccgaactggttttggggtcctaaagaatccaagggg

SEQ ID NO: 110995 - DNA, 352 bp, Arabidopsis thaliana columbia
  unsure (1)..(352): unsure at all n locations
gggattnccggggcggccccacccgtccgaccagacctagatccagttttttcaacaaaataatagcgtctcaataaacccccttggtctgtttccctggaaatctagttccttccttccacgaaattgagagagggcttttggtcccacattggtcaggctggtttccaggtcggaaatgctggctgggggctgtcctgccttgaacatggcttccagcctgttggccagttgccgggggccaagactgttggtgggggtgacgttgctttcaacaccttttttagtgaacccgttgctggtaagcacgcccaccgtgctgccttggtggacctggagccacctgtattcg

SEQ ID NO: 110996 - DNA, 448 bp, Arabidopsis thaliana columbia
  unsure (1)..(448): unsure at all n locations
gaatnccgggtcggccccacccgtccggaggaaaatccgattcatcagggttggtttcttctttttttaaagctaacccctcttaaggcaatggttcttaatgggcttcaagcaccacacctcctggggtggttattccgtttagaaggaagttggttggggaagagtttaaggggcgggctcgtgaccccgaaaggaaggaatcggtccgtcctaattttcggcccaaaggtcctcctgtgcaaagggcccctttgaggcttaaagattttcttgtgaccctagattctcgtctggccaggacacaggtcgttccaccggtggcgcctttaagtcagcaggctggttttttctgccgcgttggggatggggtggttaaagatccggcaacctcctgggtccacttaattgggaaaaaccttcaaagggctttggggttgtctttgcg

SEQ ID NO: 110997 - DNA, 425 bp, Arabidopsis thaliana columbia
ggcggcccggcgtccgccgtttggcaaaggtggggatcctgtttggttcccggaaaccgcttggtccgctatcaggaactggttcagtccgaattgggcaaccgtttgggccttttttttttcgtccctaagcaaatcttggtggaagtgggagtttgcatagtttttttggcccccggaggccagtcgtggaaaaagtttaccgaaatcccctgtcaggatggttcaccgaccaaactttttttcttaataaggaatttggcttcttctaatttggttttatttaatttcccaaacttaaactccatctggggggtcttttttgtggcggccgcctggttctttaagttttccgccaatggcgtggccggcaccagccgcaaagggcgtccaagaagatgttcattttggttccaaatcaggtc

SEQ ID NO: 110998 - DNA, 376 bp, Arabidopsis thaliana columbia
gaataccgggccgaccacacccgtccgggtggattcgggggttccggggaaatccggttatggggtatggccaggaaccggtgggttttttaaggtttggaggctaataacggaaattagttccaaggctgggatggggaccaccaccatttttaaagtagcctctgttccaatgggttaaccgcatttgaagaaaccgacccggcctttgttggaagcaaaattggttctttccaaggccatccaccgggtattgtttcccgtttctcctgttccattggtccttgaatcacagcgcaccaagatttggaactgaacttgcaaaatttaaaaaaccaggttgggtttgatccaaaaaaacaaatttttttttatg

SEQ ID NO: 110999 - DNA, 447 bp, Arabidopsis thaliana columbia
attcccgggcggacccgccgtccgtttattaaaagcccttccctaaaaaccttcttatttccattccttttcctcttcctttgcgggtttcttttttttaaccatttatttttaatatccatccttataaaaggaaattcagattcccgaagcaaactttaaatcttccatcataataatctggtccgttccacttccatccttccatttttttggggggattattcctaataaaagagagatcccctcattaaaaaaaagctccctccttccttttcttttcctcccctcggtcaagggcggtcaaggctaataaccatccttttactctttttttcctaaccaccggccaagaagggattgaccagccgcttaaatctaagtttaattcaataaacgccggggttgttccatgaaagcaagcgagagaagtttctccggggatgg

SEQ ID NO: 111000 - DNA, 444 bp, Arabidopsis thaliana columbia
  unsure (1)..(444): unsure at all n locations
cgggnccggatttccggggcggccccacgcgtccggggaaaaaaaaaccaagggcacctaaggccgtctggttcttaaactcggccttaccaccggcggtatcttccggggtaaggaaactccactttttttaaacacccaaccgtccaaattccttttctttaacaaaaaccgaattccgggccgggaaaccagattcttcggccgccgttgttgatgccccggccacaaaggaagttcccgtgggtttaacccccccgcggttggacccaaacacaccgcttccgatcttggttggaagcaccggtggtcttttccgtaaggggcaggtggaagagtcttccgttttaacggggaactaaccgaaggaccaattctttgggatgccgccgggaggggcagggttcatgaaagaaggcccgattcttttgaagctggcgagga

SEQ ID NO: 111001 - DNA, 440 bp, Arabidopsis thaliana columbia
  unsure (1)..(440): unsure at all n locations
gttttggttaaggctggcgtcatggacaattcccttttggggggcaaacccaccaaagaccttatggttaggaagggatgggcaccagggggggcaaccttggcaggagcttcaactgtccaatccggaggctgcaggtcccctgagattttaactggctgccaagaccttgccaggcaaaaaaaagtcccattattctaaaaagatttggcttgggatggcgaaggcagggccaggtccagggggggtcccaaggtttcctggaaagggggaaaaacttggttggtttcaatctatcctaatttaaacccaccaaggattctatctctctctatcaaggaaagtcctggcnnaaaaaaaaaaaaaaaaaaaaataaaaataaaaaaaaaaaaaaaaaaaaaaaaaaataaaaaaaaaatataagggggcggccgtttta

SEQ ID NO: 111002 - DNA, 425 bp, Arabidopsis thaliana columbia
cgggtccggatttccggggcggccccacccgtccgcatggggatccatggctttggatgattgagttgcttaaagggcttcaaccatgggtaccaccgcgggagtcctgggggctaagattttgccagcaattcgaccttggacctggggcattggtaaaggcctaatttgagttccctaagttattttctaattctcggccttttaaattcccttcgggtggctggacccaagttttgtccatgggctttccaagggttcctgggggggaccatggggattccggggggcaggacccgttccatgggaggtttaaggatttagtccataaaggattagctttgggggctgaacgttggatggctcctctccaaagaaggggggggggattcacgattcttttggaccctgcaccttcttccctt

SEQ ID NO: 111003 - DNA, 374 bp, Arabidopsis thaliana columbia
tcctcttttggcaaccaaccgtaaacccctacttattagtccattttggcgggggggttaaagtgggcttccttggcctgggctggcttgatgggggccggcccattcacagcaaccgcgcttttgagtggtggccccgccaacggcaccctgccagggggcttggcctactggccccgaggtgctccacttccccaagggtgctgcaccggcgttcctaaccttaaaaccttggccagtccatccccaaaccgtcagcaggctggccgttgccttcattctgccgttaaagccgtgggtccgggtctaaacactgccggtgcagttgaacttcttagcgcatgcaaggccatttttccttacaaaatcagggc

SEQ ID NO: 111004 - DNA, 407 bp, Arabidopsis thaliana columbia
cggggcggccccagccgtccggtttgggaccacaggatttggggtaatagttttagtggtggcaagggtggtcctttgggggtcccaatggtcaacccctaagtttaccggcaggttccctccgggtccaatgggtttcccgaccttgggagggccattagatttttttaagccttatggtttctacaagacctccccatttttaaggaaaaagatgttaaggtttgggccattttttgggccaacctttttgggggtaaaaaccggggtttcgccggttaaggttgttaccatggggattttaagacaggagaccaggcttttcattttagagtttccggttggtttaatgaagccatggggaaaggatggctggtccttgaagatgggaaccttccccaggccct

SEQ ID NO: 111005 - DNA, 289 bp, Arabidopsis thaliana columbia
gaatcccggggccgcccacacccgtccgcccacccttccgggaggccatggaagaggatttttcctgagtagggtccgaaaggcatttttggaaaaattggggtcccaggattaaatttttggaacctttgggggtttccctttaattttgggcttacttcaatcatttcctcaagtacctgccaaagaaaaaggggggcttgtattttttctagaattgccctccttttttcgtttttttccgaaaacctaaccctttgtaatggtttttttacctttggagattttt

SEQ ID NO: 111006 - DNA, 442 bp, Arabidopsis thaliana columbia
cggggcggccccagccgtccggaggttggcgcgaccttccgcggttgttgaagttgttttttccataaggggtcctcggtgggttccgggtttccttcccggttaaggtgggttaacagccgggttcggtttcggaaggaaaaaggcagttcccaaaaggagggccaaaaggacggggcctccggcccggcctttttgttccccaggcgccttttttcctgactggctggatggttcctgggtgggagattccggttttgttcccttcggtttaggcaaaccggccgggttttttaaattcgttttcgtttaactagaccagattctggctaaaaacttggccggggacgtgttcggaccccgtccggaagctgccgacgccaattcgacgccgtttaagccgtccagggaggggttcggattccaaagtttcagggattgc

SEQ ID NO: 111007 - DNA, 458 bp, Arabidopsis thaliana columbia
  unsure (1)..(458): unsure at all n locations
cgggnctggatttccggggccgccccacccgtccgaatttttttccttggagagctttttcttggtttggccggaaaagaaaacgggaggccaccaggttccgttttcgttcttgccgaacttgccaaaggcggctttgggtttaggtggggcggcaacggccctaaactcgtcgttctccactgttgatggggccaaaagacctgttttgttcaaccgattcaggggggtgtggaaccaaaccgccggcaaagggcctaattctttgttcccgtttttccaaaccccgaacatttcccattttcttccaaaacctcaaactttttcctccaaattgggtactaaggttctccaaatggttaatccaaccctcggggttctttttcgccctgaggttccccgtttcccgtccattttccaacctttgggtcttaattccgataagaaggtccttccat

SEQ ID NO: 111008 - DNA, 406 bp, Arabidopsis thaliana columbia
gggcggaccaagccgtccggaatggaaataccttagattcaggttttttttttgtgggaaccacaccaggagcgggtggggcatgtttaaaaagcttggggccccaaaaaaagacccatttggcttttgtggattaagtcccaacaactccattttaaaaattcggaacccttcaacctcgtttaaccgttccataatctaggaatatttacctttattagctcttccagtttcaactccttaaacaccatgaatccaggccccggtttttttctccatccctaaaaactttttggtgttaattcctattaacatctcaaaaaactttggtggacctgccttctctagttcctattcaataaacaattccaaaacctgtcctggagctgttaaatttctcgggttt

SEQ ID NO: 111009 - DNA, 419 bp, Arabidopsis thaliana columbia
  unsure (1)..(419): unsure at all n locations
gaatnccgggttggccccacccgtccgggctttttggttggatccgggggtcccatgttttttttttaaacaaacaaatgctcctgttcccaggttcaaaacatgcatgggtttttactgggaccagtttccacctacctcaattattaaaccaaaattgtggcccgggaactggaggggttggtcccttggttttggagatccttttccttacaaaccagttgaagatcttgcttttgcggccgcccggttttaccaccgagggggaccgttccaaaacttttccttgtttaacgggggaccaaactttgttggaccaagtggaggaccattaatctctactagttttgattttgaggctccaattgatgagtttggcctccttagccacccaaattggggccacttacaagttctac

SEQ ID NO: 111010 - DNA, 374 bp, Arabidopsis thaliana columbia
  unsure (1)..(374): unsure at all n locations
gggannnccggggcggccccagccgtccgagtttgcttagaaccaagtaaccctcaccgtttttttattctttcccattttctggactccactgggatgtaccaccaaaggaggttttgaatgggggtagacccaaccagcctcaaaagtgaagagcctattcctaacctttccaattttggaatctttccctcctccgtggtttttgcaaccaccgtgtaaatggcagttttggaacacaccaccttgaactccagtccacggaccaaaaacctcccaagttttttgctcgtcccatttgggggtaaagcggccaataattgtccgagttctgatccatttttgcccttactttgccaaacaataccctgccg

SEQ ID NO: 111011 - DNA, 441 bp, Arabidopsis thaliana columbia
gggtggacccaggcgtcggattttttttttctaactaaatcctccagggttcctttttttttggcacccaaggttcctaataaggctcctcttcctaagttaaaatttttccctcctttaaccaacaccaaccctttggcttttcaaaacaacccttttttaacgggaccaacggcggtggggcggccaaacaacatcaatttttataaagcagttcttccgaagaagccacaaacatttccggttcctcctattccatttttttccaaccctccttactttgacttgtttggcccggggttggcggggttaaacgaaccagttgggtcaggcaggcaggctttttcggggtccttggggggattttccacggggtttcctacggctaatggggcttggtggccccaccattttaggacttggaggaccagggggattctg

SEQ ID NO: 111012 - DNA, 460 bp, Arabidopsis thaliana columbia
  unsure (1)..(460): unsure at all n locations
caggncggaattccggggcggccccagccgtccggcctttttttttataaacttttggctgttttttttttctttctttccatcccaactccaaggtttaactttttttttaagctaaattttcctccaaggcaattgtttccgcccattttttgggaaggaaacagtttccgtttttttcctaaactccgagttttttaactgttttggccttggttccacctaaccccgggggcaaggctaaaaaggtggggggagttttcaacctggctttaggggcgggaaaggcacctccggccccaccggttggtccggccctgggttttaagggggttaccattttggctttttgcaaggtttttattgctggaactgctgttaaagctggttttttttttcctgtggaaaccacggttctcgtggttatgagctttacgttttttttaaagaccccgcttgt

SEQ ID NO: 111013 - DNA, 398 bp, Arabidopsis thaliana columbia
ggaattccggggccgaccacacccttccgaaaatttattcctggggaactaggaatatttttacgttgcctgggcaataatccgtgcaggggcactttttgggtgatgtggacggcacccttttaaccgcctcccaaattctcggccataccggaggtgtttggcccaagatcgccaaatttcccctgttaaagcccgaaaaattcaggggattcatgaaggacttccaggggcccggtttccttgccccaaccggactttttttcggggccaaaaattccatgggtttccaaggtgaccatggagcttttttccaaggaaaaaaggaccctgaaggtgttcctttttatataccaaacaagtcttgggtctttggcttttacgataaacaaatgcct

SEQ ID NO: 111014 - DNA, 413 bp, Arabidopsis thaliana columbia
gaattccgggtccgaccacagccttccgattaattttcccagagccaaccaaacttgtcttttcctggcttcggcacccgctggaatcttgggttccttttccagggatccgatggattcatcttggtttaggaatggcctaaggaattggtaatcaaaaagtggatttttacctagtggttcaatgccattaaaccaagtcttttcccagggagtggttttttttggcaaaaaatttgaattcttaaaatccaaagcgatttttttcaacaaggaaactggctaaaaggttccagtttttgtttttccccaaggcccacctggagctgtgcttattcttttgaagcaaattggtaaaactattccggttcttactgaacaggttcgagttcctactgggagaattgttttgg

SEQ ID NO: 111015 - DNA, 330 bp, Arabidopsis thaliana columbia
cggggccgtcccagccttccgtcctctttggatcctggaagccgaaaaaattttatttattggtattcccatccaccgcttggtgggggtcttgttgaaccatccttaaaaacccatttttcttttctccgtcttttcttatttctaattgtccaatccgtggtcaccagccccaggaggggaaagagggggttcccagcccttggtaatggttggttgggcctttaggtaatgagtgtccaaaaagaagcctatttccccttgcccctgcttcttctttcttggtggtccctcctcctggctttttaaggtgggaggcccctttggcca

SEQ ID NO: 111016 - DNA, 416 bp, Arabidopsis thaliana columbia
gaaggccggggccgaccaacccttccggaagccaagggctttgtttaagaactttagtttaggcgaaaagggaggccccccagggggggatgcctgacccagtgggaccccacttgaggaccttgatcttcgtccttgaaatgtttggaagcttatttggattgtccaccggaaagactttcaaccagtttgaaatcaaccctgaaatgattggccactccctggctgagttttttttttaatacaacccgtccaaccacggaaggcctgtttttgttgctaccaacttttccagattcattccccttaagtgaaaagctttatttggggattgtgtttacttgttcgttttttgggatcctaagtccggggttcttttttgttttggaagctttttattaccattcctttaaaag

SEQ ID NO: 111017 - DNA, 309 bp, Arabidopsis thaliana columbia
  unsure (1)..(309): unsure at all n locations
ggaanccggggcggaccaacccttccgttctttcccttgtatgttaatgaattttttttgtaagatccaaaccggaggttgcggaggggcatccttgttgatacctaaaaaaggtccaagctaccaaggcccccttccactgcccgtaacttgttgcctctacttgccctcctaatgcaaggctttcctctaacacaaatgcttaaaatcctttgtaaacccctcaaatgcctttaagccaacggtccggcctcttcaaccttcgaacctttgaaccctgtttagggacccatgttggctaaccatttg

SEQ ID NO: 111018 - DNA, 424 bp, Arabidopsis thaliana columbia
ccgtccgccgaatattttaaaaagaccaaccccaaggtttgttttaaaaaaattaattgaatgtccgagggggagggcatgggtaaaacggtttttccggaaggcaaaagtatatttgccacctttattactttccaaacggggtcatttgttgcaaccggagctgaatttattgcaggggccataacttccaaaacctgggccggcccaccaaagcaccaacccgaggttttccgaattgaacttacccacccatggatctaccgatgcattatattcggttcccaaaacacactttacttccattaaaaccgccaattttttcggaaatgcaaattttacggtccagtcttttttttttttggtaacccatccgtcgtactccaaaactgtagcatctacccacggaacccaatgatttttt

SEQ ID NO: 111019 - DNA, 395 bp, Arabidopsis thaliana columbia
ggcggccaaggcgtccgatgttcctgaagctgttcttgttcctgcccttactgttgttcctgccaacggaattgctggggcagttgttgtcaaggttgccccaaagccaaaggccaaacctgccgaagggaaccctgcaaaaaagaagcctgattcaaccagggaaaatgagtctgatgataaaaataagtctgaaaaggatgatgcctctaaaaaaggaatggttgttgatgaaaatgcctcaattgttgccagggaggaggtttctggggttgaagaaaaggaggggactcctaaaaagcctgagccattcaacaggaagaggccaattgattcttgttccaaaccacccgtttttggaaggaaggcaaaaccagcagcatgcccagctttta

SEQ ID NO: 111020 - DNA, 385 bp, Arabidopsis thaliana columbia
ccagaggatccacttaaggctttcgtcttatgcaccagcaatttccgcggaaaaggccttccatgaccaactctaagtggctgggaccacaaccagggcctttgaacctgcttccatgatggcaaagggtgccccgcgccatggaaggtccttggctggctgttggatgtcccggggggttgtatcccccaaggttgtgaccgcaggggtgggcaccttcaagaccaagcgaccttttcagttggtggactggggccctactggtttcaagtgtggtttaaactcccagccaccaactgtggttccgggaggggatctggctaaagcccataagagcttttgtttgttctaaaacctaaccagggttgttgaggttttttcccgt

SEQ ID NO: 111021 - DNA, 212 bp, Arabidopsis thaliana columbia
gaccaatgaaagagttgatgttgagattatttatagtggccgaagaggttttggtggaagggggaggcctggtcctatcaccagccaaaaaaattaaaggggccgttagaattccctaattttttttaataccaaacctgacctcattttattccgttttttgttttaacctaccgttaatccactaatggttattacctttcctcacctga

SEQ ID NO: 111022 - DNA, 396 bp, Arabidopsis thaliana columbia
gggcgggatttccggggccgcccacacccgtccggcaaaaaggctggagccacaaaaacctgagtttttcttctccgaaaccggatcgccgaatctaatattttcccatcgaagcagatgggaaacttttttattaacattggagtctgtaaccgggggccacccaaccaggctttgggcccagatctttgttgcagccctggatgcctgccttgaacaaaaccctgccagcaaagttgttggggggacttgccccaagaccaactgggccttggccttgggggggaccactaccaaggctcctgttgactccaaaaagtttgtccggaccaccttccgggccattggattggcctctaataattgtggccttgatgctaccaaatgcaaagtcct

SEQ ID NO: 111023 - DNA, 326 bp, Arabidopsis thaliana columbia
aacccaccaaaggttcaccatatccaagaggtttctacttttgtaagacacaaaacggttggtgtagcccgtaaacaagtggagggtaatagatccgacccaaagatgtttattgtcacttacacggcggagcttaatcatccagatcctacacaccggaattcttttgccggaagcacacgtcagaaaccatcctatcaacagacgagtaaatcttccacaaccactattgctacttatacatcggctccggtgacttcagccgacgaatttgttttgcactgtgaggatcattaaacggcgggtgatcttgacggagaagaaaa

SEQ ID NO: 111024 - DNA, 247 bp, Arabidopsis thaliana columbia
gtcagatcaaaatcagaatcagaatcaaatttttcgttttgtcggagtaaatcaagccatggattccggaaccaaagtgaagaaaggagccgctggaagaagaagtggtggaggtcctaagaagaaaccggtttcccgttcggttaaatccggtctacagtttcctgtcggttggatcggtcggtatcttaagaaaggtcgttattcgaagcgtgtcggaaccggagcttcgttctttcttgccgcc

SEQ ID NO: 111025 - DNA, 255 bp, Arabidopsis thaliana columbia
ccgccatcggtcgagaatccaacactgctgcgtgtgtgcatacaccgaacgcttacatgtgagagtctatctctaaatgacacttcgagagtccgcggcccgtagcgagctgcatgtttcatattgctttggtccggaacacgccattggcatatagaagtctctcttgggatggaggggatgggtcgttagctttttattcccaacgacttctttatagctaaaggagagaagattgtgttcaagaacaacgct

SEQ ID NO: 111026 - DNA, 336 bp, Arabidopsis thaliana columbia
ctttgacaatggctgatggtgtagaagctgcagcaggaagaagtaaaagacaaaacagcttattaagaaaacaacttgctttagctgtaagaagtgttcaatggagctacgcaatcttctggtcgtcttcacttactcaacctggggttttggagtggggagaaggatgttacaatggagatatgaagaagaggaagaagagttatgaatctcattataaatatgggttgcaaaaaagcaaggagcttcggaaactttatttgtctatgcttgaaggagacaggggtcctactgttagtactactcatgataatctcaatgatgatgatgataatt

SEQ ID NO: 111027 - DNA, 219 bp, Arabidopsis thaliana columbia
taatttctctcttcatcttctcgctctcgatctcctacttaagctatagtagccagcaaatcaatcaagcaatccgtacaatggcggccaggaagatgaacaagattgccgtggcggcgctgttcctcgtcgccgtggtggtggcggtcggtaccgtgtcttgcgcccactttttggttaggggttggacctggttccaaatttttaaccttcttttcc

SEQ ID NO: 111028 - DNA, 263 bp, Arabidopsis thaliana columbia
  unsure (1)..(263): unsure at all n locations
ggcttccgatcacctttaccaaaaccttttaaatctcattttctttttccacaacaatataccctttccagaaagattttacaatcatttgggcatgggccataaaagnactaaaacaaacttactaatacctttctataaaacccacaatacatccacaacaatctacttaccaaaaacataatttttttaatacttatactacctattaatatgacattccaccctccatcttgtattttaacaaacaacttcctccaaat

SEQ ID NO: 111029 - DNA, 377 bp, Arabidopsis thaliana columbia
  unsure (1)..(377): unsure at all n locations
ccgggccgacccacgcttcctattaataacaccttcactatccaatatattatcntttaaaccctgagaaacaangacgtgaggtttcacaattttaaggggggttctaaccccatcaacattccttttccagactaaaccctcatcctttaacccccttcgtgatgtttcctttctcgaatctcccatatacactatggtaaataacctttgtttttcaccttacatattttagttcttaatacccttttccgttcaaactccttcttaccctacctattaattccctttcaattattgtattaacaccttctttttttcttaaacccttaaaccttttccaaaaaacaaaactcttgtattttatccttataatt

SEQ ID NO: 111030 - DNA, 352 bp, Arabidopsis thaliana columbia
ggccgacccacgcttccgcatcaccaaacatttcaccatctgcttttttttttggaatatgaatttgcctgtggagaggagttttaaaaccttgcctgctggggagactcttcctaggaatgaagttcttggtggttacatctttgtttgcaacattgatactatccaggaggatattaaacgtcacctttttgttttacctccaaaatacaaagactctgttcgagctataacacctgaattgcctctgtttttttacaactacaccactcaccatctttatggtttctttgaggcaacaacttttgtaggtactaatattgattctactgcttggtaagacaaaaatttc

SEQ ID NO: 111031 - DNA, 325 bp, Arabidopsis thaliana columbia
ggccgacccacgcttccgtttacacatatcctttatctatcttctcctttcattcaaaaaagcgaaaaatcaaaaaagaagagctttttcttttaatctctgcaaacatatttaacaaccaatacctcttctttctttccaattattctttaattttcatcatcataatggtcataacttaccatttctttctgtcatacctaaattccaaccaaaatatattttatctttctattttctacaaaaaaaaacttattattttttttaaatcaaattctctttaccattccatactcacaaatgctcccccatcccataagtaatc

SEQ ID NO: 111032 - DNA, 372 bp, Arabidopsis thaliana columbia
aaaaaaaaccattttagttgaaatcaaaagccgttaaagctcttgtatagaataaaccaaaagccttcaagaaactccctatggaagccgtttcctgctgcttttagaagaagtagatgatataataagattttttagacgtacaaaatctacattttaaaggttctgaatcaatttcatccattattttggtttttcaagcaaagttatttggttttatgaacagtttcatcaacttcattcttgataaattggcatcgtaattttctaacctctcgatgtttattaagatacctacttttacttttcttaagattcatactgcttttagactttttttttcttgttgagtttgccaaacattcttttttt

SEQ ID NO: 111033 - DNA, 353 bp, Arabidopsis thaliana columbia
  unsure (1)..(353): unsure at all n locations
ccgaacgttatggcaaatggtgttaatccatgatttgttttccgaaaaacgcttccatcgctagcatgagcttgttcagttcgcagggggcgaacatctttncctttatattatcgtccctcagcaaatcattgttgaagttggagtatgcatagtttatatggccaccgaaggacattcgttgaagaattttcacgaaatcccctgtcaagattgctcaccgatcaaactttctttcttcataatgatatttgcttcttttcatttcgttttatctcatctcccaaactttaactccatctcggttgtctttcttgttgcggccgtcatgtcttttagttattcgacaattg

SEQ ID NO: 111034 - DNA, 327 bp, Arabidopsis thaliana columbia
ggttgattcggtggtttctgtgaaatccggttattgggttatgacaagaagcggttggttatgtaaggatttgaagctaagtggtggagatagatacaaggcttggattgagtacaacaacatttataaagtagcctctgttacgatgggtttagcgcatttgaagaaaccgaaccggccattgattgaagcaaaattcgatctttccaaggtcatacacgaggtaatgtataccggttttgctggttcgatgggtcgtggtgtccagcgtcactagatttgggactggactttccagaattaaaaaaacaggtttggtttggttcg

SEQ ID NO: 111035 - DNA, 259 bp, Arabidopsis thaliana columbia
tttccccaacccccatacaaccaggcaactcttaaattttaaagctctcctaaaccaccaccccaccttcctaaatccttctctttaaccaaaacctcattcccctcctttaaaacaaattcctcctccaccactgtttcacccccccccacaaaaaaatctccctttttattcaccccaccactttttaacccaaacacacctttcttctatctttcctttattcaccttttttctttttcataaacttcaatcttta

SEQ ID NO: 111036 - DNA, 382 bp, Arabidopsis thaliana columbia
gttttggaacacaggatttggggttatagttttagtggttgcgagggttggtcattggtggtaccaatggtcaaaccctaaggctaacggcaagttacctccgggatcaatgggtttcccgatcatcggagagacattagatttctttaagccttatggattctacgagatctccccatatctcaagaaaaagatgttaaggtatgggccattatttcggacaaacattcttggagtaaaaaccgtggtatcgacggataaggatgttaacatggagattttaagacaagagaacaagtctttcattttaagttatccggatggtttaatgaagccattgggaaaagatagcttgttcttgaagattggaaacatccacaag

SEQ ID NO: 111037 - DNA, 342 bp, Arabidopsis thaliana columbia
  unsure (1)..(342): unsure at all n locations
atcaggcacccaatggaacggatctttccttttcaagtactaagaacccattctcgagggagtgacccatctaccttgggggggagttccctgaacactacntttggtacacatatgttctatccgcttacccctaaacattcccaaggaaccgttagctaaaacttatccacagcaggttgaccattctcaaaaccctatgctgcgttttccctgatcttttggccagtaacggaaaaagtttgtagaggcagttttgttcaaggctggtccacagatcttcaaccaaggaggactcgattacttggaaaacccctatcttgtttcaccctcaaatcattt

SEQ ID NO: 111038 - DNA, 428 bp, Arabidopsis thaliana columbia
catggagatgcattgcatttgatgattgaagagcttcaagtgctttcaccattggtaacaacgcgtgagttctgtgtgctaagatattgtcagcaaatcgaacatggaacttgggcaatagtaaatgtctcatatgagtttcctcagtttatatctcaatctcggtcatatagatttccttctggttgcttgatccaagatatgtccaatggctattcaaaggttacttgggtggaacatggtgaattcgaggagcaagaaccgatacatgagatgtttaaagatatagttcataaaggattagcttttggagctgaacgttggattgctactctccaaagaatgtgtgagagattcacgaatctattggaacctgcaacatcatcccttgatcttggaggagtgattccatcgccagaagggaagag

SEQ ID NO: 111039 - DNA, 225 bp, Arabidopsis thaliana columbia
ggaataccggggccgacccactcgttctaaaaaacatccatcaatataatattttttattttttacaaactaataaacaacctggagcgatgttttcttacattggcggagggaaattatcaccaatccaccaaattctcttcttcatccaaacaagtcctatataatgttcatccctatatacccaaagctaacgtattttttttttcaaatttatactacatc

SEQ ID NO: 111040 - DNA, 369 bp, Arabidopsis thaliana columbia
  unsure (1)..(369): unsure at all n locations
ttccgggncgcgcccaggcttccgattttgcttaaaaccaagtaaacctaaccgttatgttattctctcccattttcttgactccggtgggttgtaccaccaaaagaggatgtgattgtgtgtaaactcgatcagcctcgagagtagagagccttatcctcacctttccaattcttgaatcttttcctcctccgttgtttttgtcaccaccgtgtagatggcagttatcgaacacaccaactgtaactacagtacacggatcaaaaacctcccaagtatattgctcgttccatcttggggtaaagctgtcaataattgtccgagttctgatccatttctgcccatactttgccacacaatacgcgtccg

SEQ ID NO: 111041 - DNA, 355 bp, Arabidopsis thaliana columbia
gcgagttctctgagtaaagctgatgtggccatgagcattcttctcactagttctacaactattgcttctggaatctttacacctttggttagagggcttctaattggaacacaaattcctgtggatgcacttgccatgtcgaaatctatactttaggtgggacttgttccaatcactcttggccttgtgttaaatacttatgcgaagcctgtggtcactcttcttaaacctgtgatgccgtttgttgctatggtatgcactccgttgtgcattggaagcccactttcgattaatcgcagtcagattctgtcagctgaaggtcttggattgattgttccaattgttacattccatg

SEQ ID NO: 111042 - DNA, 397 bp, Arabidopsis thaliana columbia
ggctctttcgttagatactggagtaccatggaatatgtgtcaacaaacagatgctcctgatcccatgatcaacacatgcaatggtttctactgtgaccagtttacacctaactcaaataataaaccaaagatgtggaccgagaactggagtggatggttccttggttttggagatccttctccttacagaccagttgaagatcttgcatttgcggtcgcgcggttttaccaacgaggtggaacgttccagaactattacatgtatcacggtggaacaaactttgatagaacaagtggaggaccattaatctctactagttatgattatgatgctccaattgatgagtatggactacttagacaaccaaaatggggacacttacgagatctacacaag

SEQ ID NO: 111043 - DNA, 220 bp, Arabidopsis thaliana columbia
ggaaaccgggccgccacgcgtccgaccggtccttgttacggcttaggtttactttttatcgttcgggcttacggcgggaggatcttggtccttttttacgtgaaccggcgttatctttggtggaaacattaacccagctgtgactttcggtctgttcttggcccgtaaggtctttttggtgcgagccttgggttacatgataactcatggtcttggaacc

SEQ ID NO: 111044 - DNA, 211 bp, Arabidopsis thaliana columbia
gaacaatgagagagttgatgatgagaataagatagtggacgaagaggatattgttgaagggagaggtcttgttctatcagcaggcaagaagaataaagtggtcgttagaatttcctgattttttttcataacaaatctgtactcattttattacgtattttgttatgaactaacgttgaatcactaatggtttataacttttctcaactga

SEQ ID NO: 111045 - DNA, 167 bp, Arabidopsis thaliana columbia
cgtccgttctgtcccctctatgataatggattatgtttggggattcgaagcggaggttgcgggggggcatacttgttggagctgagagaggttcaagctaacaaggcgcccttacactgcccgtgacgtggtggttctacgtggccatctaaagcaaggctttgctt

SEQ ID NO: 111046 - DNA, 359 bp, Arabidopsis thaliana columbia
ccggaagatatgaagagaacaacctcaaggtcgtggggaaaaaaattaattagctgctcgttggagatggcaagggtaaaactggtattgcgggcggcaaaagtttatttgacaacatcactactttccacacggcgtcatttgctgcgaccggagctggatttattgcaagggacatcacattcgaaaactgggccggtccagcgaagcaccaagccgtggttttccgcatcggagctgaccacgcagtgatctaccgttgcaatatattcggttaccaagacacactctacgtgcattcaaaccgccaattctttcgtgaatgcgatatctacggtacagtcgattttatttttggt

SEQ ID NO: 111047 - DNA, 405 bp, Arabidopsis thaliana columbia
cggggcggcccccccttccgggaaaaccattaaaccttggaattcaagtatgggggattttaacctaagccgttaacatcctggaggtggtccaggttagcccgcgcgtttttaactggttcaaactccaactcatttacttggactggggtggggttaaaacttaacccggtggaccggagttttttttacaccgtccccgagctgactgcgttttttttaatttttaaacttaagtcctttttttaagccacgctcttccattatttccaactcgccggccgcttggggggggattcaatcaaaaccaaaccatccatgtgttattttccggacgccaaaaatgccgggtttttaacggtggctgggtttaacggggacctttcccatttttccggggatgaa

SEQ ID NO: 111048 - DNA, 414 bp, Arabidopsis thaliana columbia
ggaatacccgggccgaccaagccgtccgtttaccaggcgattatgaaatcttcgtatactttcccgggcctaacggaaacaagggggcgggcttaaagtccaagggggtcaaaacatcaactttggttttaaaatgagaggacaggttgggggggatttaaaggattggaaatgggggtaaggttaaacactctgaaactggggtggattggattaaggctgggagtttggttaacaattaaccgttttcgttttccaccgttccaaattcctgaaattcaaactggtttgggtttaactacggatcctggttatgtagttccagtggaaatcaacgggaaccatatgtaaaattttgttgagaagcacgttttgggtaaaagcgggtttaaaggaattggtttaataaatttt

SEQ ID NO: 111049 - DNA, 295 bp, Arabidopsis thaliana columbia
cgaagttggcgatgttgatgatgattaaaagaaaagggggggggagccaagacttcgtcggggggggggtccaacgttgtccataagtggcctaacggaaccagtctttatgtccaagcgaagcttgttcagttgggggggaaggatccaaaaccagcgttggagttgttttggttggcgattaaagccggggatagagttgttggggcttttaaagccatggccttgttattgaaccaccagaccagagttgaagaagccattgacgcttttaaatcttttaaagatctttgtt

SEQ ID NO: 111050 - DNA, 361 bp, Arabidopsis thaliana columbia
ttttggttaatggttttctttttattaaccaattcttaaccaggaaggagctatggttgacccggtggttgatccggagtccttgaaggagatcattaaggttggccgggggttccgttttttaatggggaacaggaactgggctctaataaggctccgatgggcagggaccgaggctggaccctatgatgctaaatcaaagaccgggggacctaagggttttatcaggaccgaagaaaagcccactcatggggccaccaggggttggaagatcgttttcaatctttgtgggggcgtgaaagctaagcttccaaaattaacatccgcagaccgtgttcagttggctgggggggaaccagtt

SEQ ID NO: 111051 - DNA, 318 bp, Arabidopsis thaliana columbia
  unsure (1)..(318): unsure at all n locations
tttgaacaaatatttttataaccccagattttttttttatatgccttcacttcacaagcgatgccgcnggttatttttaaaaaaccaatatcaaacctaaagacattcaaaaattcttttcttgcccatcatttaatttaggttcagttaaaactttcccaccctgtccccattttttaattaaaacccttccagaaaagcttctaattttattaaaaaataaattgaagccttttttttcagaaacctcctccactattttccaattgccggccgcctttggtgggatttaattaaaacccaacccttcattttttt

SEQ ID NO: 111052 - DNA, 395 bp, Arabidopsis thaliana columbia
ttcagttgggtcgggtcgaaaaaaaaactaaccgtttggtttggatccggggggaacttgaaggattggttgttcccatgaggaaggaagttgttttggttaggaagaaaattgattttgtcaacaaagaattaaagccattgggccttccagttcaaaaaagggaccgggggtccaaagaagcttttgaagctttcaacgaaaagaccagggggagggggcagttattaaccaggctattggagttggtgggggaaagcgaaaggttgggattgaagaacctggaaaagctaaccaggaccatagattttttccactgactttgaatccaagacaggccaagaactttttgggccaaagatcatttttgtggggtttaaactttacgtttaggt

SEQ ID NO: 111053 - DNA, 321 bp, Arabidopsis thaliana columbia
caattggggcaaaacaggaaatttggttggtttccgttgaaggctacaaagtcgaaggaaagggccaattggaggaggccgaggactggtttaaccccgggggcagtttgaaccaatggggttgggttaccaaccaaaaggaatttgttgagtggaaggtgaaggacctaaaaaccggaaaatgggttatgttctttatgttgggatttttggttaaagcaatcgtaactggaaggggaccaataaagaactttgttgacaatttggccaatcaagtaaaaaaaaacgaatgggctttggcaacaaattttgtttccggaa

SEQ ID NO: 111054 - DNA, 356 bp, Arabidopsis thaliana columbia
ccgtccgttgattgaaggacctgaaacagaggttgttgttttgtgctcccaacggacccaccgtgtacccttccatttatttacagaccgcggttcgttgggaatcaatctggatggccgggaacaattaatttttaaccctagaacttacacccttttcaaccctgaccatttttctcctccactgaaaaagaggggcaacttgggggccttactggtttaactatgcccggtttcttagcccacacggaatttcctttggaggggagaccttggaaccgattgcagaaattgacatgttggtaaaatctatgaatggtattgtagcaatgcctctttttaaaaatgggaaagga

SEQ ID NO: 111055 - DNA, 315 bp, Arabidopsis thaliana columbia
gggccatggattaatgggttcgtggtggccagtctttttttaataaacgttccaccttaaataacggattttttccaccagaggactgggttttggggggccattccaaaccatgggccatccatgaatccttccaaaagggatcaaatgttgcaggccttgcagaacacatgggacctgggttttttgatcacatattcaggactccaaccaggttttcaggggaaaggatcaaggggggcttcagttttttattcaaggctggttgttccaccatggataaaccacggtttttaatcccggggttggtttcca

SEQ ID NO: 111056 - DNA, 339 bp, Arabidopsis thaliana columbia
aaaaaccttattttttttttaaccgctttttttccttaaaacttacggcccttagttttggaattcccagcaatttttttccggttttttttttacgttccggcggggttaactaacgggggttggtttccgtcctttgttccgtgggggggaaggaaccatcggcggttgaagaaccgtcgcagggggggaggactgaagaaccccagatttcaaatttgaaagggaggcttttggatttcaatcttcctgggcctatgagggtaaaggccatttccgggcttttgggccatggggggactgggaccatgtgtcggtatttaaggcaaaaggatggaa

SEQ ID NO: 111057 - DNA, 384 bp, Arabidopsis thaliana columbia
aaggttttaatgggggttaccctggctgggactttgttaaacacagggaaggttttggggaaaaatcccaaactcgccaggattattaacctttgggttactagcctccttaagggcgcaacttttttcctgccctacgtggttttaaagtttttaatcggttttggccttgggctgtttcggatcataccttggataatcttccacctgaaaaagaagtttttttgcaaaaccgaaccgggggtcaaagaagctgggtccccgggggacttaagttttgcgactggggttcccggggccatgctaatcctaacaataacgttctgttattcagccatggctcctttaatcctaatattcggcataacctacttgggtttaggc

SEQ ID NO: 111058 - DNA, 388 bp, Arabidopsis thaliana columbia
attttattaattaaggagcctttaactggcgcatcattttaaccaaatgggcggcttggccaagggtttattcttttccggttttgaccggaagggccgttaggttttcccgggcggcctccaaagaattgggaaccggccgaataaccatgcgcaaggcttccaggccaaccggtccatccggcagccattggtacggatccgcccgagtaaggtactggggtccattttcgggggggcctcgaagctacctaactggagagttccctgttaataacggtgggaacattgccggtttatccgccgatcccaaaaccttggttgggaaccgtgggctagaagttatccccagaaatggggcaaggctcgaagccctaggctgggtttt

SEQ ID NO: 111059 - DNA, 330 bp, Arabidopsis thaliana columbia
gggcccggaattccggggcggaccacaggcgtccgtttttttttaatccttaacctaaggtggtggtggttttttggggggttggggttaatttttttgacatttgttttgccaagaggtccgaagccaaggaatttgttggggttggggaaaaaaaggagggccttgtgttcaaggaggttaaggggttaatggatgcttccaacgggactttgccagaaaagggggatcagttactccaaatgatggttgaactgaaattagaaaaggactttttaagatccaaatttgggggactaaaggttgaggtagcgcagggtaggtttttcc

SEQ ID NO: 111060 - DNA, 336 bp, Arabidopsis thaliana columbia
cggagggaagaaggatcaaaaaggccgttctacgactgattgcttttgttcaagcctataatcaggaaggagggcctaatcgacctcgttgcccccatgggtaaacacgtttccagcaaaaatggcgtcctaaccgagatcaaatcctttggcagggtcaaatggggttccggttttagaaagctcgacggaggacactttcagggccaatggatgcaaataccaatgatgccacctccaaacatgaccaaggggcttaattacctgaccagggaagacaaactgttgcgctggtttttagttaaacaccgggccatcaaaattggccagtcggaa

SEQ ID NO: 111061 - DNA, 379 bp, Arabidopsis thaliana columbia
atttaataaaggggggcggtttcccctaacatggtaacggttaaggaattggtggccccttattttcagggggccaaaaggttcagcaggccttttgtcgcccaaggggccacgcccccgaaaccacttgtggttaaaaggaaggtggccttgaaaccttccccacccaaggggatcatggtttttccagggttcctggaatccgccccaccttataacaatcaggtccaagcccttgtggaccgaaacctgaaaggccttgagctgccggagccttttgttaccaaggagttggtttcgttggcggcctttgcatggtgggtttttcccattttcgtggcttacagagggtttttttttttttttgtgacaaagccaa

SEQ ID NO: 111062 - DNA, 374 bp, Arabidopsis thaliana columbia
  unsure (1)..(374): unsure at all n locations
aacgggncgggaaaaaggggcggaccaaggcgncggaaaagacaacnggggnaacaaaacaaaagactaaaaagggcaaaggaccncaaaaagagagaggnaaagggcccaaaaaccncaaaccgcccggaagaaaaaaacccggcaggaaaaagggaggggagcaaacccaagccgaagaaagacccaacgggcaaaaaccgaaagggggaccaaaccgaagcgaaggagggggagggaaccgaggaaaaccaaggacaagcaacaacaacaaaaacgcgaaaagagggaacgggccaagcgggacaagaaaaggcaaaaaagcaaaaacaaggagacgnaaagaaaaaagggcaagggggacccaaccaaaa

SEQ ID NO: 111063 - DNA, 389 bp, Arabidopsis thaliana columbia
gccaaagggggatctgttcctttgaggaaccacccccaaaaaaaaaaaaaaaggatgggcttcaccggttgaaagggggggggaggaaaaggcttcggggttttaaaccttgtgggccaaagccaaaggtttttttgcggaaaacctgccaatttttccgcccccggaggcacccggggccacctttgttttcaaaggcgtgccccgggtgggagtaatttttccccccagggtttccgcaaagaatcctaactttaaatccatccttatctgccaaaccttttacatcctaaaaaggcccccagggccgatcgcttaagccccaatcccgaccccggtttctttggttgggacgcggccaacggttttggacgtaccggttaaggggg

SEQ ID NO: 111064 - DNA, 397 bp, Arabidopsis thaliana columbia
agtttaaactggtttggttcaaaagccggaggagggggattttattggttaataggatattggttttgttggaggttaaacgaaagggagtcatcgttttcggggccttggtaggaccactcaaggttttccaccccaaggcttttttagaagccaaaatagattttacgtttaggctttacgccttggactgcccgggttccattgaccgccagggggtcaagcaaatgttgatcgcccttttttgcgaatttgaaatgaaactggctgttgaaaccatagagatattcctcgttaggacatttgaggatgcagacgtgatataagatggaaaaatggttaaattagaggggggggatttcgtaaccaaaaatccatcatggcttaagatcatgac

SEQ ID NO: 111065 - DNA, 440 bp, Arabidopsis thaliana columbia
cggccccgtggccaaggttccatggttcggttttgaccaggagtccactttacttaagcaaaccgtaaaatggcctttaggtgggcctgttggagcgttccttggtcctaagggtccttactactggggggttggggctgccaggattggggggcgtgccatttaaaatgctcattccaaagctggtttttttgctggaattaacattaggggtcctaagggggaagttttgcctggccagggggggttccaagttggcccaaccgtaggaattgatgcaggtgatcatgtttggggggctagatcccttttggggagaataacagaccaggctgtggtggtcctaccacttgatcccaaaccgttggagggtgactggaacggggttggttgcccaaccatttacagtcccaagagcttggaaaaggaagggggttttg

SEQ ID NO: 111066 - DNA, 338 bp, Arabidopsis thaliana columbia
gaaggggagccaggtttaatcagttggttttttgctttccttccagcctttggaatccgggggagagccttgaggggaaagagaaggttgtttgtattggtttgggactttaaaatgtaaattggcaggacttggtttgattggccattaataaacctcaattttttttcaaaaaaaaaaaaaaaaaaaaaattaaaataataaaataaaaaaaaattaatatataaaataataaaaaaggggccggccgttttaggggtcccaggtttcctaccccggccttccacacgattattttttttttggggcacctaaaataaattcaccggcccggcttt

SEQ ID NO: 111067 - DNA, 406 bp, Arabidopsis thaliana columbia
gcccgaaattccgggttcgccccacccgtccgagctttacagggatctaatttgtttagactgcagtcccggggtttatttaatggcagcaccaaagatgttgaaaaaccagaccacctttttagggaaatttccaaggcctggaatcctgtttttgaccggagcttaaacaccctgttcctaacaaaaatggtccggggttggtcgttgcccctaaagtccttttttgatccaaaggttcctatcaattttccatttgggaagggtcctttgagccctggtttccgggggggaacatgcttttcgaagatttcctaccggggaagaacgctgcattgcctgcaaactttgggaagcgtgttgtccagttcaggcattcccattaaaggcagaaaaaagggaagat

SEQ ID NO: 111068 - DNA, 419 bp, Arabidopsis thaliana columbia
gcccggatttccggggtggccccacccgtccggtttcggttcctttttttggggccaacccattttttaagggtttttttgagttttaaggacttcgaacctcctttgtttttcctttggccaagagatctttttccgaggggttggtttccttcgtcggtttccaaacttttgcatggagaagcaaggggggttccaggaagggggggaccgaggccaaaataaaggtggccatcaaggggttcggtgggatgggtgggacctttttggggggtgggcatggtcgtagggactctcctttggaggtcgtggccattaacgccactgtgggggttaaacaggcataacatttcttaaattacgactaaactttgggaatcttggacgctgttgtcaaactttaaggagactaagttttt

SEQ ID NO: 111069 - DNA, 378 bp, Arabidopsis thaliana columbia
gcccggatttccggggtggccccacccgtccgtgggccaaagccgggggggtttttggtttacaaaggtcggagataataaccgtcgggggtttcggaggaattgaatctgccccgtgggatttagatgaagttaatgttttacccgtggatgccagcttcgtggatcgaatggccatcaaaggatggcttcgatttacttcctgcaaagttccggcggtggataggggttggcgtgctctggaatttttagggttggataatgagaaagcttctgctgaattcgatggatggaaagtggattggatcataactgattactggttgcctggaatgactggttatgagcttttaaggaagattaaggaatcgtccaatt

SEQ ID NO: 111070 - DNA, 378 bp, Arabidopsis thaliana columbia
tttaaattttggcaccttggccttcgccatggttcctaacacagggaaaatccaatttaacatggattaaaaacctcccattttttttaactgggggtccgaaggatctttttccattatttttaactcgaacccttagcagcttaagtttgtgggggaaggctgggggggaaggctcaaattcatggactgatctcgccgtggttggtccgattcaaaaggttggggttaggtctgaagatgggttaggttttatgggttggggtttggctggtttggaagcttttggggcataatggaatttaataacggcaatcgccaaatggcccgtattttgaggcggattcgaactagtgggattctggttctccacggggt

SEQ ID NO: 111071 - DNA, 396 bp, Arabidopsis thaliana columbia
gtttcttaacaggccggccaaaaaacatgcggccaaataccaataaggtccccgttcggaaccgggtaaggtggcggggaccaacgtttaaaacgtaccataacgggggaccttgaccaacaaacttggacgttaacaaccaaaacaggcggtaaccttataattttggtggattcccccaaacaggaaatttacgtaactgatccgtccatgtttacgggggcatgtccccgacccagccatggattcgggtgggatggggacgctccgttttttttcaatgacaacaccgtttttacgctcctggacggttccgaaaacaaatcccttgaattaacaccgttaagtaacggtggcggccgggtttccttttgggatcgtaaaagctcctccatt

SEQ ID NO: 111072 - DNA, 300 bp, Arabidopsis thaliana columbia
gtttcttaacaggcttgcaaaaaaacttgtgtttcaaatcccaataaggtccctgttgggaacgggttaaggtggtggggaccaacttttaaaacgtaaaataaggggggaccttgacaaacaaattttgaggttaacaaccaacataggaagttacccaataatttctgtgaattccgctaaccaggggtttttcttaattgatccgtcaatgtttacgtgtgcttgttccccttccaatcaatggtttggggtgggatgggacatttctgttagttttcaatgaccaaccctttttaa

SEQ ID NO: 111073 - DNA, 422 bp, Arabidopsis thaliana columbia
accatttaaaaaacctaagccaatttttttttttttttaccaccaaaattttggaaagggggatttttagggtttccatggtggttttaatgagggggatattttccgccgtggcatgggcccaatttggggcaccagccccaagtcctacttttggatttagggcgacctaagggtctttcgggtaagttggagtggcagaagccccggttttggttttgggttcacttttttggatctaagttacggggagggggatttcgaccagggttggttttgggggtttaggccattaataattattcgcggtttggggtgatttccgaagcagtttatagatctatatttttattgtgcccttttttttttcggtttttatttaactttttatatttggatgaggttttactatttctttttta

SEQ ID NO: 111074 - DNA, 369 bp, Arabidopsis thaliana columbia
gaacacaacaaagggtttttcttggtttagtaatttaactgttacggttccggcctggggggttttttttttttcaacggttccaacgacaccggttttttaattaaaagccaactcctccaagcttttcttttttttccaagattggggttggaggataatcttttgggggaaatttccttttccacctttaattgggggttggttacaaaaaagacaagcttccgttgggggccggcgtaaatttttccgggggccccgttgtaaagggctttttacagaagagatgggggatagggtttggctcctatggaggaaatcaaagcaaagaattctgctatggagactgttgtgaaataaaggatgggg

SEQ ID NO: 111075 - DNA, 337 bp, Arabidopsis thaliana columbia
gatggatatttggtggcaggggaactttggttcaaggggtagggaattttcctttggtggaccggattaatttggggcatgtggattttgaataaggaacgaaaaaggttgggtccggaacaattttgaggtggttaaacaaaagtttttagataaaagagcccttttttccggggaacttaaaggggtaatttgcagtggttttggggggtccatatgtgacgggaccaaggttgacgttggcagcttgaagggtaagcaggcactcttgagaagggtggccggcgttggagtttttcttgcaacagatgagggctttaatgttggagaccaagga

SEQ ID NO: 111076 - DNA, 381 bp, Arabidopsis thaliana columbia
ccgggggaccgggccgggatttccggggtggccccaggcgtccgaaaaaaaacctcagggggccaattttaaagggcgttgtttccgcgcaacaccgccaggcgcttccttttcttcttccaatttaaacgggccgtggccgttgcttgggtttttaacctccacacatcctttccggttttttttccttccaaataaccgacttcttacaccagaccgggtcctctttggacctcccttcttcttccgggtttttttaaggcggccgatttggggatctccagggtcgttgttttaatgaacggggttggtaccggatcgatctggcctttgaccttgggtttggctggctgggccgtcgaattgatgcatacgggggct

SEQ ID NO: 111077 - DNA, 423 bp, Arabidopsis thaliana columbia
ccacccgtccgttgaaggacggactagctttggctaaaattttagttccggcgtggaaaaaattaaccatcctgggacagccaacactgatagggcctcattaaggaatcattggattgatggtgggcttctacgctgctatgaaccgggccagttttatagtgacaacgcctaccaaccctggcttgagggggggggcgcctttattatctttaggggcgaagcgggttttacctgttcctcccaaagtaatggttgactctgcgaataaagtgtcttacctctctggaaggcctcatgaaaatttcaggcgtaacaactttgctagtccggaaaacgctcaactttgttggtatccaacggcgcctaatattgggtaaattccactggggaagcttgataaattgttaccggaattaggga

SEQ ID NO: 111078 - DNA, 339 bp, Arabidopsis thaliana columbia
acaccaccaaatttaaaacgtttaacttggggcggaactactaaacctaaagggccgcttaaccaagggttttttcttcccttgctttggccggtagggccggaaggttttcccccgcggaatttgaagtccttggaggcggccgggtgccaatgaggaagactgtggccaagccaaagggcccataaggcagcccatggtccggatctgaccgggtaaaggccttgggtccattttttggcgaataaccgagctaccttaccggggggttccccggggactacggttgggacaccgccggactttaagttgaccccgggacattcgcagggaaccggg

SEQ ID NO: 111079 - DNA, 343 bp, Arabidopsis thaliana columbia
gaagaggaataataaaatggttagaaaagggacgttggtattgagaataactggtacaggcgtgcggttttctaccaaccagggtccacgacttggaaaaagggaggccttcgaatcttttttttttggggggtcttcctttacttatggcctacatgttggtcctttaccaaacctcttttgttcctctccgaaccgaaggtggtggtggggcgccaccacccagggctcccctggccaacgacataccgaaaccggatcggttgatggctattgggccaccaaaaccgaaccgtttcccatggtttaaagggggatcccccttaccttagttgaaagaacg

SEQ ID NO: 111080 - DNA, 389 bp, Arabidopsis thaliana columbia
gggaaaacccgggccgacccacccgtccgttaaagaaaaagggcggaatccaaggttttttttctcggagcctggcttaaagaagtccagggggtatttggattggccttggcccaaaaaagataaacttgttcttgctaaaaaaaaaagtgttgtggcccgcaggctttttttaaaaagagctgtccagtttcccaaaaattcccctgggaaggttaccgggttgtcccgatggaagcgggagcttaatttgaagggaggttttatactttgcccctgaggctaagctgttttttataattcgattccgtggattaaatgccatggacccaaaaaccatgaaaatcctgcagttcttgcttttggagacaaattttaaatggggggtt

SEQ ID NO: 111081 - DNA, 367 bp, Arabidopsis thaliana columbia
gggattaataaagggtccaaggccaattattaattttaacaccggggaccaaaggtggttggacccgagtaaccgggatttaaggggggcaggaccagttgtttggaacatggttcctacttttacaggaccagttaaggctggggttttggggctccttaacctaaaaggaaaactaaacgggatcgttttccgggtcccaccaccaaacgtttaaggggtggatttggtggggcaggtttaaaagaagacatttgttgaggaagtaaacgttgttttaaaagattttgcaaagaaagagcttaaagtgttactcgttgtttgcgataagccattagggtccgtggatttaagatgctcagatttt

SEQ ID NO: 111082 - DNA, 460 bp, Arabidopsis thaliana columbia
cgccggccgacccggcccggaattcccggtccgcccacacccgtccgccgaagccccataaaggaggaggtcgccggtaaagtgaaaggccgttgttggggtttttgaagaagttgaaggattcagcctggttcttggtcgaaggcctctttttttaatcggtttgggcctctaagccgaccgcagggggggtcaaagttcctttgtggcaaagcaatactgggggattagttttcagcaaatccttaaattcgacctatgttcctttaatgtccggcccctggcagttaaacaatggccttgttggaactcaacaaaggggatggattagctggaatttctttgctggcaatatcaatgaaactgttataaaggaacctgttgttgtcttggttttattggccctggctgtttaaggtatcttccatgtaaatattgtgtgtttgcgggtccaattttg

SEQ ID NO: 111083 - DNA, 366 bp, Arabidopsis thaliana columbia
agggagggcgtaaccgccgggttttttttcctttttttaatggccaccgccatggccgccaggtccaccgtttctttccgggccggcttgttaccaaacggggacttggggctgggcccaaacccttcggccttgaagggaccagaattcctaaccaacctggcattcccaaacggggagagtccaggattcgtcgattccattaattcaggccttaaccagggggccatgcttttggtggttcccgccggtaaattcgttgtaggacttgggaccgaagcttcgatcaaccaaggacttaagggggttaagggaaggtattactaactaacttttagggctgttggaactggggcccaagacggg

SEQ ID NO: 111084 - DNA, 349 bp, Arabidopsis thaliana columbia
ttctttttatttttatctttttccatggatcttttcttttttttggctggtttaaaagcttttggatctttttttggatcgatctacgggccactgttaataccatcaacgacctaatccggtttaaatttttcctaacgaaatcgaaggaggatgggatcggttaaggcaccagtggttggtccggcaattggaccaaaacaggtgggggcttgtgcttaattggtaaactccactggtttgaaacctagaagccaatttgggggtaatcggccaaaaggggtaaggtttaagggcactaccccaccattaacttttagatggtgcaccaggagtttcaagggggttt

SEQ ID NO: 111085 - DNA, 395 bp, Arabidopsis thaliana columbia
ggggccgccccacccgtccgagaaattggggggggggtggagggtctggcttcagttgaatcaaagatgggcccttttttgtgggttttttttttccggcttttttggttggaggttcctgacctttcaggagggctttttttaaattggccttaaatttttccgcccttcctccttttttggatcaatttttccgggaaaaagccccattttttaaacccggccttgtcctggtaatcaagtttgtggggtaagggatgaatttggggggggatctggggggaagtttccttttttttttcaaatggcggtaaaaaaaaagagtttttattagggaggagatggagattagattttttcgtttttgttggggggatttgggtaaccgcgaaccc

SEQ ID NO: 111086 - DNA, 360 bp, Arabidopsis thaliana columbia
ttcactcccttaacatttttaataatccataacatttcctttggcaacccaccgtaaaccactacctaagagatcaatttggctggggggatgaagtgggcttgcttggtctgggctggcttgattggggccggtccaataacagcgaacgcccttttgagtgggggcaccgtcaacggcaacctggcagggggcattgcctacttgacccggggggctccacttacccaggggggctgcaccggcgttactaaccttaaaaccttggccaggccaaccccaaaccgtaagcaggcttgccgtggctttaaatctgccgttaaagccgttggtcccggtttaaaaactgcccgggcagtt

SEQ ID NO: 111087 - DNA, 305 bp, Arabidopsis thaliana columbia
ggccggccttttttggaggaacaggagccttttggttaagcccaaagttaaccattttttcttttttggaaactttccggtggccctaccatttaggggccattaattggttcctttggtttttttaaaacccaaaaccaaagttgttcttaaaagggttgggaagcctaaaagcagggttggggttggcatttttggaacgtttggggggatgggtttaacaaaggcgaaggagctattcgtgggtcgggtggttttgatcggtttcgttgaatcgtggtttgggggggcgtggccggaaaagg

SEQ ID NO: 111088 - DNA, 379 bp, Arabidopsis thaliana columbia
gaggcttcctttttttttttttttttttttttggcgaggaaaaagaggaggagggggatcagggacctcgaagggggggggggggggttggcctcctttggcctttaagtttttttttttttgggctggaatttcgtcggcaaaaagggccataaatcggttttggcggttgttattccgggttcaaaatcaacctccgttgcggatttttacgtggggggctggattagttggccatttaaaagggggatcagttccaaagggatcctttccatttttaatccagatgattccagtttcggccttaaaaacgttcgatcttttggacctgaaggaaggaaaaaggatggtccacaggttcttccaagtgccaaagttt

SEQ ID NO: 111089 - DNA, 111 bp, Arabidopsis thaliana columbia
ccacacgcgtccgttggtttagaccgctggcggtcgttttagaggatccaggcttacgtccgcgtgcttgcaacgtattagtttttttatggggcaacctaaattaaatta

SEQ ID NO: 111090 - DNA, 398 bp, Arabidopsis thaliana columbia
gccggcggacccggcccggatttccggggtggcccacacccgtccgaatggttggatcatttggggggaaaaatattggttgtttaagggatgcttttttcggggccatggaaaccagttggtttaacgggggaaaaaacggcggttaggggattcccgtcaggaaaatcaagaccgccaggcctttcggaattaacggcagcttggacttgggggacggcgtcaacccttccggcagaaagggcaggggatccggggtttccaagtccgtcgccaggtttggagctaacgtcgatggatccagtcttatttacaacaggaccaaggggtcagcgaggggtgactggtccaagggaggagtaaccggattggcaattggggcggtaactttggccgga

SEQ ID NO: 111091 - DNA, 290 bp, Arabidopsis thaliana columbia
ccttggcccccaaacccaaaggccgttggattttaaatttaagttcctcaaccccagccattaaatcctgaaaggctggaagataaattcggccaaaagggcataaaattttgggaatcaaccaccattcctatggtggagcttaaggtcagaaagggaggttcattaaacctgagtttatcaaagcctcatgtcctttattataacccaaaggtttcctggaaggacaagggtttcggggaagtccttaccacatttaatggtgataagagcacaggtggggttggtgt

SEQ ID NO: 111092 - DNA, 389 bp, Arabidopsis thaliana columbia
aatttttggttccaggaatgggaggtttggcgacctcacttaatggcttttccacactcaatttggttcttggaactaataaccttaaaaccttaaactttttaaaaccaatcaccaccaaataacaccctggtaaaaccccagaaataccttcaattcccaacgtttttaagttctttaaataatcctttttccttttggaagtaatggaatggctttttttcttggacccacaggttgcagaaccagttgggggagatttcggatttttagaagggggatcattggcgtggatccacccaatggggagggggggttaattggcttccacttttgggacgggttacttaggtgggcaatggagacgtgtccgtccgatccagaggggg

SEQ ID NO: 111093 - DNA, 393 bp, Arabidopsis thaliana columbia
ggacccggcccgaccaacccttccgatactaatccgggaataatggcccttttcttttttaaaaaaacctaacagggaaaggggggtttttgaacctccaaaaaccaacaggtaaaaacctgggaacccctgtaccaaaaatggacttggaacaaaacttccgaattccatagcctaagggttcggggaaaaatctccgccaaaatctatagcccaataaaaagaatcggcaccggaaattattccaagggggacccaccaaccacacaaggcgggaaactaccggaaaaaaataataaggccccggccaaagtaaaagtccacgacattttaacaccagatggggaggtacccaaggtaccatccccggatggtaatataacccaaatcact

SEQ ID NO: 111094 - DNA, 400 bp, Arabidopsis thaliana columbia
tttgccaccatggtgccgtttccttttttctaggaaggggtttttaaccctttgggtttttttacaagaaatcgtttccaacctgcttaaaaaccacttttaaggatgtggatgaataaatctgaaaattggccaaaaggggatggcccccttcccaaatgggggggattttccgggactttaacggattccttaaggtaaagagggtaactggaggcaggatcttgaggatcctaaaagctaagggcctggctcttgaaatccttgaggatcggacccatctaataaaaaaggttgtggccatccgtaaccatttgggggggaccaggaaggccagggtttccaagttaaggttcattttggttgaaagcaggattaaccgcctcgttcgttttacaag

SEQ ID NO: 111095 - DNA, 393 bp, Arabidopsis thaliana columbia
  unsure (1)..(393): unsure at all n locations
cgggncgggaatccccgggccgccccacccgtccgtttcttcttaacttttccttctcctttaaaatcaaaaaaatcgtttgggccaaattggacgtggcgttaattttttaagcaaaatttggcggaggaagatagccgtgaagttaaacggggcgccaaatttgaggaatcaggtcctttttggaaggtgaccaagattgacggcaggatctgttcgaaaggagatgccaaggcggcccctttggtgcttcctcccgcggcggaggaatccggttgaacggcggttggatggcctgtaagccatggtagcgggattggcaagccgatcaggagaaaccaggggaatcctggttttttaacctgcctgggtcgcatggatgaattttgcagc

SEQ ID NO: 111096 - DNA, 377 bp, Arabidopsis thaliana columbia
aaaaccgggccgcccacacccttccgatgccggaaaaatgtgaaaccagttaaaatgtatttgctccaattggaggaaaatgtgaccgccgtaataaaaaatttatcctaaaggaaaccagccaaaacctccttggcctttaactggcctcgaatccttgcccaagtttatttttgaaatcgtagaatgaatcgtttccatggtttggttggaacacataatctaatatttactctttaaccttcttttttcccttttttttaacaaggtttccattaaccttaataatgttgggggtctttaaggcactgttgccttggcttccttatggcttaaccttttacttgctttaatcgttgggccaataattctggttt

SEQ ID NO: 111097 - DNA, 431 bp, Arabidopsis thaliana columbia
  unsure (1)..(431): unsure at all n locations
ggncgggaatccccgggccgcccacacccttccggggccgtccaggaggacaattttttttttttgtttgaaaaaatgaagcacaccatggggaggcttattggtaatttaaaaaggaactgccaaatttttgtcaggacttggttaaaccagcctgccaggaaacccagaaaaagaatggcagggcaaaaaagggttgtaaagattttccttggtccaatttttggacttttccgccttgtggggcttggtcagatttttaagtccaccatgaaggtcagaaccggtaagggattaatttttgagaagttcagggttgttggtttccaaaagaagtgggcgcttccaattggttttgctgtggaccatggttgaaggacccgatttttgaggggttttaaatcaattgtccagaggctgaaaacctacaa

SEQ ID NO: 111098 - DNA, 188 bp, Arabidopsis thaliana columbia
agtcaaaacaataaaactttgaaattcagtaatggttgaatttcaactcagccgttaacatacttgaggtggtccaagttagcccgccgtcttttaactcgctcacactcccactcacttactttgacttgggttggctcaaacttcaccccgttgaccgagtttttttttaccacgtccccgagctg

SEQ ID NO: 111099 - DNA, 434 bp, Arabidopsis thaliana columbia
  unsure (1)..(434): unsure at all n locations
ngaagtttgcgatgatgatgatgattcaaataagaggttgtgagagacaagactcgtcgggggcggggtacaactttgtccataagttgcctcacggagacagtccttatgtccgagcgaagcatgttcagttggtggagaaagatgcagaagcagcgatggagttgttttggatagcgattaaagcgagagatagagttgatagtgctcttaaagacatggccttgttaatgaaacaccagaacagagctgaagaagccattgacgctattcaatcctttagagatctttgttcaagacaagctcaagagtcattagacaatgtcctcatcgatctatataagaaatgtgggagaatagaacagcaagttgggttattgaagcaaaagctttggatgatatatcaaggagaagcattcaatggcaaaccaaca

SEQ ID NO: 111100 - DNA, 283 bp, Arabidopsis thaliana columbia
  unsure (1)..(283): unsure at all n locations
ggggggnnttaggacgaataaaattaagaactctttttttttttttaatggcgaacgccnaacgaggggngggtaaagctataaggccaatttggaaactaaggaccaccaaagatttcttcttgcccataataaatcaaatacaagccttctttgaaaccatgtttccgatggagaaaccagagccatccaggaaaggctctaaccctaataaaaagtggggtggtgccatggttgccggtgttgttgaagccataaccactaacggcggtttttttttttt

SEQ ID NO: 111101 - DNA, 130 bp, Arabidopsis thaliana columbia
ctgtattgaaggacctgaaactgttttttttttatatagtactcctatcgactcacggggataccctttcttttttatacagaccgtagttttgattaggattctataattgattggcgttgaacaataa

SEQ ID NO: 111102 - DNA, 242 bp, Arabidopsis thaliana columbia
acgttccaccttcaataaccgaatatctccaccagaagactcggtattcgcgtgccactcccaaccattgtccatacatgaatacatacaaaatggatcaaatgatgcaagccttgcagaacacatgggaactcggatatctgatcacatattcatgactccaaacaagttttcagaggaaatgatcaagtgtgcatcagctatatattccaagctcgctgatccaccatcgataaaccacg

SEQ ID NO: 111103 - DNA, 203 bp, Arabidopsis thaliana columbia
cccacgcgtccgaaaaaaaaaacacaaaaggtctaaagggcctttttccattatggacgaacaacacccctgccggggagggaaaggctgtaaacctgtcccccgcaacatccgaagaccacgaaagcgggcgcgtcgacaatgaggaagaccgagggcacgcaaaagggccaatcaagaaggccaagggacggatccgaccg

SEQ ID NO: 111104 - DNA, 457 bp, Arabidopsis thaliana columbia
ctcttctttaatccctcacctcaagttgtcgtcgctctcttgagtgtctgggttcatctttctgacatctgctctgccaagatgtccgaagacaaggaatctgatgtggttggagaagaagaggagagccatgtgatcaaagaagataaagagttaaatgatgcctccaacgagactctgacagaaaatggtgatcagctactccaaatgattgctgaactgagattagaaaatgactttctcagatcccaatttgagggactcaaggatgaggtagcgcaaggtaggtctctccagaaagctgagcaagtggaagcggactctgctcagctgaaacaacttcaagaacaggtcgcatcattgagcagagaaattgatgtggaaaaacaaactcgagttgcagctgagcaagctcttgagcatctaagggaagcatactctgaggctgatgctaaat

SEQ ID NO: 111105 - DNA, 392 bp, Arabidopsis thaliana columbia
ttcttctttaatccctcacctaattttgttgtctttctctagagagactgggatgagggttgctgacatttgctctggcaagatgcccgaaaacaaggaatctgatgtggttggagaagaaaaggagagccatgtgttcaaagaagataaagagttaaatgatgcctccaacgagactctgacagaaaatggggatcagttactccaaatgattgctgaactgaaattagaaaatgactttctcagatcccaatttgaggtactcatggatgaggtagcgcaaggtaggtctttccagaaagcttagcaagtggaagcggactctgttcagttgaaatcaactttaagatcaggtcgcatcattgagcaaagatattgatgggtaaaaacaa

SEQ ID NO: 111106 - DNA, 270 bp, Arabidopsis thaliana columbia
ttgaatagggggccgacccatcttccgttaatacaactttagtaaccaaacttatttttttaaatggccaaacctctacacaggaaccgggtttcttttcctcagagcccccaaccccctcccatttatcaactccgccagacttcttgacgagatccaacctcatcctaaattagtcccaaccgtccaaatcccctctgtgtctccaacctaatctcaggaagatgttggaacctattacaacccattactatcaaccactaccacaac

SEQ ID NO: 111107 - DNA, 169 bp, Arabidopsis thaliana columbia
  unsure (1)..(169): unsure at all n locations
gacaaagagaggtctgagtctttcggaatgtcttgtctaaaaaaaaaaaaaaagcnttgtatgagcggttgaaaaggtggtggaaaaaaaggcttccgtaatttcaaacttgttggacaaagccaaaggtttctttgcggagaagctggcgaatattccgacccccgaa

SEQ ID NO: 111108 - DNA, 440 bp, Arabidopsis thaliana columbia
gtctcctaacaagcctgccaaaaaacatgcggccaaatacccatcaagtacccgttcggaaccgggtcaggttgcggtgacccacgtttcacacgttacatcacgtgtgaccctgaccaacagactttgacgctcaccacccacacaggcagttaccctatcacttctgtcgactacgccaaacaagagatctacgtcactgatccgtccatgtctacgtgtgcatgtacccgacccagccatggattcgggttggattgggacgctccgttttctttccatgacgacaccgtttttacgctccttgactgttccgtagacgaatcccctgtattcacaccgttaagtaacggtagcggacgtgtttccctctgtgatcgtcaaagctcctccatttgcaccttcttgtactcaaattgcagggccataagcctcataaa

SEQ ID NO: 111109 - DNA, 443 bp, Arabidopsis thaliana columbia
cgggccggcccacccttccgaatgaatatctggtgccagggaacctctttttccatgtgtaaggaatttcccttccgcgaacctgtttaatctggggcagggcaatcctaaataataaacaaaaaaggctgcgccccacacaacttttttttgttaaaaaaaaattttataaaaataaccccctttttcggggaacccaaaagtgttattcttcacctctttttgggagcacatattttacaaaaccatggtttacttttttaccctccagggtataaagacccctcctaataggttgaaaaggcttaaatttttcctaccacaaagaatagcttctatttataaaacccagaaacttttatccactatgctcaactacttaaaacaaagcttgttatttatgtgcaaggacaaggatcatcagtccctccacctgtcttgac

SEQ ID NO: 111110 - DNA, 393 bp, Arabidopsis thaliana columbia
cttcctttcaagaaaattggctgaatccattttttgttttctccagagcctgccctaaacaagagcagggggcatttttaatggggtttggccaacaaagatgaatcttaacctgttaaaaaaaaaatttttgatgcccgcaagcttatctttaatagagctgagcatttttccaaagaataccctgagaaggataccgagttgatcccttaaaatcggtaggctaagttgaaaggaggtttctacttttaccctgaggctaagttgttctttatcattcgtatccatggtatcaatgccattgacccaaaacccaataatgatttttcctcttctccctatgaaacaatactttaatggtgtttttcttaaggttgtcattgtaacatttaa

SEQ ID NO: 111111 - DNA, 457 bp, Arabidopsis thaliana columbia
gaagatgaataataacatggctagaacaagatacgatcgtattgagaataaccagtcaagcgctcagtgttccaaccaccatagtcccagacctggaaaaaaggaagacttcaaatctccttcttcttggggctctacctctacctactggctacatgcttgtaccttaccaaaccttctttgttcctatcccaacctaaagtggtggtatgaggtacaccacccaaggctccccttgacaacgacttaactaaaccagaacggctgatgactcttggacacccagaccagaacctcttcccatgtttaaagggagatccgacttacctagttgtagagaacgacaagactctagcgacatacggtatcaacgcagtgtgcactcatcttggatgtgttgtgccatggaacaaaactgaaaacaagtttctatgtccttgccatggatcccaataca

SEQ ID NO: 111112 - DNA, 327 bp, Arabidopsis thaliana columbia
atgaaagacagaccatctttggccaaaattttaaaccctgcgtggaaaaaactaaacatcccgggactgacaaactgatagaggctacttaaagaaacatgggattgattgtggctactacgtctgctattaacgggtgcagttttatagttactacgcctaacaacactagcttgatgaggggagcgcctttattatccttaggggctgagctggctctgactgatcctctcaaagtaatggatgactctgctaataaagtgtactacctgctggatagtcatcatgaaaatttcatgcgtaacaagtttgctaatccggaaaaca

SEQ ID NO: 111113 - DNA, 414 bp, Arabidopsis thaliana columbia
aatagttggatcatcttgttagattatatattttctgctccagggatgctatctggggagagattgaatccaactggggtaagggcgtataaaacggcgtctagagaattaccttaaagaagataaagaccgacaagcccttcggatttaacggcagcatgtacttgagggacggctttaacccctccgtcagaaagggcaggggattcggtgtttacaattccgtagacaagtatggacctaacgtctttggatacagttctatttacatcaagaacaaatgttcagcgagtgttgtcttgtacaaggatggatttacataattgccaattccattcggttacttttcacctgtattttttccgaaggtgtcttttttgctttcaacaaaagtttttttcctaataaaatttt

SEQ ID NO: 111114 - DNA, 409 bp, Arabidopsis thaliana columbia
atggcggaaaaatgtgaaagcagtttttatgttttgcaccaattggaggaagatgggaacgtgttattaatagatgtatccggaaggagagcatgcataaactgcttgggctttaactgggctcggatactgggccaagtttattcttggaatcggaggattgatcgttcccattgctcgggttgaacacataatcatatatttactctttgacccttctttctccccttttgttaacgaggtttcaattaagcttgatgatgtttggggtcttttaggcactgctgcctttgctttcttatagctttaccttctacttgctgttatcgctggggcaatgatgctgagtttgaaggtaggtcttcattaccattcatgcattgaaatggggggcctctctatggaactc

SEQ ID NO: 111115 - DNA, 281 bp, Arabidopsis thaliana columbia
ttttgggacgggggttaaccaaccaaccttaattaaggggtggggggaggccaaacagacggaagctgtccttcctatggtttccaagaaggctgcccagcctgcaaggcccaaagaaaagcctaaaaaaaaggaggccccagtggcaaaggcccctaacctggctgaaaaggaaaaggccccaaagcccaaagccaagaccctttttgactggttaccaccaagccctatggttctagatgatgggaagaggctttactaaaccaccaaatttaacttcc

SEQ ID NO: 111116 - DNA, 366 bp, Arabidopsis thaliana columbia
gtccgaacggtcgggaagggaccaccggaacctcaataaagggccccgccggcggtaactgcaaagggagcttggttgggggaacctaaccaaagcggcccaccacctacggttgcaaagcggaagggagggccgtaccgccggttcatggaaggggttgggggcatttcttcttttgttccggcccgcctttacaaattaagccaatagtcgacaagcctgaatgggccgaataaaaagccaccagcctgggggggggacaccaacctcgttgttgggccattttcaagaaccaggctagggggagggggtcccatcgccgagaagctggtgggaggccgacaattccgttgcaacaaatttaag

SEQ ID NO: 111117 - DNA, 194 bp, Arabidopsis thaliana columbia
aaatttctaaaaatcttaaaacctttttttaatttttttttaccgggtccaagaggcagatcttggttaggactctaaccggaaggacattaaccctggaggggtaaggttccgccccaatcgccaccgttaaggccaggatccaggttagggggggcattcttccgaatcatattaggtttattttcgccgtc

SEQ ID NO: 111118 - DNA, 224 bp, Arabidopsis thaliana columbia
cggtttggatttccgggtccgaccacacccgtccggtcacattactttgaagccgaagctgaagacttttaatggtttagggccggtccttccgggttatccggccaaacctaactttggaggggcctttttccggcgtaccgccggggccgtgtcggccattaccggagctttttccggggctggattagggaagaggccagctgattcgttggatccaggga

SEQ ID NO: 111119 - DNA, 301 bp, Arabidopsis thaliana columbia
ggcggaaaatgggggatggataagcttttttttcctttttttaaactggggggatctgcaatcgagggcctttttgatgctaaacggggccattaccttcccaaaaggttaaggttccccgggttcaaattggattgccaaatcgattcctgggccgaccttactttaagttacccgaacctcaacacctaaactttggggggttactaaatgcagaagcagcagcgggtgtgtttccgggccttgggggcaacctaggttaattaagaccaggaaggaggcttactggttttacaggttc

SEQ ID NO: 111120 - DNA, 363 bp, Arabidopsis thaliana columbia
tccgacaaaacaaaaaaaaagggtttccattgttttttaaggcgccatggtgggaccttaattaatcggcggttcccaagttccaataagtttcggttcctttccataagccaacacacattcctttttgggcctaaaataaggcacggttggggggggccgggtaacagccttggttccatccagggccaggttaataacaccagaaggggggctaggggttgggtgtgccgccaccgtttacgttcttgatgctgttggggaagctggaatcgtttggcctaactttggccgggctggttctggttcgagctgggctgggaaagtggggtctggttctgtggttcagctggcccagggttt

SEQ ID NO: 111121 - DNA, 343 bp, Arabidopsis thaliana columbia
tgctggttttacctgtaataggatataaatttcatcctgtcccagataaaaaagacccgattttttaggggtccttaaggatttggaccaaataatggggggttggggtttttaactgttttacctttaaggttttatctacctcccactggtggctgctggttttacctgtattaggatttcattttcatcctgttcccctaaaaaaaaaaaaaaaaaaaaaaaaaaaaaaaaaaaaaaaaaaaaaaaaaaaaaaaaaaaaaaaggggggggccgttttaggggtcccaggtttacttccgctggcttgcaaggtattagtttttttttggggccccctaat

SEQ ID NO: 111122 - DNA, 421 bp, Arabidopsis thaliana columbia
tccagaagtggacgacaccatgggccccgaataagggggttaagggggcttaaaagaaaaagccggagaaggttcccacccaatggttggagagacgcccaaagcatttcggtttggggggcgctttgcctcctaagagggacctttttggttccataaagggcctaagtaaatccgttttaaaaggcagaagcgtttccttaagcaaaggtggagggttcctccagtttttaaccagttaaccaagacctttgttaggaatctggccaccagccttttaaggatttttttgaggtttaggccagaggccaaagccgtaatgaaggaacgctttttgaccaaggttaaagctgaggcaaaaggaaagcctgttgattccaagaagcccttggttgttaagtttggtttaaaccatgtgact

SEQ ID NO: 111123 - DNA, 245 bp, Arabidopsis thaliana columbia
ggattcccggggtggaccacacgcgtccggatatgggttaatccagagttggttttggataggccaaattcaagtccccaaagctaaaaggcaccctggccgaagtatataggacctccctcaaaagcaggggtccctttaaaaggcctctttttaacaaagggttatgcaaataggttggttagggaaccattaacggcttccttttaaaatcggcccaatggaccttcaagggtggttggacc

SEQ ID NO: 111124 - DNA, 231 bp, Arabidopsis thaliana columbia
ccgcgtccggcccattactttgtggccgacacgaaagaattttccattggtgagaccaagcacgttcctgaattcttggccaattttaacttcttaaggaacctcttcacgggtgggagggccagcaagggaaggccttccccggggcccaattttctggtgaaccttccaagggggccctaagttccttggcttcaaccagggacggggccaccggaggatttggaggcc

SEQ ID NO: 111125 - DNA, 295 bp, Arabidopsis thaliana columbia
cggttcggatttccgggttcgccccacccttccgtggaaaccgaaggccataggtttaaaagtaaaaggtttttccatattggagattattttggaaaattttaaccggaaaaccatgttggccagtttttaatccttatggtttacctggctggggggttgtgggaaatggtacctattaaccccatgtgtgtaagatggaaggagggggttgtccaaggggaggggggggttggttgttgggattaaacctttgccgaaaggaggcctggttggtcacgtgatggaccttttc

SEQ ID NO: 111126 - DNA, 275 bp, Arabidopsis thaliana columbia
cggatttccgggttggaccacacccgtccgttttttttatggataactcaaatttattagaccttattaaagggggtggctaccgcaaggtaggcggggaaattatggtttggccttgattattaccaggcaacctcaaaaccaatggggattaaaccatcggtttaattttttttttaacagaataattttttaattgggggtccctttggccaaccttgccctccttagccttttgggactaaccttaaccggggttttttccgggctgggcc

SEQ ID NO: 111127 - DNA, 394 bp, Arabidopsis thaliana columbia
ggaattccgggtcggccccacccgtccgattaaccaaaaccactagagttaagttccttttagggtagggaagagagggcggttgggggtttagccgggttcctggtggttttaatggggtttaaggcagcaaccgaaccaggaccggttccaaccaaaatggtcggacctggtttggccaaccaaaaaacctttgtagcgtccgttgtggtcgggggacctgttggaattgggggacccgggggggttgaacctgtttttgtgggtgccgccgtgggagttgtgggtgttgccgaagttttgcctgttgccggggtaggcggcggatttggtggcttaggcggtggtgtaggtggccttggcggcctagggggcctaggtgggggttcaggtt

SEQ ID NO: 111128 - DNA, 428 bp, Arabidopsis thaliana columbia
aattccggggcggaccacagccttccgtttccaaccacggggaactgaaacctttccggccttaaatctggggtagtggggttaaatgttggtttaaccgggaaggtttcttaaaaatattatctttggatgatgaaaacaagatttttggatgggttttggaggaccgcgatgggatcggtttttatcggcgggggcatggaatttttaatgaccaaaactggtttttacgccagggttcctgtattaaaaccaaagagccggccgtgggaaaattctcctgaagctaaagccataaaagaagctcttaatccttggaggaccagggccgcagaaccaggcaaaaccccttaattcattcagggagctctttaatcctggtttaagtcaatttaactctaaaaactttcgaaaaggctgcttaagtt

SEQ ID NO: 111129 - DNA, 390 bp, Arabidopsis thaliana columbia
agaagcttcccttgcccagggggccccagtttaggaagggtaaggatggcctggttgcccaaggaaggcgtcgttttgaccgtaaccattctggttttgggggtaaaaccaagcccgttttccacagaagggttaaaccacctaaaaaaatggggctggggtttaattgccaaagttgcaggcttttttggcaccgcccgtttaaaaggggcaggccctttgggaccgggggggccaggaggggaaggggaccatctttttttaaagtggtggttcaatcaatctactttttttggtttggttgggaccctgccctgcttaaatactgggatttacttggaatctaccagaatgggcccgggtttttaattaaaataggacttggccttt

SEQ ID NO: 111130 - DNA, 359 bp, Arabidopsis thaliana columbia
gtggaaatcggaagagtagcactggtgaactccggaaaaaaccatggaaggctcgtcgttttcgccaactttgttgaccaaaacaaagttttgggggttgcccctgttttggaagggatccaaatgaacttaaaaaggtggttttttaccgtttttgtaattgacataaaccggttgccaaaaaaaaaggctttgttcgaggcattggaaaaggctgttgtgaaaaacaggtggaagaaaagctaatggggtaggaagctattcgggcaaaaccgtagggttaaccttaacaactttgttaggttcaagaccatgttggccaaaatcaaaaaagctggtgttgtaaggcaagagcttgc

SEQ ID NO: 111131 - DNA, 363 bp, Arabidopsis thaliana columbia
gtttatccgccgaccaaaaaaccttggccagaaaccgggagctaaaagtaatcaacagaaaatgggccatgctggaagccctaggctgggttttccttgagctatgggttaggaccggagggaagttcggaaaaccggttgggttaaaggccggttaaaaaatcttaagcgacggaggatgggactactggggcaacccaggctgggtcaacgctaaaagaatttaagccattggggctactaaggtaatcctaagggaagctgtggaaggctacaaagtcgccgaaaatggtccatgggaagaagcaaaggactggttttaccaagggggaagtttgaaccaatggggcctggttactgacc

SEQ ID NO: 111132 - DNA, 281 bp, Arabidopsis thaliana columbia
cgtccgtttggttggtaaggttcttacgggaatgatgttcttattaaggggtcccaactttatcccgggggggaagaaggatctgtccactaaaagtgttaaaaggactgtattttggatgggtaagaggcaggagacaggggaggtggtccttgggggtaccactgttgttatggttgggctgaaccagttaataaccaaaattgctccattgactaatgagaaggaggtggttgttaaccccatccgggctttgaagtttctggggcttcctgtggttc

SEQ ID NO: 111133 - DNA, 332 bp, Arabidopsis thaliana columbia
  unsure (1)..(332): unsure at all n locations
ggggccgacccaggcttccgngaccccttgggaaaaaatcaaaaaggaccttttatttctccagaccggcttccaaagcaggcaagggtttttttttttcagctaaaaaggctcccttcttctttgaaggccaacccattggtgctgcggcagcggttccggcgccgggaaaaatcccttggtttgcatctaacttggcaggaccatcaggtcctggggtggcttttaagagtgggaccactggcctctaagcttttcctgctgaagcttttatgattcaggaccaagaggtccttgctgctgaaagggaccgacctttaatggctttcaag

SEQ ID NO: 111134 - DNA, 287 bp, Arabidopsis thaliana columbia
ttttaaatctttttggattcacaatccatcttttttaaagggccgggtcctggggtgggatcttttaagcttagctggggataagggctactgcaactactaatgcctgggcctggattttccgccctggtccttaaaagccaagattcctaaccggtttttccggtgggtggaaccgggactggccgtttccatggacgggttcatgggccaaaacgtcgcggttcaaggttgaggctaggaaaggagattggttgcccggttgggcatggcctgataatctaacc

SEQ ID NO: 111135 - DNA, 333 bp, Arabidopsis thaliana columbia
gaaaatggaattcaaaaaggaaaaggcaaatctgttattctctgtggaagcctgatggacctgaccggacctattgcggaggaggggttaactgcatttgcccgggggtaatggctgcggttccgcctgaaaccggcttggccggggttgccaaaggaaagagagggggggtcctttgaaggcagaaaattctaatccatggattaatttcctcggttcctggccaatttttttttttttttcctaatacgtccgttcttggcaacctaattcgcaatctgctcaatcgttctttgggggttcttaccatggaacctttgtttaagccatgtt

SEQ ID NO: 111136 - DNA, 312 bp, Arabidopsis thaliana columbia
agaaaccaggaactttgttttggaagattcccgggggaggggtggatggggccagctgggttttgcccgttaaggttaatattttggaggttccagattttggggaaggaccaaagggggatggccaggaccattttggccttggggaatccgaggggaaaccgggcaaaaccattggcaagggttgcgtggccgttaaaaaaaagagcttagggaggccattggaggggtttttggcttacggggtagctaaccagcccgctgggggtttcgggggggctctttcccgggggaccggggaggggatttgcc

SEQ ID NO: 111137 - DNA, 334 bp, Arabidopsis thaliana columbia
tggaaggccctagattttatggggagccatttgccgtttctttaagggaccaaaatggacgttgccggggtttccaagggttttagtggaaaagatcctctgtttggttcgggccacttttttgaggggattccaacccacttgtaagggatggaatcgttttttcaaggttgccaggggtttggcaggaaagcccatggaaaaagccgaaaagcagtttcaacctttaacgtggcccaagacctccaggattggccctttaaacgtaattttccatggaaccactcaatttttagaggttaaaaatgaggtaagttaactcgttcctaacttt

SEQ ID NO: 111138 - DNA, 282 bp, Arabidopsis thaliana columbia
cggatttccgggtccgcccacacccgtccgcaaatcctgaaattaaaaggaggatttgggttttctccgggggtgggggatccgccggagtcaaatttcgtagctggatttttcctccttttccccccaccaagctttccaaaaaagggaggggattcttgcaaaaccggaaaacggggaaggaatttccgaaattaaaaaatggtaaagtgttggattccggcaaaaagaaaaaatctgaaaaaaaattgataaaattcggggagtaacctaggtttttga

SEQ ID NO: 111139 - DNA, 343 bp, Arabidopsis thaliana columbia
gggaaaggattccaaggattttgatgggaggacgccggaggctgaggcgattaaggaaaaggcccctcaaaattctgttgagaggaaaacagaacctgcggcaattaaggggaccgaaccccaaaagtttgttgtcaaaaaaaccgaacttgcagtgccagaggagaagagtaccgccttgagggcggaggacccaaccggaggctggggggcgattcaggttcaccagcagcagggagctgcagtttccgggagctgttaaaacctttttggttttgtccagagcccaaagcgtgaaaagtttgttgggatttcaggggtagcattaacattatgaggggtt

SEQ ID NO: 111140 - DNA, 371 bp, Arabidopsis thaliana columbia
cgaatttttaaatctttttggattccaatcaattctttttaaagggccgggttctggggcgggaccttttaagtttagctggggataaggctactgcaactactaatgcctgggcctggattttccgaccttgtccttaaaagccaaaattcctaaccggtttttccggtgggtggaaccgcaactggtggtttccatcgatcggttaatcggccaaaacgtcgtcgttaaaggtggaagctaaaaaaggagaagggttgcccggttgggcatcgcctgattatctaaccggcggtttggccggtgacattgggttggacccgttgggtttagcaaaggacccaaagaacttgaattggttcgtccagcca

SEQ ID NO: 111141 - DNA, 321 bp, Arabidopsis thaliana columbia
  unsure (1)..(321): unsure at all n locations
gganttccggggcggacccaggcgtccgttgaaacttggttcttttcctccttcctaaaacctttaacgcggttcaagacttccgttggttaaccgaaagagcttccaaaggttttattggaaaaataacttgggaccttagcattatctacaagtaatctttttggttaaaccggtggggattcctactggggattcaatttggaattggttccagccaaggctgaaggttaaactaaaaggagcgggtaaaaagcatgaaggacgcaccattggttggttcctttggcaaccctgattggtagggagctgaggagcgag

SEQ ID NO: 111142 - DNA, 312 bp, Arabidopsis thaliana columbia
ttggatccggtggaggatgatccttgcttaccaactgaggaaaaggttccaatcctgatggcttttaaccggcccatttccaatcctgatgggctttattaatggggtccgaaggagtccaggattttatgggcccattttaaccatgtttttgcagttttttgggaactggaaaaagggtttcaggaggctttggaggaaattcctagaaaaaggggggcagggatggccaagtttatctgccaggaggtagaacctgtggatgactacaatgaatactgccactatgtggctggcctggttggttaaggt

SEQ ID NO: 111143 - DNA, 398 bp, Arabidopsis thaliana columbia
ggaattccggggcggaccacacccgtccgattgggaagtttcctcggctttttggttttctttggatgaaaggggaccagttttggattggaattttttggctttaactgttatggcaactgggattaaccagttaatattcttggtaataacggtttttttaaaattggaccaagtaactgactttgttggtggaaaaaacttggttttactggctgggttaacacttgttttaaaagcctttgggcattttcaacagatagtttggactttgctagttggggtttggggcctccgctggggaattttccttttaatgaggacctggcattggggggaggaccgcccctttgatgaccagcggggaaatatagggggactaataatttttgggactt

SEQ ID NO: 111144 - DNA, 285 bp, Arabidopsis thaliana columbia
ttacaacaaaggccgggaaaagggccacgagccatttttgaacggccatggatcctaaagaaggcccccaggattccaaccaaatccctcaattctccttggaaaccaaaggtttaaatttgcacccataagggctctcaatgttttggagccaagcccacggacaaaattaaacagggaaggctctttttgggctgttccccaaaagaacattagaataaaggttagggaaaaccaaaaggagctaaggctttggaccaaagcgaaaaaaaatcctgttgtatc

SEQ ID NO: 111145 - DNA, 375 bp, Arabidopsis thaliana columbia
gaagacattaccgtggggaaaaaaaaaaaggtaggaccgggggagggaaggccttgtttgcgaaaccattcctataataagtggtttggggggttttggccgccgattaagcaggggttattttgggtttcgttgggtcaaccccgacccgatgggtttccgtgggcctccggggggtagaaaaatctgtttcccagatcttaggtcattctggtaacgttttttttttggttggtttaattaaccgttttggtaaaaggtttcaaaccgggggggagatgaagcttcgtttttggtttttaagggggattctggtttggtccagatccaccaccaggaagggcttttttaccaacctcggggttaatcaattgg

SEQ ID NO: 111146 - DNA, 359 bp, Arabidopsis thaliana columbia
  unsure (1)..(359): unsure at all n locations
cgggncggatttccggggcggaccacacccttccgttggaaggttggcaacctccgttgcctttaatcccatggacaccctgaaaatttcacaacggtatcgattacggaacgacggaaacccttttgttccaggggagggaattggcccggaccattggctctttataaggggcccaattaagaaaggtaaggccgtttattggaccactgttaacgcctgttaagcgggttattaagcctaggctgggcgggcggtcaacataacaagagccgtgacattttaaggatggatttaattccacggatggggagctatttaccgtacttggtacgactttaacagtccggaaaagcaaa

SEQ ID NO: 111147 - DNA, 162 bp, Arabidopsis thaliana columbia
ctggatttccggggtggcccacacccgtccgaagtattttaagccccaacccgttctttttttttctagcgggcctaaacttatggccggcggttcctataaaaaagtaactgggaaaaccttcgtccactttggacctacttcctgggaaatttaatgttg

SEQ ID NO: 111148 - DNA, 380 bp, Arabidopsis thaliana columbia
tttaacccatccttctccttcctctaattttaaggtttcctcctcctggcccttccttactctttatatttttctaaatcctccgattggacccaccgttttaccagatctttgatctaaagggcttccaccggggttaaaggcctgaccgttggctccggcgagatgctaatggttttggtccttaccgaataaggcgtttttttggccgaagctccgggtttcctaaaggctccaggcggggctcccgttaacgtggaattcgttgtttttggtttggggggccaacctgttttcgtcggaaaactgggagacaacaggtccggccttatgtgggctgggattttggggaaaaccggggttgatgatcaggggattaa

SEQ ID NO: 111149 - DNA, 376 bp, Arabidopsis thaliana columbia
aggaagggtccattggggctccttaagggggattttcttaggctgggaggggtttcaacggggaagctttttaacaaaaccataatttttttaatgggccccgaggtttggtccaactttttaaccgctattgaatctgacctaagccggaaggaaatttccaaatttaaggggcctcctttgggccccggggtggggttggaggtggcctttcccgtcgggtgggggcagttccgatttttttccagggctttaagggccaacaattaaggggttttgtggtccagaggcctaaggaaccggaggattccttttcaaaagggggggaagggggggagggggatctaagggccgggttggggcgtttaatcacctg

SEQ ID NO: 111150 - DNA, 362 bp, Arabidopsis thaliana columbia
  unsure (1)..(362): unsure at all n locations
aaattnngggttggacccaggcgtccggggctttacgccaattaagggtaccgattttttgttttttttttaccgtggtggccctacgtagaacaatcggggccggaaaatcgggacctccggaccaggaccttgacaagacccgtaaacatttccacccccccaaacgagggaggcctaaccggttcctcgataaattccaacccggaggaaatcttcttcccggggacgggggaggtaattccggggggggtaaaaactccaagccgttggacataaacaaaattttcgttgccaaaggggaaaaaaagaaacccgccccgattaaaccttacactctgggacccaaaatttcagatggg

SEQ ID NO: 111151 - DNA, 393 bp, Arabidopsis thaliana columbia
taaagaaaacctgaatcgcatttctaactaaggcctggccaaggaggctcgggggcaaattttcttccctagggattccggattggccggtcctcggagcccggtttgctcctggccggacccgaacctaacctccaaacctgtaatcggtttccggagcaaccctgaaaatgggccgtttggtcggtggaccaatgatccaagctcgacgtccatcgttgttccgaatgtaaagtccgctaaggcaggtggtgctcgggttatcccactaatttacaacgaacctgataaagtgctcttcaaaaacctaaagtcggtcaccggggtaaattccactgggggttggcctaaaaaatataattatttgaagaccgccaaaaaaattttcactaa

SEQ ID NO: 111152 - DNA, 380 bp, Arabidopsis thaliana columbia
gccagagctggtcaacggccgaggggtttgtctcggggccgttgggatgctttggccggaggttttaaccaaaaccggaatattaaaggttccggaggggtccaaggctgggaaggagcagtttttggcttcgtcgtcaccatggttcgggaccaagtcaatatggtttaattccgtggggaccagacgggggcaggacatcaaaaccccagaaggggtgacccaagaccttatttttaagcattccagcttacctaagggggaagtgggttcccctgggggaatctttaacccgtttaactttgttcctacgcaggaggccaaggagaaggagctggcaaccggaaggttggcaatgttggcatctttagggttggggg

SEQ ID NO: 111153 - DNA, 255 bp, Arabidopsis thaliana columbia
gaattccgggtccgcccacacccgtccgaaaaagggttttaacagaaggacggttttttcttttcaccgccgcggaacccttcagcggggaattttccccacttccgggtcgtcaataatgatgaaccgtcccaacgcctaaaagggggaccacctacttcttgccattattcatgcccaaaacctggtccttagacttgggactcacttttggacccgccgggggtttatcttaagttcccggggaagtgtaac

SEQ ID NO: 111154 - DNA, 359 bp, Arabidopsis thaliana columbia
acccgaagccaaagaaccaaattcgcagccattagtcgaaaagggctgaaatttcggggacttggtttccttcttttttttcctcggttttggcaatccgtggctccaacatgggtggcttaaaaggtcagatggtagctgttccaaaacctacttcccagttccaggagttttttttgaaccgaacccggtttgttggcattgccgttgttcccggtcttgttcccggttccggcagttgcaagattaaagcttttcgggctgttttttccggggttggacccgccttgcctcctgattcaagggaggctggccttcgtggaaacctgaaaaaggtggttctagcttacaggggaggc

SEQ ID NO: 111155 - DNA, 378 bp, Arabidopsis thaliana columbia
gccttaagggtcctggttgaggacttaataaaagcaatagagggctggacccttactttaaacgttttttggaaaagggttaaaaggaacccaatggggggttttcactggttggggacccacaccaccacccatgtgatttttacaactcctttactacgggttcagccttccatggttaagaaaggggtgaaggcaagggagctttcaaggaaaacaaaggggctgagaaggaaataatggcctaaaccatgggagggggttaaactttggttggcagccatggccataaaactggaaccacggttttgggggatgtcgaaaataagtaaggagcaacttttatggggtgaagaaaagatgaaaaggctcaccttt

SEQ ID NO: 111156 - DNA, 437 bp, Arabidopsis thaliana columbia
  unsure (1)..(437): unsure at all n locations
acgggncgggaattccgggtcggaccacaggcgtccgttttttttttttttttttttggcctctttttggatcaaaatttaaaatctagttaaaccagggggttgttggtgaggaaaacctaagggggccgggattccaaggtaaaggacatgtttaaggccgatttgggtggtttggaactcaagctcgccaaagttgaaatgcctggactaagggttggtcttaccgatttgggaccttttaagccattaaagggggctggaataaccggtttttttaacatgaccttccaaacggcctgactaatgaaaaccttaactgttttgggggctgaagcaaatgggggttcctgcaacattttttccattaaggacaaccccgccgaagccttggttggtaattccgccgttgttttggcctggaaaggggagacttt

SEQ ID NO: 111157 - DNA, 421 bp, Arabidopsis thaliana columbia
aaccaccaccataacaggaaggcgtccttttttttaggacccttggtccctgttcttttttccagtttaatggtaaaatccgctgccattttaacaccgcctaacttttttaagttttttccattcggggctctttttgggaatggaagaatcaagattagcatgggcccatccatcaaaatcggggaatcctaaagaggttggcatggggggggtggcccgtcctccaagggggggctttttgggacctttttaatctttaccggccccaaagctgggacctttagctatggcagctgcttggaagagagcaaatgtggacccagctttggtccaggaggtggcctttggcaaggttcttagggctaattggggccaagctcctgctcgtcaagctgttttaggggcaggaatccctaac

SEQ ID NO: 111158 - DNA, 328 bp, Arabidopsis thaliana columbia
gacctgagtttttagcatgggcgaacctaacccctaaatccatcctttggatcctttccgctctcggggggaccgcctttgctgaagttttctccgaggagaaatccaaaaatggttggaaaaagagatgggtaaaacctgcctggaaaaaagatgttattcctgctggggatgggaaccccccagctggaaatggtcctggggatgctaccgataaaggtttccaacctggcggggcctccagatcctcccctttttcagctgaatcccctgggtttaccaccagggttaaaaccttagccttccaattctttgccaagcttgacca

SEQ ID NO: 111159 - DNA, 428 bp, Arabidopsis thaliana columbia
caaattaagaccatctcaataaatcttttaaaaccttttccaattttttagaaaaaccatgtttggctgggggggaggctggggttggggatctgcctgcaggtccggcattggttgcgggggttgcaaaaggtcccctgccttggagaccaccgcccccgagactttggtcctcggggttgttccggcgttgaactttcagtccagggtttccggcgggactttcgttgccgagattgttgcttgcaaatgcggttctgcctgcaggtgcacccctgtgccctgcaaatgaagaacttcttaacccctaagtctgtattacccctaaggttttgttaggttggctattatgtaataatgggctgatttttccggtggttttgccggcgacgtgggccttcctctcctccggggggggtttttatggg

SEQ ID NO: 111160 - DNA, 432 bp, Arabidopsis thaliana columbia
tacggtcggatttccgggttggccccacgcgtccgaaaaagggaaggggctgggggggaatgttttaaccaggcaacttaaaccccatgaatccaactttggacctttaacttaatcgaatttgggatggttggggggggttggattggcccctttctttccgccaggacagggggctttattggttgtgggagcgtaaaacccacctgtggtggctgttagggttggttcttcaagggtaaaaaccacatggctggggaaggtgactgcaaatcatcgcatggggtttggagctgactgggttgtttttttccaaactttggcaaagatcatggaaattccaaatggttggcccttataggaccccaagcgaggacaagaagtcaaaaccagtttcaaaatttcctggaccaattttttcccaagtaaatt

SEQ ID NO: 111161 - DNA, 426 bp, Arabidopsis thaliana columbia
aaccaccaaaaaaagggctggttttattttactcaccatggggggtttaataaaaaccatcttttttggcggattaatcttccttataattccgaccggtcctaaggggcccaactaacacttcttaacctctttaacaggcttccttggtttaaccactccaggcgttttttggggggctcaaagaccgattggtttaagtcaaaaccactcaaaggaccaccgaagctttgaagctggccgttgcagttaaggccaggagagctaaagaggctgtggtcaagggccgaccatcctaagaacccctagttgaagttttttccaccatcaacgaccagtttaaaaccgaggttgtcgttgttcccttaaccaaagtaggacgcggtaagaaggtagttttggtggcggcacccggggatcggggtt

SEQ ID NO: 111162 - DNA, 390 bp, Arabidopsis thaliana columbia
aaaggacggttggttgggtttttaaggttatttggagacctatcggtggaggaggcggttccggatttcagaaccgttgcccgccgtcgttgattccgttggacgccgtccagccgcggtttccgggtccgggaaaaggttcttccaccttagggaactggattccggggttcgaccggttggggggaccttaggaggggctaaaagggatttaaccaaacccggggttgatctaaggttttttaaaggggtggggcagattttgggggaggggcttcgaccccgggttatggaaggatggatggggaaggcgggcaggggtccacgttttgtggggggtggccgaagcaaaggggttaaggaaaagctaacctccggaactggggtggt

SEQ ID NO: 111163 - DNA, 368 bp, Arabidopsis thaliana columbia
aaacccttaagaattttaattttttaacaattccgaggttaacggtttttccggttccagtcctaatgggaaccacctaaaaggatccttccatgggggcggatttggcaaattttccaacggaggactggccggcctttacaacggcgggggatttttccgaggaccttttggagggaatcgattcctccaccaaccttttaatgggttccgagggaaacaatgtttggccggattgggagatagatccggggattctgggggaatattccggtggcggaggagatgaggaccaggaaagggggggtaccacttggccggcttcggaaccatcgaaaagggacgttggggtgggtaagcaaaagggg

SEQ ID NO: 111164 - DNA, 361 bp, Arabidopsis thaliana columbia
  unsure (1)..(361): unsure at all n locations
gggnntggaattccgggtccgaccacacccgtccgaaaggaccgtttccaattaaaagctttgtctgttttggaaggagtcctctaaaatcctggcggttgcacctgccatggtgggaccaactaagtttcaaaccataaggaagggtttccggggggattcagtggtttggttggggaagaccccattgatgaaaagacctggggggattcatgctgttaaaccggccattcaagctttcctaagcctccttccttttcttaaggggaaggtggggtggaccttaactaagggggcctggaaggaagccagtgataaggttgttaagtccagggtgtgggctcctgctcggtgaggttaa

SEQ ID NO: 111165 - DNA, 303 bp, Arabidopsis thaliana columbia
tggaattccgggtccgccccgccgtccgctttcttttcccataggtaaaaaattatttttcttattcctcctccccggttaaaccaccaggaggcattttttcttttggcgttctccgtttattcaaaacctttcggggggattctctggggaaggggggaacctattccgtccggtgctaagtttcccctctccctttctactaaaagggcggccttttttcttcctatctgaacatctttggttttcgctttcggttttggcaagaagggtgggtctttcttttgcctgggccttacccat

SEQ ID NO: 111166 - DNA, 301 bp, Arabidopsis thaliana columbia
aaaaaatttttttaaggagcttggaaaacccttggggaggtctaaggtccagcctatgctactcctcctggaataactttttttttaaccggtttgggggggggccttagatttggattccggggccaaaaagggaaacaattccggacccgcaattagcatgggggcctttcaattggtggggcctaacgaaaacccacccataattataaattaatccggttttgcaggcaaaaccatcccggcggaacccttggtgtccgtagccttaaggagagggggaattaccgggccttttaaa

SEQ ID NO: 111167 - DNA, 394 bp, Arabidopsis thaliana columbia
gggttggtcccagccgtccggtattttttgccggcccatcctagggcaagctaatttaaagggggcaaagtggcaaggtgctggcgttttttgatgcaaacctacccggaccggtttatttggaagcgctcctccagggggcaaatttgtcctgggcaaaagtaccaagggggaatctaccgaccgctaccttctatggaccgccggtaccgggaaccccatctttcaggggaccaacctttccaggcccagcctcaactgtggcccttttagaagatgaccagggggtttccctttgcaaagttgcggtgggagttaccgcacttccggggattgcaccccggaacccattgttgggcacctaacctttgaaaggaaaagcttcgacctgggg

SEQ ID NO: 111168 - DNA, 324 bp, Arabidopsis thaliana columbia
  unsure (1)..(324): unsure at all n locations
agaaattncggggtggaccacacccgtccggccggtaacggtttcctcacaagctcaaccattttttttattactcttaccggttttatctggccgggctactactttttttgccggtatgggccggctaaaatcaacggcaacgttctgttttactgggaaccggaccagtcctttgccattttgggtccggccagaattaaagcgcgcttggggtaagaacaataaagtagctcaagctccggaggtcaaattggggacgcctttgaaaatgagggggtatccgaatcctatattacggtctaaaaacaagaggatggcttt

SEQ ID NO: 111169 - DNA, 354 bp, Arabidopsis thaliana columbia
cggatttccgggtccgccccacccgtccgtttgtttcggaggcaaaggaagcgttgttgacccgaaggggaaggaaatggctcgggcttgggacctcgccggttgcaaattttttgggccaattaaaccaggcggggacgtcaaaacaaatcctaccaatgggtggccggaggggttcatggcccgagtagcaggccggggttgggtttggggtgggcctcaacagggggaagggtgggcccataaagcattaggaggattggggcctaactggggtgggacctccaccctggaaagctaatggttgggggttcctgccgcaccggggccgttgtccgcaaagcaccagcttac

SEQ ID NO: 111170 - DNA, 405 bp, Arabidopsis thaliana columbia
gtttggccgttaaggtttggggaaaggattttatctggagcatggtttccagttaaggtggtggtaaccaaaaaggccgcccttaaggttaaggcttggaaggctgcaaaggcagggaaatttggccaaatggttaaaaggcctgcgaggaaaatcaggccaaaggttcctttcaacaggccaaagccattgcccgttcttagaaggcctaagtccccaaggatcagggttcctccagggaccaaatgggttctttaccagatcctaaggtcccctttaactactgattctgccttgaaaaagatggaggccaccaccaccttatttttaattgttgccttccgtgctgccaggaaaaagaccaaagatgctgccaggaagatgtttgactttcagaccaagaag

SEQ ID NO: 111171 - DNA, 375 bp, Arabidopsis thaliana columbia
gaaatttccaaagctgaggcatcctggaaccttggttggttggagcagattaccccaccagcggttaaaagcgattcctgggggtcctaactaaggccggttttaaagggcgatgagactttcctggccaggggatctaaagccgcccttaacatggaatctttgggccaaggggcctatgctttattaaagggaaaactggcaggaggcggccttggcaaccagaaaattttttgggttttcccgattaatctggtacccgggccaaccccattcgacctccttagtgttaccgtagggctggcgatttatggagcttcctttgccttatggggggcaggattaaccggacctgtgccacttaaaagcgctaaa

SEQ ID NO: 111172 - DNA, 342 bp, Arabidopsis thaliana columbia
aaaatctttctctatttcaatggcttttttttttttaaatcttcaacttttaaccaaggttatgtccttggtgggggattggaccctaccagctttttcgttggggtctttggggtaattaaatccataatctgtggttttagcggggtttagcagggttttagagttcctgattgggaacctcgattagcagcagctaaggacatttccttagctcaggttaaaggatgatggccctccaattaatggatccccttggggccgatctgggtttatctaactggattcgggttcccaaatctagccttttaaggacagaaatcggtttcctctgtggtggag

SEQ ID NO: 111173 - DNA, 295 bp, Arabidopsis thaliana columbia
gccagggggcaaaggaagctgatccatggtttttttccaattggaccaccttccaaaggactcctggcgggagggcttattcgcagccaaggcgccccccagtttcaaccgaaaaatgggaagccttttggtgggggggctgcttctgaccatttaaccatgacctgtggccaggatggggggtccacttttaatttttcccatttccagattttcctcgttggtcaagaagaaacggttttggtggatgtttccaccacccatggttaccattaaacctcctccatggcagttt

SEQ ID NO: 111174 - DNA, 410 bp, Arabidopsis thaliana columbia
ttcccggggcggccccaggcttcgggaaggattggggcccggcctgggcccgggaccccccttggatttttccttcacccttttggggcggttgttggggaaggaaaaggctgttgaagcttccagtttttggctgtttggtcctacccctgggggggggtttccttttcctgagcttacccaaccaaacgggtctttggaggatccaccacagtttttggtccccttggcaggggagtcaggggaattggaggctttagggctggtggttttcctggggcggccaaaagcaaatgtagggttggctgcagtgggtaccagttgggaggtggagggatctggcaaggttaagctggtagcagaggttttctttgttgaggttgcaaagaagccgttggacctgatggggt

SEQ ID NO: 111175 - DNA, 417 bp, Arabidopsis thaliana columbia
gggatttccggggcggccccaggcgtccgttgggcccaaggggggaaattcggaaatggttggggccggagaaaaagggggcggttttggaaggctttcttggacccaaagaggaccttcctggttggattgcttttgaaggccatttttactcgccttggaggatccggcctggggtccgatgacctgtccgaccggttttccggtttggccttaaaagaggttttgaccagatggcccaggggggtggtggttgctggtacccggcgtttaaggcgtgcctgggccctttcattgaagcacgggtccctccccagggttcttaagggggggcagacccaattcgggggtttttttcaggactggctggctttggtggggagggaaggcagggaccggggggccttgggggtttta

SEQ ID NO: 111176 - DNA, 317 bp, Arabidopsis thaliana columbia
  unsure (1)..(317): unsure at all n locations
cggatttnnaggtccgaccacacccgtccgaccggccttgaacacaaaccggttaacaaatttttagcgagggaggactcgattcctggggaaaccctacttgggtccaccctaaaagcatttgggccattggggccactaaagtaatctggatgggagctgttgaaggctccaaagccccagaaaatggcccgttggaagaggccgaggacttgctttaccccgggggcagtttcaacccatgggttttggctaccgacccaaaggctttcgcggagttgaaggtgaaggacctcaagaccggaaaatgggttttt

SEQ ID NO: 111177 - DNA, 395 bp, Arabidopsis thaliana columbia
ggatttccggggcggccccacccgtccggagcctggggtggttcctaagagtattaattttttttttaatcctaaggtccagagggttcaaaaattggttaaattaccgcagccggttcttgctattaaaaaaggaacctttttggatgggtggggaatgatggaagaattcctaaatcggggtttaccaaatttggatttttttttctttccggaatttttttatttttctagtccatttaaaaggaacccttgggccttcccaatcaaattcctttttttaaattttatggaaaccttaatggttattaaaaggatcatccgaaggaaaaaaggttttttcccttcaatggaaaaaaattcccttcatttttttatccggattaaagaagaaa

SEQ ID NO: 111178 - DNA, 445 bp, Arabidopsis thaliana columbia
ggatttccggggcggaccacaggcgtccgtttttttgccacattaactactaatcttttttgcattcttctttttttttacacccgaccaaccccacttttattttatcaggaaggaagatgtttagcaaaggatcataacgtcaaaaacagtcaggaggctaaggatttttggccgaccaaatttccgatctggtttttaagctccaacacctaatccttgaacttggccgccgccgttctgccagggggtaagcttttaaggtcctacaggagactggcacctccttaaggaccttccacaggggggtggttgacctaatggaccgttggtgggacctctgggtttcgacggacgacaccagggccgaagcagccttaattaggagctggcttattttttaaatccgatttactaattctgagggctattattaatccgtttc

SEQ ID NO: 111179 - DNA, 205 bp, Arabidopsis thaliana columbia
acccgtccggccaaaaacgggggtaacctggttgttttttttgacccccttggtgaacttcacagggccggtgaaccttttattgttccaccaacaattctgttaatcctagcaaaaaaatattctatattgggtggaaattaaggaacttcttggaccgccgtgccttccaatggggtaagaaagagtaccttaggccatggcc

SEQ ID NO: 111180 - DNA, 271 bp, Arabidopsis thaliana columbia
gggatttccgggttggccccaggcgtccgagcacctttggcaccaccatggccggggatgggcctggggggatcatccataaccaccaaaccctgtttttaatcctttttaaaaccaacattaagggccaggaaccctttgggactggccggggcatcggggggaaagagcacttgctttggaaggaactggttggggggggatttgaacggggtaggatttgggctgatcggatggctagctccgccaggcattccagggattaatggga

SEQ ID NO: 111181 - DNA, 397 bp, Arabidopsis thaliana columbia
cggggctttggcctggtgggctaaagggtgcttgttttaacctatggaaggctgattagttgatgccattagagcttccagtcctgataattccccagtaaaaggctttttaaacacactcaaaaaaagagatcggttgggccgaccccctttttatgggccgggtcctgggcaacacaaaactccggggcccgattaacttttttacaggtggatgggggattggggcctaattactgaagtaagaatccatcctttcaaagcttattttaaggggggcaatccgtttttacttttaacattttgttggtttccggtggggtaacgaaagggacatttaactctactccaccattttccaggataaaaaaggggggccaggaaagagttcaattga

SEQ ID NO: 111182 - DNA, 186 bp, Arabidopsis thaliana columbia
gtctaattcctaccgggaggcgggcctttgtccccgggaagctcttaaaactgtctgccggttggggccacttacttgttcggattgtactaagccgatttcaaggaaacttaaggctcctcccaaccccctttaattctctgaagttcctctaaagattccggacccaccgtgggagtccctggg

SEQ ID NO: 111183 - DNA, 289 bp, Arabidopsis thaliana columbia
cgacccacccttccgtttggaatatgggcaaaagtttcacttcgcttttttttgtggaatggagtccccttcttgggcttcaaccgttggaaaactagcccgctgtaagccaccatgggctttcaattgcccgggattaaataatcgcccttttttcctcgtaacccgaagggccccctaaatcttttttctggttccaaccaaaggggggggtatccgctgcatcaaggggggtttgcctttcggtttcccacttgaagggcctctgaaggcccgcaccaaccttttc

SEQ ID NO: 111184 - DNA, 303 bp, Arabidopsis thaliana columbia
accggtcggatttccgggtccgcccacccgtccgaggaggaggaggaggatgaggaaccggagctttctttatgaggaagaaccggtttaatttggccggaaaaaaataaagatgtgggggaattaatccttggatgaccatttattgtgcaaggtcgaaggaaacaacttaaaaaacgcggcctttttgggccaaaacggcagtttcggggttaaaagctaagctttccttaattggaagcctgcaagattggcaggattaaccaaaaactttgaaaaagccggccatttttgccccaaccg

SEQ ID NO: 111185 - DNA, 418 bp, Arabidopsis thaliana columbia
ccgtccggtgaccacaaaacccgttcgttgtttccttgaccattccgcctccttcctatgtgcaaagggttgggatggccaaaaagcattttctatggcctcaagaccagcatttttggcggcattttcaccaggaaggattggagggccaacctggttgggttaaaatgaatccagcccaaaccgcatggccttatggtttgccgccggttaacgggttgggaccgccgccgatgggtttttactccaccacccctaactgatttaatccatttggttggcttttttcttccatttatttcccgcccaaggtatatgtgttataaggcggttttctttgtattggtccctgaccttgcgtcctattattgacacctgagaacttttgcctttttggagtttggtgaaataatgaagt

SEQ ID NO: 111186 - DNA, 412 bp, Arabidopsis thaliana columbia
cgcatccgttaaaagcaggaactagaagctttcctcctttcctactctttacacattttttttttttttaaggagctagcaagggccaaactaataacttttttttttttactaacaatttaattaactttggttggcctaactaggccaaaagaggctgagtcccatccaaaaggttttggcccaggaggtctgaattcttcccaaggggggggccattgcccagggggatgttgcaccccaaagtttcttaggccatgcttgtttttttgccaaaagggttgggctaaatgcctttgggtccctccaggcccgtccggaaccaaacaagggggtccttgttccaccacctggaagactcaccaggggggaccaaaaggtccataaacaaaaccattggaggagaaacccc

SEQ ID NO: 111187 - DNA, 203 bp, Arabidopsis thaliana columbia
aaaaggaggaggggaaccaccaggaggaggtatgggtttcctttatgttctcctcaacggttggggttacttcccgggttaaggcaacaatggtggttcaattaacgggttggaagtaatccgtttttttccgggtaacccgaagggccaacaacgacattacttccataaaaggcaacggaggaggagttagctgaatgaag

SEQ ID NO: 111188 - DNA, 421 bp, Arabidopsis thaliana columbia
ggtttggaatcccggggcggccccaggcgtccggaaaaaacaaggcatacccccccgattatgtgtttgggggctcctccgaccaggaccaaggtggggcttttccgggacctccaatgtcccataccgcgaattttaaggccggggattccataattttcttcctttttacccccaaggtgtttttccggacggggtttccctcgggccttggttgttggggggtgtcctcttactgcggggtgggatttcccgagctggaaatgagggattccatgtgcttagccggtagttattaaccccattctgtggagaaggctttcttaccaaaggactttttaggggttggttggaattaaaaggaatgggccggttcgtccaaggttaggtaggtctgttgcccaaaaggcaagatttttta

SEQ ID NO: 111189 - DNA, 326 bp, Arabidopsis thaliana columbia
caccggtcggcatggagcagcggtaactccactaaagggcccggcggcggtgactgcaaagcgagcatggctcgcggcaactcaacaaagcggcccaccagcgacggctgcaaagcggtaaggaggggcgtagcggcggctcaatgaaggggtttggcgcatttcctcctttgttcccgcccgcctttaccaactaagcccatagtcgacgagcctcgagaggccgcatcagaagccaacagccttgggtggtgacgacgacctcgatgatgtgacgatttctaggaacaagctcgtgggaggtggatccatcgccggagagcttg

SEQ ID NO: 111190 - DNA, 429 bp, Arabidopsis thaliana columbia
cacaaccaaaaaaaagaaaacacaaaaccaatgtttataatggcttcctcaaccatggctttgtcctcccctgccttcgccggaaaggctgtgaagcctgccgcatcagatgtcctcggaagcggccgtgtgaccatgaggaagactgtcgccaagccaaagggtccatcaggcagcccatggtacggatctgaccgagtcaagtacttgggtccattctccggcgagcccccgagctaccttaccggtgagttccccggtgactacggatgggacaccgttggtctatccgccgacccagagaccttcgccaggaaccgtgagctagaagttatccacagcagatgggccatgctcggagccctaggctgcgttttccctgagctattggctaggaacggagtgaagttcggaatagcggtttgtttc

SEQ ID NO: 111191 - DNA, 394 bp, Arabidopsis thaliana columbia
agccacgcgccaggcgcatgagtttggttcatacacagctagctttggagaggccaaattcaagtccccaaagctcaaaagcacccttgacgaagtcatagtagcctcccttcaaagcaagtgttcccttcacaagtccttctctcacaaatggatatgtcaataggtttgctagtgaaacattcaccgcctccctttcacatcggccacattgatcttcaaaggctgatggaacaagattatgacatcggatctactattcgggaaaagattattcctcgggctgtctcatggtttactggtgaggctatggaagcagaggattttgaacccaatggcgatctgactatggtcctgtgactacaatgacaacgatgagaacatggtgtcattt

SEQ ID NO: 111192 - DNA, 148 bp, Arabidopsis thaliana columbia
aaattggggtagacacgaatcaatcttccattgttagacgaagcacagatcttcactctttcacaagtttcagagcataaggaagctcatgactgttggaggggcatcaatggaagggtttacaaggggaccaagtttcttgaagacc

SEQ ID NO: 111193 - DNA, 434 bp, Arabidopsis thaliana columbia
  unsure (1)..(434): unsure at all n locations
caccgcgtcgcnngtttttttttagaatacacttcaatatnaatacgaactttattataagaggagtacgctaacggcaagagtagagcagagaaaaataattgattgtgacagtgattatataacaaggcaacacctcaaaaacaatatggtgattaaaaaacatctgcttaatctttttgttttcacaggcatcattctcttcaatagggtgtacccctttgacgaacatgcctctccttagnccttcttcggactcaaccctaacgcggtgtattnttccggagctgagccaacagaattggctcttggccacgggcacaagaaagtggtctgagcttgcgttacacgttctccgggtttgccgccccatgtttttagacaagtgttttgcaacgcacgtgcgtaggaaaaggacacgtgccatgggtttt

SEQ ID NO: 111194 - DNA, 259 bp, Arabidopsis thaliana columbia
  unsure (1)..(259): unsure at all n locations
tactaaacaaaaacactatagttaagtttctataatagtaaggaagagatgccatttaagaatgtttccaaaatctctcagactctcaaaaaanctcaagcagtcaccttaccattaccgtttccaaccaaaaatttcgatatctttttttgtcctccataaaattctttttttttgttcgcctctattaaaaaactcttttaatttcctccattaacaaatatatttcttttctttttttctttacacaacaaaataa

SEQ ID NO: 111195 - DNA, 410 bp, Arabidopsis thaliana columbia
attacaaccacggtgaactgaaacccttcctttcataaatcttgggtagttggtttaaatcttttcttaaccgggaaaggatcttaaaaattatatctctggatgatgaagacgagatttctggattggtatttgaagatcgcgattggatcggctattatcgtcttaggcatggaatttttcatgaccaagactggtttctacgacatggttattgtttttgatgcagagagacggccgttggaaaaatctactgaagctcaagcctttatagatagcttttaatctttgaaggaacatggacgcaaaaccaatcaaatccccttaattcatcaaggtgcttgttaatttttgatcaagttcttttacttctataattttcctattgctgcttaaatttcttattgttt

SEQ ID NO: 111196 - DNA, 136 bp, Arabidopsis thaliana columbia
gttgagatcggaagagtagcacttgtgaactacggtttaagatcatggaaagctcgtcgttatcgagaacctttcttaacaaaacagggctttagaaaattccctccatattgataggaaccagccgaacattaaa

SEQ ID NO: 111197 - DNA, 127 bp, Arabidopsis thaliana columbia
gaagattgaattcagaaaggaagaggcagactggttattctctgttgaagtctgattgacgggatcgttgctattgcggaggggggctttactgcattatcacttataattgtttgtcatttccctt

SEQ ID NO: 111198 - DNA, 441 bp, Arabidopsis thaliana columbia
  unsure (1)..(441): unsure at all n locations
cggaancccgggccggcccacgcttacacttgatactgttgaggatgttactatctttttttctgatgaaaaggttcccatcctgatagcttttctctcaaacatatacgggccttattaacattattcatgtggtacaaaggagtacaaaattctaatggaccaatttcaccatgtttctgcagcttttttggaacttgaaaaagggtatcaagaggctatcaaggaaattactagaaaaatggttccagggatggccaattttatctgccaaaaggtaaaaactgttgatgactactatgaatactcccactattttgctgggctttttggtttaggtttgccaaaactcttcctcgcttcaggatcataagttttttacaccaaatttgtaggctatttccaattcaatgggtttatttctgcataaaacaaacattt

SEQ ID NO: 111199 - DNA, 427 bp, Arabidopsis thaliana columbia
atcgaaagttagcaaactcccttgactttaattccatggataacctgaaacctccaggagggccttcaataaagcacgggggaaccccctatcctccacagtaagtaattgaccctgaccacaagcatcttataaatcttcaaatatcagtaaagctaacccatcaattaacactaaaaacaccggttcagccgattatttagcctaatctaagctgttagtaaacaacaccataaccctgaccatttaacagaataagaaattccaaggaaagagaaccatttacctcacctagtaacaccttaaatgttctgaaaaacaaaacaacccaaatttaaacaaattttgtacagtctaaacaaatttcagtattaacacttaaaaacatcttatgagtcttacttaaggctttacgttctaaactacg

SEQ ID NO: 111200 - DNA, 195 bp, Arabidopsis thaliana columbia
ccgaattcccggggcgggccaaggcttccgaggttgtacgccaattaaaggtacccattttttttttttttgttaccgttgaagcctctacggggggaatttgggcgccgatagggttcgtatactcccattcatgaactacgtctagcatccgaaatcgatttccacgacacgcaatacaaggtcttgcgctaa

SEQ ID NO: 111201 - DNA, 240 bp, Arabidopsis thaliana columbia
  unsure (1)..(240): unsure at all n locations
cccatcaagnaccctctcgcaagcnggttttttaaaatttaccgacttttaacacatnncatnactttttacccttaccaacaacactatcctctaaccacccacacatacacttaccctattacttctttctactaccccaaacaaaaaatctacttcacttatccttccatattaacattttcatttacctaacccaacctatttttttatattaatttatatccaccattttttttt

SEQ ID NO: 111202 - DNA, 431 bp, Arabidopsis thaliana columbia
  unsure (1)..(431): unsure at all n locations
caaaattcccggggggacccaaacatncgtttctctctctctctttttctgcctttttttttattcaaatctcaaatctacctcaagcaggtctttaatcatcgaggggacctcaaaaaacccccaatacaaggtcaaagacatgtctcaagccgatttcggtcgtctcaaactcaagctcgccgaagttaaaattcctgaactcatggcttgtcataccaaattcgaaccttctcagccattcaaaggcgctaaaatcaccgaatctcttaacataaccatccaaaccgccgtactcatcaaaaccctaactgctctcggtgctaaaatcaaatggtgttcctgcaacatcttttccactcaaaaccacgccgccgaaaccatcgctcgttactccgccgctgtttttccctgaaaaggtgaaacttttc

SEQ ID NO: 111203 - DNA, 324 bp, Arabidopsis thaliana columbia
ggggccggcccacgcgtccgaatcaacatataaatgcattgcaccttttattaccagtgtgaggtatatcaaaaccgtcggcctcttttaattcatgcacgcgatcattccaaactgaactaaaaagcccaactaccactcacctaccttcttgacaaacaaactttttttaaccaatccaccctttttttcgggaacccaaaaaccgtttccttcaatccaaaaacactcaacatatcacccaagccctaaaacttctccttcaacctaaagtcaaaacaaccactcatgctatgggcaatcaacgaccattttcataaaccc

SEQ ID NO: 111204 - DNA, 297 bp, Arabidopsis thaliana columbia
  unsure (1)..(297): unsure at all n locations
gaaaccactcgagctaagaaacttttcaactgcatataggtttttcaaattcnaacaagcggcaccttctacacaaatcctaacgatcttttaccctaggggttcatggccccactaacatccacgaaaaacgcaatgtgattcgcctccacataccaaaacctaaccccataaagcaatagcaggatttgcgtctcacaaagattacaactccacactaaaaaacttatggttccaaatacctttcacaacatgacctatatactcaaagcaacatcttaactcctccactcttgt

SEQ ID NO: 111205 - DNA, 426 bp, Arabidopsis thaliana columbia
agaagatcgtttacgattcaaagctttttctttttttgaatgagtactctcaaatcgggggcgtttcatctgacaaggggggatcaactcaccttcagaacataaggaaaggtttacgaggtgattcagttgttttgatggggaagaacacaatgatgaagagatctgtgaggattcatgctgataaaactggcaatcaagctttcctcagtctccttcctcttcttcaggggaatgttgggttgatcttcactaagggtgacttgaaggaagtcagtgaagaggttgctaagtacaaggttggagctcctgctcgtgtaggtttagtcgctccaattgatgtggtcgtgcaaccaggcaacactgttcttgacccttaacagacctccttcttccaggtgcttaacattccaaccaaaatcaaca

SEQ ID NO: 111206 - DNA, 156 bp, Arabidopsis thaliana columbia
cattcttctcccataagaaaaaaaattgaatcatattcctcctcctctgcttcaccacgaagatgcttattcttttgtcgccttctccatttaatcaaaatctctccgtgtgaatcgtttgtgaatggtggaaactaatcctatcggtgtaaagtt

SEQ ID NO: 111207 - DNA, 256 bp, Arabidopsis thaliana columbia
  unsure (1)..(256): unsure at all n locations
ttatactttccttttccagggatctaaaaccgnccttctcattgaattttttgttcaaaatttctatgcttttataaatggaaaactttcaagaagcggacattttaaaacaaaaattttttttttattcccactaatcttttaaccgtgacaaacacaatcaatctccttattgttaccgtttgtctttcgaattatgaagctttttttaacttaatggaagcaggaataaccttaccttattattttttttata

SEQ ID NO: 111208 - DNA, 432 bp, Arabidopsis thaliana columbia
gagccttgggttgatactaagagtaaaaaattttatattaatactaaagttcagaattatcaaaaaattgataaaataacgcagacggatcttgctaataaaaaaagaaacttttttgattggatgggaatgaatgaagaaatactaaatcagcgtataacaaattttgaattttttttctttccggaatttttcttattttctagtacatataaaatgaaaccatgggtcataccaatcaaattacttcttttaaattttaatgaaaacataaatgttaataaaaagatcattcgaaagaaaaaaggttttataccatcaaatgaaaaagaatcccttcgattttataatctgaataaagaataaaaagaatcggccggtcaaggtgaacttgaatcttttatagaacaataagaatttcccgaagcagtt

SEQ ID NO: 111209 - DNA, 305 bp, Arabidopsis thaliana columbia
ctttgaatattggaaaaaggttaagagtggcttcttttgtggattgccggaccgctcttggtgttgttcttattgatcagtaggaagctgccctgcacgatttccttccaatcgcgtccgaaccacaacgaggcccagcccctctaaaaccgtaaggtcccatcgcttttgatctcgttaaaccacccaatgtccttttctcagacatcgcatggcgttttttcctcgacccaacaggatgcatcagcagctggaggagaattcggaatattagaagggagatcatctgggttgatacacccaat

SEQ ID NO: 111210 - DNA, 319 bp, Arabidopsis thaliana columbia
  unsure (1)..(319): unsure at all n locations
ccgaccaacgcgtccgttcttcttcntcattacattccattcttaattttcagagagataaggttagagcaaagcactgtttgaaccaaacaacaaaaaaatgcttggctctaatctaacaccattgggggttcaataaaacccatttttttctgtggattcattttcttttcaattccgttcggtcctaaggggtcaatttaacatttcctaacctctttcaggggcttcttttgtttaccactccaaggcgttttttcgtgggctaagagcccgatctgttttatccaaaacaccttaaaaaacacccaatctttta

SEQ ID NO: 111211 - DNA, 200 bp, Arabidopsis thaliana columbia
gaaccaagatgagcacggaatggtttttgttctaatggggaagtctttttagcaatagagtagtgtgggttctaaaacttatggtcattccttatgagtccattgaagattatgtttatgctactctgttcctctatgtgggtcaagtacatccccttactcatgaaggtctcttactttatcctcactgttaattctat

SEQ ID NO: 111212 - DNA, 332 bp, Arabidopsis thaliana columbia
aattaaaaaagggactcagatcgcacgaatggtgcagaatacgcatcgtggacaccgccgacgagtttccttattggcggagcaatccttttatccgccgccggctatgttagatccgacgcctcggaccaccgtaacagggaaggagacaccgtccctttctaccccaacaaggtaggcccatttcccactccaggtgggacgtatggaaatttggatctaccctactgtatcccacagggtgtgaatgagacgaaggatgctctaggagcggtggtaaacggcgatcgcctagttagcgctccatacaagctaaacttcagagatgaaaa

SEQ ID NO: 111213 - DNA, 354 bp, Arabidopsis thaliana columbia
  unsure (1)..(354): unsure at all n locations
gtaaagacgataatatnttttaagcgcacttttttttttttcttggttgagctgcatattcttgaaagaggtattgaattcagaggattagatggcccaatgggtttatcatcaagagacaggtctggttaagaattcagtaaaaaaccagattattgatgcctgaagctctctaaaagtgttgggnntttttatttggtaaaggtgaggctgatgtctctaaaagctggaaacctggtgctgaatatggtagctgaaagtcatgtcaccctcttggatctttggtggaatccaactaccgaagattacgcgattgatcgtgcacatcgtattgtacaaactcgtacagttact

SEQ ID NO: 111214 - DNA, 409 bp, Arabidopsis thaliana columbia
  unsure (1)..(409): unsure at all n locations
caaccgaaaaaaaagaaaccacattttcaagtgttctaatggctgcctcaaccatggatttgccctcccctgccttcgccggaagggttgttaaacctgccggatcagatgtcctcggatgcgcccgcgtgaccatgaggaaaactgtcgccaagccaaagggtccatcaggcaccccatgtntcccctctgaccaagtcaagaacttgggtccattctccggggagcccccgagctaccttaccggtgagatccccggcgactacggatgggacaccgctggtctatccgccgacccagagaccttcgccaggaaccgtgagctagaagttatccacagcagaggggccatgctcggagccctaggctgcgtgttccctgacctattggctaggaacgaagtgaagtt

SEQ ID NO: 111215 - DNA, 175 bp, Arabidopsis thaliana columbia
  unsure (1)..(175): unsure at all n locations
cttatttttggataactncaatatagaagatttatttttctgcgaccggataggcttttttgggaaaaggtaatcccatatggagagcattattacccgtaagcaaaaaaatagttgtttgtaaaaggtgtacaaaaccgatggggcccaactctaccaccattagctacgagag

SEQ ID NO: 111216 - DNA, 342 bp, Arabidopsis thaliana columbia
  unsure (1)..(342): unsure at all n locations
gatttgggaagnttcgaccgatctgggggttttagggacaaaacccaactgctaggcaatggcgccacctccaggacggaactccggcaccagcactcttgctctggttgctcgagcttcggctttcgggtggggcctcatctacggcaacataaagctcaaggctaaaaagagtgttgtngnnttcgcagattaaggccgatgcaaaggctcatcacaaaaccaactcttcttctccttctcaataagattatgaagccaagggatggtttactctaaatgcagttcatatcctcctaaagctaaaacaccctgggggacattattaccaccttccggtta

SEQ ID NO: 111217 - DNA, 331 bp, Arabidopsis thaliana columbia
aggtttgaggacatgagaaatgtttttgaagatagggggccttataaaagaccaccagtgaagaaacttagcaacaaagcgtcattggtgtccagagatggtgattttgacttggaaattctggaacgtaaaactggtttgactttgggtcagagttcaaggggagacaggctattgactatgaggccggaagcaaccccattggactttttgatccgttctcaatccaagattgttccatatgagatcatagcccgtgcaaaacaggtttctcaggaccagtgtcggttcaagatgaacaagaaacttctgtagttaaaaggaacaaaga

SEQ ID NO: 111218 - DNA, 281 bp, Arabidopsis thaliana columbia
  unsure (1)..(281): unsure at all n locations
tttaaccacctcttttttttttttgcttcaggggaggaattggggccggatcaacccatggaatggaaccttgtaggttctgagtgaccaatccaagctcttgacggccttgtaatgtaactggaggattcattgactccatttttgatggaggtgggtatgtnnncatatccaaattatttgttccaagatctgtagagaccctttctaattgtagcaaaacctataggccctgaaatgtatctgcctgtcttgatggacactcaatggccaaatatttc

SEQ ID NO: 111219 - DNA, 424 bp, Arabidopsis thaliana columbia
  unsure (1)..(424): unsure at all n locations
ggccgacccacgcttttgttttgttggataccantacaatcacccaattttgtttttttgcctataaatgatggggactgggagaagcttcctttctatcgggtccttcataccacctacattttgtatccgatggctttagcggttgcttatatactcaatgggtggctttccattcattcttcgtgtaatggttctatatattagtatgggtttatcatttaacttggatagtgaactcaacttgttatgtatggtgaaatcaagtttggtacacaggcgatttgtttaataacaactggggggttgcagctttagcattctgggaaggatggcccaacaatcaccatgcttttgagttcttatcttgacacggtttataatggtggcaactttgatatgacttggttcgtctttaagtccc

SEQ ID NO: 111220 - DNA, 352 bp, Arabidopsis thaliana columbia
gcaaacctgaccgttgggaaaaaaaaaaacgtccgcccttgagagagaacgccatgtctgccaaaacaatcctatcttgagccgattaggagcttctctaagccacatcaccagggggtaatatgggaatacgcaaggcaaacccaacccgaagggttatgggggggcatcggggggagcaggaatcggctacccagatcttagaacaatctcttgaggaactcactatcgctcgctaaactaacgcgctggagaaaaaggatcacaacgtgggggagatcaaccttcgattctcgatttccaaggagaatgtcgattggctcagacccaccaccacgaagggctattctta

SEQ ID NO: 111221 - DNA, 375 bp, Arabidopsis thaliana columbia
  unsure (1)..(375): unsure at all n locations
tataaacacnattagctaaaagaaattattttttttgatggccaccttatccatcactaccatttttctagcgggcggtgtggccgcaccctccctagctggtcctgacatccatgtcgaggactctgtaggccgactacttcgacctggcaaaacgnaccacatcgaacccggtgaggacgggacaggaggaggtattttttcgaccagtgaagaaatttgtcctcttgacattttccagtcaaacaaaccgtttgacttgggcctacccatcaaattaaagtccgtgttttggttggctaaggaaatgattagtatcaccatcgagttgggggctccgaactgggttttgggtccaaaagaatccaaggtgtg

SEQ ID NO: 111222 - DNA, 229 bp, Arabidopsis thaliana columbia
  unsure (1)..(229): unsure at all n locations
caactaaatttttttttttatttgaaagattacacctacgggggatcttataaataaacttgtaatccaaacaccccgttttttaatcctttgtaatttctaaaggtgcagtattttttacctaaatgttggcatctattnactactttttatttcaatcgnnnctttagatttaatgttaactcttatattgagttcctcttatcctactatttttcatttttttata

SEQ ID NO: 111223 - DNA, 421 bp, Arabidopsis thaliana columbia
  unsure (1)..(421): unsure at all n locations
gccggaattatctacgactttgtcttcatctttgaaaatgcccacgagcaattgcctaccaccgattactgaagacgtcaaattcaacgttgttaatctgatgaatttttcgggatttgcttttttaatttgcatcgtaatgggtttttggccgttggatcatttttagatgaatctttgagccanggatggatcatttatgtgtctttgggtttgttgttggagttgtaatatctctggaaggcttttgtgcaattgtattgttcggtttaataactataattgagaaaaccagggaatgtgaatcatgaaaatgaatttttttgttattgtttattttacttaaagagccctaactaatttagatcatattttacgagacatggaaattttaatgaataataaacattgtgattgtttt

SEQ ID NO: 111224 - DNA, 277 bp, Arabidopsis thaliana columbia
accgtttggcacaacaccaaagaccatgattttattttttaccaggggggatgtgggataattagacctttggtacaagttctcgcgggcccaaactttgaataagagggggtggtcgcatataatgtagaactgggggagttcgaaaagacccatttcttgctctcggtttggttggacattacccgccacctggtgtgtaacactcgactgtcaatgaacacccccggaaaccggtttcatacgagacaaacgttgagaaagctgctgttcactg

SEQ ID NO: 111225 - DNA, 351 bp, Arabidopsis thaliana columbia
ggctaaggaggtggacgaccttatccgcaacatgtggtttccttgggtcgaattcgagttggagcacgaatttgagataccgcgagcacggtaacacacccggatactatgatggacggtactgaacaatgtggaagctatccttgtacagtggaacctactcctttcaagtgctgaaggaaggggaaaagcccaagaaggagtgcctcctggccttcattgggaccataaaggtggacaccaccggtcaagtccagtgcatcagtgtcattgcctacaggcctccaagctttaccggctgatttgccttggcttttggttaaacctaaaaatttgaacccccatcattga

SEQ ID NO: 111226 - DNA, 280 bp, Arabidopsis thaliana columbia
  unsure (1)..(280): unsure at all n locations
gactccgtcgtaaattctataacgtaaccattcctgttttaaatgacagtgggggttcaaatctcgtcggataacagctgaatagcgctcgttcctggcnggagcgattagcttattttacgacgaatgacttgccgatctttacgacgggtgtgtgttattctcaaagatgtgccggagcttttnnctactacgacggtcgttttattggatacacaggagacgaagttttgccacattcggggaaagattggatggatctacatgtaaattccgctgg

SEQ ID NO: 111227 - DNA, 406 bp, Arabidopsis thaliana columbia
tttatggagaagaacactgtttggaaacagtttaaatctgtaagaaagagctgattaaattagcagaggcgcttacgaaatctggttctacaaagaaactgcataagaaatctgtgtccttctttttctgaaagtaagtagaaacactaacttacttgttactgtaacacgcatcgcctaaagctacatgtatgtgtatatagatatagcttaaagtttgctaataaaaaaaaaaaaataattaattaattataccttaaaaataataaattgattttaagtaaattaatagcattaattaaaaaaatgagtaataattataaaataaaggggggggccgttttaggggttccaagtttactgcccggtgcttgcaacgaaataattttttttaggtggccctaaa

SEQ ID NO: 111228 - DNA, 312 bp, Arabidopsis thaliana columbia
cacgcgtccgactatagcagtttgaaactttttttattttaagcgctttggttgcgccggaaaggtttgttcttcctttagcttgagggcagattaagatcgattgtttcatgtcataaaccccatccacgttcaagactgttgtctcttctttaaaaaatcctgctctgctatgtcccaggctgccgtgagactagcgtgagctcgccaaggggttggtcctgaaggctaattttttgccggatggcctttgtattgatcaagatcccagattacttaacggcgatttgctgaacattatggttataccca

SEQ ID NO: 111229 - DNA, 130 bp, Arabidopsis thaliana columbia
  unsure (1)..(130): unsure at all n locations
cgaaagaaaaaatgttgaagctgntttaaacgatagttttctctgttttgccgttaacgttgtacataccgcggttaaaatgttggacggggtgggcggaaacaatggaggatatgggaatggaaggtag

SEQ ID NO: 111230 - DNA, 398 bp, Arabidopsis thaliana columbia
cccaatggaaaatgggggtaattcttcgggattttaacggaattccacaggtgaaaggggttcctggaggcaggattttaaaaattttgaaggctaatggtttggcccctgaaatccctgaggatctgtttaactggatcaaaaaggctgttgttttccgaaggctttttggggggaccaggaaagataaggtttccaaattcaggctgtttttggtgaagggcaaaatccatcgcttggctggttcctccaagaggaccaagaagctccaacccgtttggaagtccaagtttccaactgcaagcccttttggggcttgggaagaataaagttgatcatgtccttcaagaaggaccatttaattgtctgaatggcaactaaaagtttttttttttttg

SEQ ID NO: 111231 - DNA, 388 bp, Arabidopsis thaliana columbia
  unsure (1)..(388): unsure at all n locations
gggnccggaatnccggggcggaccacacccgtccgaaccaccacaaccactaatttttcaacattttgggggaaaaaaccagaccaggggtgtttagggatctaatggcgagggcggcttccggggctgtcctaagggggctgggtttttcgttcctaaccggaggcaaaagaggggccaccgaattggcaggcggggtaggcactggagctaaaagggtgggcaggaaaactttaatggtcgttgttgcggttgttaagcctaagaaatttgggatccttgccgttaaaggggggggcaacttccttgaccttgaatggttcgatggttcgttaccagaagatttcgggttcgacccattgggtttggggaaagacccggttttttt

SEQ ID NO: 111232 - DNA, 241 bp, Arabidopsis thaliana columbia
cggaaaactccaacgaatgaaagggggggttggtttttaatggttctggccccacgaagagggggcgaaaccatctgggggggtccaacggaaggccctttatttccaccggagacaccgttttgggcggaacaacctgtacccccaaaaacctgcatgctcggggacgaaagaggcgcaaatgggttcacctccaaggcccatgcctctggaaccagccattttgaaaggatctcctgaa

SEQ ID NO: 111233 - DNA, 393 bp, Arabidopsis thaliana columbia
ggggccgaccacacccgtccggggggactgaaggttggcccgtcctaccattcaccgtttgcgtaatcctcaaaggaggcggcgcttttttcctaataatcttctttctatctggaccggaaaattttccgcccagcctccgggggacgggggggtaaatcccgaagacccgacccaattttggctgttgtagagccaagccaggtcccgggccttgtttttttttcagacccagttcaggttttcgtgggaccaccagggtgtgccatattttccactggcccatttgctcagcgggcgtggatggttcgcaactccaagggtttgcaaaccaggatagaactgtgcccgaccgatcttaaaaccaggcctgtttgttttaaggggaaagtt

SEQ ID NO: 111234 - DNA, 402 bp, Arabidopsis thaliana columbia
aaaccggggccgacccacccgtccgaagtccattaaataactgttcctaaaaaaactgtggttggcccttaaatgaaggactggggggggggaaaagctgtttaattcaccattattcccagcacaactggacctgccagggttgccggaagggtgcttccagttttaaacggaaggttgcctggaaggtttttccgggtccaacccgtggatgtttaagtggtggcccttactgccagactcaagaaagctgttccctacaatgaaatcaaaagggctatcaaggaggaatccgaaggcaaactcaagggaatccttggatccaccggggatgatgttgcttaaactgacttcgttggcaacaccaggtcaggcttttttgaccccagggttggaattgct

SEQ ID NO: 111235 - DNA, 468 bp, Arabidopsis thaliana columbia
cggggcggaccacacccgtccaaaaccaagggttacatttttgttgccgaatgtttcctttgtgatcctacctgccacctatgggtaaggggaggttttccattaccattggggccattggtcatgttgattttggaaaatcgcccacaccgggccacttgatctataaccttgggggttttgacaagcttgtaatcaaagggttctagaaggaggctgttgaaataaacaaaaggtccttaaagtccccatggttgtgggccaaactataaggccggccgtgggcggggtttacccatcaatatggctttttggaggttcgggcccaccaagtcctacttgccagtcattgatgccccaggccatcgggatttcataaagaccatgattcctggaacctcccaggctgattgggctgttctaatcattgactccacccctggaggttttggggctggtttttttaag

SEQ ID NO: 111236 - DNA, 344 bp, Arabidopsis thaliana columbia
acccggcggccaaaaacaaacgtaaaacttttagctttttttttacctttttaccccaaatgaccgctggaacaaagtgtgggttttcaacggccttcgccgtaatggccttaaagctttcccctaaggcatttgaagtccttgcaaccaaccttttaccactgagaataactgttcccaaaccaatggacccaccagtcccccctcgaaccgaatcgacccatataaagtccttggttccaccctttaccgaataaccatcctccctaaccgaaaatttccccaaaaactccggtagccaaaccgctaaactctaacttaccccctttccattccctggaacc

SEQ ID NO: 111237 - DNA, 420 bp, Arabidopsis thaliana columbia
  unsure (1)..(420): unsure at all n locations
cccgnnttggaataccggggcggcccacaggcgtccgaccaaccaaggggggggggaaaaccggcccccccctctccttggttttttttggctccacagcctaaaaatcaaatcctcctttttttttccaccattttggttggaccttaaaggaaaatttaggctggaagttccaaagcttttttccttaaaatcctacggtttaaggtaaatctttttcctttcaccgccaagggattcgtttagtcctcaaagggttaacccaagaaggatgaaggtggttgggaaaaagtctgggcctcaggtcctttaagattggttttaccgggggatcgagatacctttagtattaattactttagccaggctttgttcccaactagtcataacggtggagggctttggcctcgcaggtttttt

SEQ ID NO: 111238 - DNA, 314 bp, Arabidopsis thaliana columbia
caatttcaaacccttaatcttgtaatggctttggggaagaagttttcgacccttatgagggattttaaggtccagaacctggtttttaacatctttgttggtgggagggggaatcgtttaattcgtccctccaaggggtgggaccagtttaagggtcaaactctttttttttttaaggcggggtccactgggaggtgtttcggttttaggcttaatgaaatgatcgcgtcctttgtaaccttgggggggagaaaggcaggccacctttttggaagagctttggatgcgagggaatccgaattcttttgggggaa

SEQ ID NO: 111239 - DNA, 401 bp, Arabidopsis thaliana columbia
  unsure (1)..(401): unsure at all n locations
aaatnccggggccgaccacacccgtccgcggccccttggttgaccaatcaaggattcctaaatctctgggggattcaaccatttggctgggccccatcgtttggggtggcaaatccgttggcagggctgttaataaggctggttgggctaagttaatgggcctggcaggggaaccaaccattcagggggaagagcaaaaaaaactggatgggctctttaaggatgccttggccaccccttgggttagcaggggtggaccttttgttcttgtttcggaggaggatgaggaacctccgtttggggggccatccaaccgtggaaggacctgggttgtttttgatccgctggatggatcttcaaccattgactggggggtttccattgccccaatttttggaatt

SEQ ID NO: 111240 - DNA, 303 bp, Arabidopsis thaliana columbia
aaaaattttaattttcatttcaatgggggtttcccgtgttgttcccccccaccgcaaagggggtgggatttccgaaatggagacaaccaatcggggcgatccaccgtaaattaagaactgaatggttttcttggtcttgggttaaaccaatcgggggaatcggggggggggcgaatttgatttccggtgcgaagtttggtccaattttttttttggattcgtgggggatcaacgggggggggaaaggagaaattttcaaaccggttaaagccgccgttgttgaaggtggaaataccgttgggg

SEQ ID NO: 111241 - DNA, 349 bp, Arabidopsis thaliana columbia
ccgggccggccccaggcgtcggcaaaaccccctaaaaaggtaaggaaaggggtctaatttccttaagttcccggccccatccggggtttgacgggcttaaagttggccgccggttaaaaccctaaaccattatccaccatcggtggatccatttccgccaccggggcgccacctaagctggtttggaagtcctttttgagggatttcggggtaatcgcatgggcaccagcagcttcaatggtttaagctggaaatgcgagggccagggaggtttttttaggatccgccaacggttcccttgttttcggaccatttgaattaacgggggctaaaggggggaggatcgggt

SEQ ID NO: 111242 - DNA, 348 bp, Arabidopsis thaliana columbia
gaccaaccggccgaccaacaccaaatttaaaacgtttaactttgtgttgaattattaaacctaaagggccgcttaaacaaggggtttttcttcccttgccttggccggtaaggccgcaaagctttcccccgcggaatttgaagtcctgggaagcggccgggtgccaatgaggaaaactgtggccaagccaaagggcccatcaggcagccaatggtccggatctgcccgggtaaagtcctggggtccatcttttggcaaataaccgacctacctaaccggaaggttccccggggactacggttggaacaccgccggactttaagttgaccccgagacattcccagggaa

SEQ ID NO: 111243 - DNA, 229 bp, Arabidopsis thaliana columbia
cgaccgaaagggttccttccaaatccgtgtcgttagctatgtaggaggaaccagccggttgtgagggggtggtttcatagggtaaggggttggaagtttccccagcacccttccatggttcgatttgttcgtcccccttgtcccaccagggttcgtcttttgggttccagggccaaccagggtttttgttgtttccctcttccaattaaaccttgtggaccccaaaagg

SEQ ID NO: 111244 - DNA, 424 bp, Arabidopsis thaliana columbia
  unsure (1)..(424): unsure at all n locations
cggggnggaccaagccgtccgaggttggtccccaaaaaaaaaaaaaaaccccaaaaggtttcatgggccgcttcaacaagggttttttcttcccttgctttggccggaagggttggaaacctttcccccggggattttgaagtcctgggaggcggccgggtgccattgaggaaaacggtggccaacccaaagggtccataaggcagccaatggtccggatccgcccgagtaaagtcctggggtccattttttggcaggtaaccgggctaccttaccggaaggttccccggaaactacggtggggacaccgttggactttaagttgatcccgaaacattcgcagggaaccgggagctaaaagttttccacagcaggggggttttgctcggagccctaggctgggttttccctgggcttttggtta

SEQ ID NO: 111245 - DNA, 350 bp, Arabidopsis thaliana columbia
  unsure (1)..(350): unsure at all n locations
ggggagggtagnaaccaaaaaaaaaaaaaaaccctttttggcctctttgcccccccccaaaaaacggggttgttcccctgtctttacggaaaaggctccaacccttccccccgcggaatttaaatcctcttaaaccgcccttttaccaataagaaaaactgttcccaacccaaaggttccatatgcaatcccatgttccgaacccaaccaagcaaatactctgggccaatcctttgtcaagtaaccaaccaccctaaccgaaaatttccccgaaaactacgattggaacaccgttgacttttaacttaatcccaaacaattctcaagaaactcttatcaaaattttttcc

SEQ ID NO: 111246 - DNA, 417 bp, Arabidopsis thaliana columbia
cgggcccggaattccggggcggacccagccgtccgaaaccataaaatctaaaaaggaagaacctaaggctaactacgatttttttggggaatatgacgactttttttgttccgatggataacggaaattttatgaaaatcgcagaaaaggaatcacaaagaccactgtcccaatatgtaactggaacttaaatggtggcaataaagtccaaagagggggtttggagggcttttgatttggggggttaatatggatcaaccttaaaatccaagaccatcagaggagtgaaggctatgggtaagcatttttttttgggggccagcggaaaaataagcgactttaaggagattctccgtaatctggatgagctaaccctgaatgataccatggggaatgatggtaacttttggggaccaa

SEQ ID NO: 111247 - DNA, 307 bp, Arabidopsis thaliana columbia
  unsure (1)..(307): unsure at all n locations
accgggccgacccaaccatcctaaaccanntaatcaaactaaatttttcctttataaccaccccaaatttccggggaaatggcgacttttaaaagccccttggaaaaatacaactctttccaaaaaaaattttaagcctttcccccccaacattcccgacataaaacaaaaccttaatgggttgcacccaacaacaaaaatggagtttaaaacccttattaccacggtattcctttatgaaccaattcttataataccattaccatgtaaaccggaatacctattgtaaaccttttctccataagtt

SEQ ID NO: 111248 - DNA, 253 bp, Arabidopsis thaliana columbia
agaaaaaaaaataaccaaataccttctcagtttttacccaaccggccaaaccgcgccatgggagaaattttttgaatccccaaccaactcttctttaatccaggggtgatttaaaaacctggcttatcaacaaagctttaatcgccaaatccattgcaccacccctttacaataccggaaccgctaatacaatcttcctccacaggaaacaaacccgtcctggggacggagcaaaaaaaccttggtttccctt

SEQ ID NO: 111249 - DNA, 367 bp, Arabidopsis thaliana columbia
ggcggaccacccgtccggggaaaacaagttttccaaactggttaaatcaaatttgcaagggaccgttaaccctcagggggaaaggttaagggaattggcaaaaagagaaggcctttggaactaatttgttcctgtaaatagggctgttagagttagaaaagaactggcggttcccgaaattaaacataacctttgggccaagttttttgatcaatggtttggggggggcctaacaaacctggagtttggttacctttgggggatcatgggtcgttctgtttgggctccacaggggtttaactgtggggcaccaaatcctggaaacatggaggggatactgcggtttggtaccaaagaacaaattttt

SEQ ID NO: 111250 - DNA, 397 bp, Arabidopsis thaliana columbia
cggggcggaccacacccgtccgttggaccacaccccgaaggaaaaggggaggatgtgggcctttttttttgggccattcccaggtttcctttgtccttcctctaaccacttttttggggggtttttccttaaaaggaaaccttaattttggtcctaagtaaatcggcttttaaatttattaaaaaggggaacctgtttgtgggggggaaccaccgttgagaaatgggttaaggaggaggaggtattgaggaaggattccaggggaaaggaccgtaaggtaaagatggtttggggaggagatgagttagggaacctcatcttttttcagctaaatgccaagggtaccgctcccggcaggggagaaccacctttggctttttttgtggcctttttaagg

SEQ ID NO: 111251 - DNA, 435 bp, Arabidopsis thaliana columbia
cgtccgaaatacctggaatcttttaatccatcttaagattggcttaaaaaggaaatcaatttttcggccaaatggggaattttaaagggttctggggggaagtttactgggggcaaaaaagattttaagccgttccaccgaagcagtttggggggacccaaaggggtttttggcatggtccttaggaaggggccagaagaaaggatccttagggccactttaatcctggacccaacctttttttaaggctttgttcagtaaatctgaaattgagttggggttggaccatccgagggggggcttaccgttccctggcatggaagatccgttcataattgggctttttcggctccatggaccatgatccacctttttgtttttccgggttagatttagccttaatccattgtaataggctttttctttttttttctg

SEQ ID NO: 111252 - DNA, 394 bp, Arabidopsis thaliana columbia
cgggcggaccacccgtccggttggttggagagtaaaaggaccaaagatttttaaggaggtgagcgaaaaaggcaaaaccggccttggaaaaaattccttggatcctccaccagttctttttttggacatgggtgagctaaaatcctggtttttttacaaagttttaatggttgagttaatggttccactctttttcttttacgtaaccgtggttcctgtaatgggccacaaaaggcaaaccggcccttgggacggcgtgggttaactgggattcgttggggctttcgggggtttgatcttggtcctggtttactgaaccgccggtttttttgggggtaacattaacccagttgggactttcggtttgtttttggcccgtagggtctttttgggg

SEQ ID NO: 111253 - DNA, 388 bp, Arabidopsis thaliana columbia
  unsure (1)..(388): unsure at all n locations
ccgaggcgtccaataaactaaaaacccttttacttttccctatctctaaccgcaaggcccnccggggcaagtgctaatttttatacggtttggccccaaaaggccgtaaacctatccccggcgtcctccaaagacatttgaaaccgccctataaaccatccccaaagcctcaaagccaaccattccatccgccagcccagggtacggatccgcccaatttaaggcctggcccccatcctccgaaaagcttcctggctccctaactgaaaagttccccgagaattacggttgggccactgccgttcaatcctccaaccctgtaaccttacttgggaaccttaacctaaaattactccccaccaaaggggccaacctttgaatccctaac

SEQ ID NO: 111254 - DNA, 353 bp, Arabidopsis thaliana columbia
ttaatcccaataatccaaatcccaccatatttacctaattcaaatttaaattaatccttgtccaaaaattaataattaaaaaaattaataaattttattataaactcaaccttttcaatttcttattattaaaacccaaaaattaccaagtcacccctttccttttaataaacaaaccctctcctatacaaaccctattttttttgatcaaatcgctaactctccatttcccttcattatctttccaacctttcttttataccactcctaacacccctttttatttccctacattcaatcttttccttttatttttaataatcctaaatatctttttataatttttttcacct

SEQ ID NO: 111255 - DNA, 362 bp, Arabidopsis thaliana columbia
cgggcggacccaggcgtccgagtggttgggttttccgaaccaatgccacttaaggttttggaaataacaaggaatttaaggggcaggcgcggggaaaattttgtggaagcgggataagcttacctttgaaggtttaaagaatttttacgtcaactttaaaaaagaaaagtggaagctggaaacattttgtgttttttacaagacttttgcaataattaaaagggtaattttggggaacaccaggcttaaggttgatgggttaacaaacaaaatgagaagccgggacaacacagtttttgcaattaacggagacatggaccagaccaccagggccatattaatgggagagtttaggtttggtt

SEQ ID NO: 111256 - DNA, 372 bp, Arabidopsis thaliana columbia
ttcgggccacataacttatcaaccattcctccttttttggccaaccggttttaaggccttcaaggggcctattcaaaaaggtgggcgtttgggccggggcccgtttaaccatgcttggtcccgtaaggtttactcccaaaggattttgttttggcccagaccgtccaaggtccttgggaccattttgggggaacacaccgttttacttaactggagaataccccggggactccggttgggacaccgttggactttgggttgacccggagacattcgttaagaaccgggggcttgaagtaatccacagcaaatgggctttgttgggtgctttcggatgcacattccttgaaattttttccaagaacggggtta

SEQ ID NO: 111257 - DNA, 440 bp, Arabidopsis thaliana columbia
cggggcggaccacacccgtccgtttagttttttggtcccgaccatttttttcttagaaccttggttgaggcttttgattggtgggaagggcctaaaaaggataaccgccgtttcttccatgtggcttaccgcgtgggggatctggaccgccccattgagttttacactgaggttttgggtttgaagctgttgaggaaaagagatttccttggggggaagaattctaatgcttttttgggtttgggacctgaaccatttaacttggtgggggagctaacatttaactatggggtaggctaatatgatatgggaactggctttgggctttttgccatttaaactaaagatgtttccaaactggttgagaacgtccgtgccaagggtggaaatgtgactggggaacctggtccagtcaaagggggaggcagtgtcattgcttt

SEQ ID NO: 111258 - DNA, 411 bp, Arabidopsis thaliana columbia
gggcggaccacacccgtccggaacactttcaatttttgaagttgaaaaactattatgtgttacaaacaatggtaatgtctggaggttgggggcaaccccgaaggctgcaagcccctggcttagtccggcaaatgcaaaatttatcgatccccttcctattttaaacaacaactttggcaatcaattgattaattcgaaggtaaaccgtttgttggagaaaaaaatccttcgaacttttaaaaagccacttgactttttaaaggacttgcctccttttccaaagttcgatttaaaaaactgccctgtttttggcaaaaagtttaaccgtgttaaagctggaaagcctcctgtgcggatagatttcaaatcccgttccaaacttgaaaagccacctgccaataaaaggaatga

SEQ ID NO: 111259 - DNA, 408 bp, Arabidopsis thaliana columbia
cggggcggaccaaggcgtccgtaataaaaggttggggaaaccatatggccttcttattatttcagttaaggctaattccaggagggaggaattttaaagagttttgagtaaccaaatggagtttaattccaaggatcctaatgcaaccgggatgggcagaataaagggggaaaggggtcaggttcgaaaggggatgatggaaaatttggttaaagtttgggttagaggggagcgttgggggttgttagttgttaaaaccgaaattttgcagggcaccacttttcgtttaaaaaagcaggctcgtcgttccagaaccatattgtgggggggaaatgtcaagctaccaatggctctgatcctgtgcctagcttgggtggggaacatcgcgatggcctttgtttgccatgg

SEQ ID NO: 111260 - DNA, 374 bp, Arabidopsis thaliana columbia
cggaataccggggcggaccacaggcgtccgatcgttaaggacctccaggaggatttgcattacgtgggggttggaatatggccctttgtggcgtggtaattgcaggggaattcttagggaaaaacgacttttgaccactttggcccgcttgcccccttgggaaatcggttttaaggcagccggggtgggttgtttttggattgttcaaaccgtggttttaccaggattttaattccttatgggtattccaggtgggaccacgggctgttccatgggattggtggcagacttggggtggggcctttatgtttggattaaaccccatcttccaaatggtcctttggccttggggtaaataatgatcgttccaccat

SEQ ID NO: 111261 - DNA, 307 bp, Arabidopsis thaliana columbia
ttttaccaggcaaagtccatgagggggaataggcgaaatctcggattggggacctcctcctggcctctgggggtggcagaagaacccacggccatcaaccatcgtcgaaaggagaggcctaaaggcgtaaatggtcttgccaagaccataatccgcaaccgtcggggccaacctgctgaggttaactggattggaggcaaagtcagttcttggaaaaatgaaaatggaaaggagttccttgttataagtagcaaggctttattccaccctccaacaccaattcggggaggaattccagaattgtttc

SEQ ID NO: 111262 - DNA, 394 bp, Arabidopsis thaliana columbia
tcaaaaaaccaagggttgcaacggtttttttttttttaaccgcgccgccatcctccgggcgaacgggctaaattccattcttcaaaccctttaaatctccctcttaaatattaaatccctaccaaggttttccggattaggatataaaaaataagaactctccacaagttttttttaagttccaaactttaacctccgtactgaacctgataatctaattcttaccctccttttaaaggttccaattagaaatggaggtggaaccctaacccctgaccagaccaaggaggtgtaacaagtggccggaaagcttaaaaagtactttttcaaggagcctttcaaaaatcccttaatttttggaaattggtaattggtttcctttttaagaccaacc

SEQ ID NO: 111263 - DNA, 283 bp, Arabidopsis thaliana columbia
cggggcggaccacacccgtccggacttttttttggagggaatggattttaacattaccataactcggcctaggttcgaggggctaaacagggatttgttaaggaggggtttggacccagggaaaaagtgtttgagggatcctaaaatggccaagaccagggttaatgaggtggtcctggtggggggctttccaaggattccaaaagggcacaagttttggcaggactttttaattggaaaagagctctgtaaaagcataaacccggccgaggtttttgttaac

SEQ ID NO: 111264 - DNA, 433 bp, Arabidopsis thaliana columbia
tgggcggaccacacccgtccgattggattccatattggtaccaattaaggttttttttatggggttggaagaaatatgggaagggggatgggggaaccatatttgggaccttggggataccccgaccgccaccccaggtggttggccacgcccaaaggtccttaatccggcacctttccgggggcagggccaggagacgggcaggctttcacgccttaccccccgtaaatttggaggggggggcttttttggggaccaataagagctccatggtggtgggggatcagggttcaaggttaaccgggtttcctgggaaccaaacggccaccattggaccacaggcggcccctttcaatttaccgatgggaaccgcttttaggggcgttcattcatacggccgggtattgattggggggtttaccaatgcaaattt

SEQ ID NO: 111265 - DNA, 425 bp, Arabidopsis thaliana columbia
gggcggacaacccgtccgattggtcttacttgggggaggggatccccattacctttaaataaacagcctgggatatccaacctacgggctttaaaatggtttcaactttaatgggaacctaaacatcaatccaagagatgttcaggcaagggagtgagcagttaacagttttgttcagggggagggtttttttgctttgttccacaggtgagggaatggccgagatggagttaacagaaccagagggcaccatgaccgatcttgtgtaagagtcccagcattaccaaaatgcaccggttgttgaaaaaggtgactccaaggttgaggaagaaggtgaatcccaccaggaagaagagtcctgggggaaatttattattaaaaaccgttggaaaaaataaattaagtcgttggctactttttttttt

SEQ ID NO: 111266 - DNA, 402 bp, Arabidopsis thaliana columbia
tggaaaaccggggccgacccacccgtccgaaaccacctcctttttgggaccttttttgttattttccagcggcggcaaaaccaacactgtgaaatgcaccaactgcggacccgcgatggtttttgactcgggttttaggtggatcacatggccggagggaggccaggcttaaaccttgggggttggttgaagatgggaaaggaggaatgggttttgtcagaagcaaattaaattcgaggttaaatgattatgtaggaccttccatgttggctttttttctttaacatgttttttgattggaaggattggtgtgtaggcatttggggttttttatttggggcactttttcaaaaaatatttaatatttatttattattaattggggcggccgttttagaggtt

SEQ ID NO: 111267 - DNA, 442 bp, Arabidopsis thaliana columbia
gccaagccttccaaaaaataatttccaagagtaaattttaaatatgatttccacccccgaccaggtgaggaaccgttaattttaaaaaccaggggggccaacccacaccaggccagtcaaaggacccgaaccagttccaaaaccagttccaaccgccaacttaatggcaggtgccaaggttgtagttaaagctgttaaagccgaacctcgtaacgaataaaacaaactcgccaggggtaaagtccccgaaccctctgttgttatctaaaaccctgccaaaaaatacggtaagttcgttaaaaaaagtacccctggtaaatacctcaccagggttttaaattatttaaacaactacaagtcgtaaaactcaaccggggctggtggtcttcctcctccaacaagtcaggctgagccagcaggtaagcctaagccggcggttaaa

SEQ ID NO: 111268 - DNA, 346 bp, Arabidopsis thaliana columbia
aatcttttaagagggaggagttaactcgccacgtggttggaccgggggccaaaagggactcgggggggcaaactttttaataattaaggccaaccgaagaatttatttggggggcaggaatccggtccacgtagaacccggggaaattttacagattttaactccaggcgggggcggattcggttccaccatataaccaattaatctcctcctaataggtcttttttggaacttaattactccttcattaaacggttaatccaaataagtggttaatgggcctggtggtggttccggggccttttagccggattttctttggaggttgggccattttcagggaaat

SEQ ID NO: 111269 - DNA, 339 bp, Arabidopsis thaliana columbia
gggcggaccaacgcgtccgaaagggctgaaagatggaccggggttccttttcaaatattggggggaaccggcttcgtgggcggagcggtcgttttttttttccgcaaaccccccgaaaggggtttccccgccggaaaacacatggtccccgataggccgttttcggtaaacaccaggctgttgtgggccaccgggactgcgtttccagagcctggcttaaatcggatggctgatcccgccggaaggattgaagcatgggcttggttgaggggcggattagggttcttggttggtctcggtcggctcgctgttttgaacgacaaagcttttaaggttcca

SEQ ID NO: 111270 - DNA, 421 bp, Arabidopsis thaliana columbia
ccgtccgcaattcaaaccaggattaccaaaaccttcttttaataaatcctaattcaaggccttcaagggggaattatggggggcattgaaaatgaaaatgatggggttaattatggtggtggcgggggttttttaagttgccacggttgttcccgttgaagttccagttccaagcccaccttttgttgctgccttgttggacccacccctgttggcatctgtggtggcttggccatctggttccatctttggaccatccttttttcctccataattaaatggcattggttaatgagttggcgggattggattctttattgttagaatgttgcatccttattttttaaggtacccatctgttcctctatgaatcaatgggaataaccaatccatacactgttttgaaaaaaaaaaattacaa

SEQ ID NO: 111271 - DNA, 235 bp, Arabidopsis thaliana columbia
accaacgcgtccgtttttcgatttcgaattttcacatctttcgtttttaagtattttcgcccaaattcaataaggccatgggagccgttattgaattccgcttaaaattttgcttttccggctccatttccggtaaaatcaagttctgtgggcggccatcggatggcttcccctggattaagtccctgcttaagattgggctcctttcctcctttttaatctataagggcaatta

SEQ ID NO: 111272 - DNA, 355 bp, Arabidopsis thaliana columbia
  unsure (1)..(355): unsure at all n locations
gccggacccacccttccnaggaagggcaaaccaaaaaccgtttaaaatttatacaatccttccttccaaacggagggggttcccttccggggttcccataaaggttaaccctaaagggatcgaagtcaaaggacctcccggaaagcttgttcgcaatttaaagcttttaaacctcgatttccagctgttcaaggatccaaaaactggaaagaaaaaccttaaaatcgattcgtggtttggaccacccaaaaccagcccctccattagaaccgttcttagcaccgccgtaacctggacctccggggttcccagaggtttcctgtccaagatgaggttggtgacccccaattttcca

SEQ ID NO: 111273 - DNA, 434 bp, Arabidopsis thaliana columbia
ccggggcggaccaagccttccaatcagaaaccaggtggaacctttaataccttttttgagggaaggaaatggcaccggggggagggtccttttcggaggttccgtggaaaggatcggcggaaaaccactccaagagctggaagagcgagacccatgttttcgttgccgccattggccaccacatccaaattgtcttttttaacaaaggcaaacatgactttaacggttttttaaggagttgggactccccatatgatggaaggaaggagtttttcaaggggaagggggggttagttgttgggattaaacctttgccaaaaagaggactggttgttcacttgatggaccatttaaaagaattggatttcatttacgaattatttcccaaatctgaggttggttgcttttgcaaaataacttttatttgggagaag

SEQ ID NO: 111274 - DNA, 320 bp, Arabidopsis thaliana columbia
ggattaatagcttgggaggaggaggccttttcatttgttttggaggagagttattccggcggctccgtgttcttttttgccctttttgagggttcctccaacattgcccttgccgcttttacgggttttattttgggattttatggccccaaggccaattgctttgtcgacgactccgccgttttttaagttttggggtcagaggaccaaaggggtttagtaaacgtgtgccagccagggaccacctggttagcagccggttcctgtttgtactcaggctcggcaattttggtttttactttaggcaagggcgttttttc

SEQ ID NO: 111275 - DNA, 436 bp, Arabidopsis thaliana columbia
cggggcggccaacgcgtccgaactttttaatttcccacaaaaagggtttttctattttttccagccttaatcttttcccaggcctttcccaaggtggttttggcggcttaaaaggaggaatccaccgccttagtttttttaccaacgccaccatttccatggccatttccggttaccaaaccgcggtggccggttttaaaacggccgacgccgtggtccaagccaccaacgctgccaactactcctattaaaccacccaccacaaaacctccggtcaaacctccaacttttccggttccaccagtaaaacctccggtttaaactcctccgatcaaactaccgccggtccaaccacttacgtccaaacccccaacgccaacagttaaaccacggtcgcgccaaccccttacgtccaaacccccaattccaacggtta

SEQ ID NO: 111276 - DNA, 391 bp, Arabidopsis thaliana columbia
  unsure (1)..(391): unsure at all n locations
ccggaatnccggggccgaccacacccgtccgttcggagaaccgttggtttcacagaaggcaggttttttgacccgttgggactagcgtttgacccggggaaaaaggttaactttaagttagttgaaatcaaacatgctcgttaagccatggtgggattttggggtttggcggttaaggcggttgcaaccggtaagggaccgttaaacaactgggcgattaaccttagggcccaacttaaaaccaccataatggatccctttttttcctcctgatgggggggcttttagcttttactggggtaatgtaaggatgggggggctttaagcttttactggggtaatgtaaggatgtaacgccgtatttttaaagaaaatttggcacctttgtgtt

SEQ ID NO: 111277 - DNA, 406 bp, Arabidopsis thaliana columbia
agcagaccatccgggggttaaggtttttccgccgggggtattattaaccggtgggactccgtggtaaccgtcgccgaccgaaaccgtaaaagatggttttggaccagagaatttgcccgtgggtcagggttgcgtaaccggaaccccgtggttgttttaccggttcagatcaatcagttttcaaccgccacccgtcggattttgaacggcttaaccgtaccatttaagttttccttgaagatccaggccgggacctttgttttaaccgttcagatgggggggcttagcaccagactccaatttttaaacgggatcgttgttcttgttcaatccaacggggcaggatttggggttgaccagatcgacggttggggttttgatgatcgtacggttgggatcgccggtt

SEQ ID NO: 111278 - DNA, 314 bp, Arabidopsis thaliana columbia
ggaaaacgggacggaccaaggcgtccggttatgataatggaaaataaagtacctggatattcaacaacggtaaaataatgtggtggatgtgtaacttgaaataaaggaagttccaggtaacccgattaactggaatccgatggatcctgagttaatgggtgtggaagtaagaaagagagttgaaaaaggagagcaggttcttgttattgcaattaaaataaaaatggttgactttccttggggggcaaaaaaagataaagtttgtggaacaatgtatttctaaaaggttttgcaggaagttttaaaagcttttt

SEQ ID NO: 111279 - DNA, 408 bp, Arabidopsis thaliana columbia
gaatcccggggccgacccacccttccaaaaccaaaagaaagtttttgaaaataaaaattgaccactaccaggatccaaaaaagggtaaaggatgtttaaatccaatcgaccaataattgttttttcccccgatggtaactttttccaagtaaagtttcccttaaaacccgtccaaaggggtaacgccgccgccgaattccgcggaacaaatactgccgtcttccccgtcaaaaaaaaatcaacccttaacttccaggattccaaatcagcagggaaaatagtgggccttgttaataacattgatttgccctgtgctgaactgaaagcaaatgctctttttttgttaaacaaggcaaggttagagggtcaaagccccaggtttacgttggaggacccagttcctgttga

SEQ ID NO: 111280 - DNA, 444 bp, Arabidopsis thaliana columbia
  unsure (1)..(444): unsure at all n locations
ggaannccggggcggaccaagccgtccgaaaattcctaaaactttaaaacacactttcttttttttccaataaatcaatcggggacgcgtggatcttaattctttccggaacctgataaaaggaccaaaaatggtttttttttttttggaaatggttaaatgggggggctctccggaatggtttccccgccttaaatttcccttaaaatgggatggtaaaaaaggggttttaaaattacccaattttaggagtgggcttcgcttaagggttccttaatttgttttcaaggggggggataataagtccaaaggtgaaaaacctccaaaatttttatttttgaaaaaattgaaaagacgtggtttgactcctacttccttgtttaaagactttaaagtggttcaggatgggatcaaaaccggtaaaaaaaccggaaacagttttaa

SEQ ID NO: 111281 - DNA, 332 bp, Arabidopsis thaliana columbia
  unsure (1)..(332): unsure at all n locations
ccgaaannccggggcggacccacgcgtccgcccacgcgtccgaaaaaccaaaactggtttcttgatattaaaatcaaaggcttttttatcaggcttagggaaaggtcacatttttgggaggaaccatgggttcgtcccaggcaacccgttgggaaatccaccgggggtaaggttcccaggaggcagttggccaccaaggcgggggggaattcagccccacccaccgggggggtcaggaggcctaaccgttcccgtccaggacccgtggttcttggggggattctgaggtcccagaagagtcctgaatggtggatccgaaggcttcctttcca

SEQ ID NO: 111282 - DNA, 276 bp, Arabidopsis thaliana columbia
gggggttaccaaatttttttcaaagtatcaccacacggccaacttcaagaccagtgttttttttaactgttgctaaggaccaaccaatttttaaaattaatgttttccagggtaaaaggaagttttttaggaataccaagttttttgtaacctcccgtttaaatggattcccccctcccccacgtggagttcaccaaactaaatctaaatttgcaattattcccaatgaaatcttattttcaagtgctgttgccaaggccccaggaaaaaaccaag

SEQ ID NO: 111283 - DNA, 426 bp, Arabidopsis thaliana columbia
cggggccgaccacacccgtccgtttttttttttttaatttccgcttttcccgttgggtttccgccttggtttttcctggcatgtcccgaggaattccttaacattctttccttttccttttttaaattcctaaccacctaaaatttttaataaccaaatccacttttgcttggtggggagaatctgttaaagaattttggtggtggtggggtccagattgggaaaatttcctttttttcaggttttttttgaataattaatgggggggattttcggatcgggaagggctgcaagaggtggttttaacggcggggttgagataattttttgtcttttcctggggggggggccggggttccggcctcggcggtttttaaacccctacctttccaaatcttgggaaattagaaaaaaaaaggttggatt

SEQ ID NO: 111284 - DNA, 397 bp, Arabidopsis thaliana columbia
cggggcggaccaaggcgtccgacctgttgaagtttttaatcaggtagtggtgttaaatgttaaagttgccaaccaaggtgggaccaaggtccacaccaatgggtttaatgcggaaaaaaatttccttaaatttgaggcaggggcaatgcgtgactgtgaccttttttttgttcgccatgggattgtagggaacccagggcctgtaaccgggccgggccaattaacgggatccaaacttgttccgggttaaaatggttggccattagttcgacccggggcgaagtttttaagaagggcccttttcttgaaccataatttttgggttacccgttccgccccaaacgagaagtttcctgggggagaattcccaaaccaaaaccaacggcctggggaaggt

SEQ ID NO: 111285 - DNA, 214 bp, Arabidopsis thaliana columbia
cgggccgaccacgcttcctacactccaactctacacacccttttttgtattttgggaagcccaccttcccacggttccgggctttaatacccgggcactcgtgctaacccaacaccattacacccttcttttgttgtttattacttattctttccaccaaaaattcctgttttttttactttaccttcacccattgtttattcattcacaccta

SEQ ID NO: 111286 - DNA, 507 bp, Arabidopsis thaliana columbia
  unsure (1)..(507): unsure at all n locations
cggtggggacttgaagagttagcggcgttcnttactatccatacgcttgtcgttatctctcgaggagatgtctgctcttctcttcctacatcatcttggtgtctatctgtgactcgagaaaattctaccagaccagcgcttccggggagacggttggttgtaatatctccgtaagaacccgacaccacatatgtggcttgtctgtaggagatcagagtccgagtcaccgggacgcttgtattctttcttcacgaacacagttcaagttattcgtatggatcaacaaggtgtgtgcactattttacatcttgcccattgtgctcagcggtgctgtggattgcttcgcaactacaagaggtctgcaaaacaagatagaacttgtaccgatcgatcttaaaaacaggcctgcttggtataaggagaaagtttactcggctaacaaggtgcctgcattagagcacaataaccgagtattgggagagagcctggatctgattaagtacattg

SEQ ID NO: 111287 - DNA, 320 bp, Arabidopsis thaliana columbia
ccccaaaggagatgggtgacattcttcgccgctactacggatgcccacccggctaaagcgggtatggtcgctcttttcatcggacttaagtgctccgatgcctttccagctaccaccttggggaacagtatcattcgcttccataacaagcaacggctgaggagcctactgaatgcgcgtgcgcacattaattgcgaagaactcactggccactttctattacgtaaacgccgtcgcccagctcgattaacgaatggagcacgctgccttatccggcaacatggggtatcgctcgctcttacactacctggatcactgac

SEQ ID NO: 111288 - DNA, 167 bp, Arabidopsis thaliana columbia
gaccccgcgtccgcgaacctccaacgaattctttggggattttaccaatggcgttgcctccaccgctcaggccggatctaatggtcgctttcaagggcttgactctttctttgacttcccacccccccaaaggcgtaacaactttttccccaaaaacctcattcacg

SEQ ID NO: 111289 - DNA, 311 bp, Arabidopsis thaliana columbia
caaactcaacgaataacgtgttaatttgtccaacgcttttgaacccaaatggccgcctgaacataatgggggcattcaagggcttgcgtcttttttccccttcatcttttcttagaggcgattggagtttttcccccaaaacctctttcacggtgactcttcctctggaaaaaataaaagctccgattcccctatcaatcgaatctgcccatataaaaggagctggtcccaccaataacggtcgtgattttcctgttcaccgactgtgcctcaagatctacggttaccacaccgctaaacctggagctatc

SEQ ID NO: 111290 - DNA, 447 bp, Arabidopsis thaliana columbia
acaacaacaaatcttaaacgttttactttgtgctgcactactcaacctcaatggccgcctcaacaatggctctctcctcccctgccttcgccggtaaggccgtcaagctttcccccgcggcatctgaagtccttggaagcggccgtgtgacaatgaggaagactgttgccaagccaaagggcccatcaggcagcccatggtacggatctgaccgtgtcaagtacttgggtccattctctggcgaatcaccgagctaccttaccggagagttccccggagactacggatgggacaccgccggactttcagctgaccccgagacattcgcaaggaaccgtgaactagaagttatccacagcaggtgggccatgctcggagccctaggctgcgtcttccctgagcttttggctaaaacggagtcaagttcggagaggcggtttgttcaag

SEQ ID NO: 111291 - DNA, 367 bp, Arabidopsis thaliana columbia
gacaaacaaagagggagggaaaaccagacacacactcttctctgttttttttggctccacaaacttaaaatcaaagcctcctttttctctacaacatctttgtttgatcttcaaagaagatttaagcttgacgttacaaagcttctctccttcagatcctactgtttaaaggtaatctttttccctccaacgccaagggattcccttagtactcacaaggctaaaccaagaaagatgaaggttgttgcgaagaagtctcgggctcaagtacttttagatttgttttaccgggtgatcgagataactctagttataattactctagccaagctctgttaccaactagtcatcacggtggagagctctg

SEQ ID NO: 111292 - DNA, 302 bp, Arabidopsis thaliana columbia
cttgccccaccccgaaggaaaaagagaggaagttagactttttttcttgggcattcccaaggggtctttttttttcctcttagcgctttttttgtggccatttccctaaaaagaaaactttatttttgttcttaggaaatctgcttttaaattttataaaaaggggaaactgtttgatgggaggaaacaccctctcgaaaatggtttaagaagaagaggttttggagaaggaattcccgagaaaagatcgttttgttaagattgttttgagaagagatgggtttttagaaactcctttcttt

SEQ ID NO: 111293 - DNA, 446 bp, Arabidopsis thaliana columbia
caataactggaatcttttcattcatcttcagatttgcttaaaaaagaaatcaaattttcagacaaatagagaattataaatggctctggtgagaagtctactgggtgcaaaaaagattctaagccgttccaccgcagcagtctcggcggcaccaaaagggtttcttgcagtgtacgtaggagagagccagaagaaaagatacttagtgccactctcatacttgaaccaaccttcttttcaagctctgctcagtaaatctgaagatgagtttgggtttgatcatccgatggggggcttaacgataccttgtcatgaagatacgttcatcaatgtgacttctcggctccaatgatcatgatccaacattttgtttttccgagttagatatagacttaattcattgtaaatagcttttttctctttcttcttgaaagagtacttgttct

SEQ ID NO: 111294 - DNA, 355 bp, Arabidopsis thaliana columbia
aaagaaacgtattgcaagaaacagcggagtttgtatccttaatgtgcgagatatctaatggcggaaaaggaagatagtgtgaagcttctagggatttgggcaaccccttttagtcgtcgagtcgagatggctctcaaactcaaaggcgtgccttacaaatacttgaaagaagatttgcccaacaagacccctttgcttttggagctaaacccgcttcacaagaaagttccggtttttgtccacaatgacaaaatattactcgagtcacatttgattctctaatacttcgatcagacgtggattaacagtcctattttttctcaagatctttactagaaggccatggttttatttt

SEQ ID NO: 111295 - DNA, 313 bp, Arabidopsis thaliana columbia
gaaaaagataaagctggatcacttttccatttctcaccgaacggattttccgcgggtttcaagatacttgtggagggcccaatcaaattctcctgaatcctgtggtgattttaccattttgcttcgccacatcctcttgggtaccaaataccttttccgcgctgttaatatggctgagccggctaaactaattttacttccaggggaaacaaacatccatggtgctgagcaaacaaaacttgatttgctctctaatgaggttctttgtaaacattttgtttagcactggtcgaacttctgttctggtgttgca

SEQ ID NO: 111296 - DNA, 234 bp, Arabidopsis thaliana columbia
aatcgttgggttttcctaaacatagccaccttttgttttttaaatcacaggtaattccatgagcaaggcattgacaatattggtgagtcgtcataagtttacccttgacggtgtcaagaagatcaacgggaacgtgctaataaaagagggaatgctgaagccactctatgagttgaacgagactcttgccataagctcagggtggagtgtagggatctcaggtcttagggtttg

SEQ ID NO: 111297 - DNA, 240 bp, Arabidopsis thaliana columbia
ggggccgacccacgcgtccttttgagagcttttgtgccctctattttttttttgagagctactttcccccagtgggtgcgtttaacaatattgtgggttctataaaacaccatttttttacacattgaggctaaaagagagatggctgaagatcaaagttcaagttctgacctgttctttaaacctgaaattttaaacttatatagaggatccaatcaatctattgaatcttttgtagag

SEQ ID NO: 111298 - DNA, 156 bp, Arabidopsis thaliana columbia
tttcgatttcgaattttccaactttcgatttttaagaggttcggctcaaattcaaaaatccaatggagcccgttatggaatccggtttagaatttggttttccggcttccattccgggtaaaacggggtctggtgggcggccatggattggttccc

SEQ ID NO: 111299 - DNA, 345 bp, Arabidopsis thaliana columbia
ggccgaccacgcgtccggagagagagagactcaatagttcacgcgcgatcattgttctccgccggaaacaacaaaggcggcgacgggaacactcaaatcgttcacggcactcctacaatcattaacggagcaaacaatacttgtctctaatgtaccgttataactttatatcccttaactacagacctttttctaagtaaccgcaaccaaagcccaatccaaattctccaaccgaaaacttcgtggagcctgaatcggtggtgaaccaacgggtggtgcaacttgcagagactttagcccaaggaggaatcgagacgattcttatccagctgttagatggacagt

SEQ ID NO: 111300 - DNA, 279 bp, Arabidopsis thaliana columbia
ggccggcccacgcgtccggtaattatatccttcaagtaagacgacctttttttttttttggaggaaagtaactccaacggcgacgtctccacttttgaccgggttgaggcaaccctcaacataaactcttccaacaatactggttctatcttcggaatctatagccccaagaaccaatgcattgtccaccactccaactatatctcatctcttgggtcaaaaaaacaaagttgaatagtaaacttgtgccaaccatggaacaccttgttatcatccggt

SEQ ID NO: 111301 - DNA, 390 bp, Arabidopsis thaliana columbia
  unsure (1)..(390): unsure at all n locations
gaaccccgggccgacccacgcttccgancagaaaacaattaaaaactttatatcgtttttagagaaagaaanggcaacatgggaaacgtacattacggaggggccggggaaagaatcctctaaaaaacactacaagagctggaagagcgagaaccatgttttcgctgacgccattggccaccacatccaaaatgtcttttttcacaaaggcaaacatgactctcacgggtctatcaggagttgggactacacatattatgtaaagaaggagatgttcaaagagaaaatagagattgatgatgagaataaaacatttacaaaaagaggactgtatggtcacttgatggaccttctcaaagtatttgatatcatcttactaatttattccca

SEQ ID NO: 111302 - DNA, 256 bp, Arabidopsis thaliana columbia
cacaacaactttaccattaaaacctttaggaaatccacggagtttaaaagtcataacaagtatcttgccaccttccctctaaatggattcccccctgccccccgtggagttacacaaattgacactaactttccaatacacgccaattgaattatatctcgcagtcctgtagacaagctcacttgaaaaacccaagacttccctattactgtctcatgtgcattgtccatggatactttaaaccaaatcttccatt

SEQ ID NO: 111303 - DNA, 305 bp, Arabidopsis thaliana columbia
cgcccacccgtccaaaattccaaactataaaacacattttcttttttcctaatattcatccgaccccgtgccattataatggtcggggctcaaaaacaacaaaatttctaccttttctctggaaatttttaaattattatctttcctttttatttcttatcaaaatttctcataaaattgaattaaaaaaaggttttaaaataacccatccttggtatcttcttcccttttgattatttcatcttctcccaatgataaaataatcattccaaaggttataaccttcatatctctttttattaaat

SEQ ID NO: 111304 - DNA, 173 bp, Arabidopsis thaliana columbia
  unsure (1)..(173): unsure at all n locations
ggtccgacccangcgaaacganaaacagaaggggcggatggctaagtttggtgtgacgttcaaccgagccttgctgacgggccccatttaactgatgaaggggctaaatatataaccaaggtagtcaaccgccctaactgcctacattaaaattcctgctacggctcaatgca

SEQ ID NO: 111305 - DNA, 333 bp, Arabidopsis thaliana columbia
aaacccgggccgacccacgcttccgaaaggtcaaagttccaactttccttgttttttttactcaaaaggtgtggatgaatgtggttgctttttttgaacctggggcgggtgaaaaaacatgtgcccaaatctttgaagaagctggctgagacacaccacccagccttagctgaggcgcttgccttggtggcccagcagacacctaccctcgcttgaatgaaccttaattttgtgtgtaaacgacaaatattatcttccccccccctttgggccacaaagaagggcaaatttacttaccgtctccttacactgttgctccctgtactataacac

SEQ ID NO: 111306 - DNA, 333 bp, Arabidopsis thaliana columbia
  unsure (1)..(333): unsure at all n locations
aacggaaacccggggcgccccacacccgtccgnaaaaaaaaaaaaaaaaaaaaaaaaaacaaattattttataaaaaacgggaatccaaaattagggggaacaaacaaaacctacggggggctaggccattaaaagtgggcccctctccttaacaaaaactttgatctgcggcccgttttttttcgggaaaggtttttttaaaaaccttgtaatttccaaatgacttggggtgggatgacacccccttttttccaaaaaccttgattttccccaatttcccacctttctatcttgtcaaattttgcccatcttgtttgaccataaggacgccc

SEQ ID NO: 111307 - DNA, 410 bp, Arabidopsis thaliana columbia
aaaaaccggggcggcccacacgcgtccgcaaacgcttactgtcaataaaaaacaggctttttttttcggttatactccagaagcacgagggggggacacacaacttggacttggggaagttccaacaaacctggtgcgatacaaactgtcaaattttatccactggacatgggttaaactcgttggaccgggaatatttggcccagaggcgttaggcacactgatctgcacaccggcaaaaacaactggggatcttccagtgacccatgagtttcactggagaaacccgttccgatcgttacaaatgtcgacaagatcgtgactaaatccaaagacggtgaccgtttcggagcaccagtgatcagtggctatgtccactcttgtgaatcttgtcaccaggatctttaaaa

SEQ ID NO: 111308 - DNA, 433 bp, Arabidopsis thaliana columbia
cacgcgtccgtgaaagaagagttgttgaataccttgaaaatgaatcaaagaaaccattgttagaagaaggagcaaatgagagtaaaaagaagaagaagaagaattcattttggaaattcttgggtgatccatatgtcttgggacgagagctctttgtgatagaaaagtttggtctcgttcaatatatgatcctcaaaaccttttgtgccttcttgacatttttgttggagcttcttggtgtctatggtgatggtgaattcaaatggtattacggatatccatacatagtggtggtgctaaacttcagccaaatgtgggctctgttttgcttggttcagttctataatgtcactcatgaacggcttaaagaaataaaaccgttggctaagttcattagctttaaggctatcgtgtttgcgacttggtggcaagg

SEQ ID NO: 111309 - DNA, 409 bp, Arabidopsis thaliana columbia
aaaccggggccgccccacgcgtccggttttctttagatctgttaataatcccatcttttttttggcctagtcactagtggtgttatctctctgtgtggaataaaaagcagggttttttaatcactcggattgttttaagatatggcaactttgaacccttttgatttgttggatgatgatgctgaggatccaagccagctcgttgttgccatcaaaaagattgataagttcactaaatcttgacaggttcctagcttgcctgttaagtcagttcctaagctttcatcgaagcccacttttcctggttaagctgttagaacggcaagtagtgatgctccacctaacaatggaccgcctgaaggctttaaccgtgttccttacagatacaacctttctaatgttgacaaat

SEQ ID NO: 111310 - DNA, 436 bp, Arabidopsis thaliana columbia
gaaaataaagcaacagttatggccgttggtcttcaaaacaccccatggaagatgagggggggatttctgagtgcgtctgggggggtggctaaactacagacagacgtggaaatcaaggcttcggttgataagtttcaccacatgttcgttgggaaaccacaccatgtctccaaagcaagtccagccaacattcagggatgtgatctgcacgaaggcgactggggcacaggcggctctatcgtcttctggaattacgtacatgatggggaggcaaaggtggcaaaggaaaggatcgaggcgttggacgccagataagaacttgatcacgtttagggttatagaaggagatctgatgaaagagtccaagagctttttgttcaccatccagtggacccctaatcctgaaggccctgaaagtattgggcactgccacctt

SEQ ID NO: 111311 - DNA, 331 bp, Arabidopsis thaliana columbia
aaaaaaaaaaacacaaaaatgttcaatggtttctaacatggctttcctccctgtttgccgaaaggtggaaccttcccctgggatagaagtccttggagcgccggtgacaatgaggaagactgtgccaagcaaagggccataggcaccatggtacggatccgaccgagtcaagacttgggccattcttggcgagtacccagctccttaccgaagtccctggagactacggtgggacacagctggctatccgtgccccagaattcgcaggaaccgggctgaagtttcccagaggtggccatgctcggagccctaggctggtcttcctgagctt

SEQ ID NO: 111312 - DNA, 484 bp, Arabidopsis thaliana columbia
gggccggaaataccggggcggaccacacgcgtccgaacgcgtgctgttacgcgccaccgcgaatgtttttggaattccgaaattgagacgaccaatcggggcgatccaccgtcaattcagcactgcatcgtcttcctcgttctcggttaaaccaatcggaggaatcggagagggagcgaatctgatctccggtcgtcagcttcgtccaattcttcttctcgattcgtcggcgatcaacgggggagagaaaagagaaattctcaaaccggttaaagccgccgctgctgaaggtggagataccgctggggatgctaaagttggattcctcgccaagtatccatggctagtcactggattcttcttcttcatgtggtacttcttgaatgtgattttcaacatccttaacaagaagatctataattacttcccttatccctattttgaatcggggatacacttgttcgggggagtggtttactgcttg

SEQ ID NO: 111313 - DNA, 263 bp, Arabidopsis thaliana columbia
aaaaaccgggccgacccacgcgaacagtaaattctttcattgttaaacaaattttttttttgttgtttgcgaagaccaccaaggggggggcttacttaaagacgtggcgggccaaattcaagagaagaacagacggaaagacctactacaggtcacggatccgccttatcacccaagacaagaacaagtccattactcttaagtatcgcctcgttgccccctttaccaaaaaaaacataatgccacacattgcatttgcaacc

SEQ ID NO: 111314 - DNA, 315 bp, Arabidopsis thaliana columbia
  unsure (1)..(315): unsure at all n locations
ggaccgacccangcgnccgaaaagaatanaaaaaaatcatacaacattgttatacaggaccgncaaaaaaccaaatggcggagtgtttaataaactcgggggttcaactaaaaaaaccgatgaacgaaaaaacgaataaagaaaattttgtcaaaaaaacggagttactaataacaaaagcgccccaagaacccaacagcacaaaccaagaagacgccccaccccaccaccggcagtaacaagagaacatcatcttctttaactttttttccccaccggaatttttttccaaacttttgggcccccaacagaaac

SEQ ID NO: 111315 - DNA, 464 bp, Arabidopsis thaliana columbia
aattgtcggctgggccccgtcattatgtgcaaaaaagcagctcgtgctggcttggcacagtctctctttgaacgacttgtgactcttggtattaaaccaatcagattgcaggttcaatatcgtatgcatccagctttgtccgagtttccatccaacagcttctatgaaggaactctacagaatggagtcacaattattgaaaggcaaacaacagggattgatttcccgtggcctgttcctaaccggcccatgtttttctatgttcagctgggacaagaggagatcagtgctagtggaacatcatatcttaatagaactgaggctgctaatgtggagaaacttgtgactgctttcttaaagagtggagttgtccccagtcagattggagttataactccatatgagggacagagggcatacatggttaattacatggcaagaaatggttctctccgacagcaact

SEQ ID NO: 111316 - DNA, 193 bp, Arabidopsis thaliana columbia
tttgaacgactggggacgcgggcactaaaaaaaaaacaaaaagctaccaaaacatccggtgaccgcccctttgtccccagttccacacaacaccgtctatgaaggaactctacaacgggggaccgtccctaagctaccggttcctccagtgaccatccttaaggtacccgttccaccagcgactgaacctaat

SEQ ID NO: 111317 - DNA, 453 bp, Arabidopsis thaliana columbia
tatatagccgtaattgcaccttatcattttctaggatcgaaggagtacgccaggcgggggttgcaaaattgcggaatgtgactcttcttcatcattggcaattttattccatggagactactaacagtagtcggattgtgccatgtgtgttccacgtcttttgtttatttttcatccccgaatctccaagatggctggcgaagttaggtcgtgataaagaatgccgatcttcgttgcaacgccttaggggatctgacgtcgatatttctcgtgaagcaaacacaattagagataccattgacatgacagaaaacggtggtgaaactaaaatgtctgaattgtttcaaagacgatacgcatttccggtaattatcggagttggttaaagtttttgcaacaattgtgtgggagctccggtgttacctattatgctagtagccttttcaacaaagg

SEQ ID NO: 111318 - DNA, 283 bp, Arabidopsis thaliana columbia
  unsure (1)..(283): unsure at all n locations
ggaaaaacgggcggaccnangcgnncnanaaacaaaaggagcgaatgacaangatggtgataaagttcaaccaaaccaagctgagggggcccattttactgatgaagcggctaaatatataaacacggaagtcaaccgtactaatggctacattaaaacccctgctacggtaaaacgcatcccttccataacgaaagacacggcatttggaacccgggccaaccgcacgcccaaanagcaaaaagccccacacgaagcgtcgtcccaaccaaatttttttttt

SEQ ID NO: 111319 - DNA, 335 bp, Arabidopsis thaliana columbia
ctttttggcagaaaggaggctcgattgcattatgtttgtaggatacatttccaaccgtggatgtagctttaaccaattaggggacattgagcggaaatccaaccccactcactaccgtgaacccggactctataccacggtctattaagagagtgagactcagaatgctgttggaaatccattagagctctatatgatcggatgcaagtgcattgtagcttatgtcatgaacaaggagcactcagattcatatgtgttggatatggcagaaggtcaaccctaaaaaatagacagaggctttcaaacgttttctgggacaattgcccaatacaaat

SEQ ID NO: 111320 - DNA, 288 bp, Arabidopsis thaliana columbia
aaaagcactttattttaccgcggtttaattttttacccccatggaagaactcccggacacgacttaatctgaaagtggggtgctttaattcctttcttcctgaatttctaactatgggagacagtgacaatcttgacgcaacaaagagatctctatcaaatgaaaaaaatcatattagactccctctaaacgtatccgctacaaggaaagccataactgatattctctagctttgtttccatgtctaggattgaaaattttttaatgatcatattttaaactttttta

SEQ ID NO: 111321 - DNA, 362 bp, Arabidopsis thaliana columbia
gaaagagaaagcagtgtcgatcttttgatcagattcttgagaagcatgttcaagaaagtctcgaaacgaactaaaaaagcatcgcgacggattttgccagctgccatgtctcctcgactcgtgtcttttgcagtagatgggatattgttattaggttcactttccattacaagagcatttcttgaggtaatatgcaatctaggaggaactgtgtttacggtgattctgctgatacggttgttctgggcggcagcttcgttcttccagacttatgggaactcttttggaccaaacccggtaaattaaaaccttgtttactcccatttgggtgggagatgttgaactcatgtttggtacgtcaa

SEQ ID NO: 111322 - DNA, 285 bp, Arabidopsis thaliana columbia
ggaggacggtaccaaggaggaggaggacgataccataggaggcggtgggcgacaaggaggagggggaagtgggggaagttactgccgccacggttgttgctctagaggtttcaacggttgctcaagatgttgatacaatgctgcagaatttttttaaacttaccccggtctctaaatcattttataaacctatcaccaccatgcatgtattgcattatgcatgtatgattttaagaaacccatggtgcttttgtattgaactgtcttaagtttttgaggcttttt

SEQ ID NO: 111323 - DNA, 312 bp, Arabidopsis thaliana columbia
gaaggagaaagcaaaggagagcttttgttcttattatggaaaagcatgttcaagaaaggggggaaactatctaaaaaagcatggcgatgtattttgccagctgccatgtctccttgactcgtgttttttagcagctgatgggttattgttattaggttcattttccattccaggtgcatttctggaggtaatatgcactctaggaggaactgtgtttacgggggtttctgttgttcccttccgttctgtgcggcattttcgtttttccagatttatgggatctcttttggaccaaacccggttaattaaaac

SEQ ID NO: 111324 - DNA, 375 bp, Arabidopsis thaliana columbia
  unsure (1)..(375): unsure at all n locations
tcaaaacggtatttttcgtgggttatagctttcttaagaggttctttcgtctcttaaacggtcttgtnnttttttttacggtgtgtggatactttgtgatatgataaaaaagcggagagtatttttaggttctcgatagtgtatattctcttcggatggggtttgacgtcggagtttctccgccgcttntttggggcgtatttcgggaatattctaagggttacgggttgggatattcgtcttctctctacgcagtcttttgcccactttataaaatctctttcattctttctttggagacgcgaagagaggttttttttattggttttgtcgtcttcctgggaattcgagattcctggaatcttaatcaaatat

SEQ ID NO: 111325 - DNA, 335 bp, Arabidopsis thaliana columbia
cccacagggccagcgagtcttaaactttatcaccgccttcatattaataattgcttcctttacctcaattcttttgtccaccatcaccattaggattcccagaattcaaccttcatcccaaattacttcgaggagatccacaattaaaccctaaatataataaaaagtttataaccaaatatgaagaactttaacattttttccaaacccttctataaagataatgataaaatcccatgaatacccctcttccttacattatcatatttccgatgtcaactccattcctaatcttaaccattgtttttgccatagctcttatcaaatttcccatt

SEQ ID NO: 111326 - DNA, 147 bp, Arabidopsis thaliana columbia
  unsure (1)..(147): unsure at all n locations
tatttttttgactttgatctcccatcagtttatctccnncnncnnncnnccaaccgaccatgttttatttttataacgcctccataatttttaccttcctccaagtaatcctctctccctaccaaaatcttctcttcattccctcaa

SEQ ID NO: 111327 - DNA, 411 bp, Arabidopsis thaliana columbia
  unsure (1)..(411): unsure at all n locations
ccgnaaaaacaaaaattaaatcccaatctttatttatcgccaaagaacaacaaaacccgcaccggtttaaatattaaatccgccctgccaaattctaaaaaanttcttaccttcctccacaaaactcttcaacaatcacaattccaaaaatcttctaaaaaaaaaatatcaccatctcaccaaccaaaacccacacctttcattgttcatctctgccacacttcctcactcccacttgcccatcctcttctccccacctattttgtataacactacttcttcccaatgccaaatcctgaacccttttttgttcaattcaatattcccaaaaacccactcccaaaatctattaatactttactttcctcaccaaattcaaattacttttctttcccaaaacaatttattacc

SEQ ID NO: 111328 - DNA, 301 bp, Arabidopsis thaliana columbia
  unsure (1)..(301): unsure at all n locations
aaccggacctcctaagactagctggggataattgctactgtcactactcatccctaancctggattttccgaccttgtccttcaaagccaaaattccttaccggtttttccggttggttgaaccgcaacttttctttaacatcgatcaggttatcaagccaaacgtcgtcgttcaaggttgaagctaataaaggagaatggtggccccttttggcatcccctgaatatctcaccggaaacattcccgttaacaatggttttgacccgctgggtctagcacaggatccaaaaaactggaaat

SEQ ID NO: 111329 - DNA, 335 bp, Arabidopsis thaliana columbia
  unsure (1)..(335): unsure at all n locations
accaacgcgnccgnncaaacccatnctnccttaaggcccacgttttcagaccggaccncccaaaacgagccggggccaaagcaaaaaaccgcgacaccacccaaaaaacggaaacgggnnccccacctaacaaaggaggaaccatgttctgggctgatcccaccggatcgaaaaacattaactcgaggctggataaaaggccaaacgcttacggtgaattctccaagcctcgagcttttttgcctaaaaggggaccaaaaggagtcccaatgaccgcccccgtaaaacaagccacctaacggtcgaaaggacagcgtacaagtgaaaccattcct

SEQ ID NO: 111330 - DNA, 329 bp, Arabidopsis thaliana columbia
gtggtgtcactcttttttttcagaaaatgttttctatacgttaagcttatgcttatttgcagcattataccagccggttatgagtagaccggctaagtttgaagatgactttaggatcgcatgggccgatactcatattactcaaattgacggaggcggagcccttcaacttaaattggaccctaactgaagaaggggatttactttcaagaatcaaggttgaagctgccaagggagaatggaaatccaactgggcctcgcgctgattatctcaccggcggacttgccggtgacaatgggttggacccggtgggtttagcagaggatcc

SEQ ID NO: 111331 - DNA, 445 bp, Arabidopsis thaliana columbia
ttcttctggaatcaagggaaaaagatagattcgcaacagaatttgttcacagttctcggggcgatttatggtcttgttctcttcgtggggataaacaactgcacttcagctttacagtattttgagacagagcgtaatgttatgtaccgcgaaagatttgcaggaatgtactctgcgtttgcctatgcattggctcaagttgtgactgagataccttacatattcatccaaagtgcagagtttgtgatcgtaatatatcctatgattggtttctacgcgtctttctctaaagtgttttggagtctctatgcaatgttctgcaacttactctgcttcaactacctcgcaatgttcctcatctccatcactccaaacttcatggtcgcagctattctccagtctcttttcttcacgacattcaacattttcgccggattcttgatcc

SEQ ID NO: 111332 - DNA, 408 bp, Arabidopsis thaliana columbia
gacgacgatacactctttcactgacttacccctacctcaaaatcaccttcttcttcatcgtctcagctcaggaatggctaactacctgtttttgaatttgagatctgtttttgtttctagaagaaaacagctggttttcaccgtctctgatcctctgatcggatttttgtttgtttttgtttgcatcagatttgatcggaatctaatgggtaaaaccaccgggaacagagattggactcagatctacgctatttacggaatcgaacaatggcagacactcgtcttccttctcttccatgctttcttcttctctcttctctctcttctcttcctcatctacttcgatcagatttgcttcttccttgattccttcttcctttccggcgccgccagattaggccggggttt

SEQ ID NO: 111333 - DNA, 339 bp, Arabidopsis thaliana columbia
cccaagtcttacatatggccaatcgaaagccaatacttgcttccccgtacatcttttgttcaagatgctcacaaagcaggattagaagtatatgcatcaggttttggaaacgattttgatcttgcatacaactacagttttgatccattggccgagtacttatctttcatggacaatggagatttctccgtggatggcttgctttctgatttcccactaacagcatcttcagctgttgactgcttctcccatcttggaagtaatgcttcatcacaagtggattttcttgttatatccaaaaatggagcaagtggagactaccctggctgtactgacttg

SEQ ID NO: 111334 - DNA, 349 bp, Arabidopsis thaliana columbia
cagatgcttcttcgaaatacgatttctatcaatttatctttgatttctgggaaggcaaaccacacggtcgtgtcatgagctttgatcctaccacacgtgccacacgtgttcttctcaaagacctctacttcgctaatggcatatcaatgtcccctgatcaaacacatttcgtcttctgcgaaaccatcatgagaagatgcagtaagttttatattagtgaggagcgtgttgaggtatttattcagggcttaccaggttatccagataacattcggtacgacggagatggacattactggattgcattgatttcggaagtaacaacgtcatggaaactttcgatgaaata

SEQ ID NO: 111335 - DNA, 371 bp, Arabidopsis thaliana columbia
  unsure (1)..(371): unsure at all n locations
nggaactgagaagcatccactcgacaatggagactgcgatttgtgggagattagctctcgcaccatcctctctcttcaattctaaatcaggttttcttattctctctctgattccgaatcaaacatctctttgttctgttcggcgcctttgaatcaaaaagttcgaaactggaattagtaatcaaattccggagctttctgtatataatcagctcatgacagttgatttacatacatattttctttgttgatattgatttgcgagatgattaggtgcagaaggaaatgggctttttagctttttaccttgtctgaacctgaaccttttttgtctgaagcaaagtgattggattaaccaaaaccggaccgga

SEQ ID NO: 111336 - DNA, 225 bp, Arabidopsis thaliana columbia
  unsure (1)..(225): unsure at all n locations
cgcgtccgnccaaaccatcactgcttactgttataagttcaagggctggcacattctaccggggtcgggcaccttttaaaccgggcttgagtaaanttgtaaacaaattgcataagggccaagttctatgcattgttgaagccatgaagttaatgaatcaaatagagtctgaccataccgtaaccctaatcgatattgccgcataagacggcaagcctgtcagcc

SEQ ID NO: 111337 - DNA, 345 bp, Arabidopsis thaliana columbia
ggagggtacaaatgggataacaatgaaaaacatctgaggcctgagacctgctacagtcctcccacagttagtggatgcttccaccttaaagagagaggtagcagaaggtgttgatctaatggttgtaagggagcttacaggaggtatttactttggagagccaaggggcataaagaccaatgaaaatggcgaggaagttgggtttaatactgaggtttatgctgctcacgagattgatagaattgctcgtgttgccttcgagactgctcggaaacggcgtggcaagctgtgttctgttgacaaagctaatgttttggaagcctaatttttatggaggaaacgagt

SEQ ID NO: 111338 - DNA, 144 bp, Arabidopsis thaliana columbia
gcgtccggttagagagtccaaaaaatataaggctgccatcattctaattgacagtccaggaggtgatgctctggcttctgatttaatgtggagggagatcaaacttctggcttgaaacaaaatcctttatttacttaatgtcat

SEQ ID NO: 111339 - DNA, 348 bp, Arabidopsis thaliana columbia
gaaattaaaagtgttcttgttgctgtagaacacaaacagaccaaacaaaaaatcaattgaggagtctttcagtcgttaggggaagcaaatagagaaatggctagctttactgcctccgtttccaccgtctccgccgttcgtccggctttccttctcaagcctaccgtcgccatctctgctcctgttcttggtttgcctccaatgggtaagaagaagggaggagtgagatgtttaatggagacaaagcatggtaccgtttcagtcatgggggctggagttttcgctcggtaaccattttttttaaaccggtgtgcttgagttatcctcccaatggctttttctttcttg

SEQ ID NO: 111340 - DNA, 341 bp, Arabidopsis thaliana columbia
  unsure (1)..(341): unsure at all n locations
gggaannccggggcggaccaaggcgtccgattaattggccaaaggttaggggggattggttggggttttggcatgggccaaggcgaagccctttggtttcctgggtttttttggccggtaattccagtatttttccattttccatatcggaaagggggaatgggggatgaacttttccaaagggggtggtccaaaggcggaggggttattaggacaccagggggggacgttttactccaaacacggtaccacagccgtttttgggttccgaaattttttccatgactgggtcgcaaagtggggggatgcgtctttgttgttagagacagcagggggggtgg

SEQ ID NO: 111341 - DNA, 418 bp, Arabidopsis thaliana columbia
  unsure (1)..(418): unsure at all n locations
aaaccgggccgccaacccgtccggaaattgncctggttacttggttttggattagcccataaataaggggggtatctggcgtttattttctaaggggaaaaggccaagttccagtattaagggttaaacccagaatttccaccaacagccaccttcttgtggtgggggtacccaaacatgggaccaccaaaggattaataaattttggcaccagagggaaaacagaattgggggctccggcaaaaaccaccagtaactttctggtaagaccttgaggaatggcattaccaacatgggaggaaacagaccagattttgttccggaagaagttgaaacaccaagcacctccaacagattaaggggcttaagggggttggaccaaagccaaaacctggaaggtattatctttattccatgg

SEQ ID NO: 111342 - DNA, 391 bp, Arabidopsis thaliana columbia
ttttggtgggaaaccggggtcggttttggaaggaatgtttttggttgccaaaaatggggtgggggttggaaaaaatggaaccggggggaaagccacggattcagaaggggttgaacccaaccaaaaggggaaaccccacctggaggagggttcaaaaaaaaccaaatttggggttggtattggacccgaaaagattgctggtgattttgaagaaaccaccgggaagaattcagaaaaaacccttggtgaaactgaaaagggccctgaaaaaagtagggttgttttcccagttggggaccaggctgaattaccaaaggagtcaagccctggagggggggcttggtttacccaattgggggaatcccagaccgggaagaaggcccaggtgtcc

SEQ ID NO: 111343 - DNA, 393 bp, Arabidopsis thaliana columbia
  unsure (1)..(393): unsure at all n locations
aattanggggccgaccacacgcgtccgacgcacccgtaaatctcctggttaatggggggtttagaaccccatatgggtggttggccatggttaatttggttttagggacccatttagtcggggcttaccaagtttattgccaacccctttttgccttcgtcgggagggaagcctttggggggtttccagggggcgaattcgtaacaaaagagatcaggatccaccttttccgggggaggccttttaactggaattttttaaggctggtttgggggacgtttttggggaggccaccaccgtggatctaaatgttaaggccttctttaaacgaggtagtgggtctttggggggccatgggttttgggcctttaacggtttatttccaaggggaaa

SEQ ID NO: 111344 - DNA, 244 bp, Arabidopsis thaliana columbia
caaatttgttggtcccttcttcgctttcgccggggaggcgtttttttttttcccgggaaatcctccgaaagggagagaaagctcccttattttgggtcctctttaacggcttttttgaagccttcggttcaggtcggattttatgcgaattcgaaatttggttttcaggtgaattgcaaatatttttccatcttcgccaacttttattgtcctggtaatttaacattggagtttcttcgataaa

SEQ ID NO: 111345 - DNA, 350 bp, Arabidopsis thaliana columbia
aaaagcattataatttccaattaataaaagttaaagccagggctgcatttttttttgccccctttatgataatggaagaggaagggggattcgaaccggaggttgcggaagtccaaacttgggggagctaaaaggggttaaggctaccagggcgccctaccactgcccgggccgggggggctttacggggccatttaaggcagggttatgcttggaccgagagggttaaaaagctggggagaccgctaaaaagccataaagccaacggtccggccttttgaacctttggagcgtgggaccttgttcaggggaccatgatggttaaacatttggcccccatttattttttt

SEQ ID NO: 111346 - DNA, 423 bp, Arabidopsis thaliana columbia
cggggcggacccaggcgtccgggttttatgggcctggagttaagtgttgttttcacggccctggaaagggaggaaggttttatggaggaactgaatcaactaaggccggaatttgatcctggaatcagaaagctggctaaaggggttttaataaatccaagaaaaattgcctcccatcctggggtttttgcaggcaaaataattccagcaaaggtggggaaaccagggctgatggaactaattgttgccaaaaccaaggaacccagggatcctttgggggttgacgctgctttaatggttactggaggagctccattaaccaagggtctgggcctggaaaaaataaaggttcccccccaaagaggttttataccatttgttgagcgaatgcgtgttattgatggaaatggaaggctggttccc

SEQ ID NO: 111347 - DNA, 325 bp, Arabidopsis thaliana columbia
gtttggatgctttccaggttattttacccagcaaaagtttaaaaaggggacctggtttaaggaaggttccatttttatcataactatctcaagggggccaccaacctttccattaatttttttttaaggagggtcttacctttccaattaattaaggatattttttattggggaatccacttggtttctaaattggttttgcccatccaatagtttaaacattaataaaattgtataataactagtaccaaaggattctatgatccagcatggtaattttgggagaataaacatgatacttggtttcttttgtttttttagttgc

SEQ ID NO: 111348 - DNA, 409 bp, Arabidopsis thaliana columbia
ttaagtttttgggtcccataatggacctagcagattttgtttttaagggtggattttgcccggggggaatttccgccggggaaccgccggggccagtttttgggaaaatccaaggtcggaaaatgggggggatgcggggccttcgcaaaggggtcccacggggggggcccagggccgggtaaaagcgttgcgatcaagggggggggcaagcaacggttgcagaagggaggactaaatggcaccattaaaggggggatcgttttaatgcaccgtttgcgccacctttttatggggcgcctgttcggggtcctggccaccaaatccaagatttttttggtaatggaattcgccaggggcggggggtttttcgccaaagtttccaggggcaggttttgcaaggatcttagcc

SEQ ID NO: 111349 - DNA, 382 bp, Arabidopsis thaliana columbia
aatccttggaccgttagggggaggatgaatatgagaaatcgattcggggtttggggaaaatgaaaggggggtttttacggaatggcggttcttatggccatttttcggaattccaggtttttggcttttttttaccagactaaaggtttttttgttgccttaattttttaccaatgggggccttagttcctgcgtccttacgaaaccatccgtttggtttacaagggttttggttgttcccgatcccctagatccaactccagaaattttggatgaacccgcctttggggttccgggcttttaatccataagggtagacccggttaagatggcgccaaagcaaaagattaggatcaagcttagatcatactgggggcctttt

SEQ ID NO: 111350 - DNA, 409 bp, Arabidopsis thaliana columbia
  unsure (1)..(409): unsure at all n locations
ggggccgcccggcgnccaaacttcaattaaaaaaatttggcttccattgttttttcaagcgccatggcgggaacttaatgaatccgtggttccccagttccaatcagtttccgttcctttccataagccaacacacattcctttttgggcttaaattaaggcaccgtcggggggggccgtgtaacagccatggttccatccagggtcaggttcataacaccagagggggagttaggggttgggggggacaccgacgcttccgttcttgatgctgttgaggaagctggaaccgatttgccttactttggccgggttggtttttgttcaggctgtgctgtgaaagtgttgttgggatctgttgttcagcctgcccagattttccttgaggatgaacagatgggggaggggt

SEQ ID NO: 111351 - DNA, 406 bp, Arabidopsis thaliana columbia
ggggcaagccaagctttaaccttttagggttttaattttactttttttttttcttaaaggcttcttcaaaatgggtttggtttattacagatttaacccaaaaggtcgtttaattataccattcggttttttaataattagaaactttccgaaaaacaatgcacaaaaattccaagccaacctttccatttgtaatctaaatgaaacaaatcctaccctattaataattttaatcattccctcgtttagcttctaaaaaactaaactgataaatacccattttttttcttttgaattatttttctccaattttaatctttccctaaacctttttatataaaccttaatctaaaatttttcaaaacaatttgggctataataataacccaatgttgaaatttccttt

SEQ ID NO: 111352 - DNA, 230 bp, Arabidopsis thaliana columbia
ggaccgggccggaccaacgctttataattaataagcgttttacttttacattttttttaccgaaacggcggcaaaacaatggcgattgttttttctagtttgtaccgtaaaggccataatgctttcccccattgcatcccaaatttttgaaaccgctctaataactttccgcaaaacctccaagccaaccgccccttcctgctgccaatgtaccgtccccaaccaattaa

SEQ ID NO: 111353 - DNA, 264 bp, Arabidopsis thaliana columbia
caacgcgtccataaaccacccttgggggccctcaacactattatttaaggaaggaaaaggaaacccggggggggggatgactacagaatttacggaattggtctaaccggccaatgcaacctgggaggttggtcgcttgttgtcaaggacttccgggttttccttgccagaggtgaaacgccgttttagggttcgagttaggggtatactgatatcccttctaagtcttctctttcttaaaaaaatattctggtagtagctttt

SEQ ID NO: 111354 - DNA, 388 bp, Arabidopsis thaliana columbia
ttaagggggctggaaagaattgcaggggatgttttgaataaccggaggttttggagggtaacaaagccttttttgttgggagaggggggaaatcttgaaattaggataaagcctgatcctgataacggacccataaccataactgatactggtttgggaaggccaaaggaggaactaatggatggcctgggaactatggttaaaaggggtccttcaaaattttggaaggctttaaaggaaaacaaggaccttggggctgccaacggtttgatcggccagttgggggtggggtttaactctgttttttaagtggctgaaaaggttgttgggtccaccaaaggcccaaaatttgacaggcattatgttgggaaatcggttgccgatagta

SEQ ID NO: 111355 - DNA, 400 bp, Arabidopsis thaliana columbia
gaattggggacggacccacccgtccggaagaccatgtagtttccagtggtttactggtccatgcttaagggggaagagggggaccaaaccagggttttaataaaggaagttggggggaatgggggcttttttgggatagggaaccagggattaccacatgactaaatggccaggatcgggaggttgccaaaggcccattccaggacatgccaggaccaaaggttaaaggcctggctcaagtccaagggttgggttaatcttgagacaaaagtcgaagatgtcgttggggaaagaactttttacgttggtaacctccctaaatccaatttaaaggccatttaaaaggggttggtggaatccaggacggccatgaaagactttgttaggagactggggaatt

SEQ ID NO: 111356 - DNA, 405 bp, Arabidopsis thaliana columbia
aagcccaaaggtttttagccccgtcctttccatggcaattaatccagcacctgccaatattcagcatttgtgggggaagtgggccttcgcctatttttttttagacggtattagaacctggctcctgaaaaaaggggatgaaaaatcggccttttttgatggcccggttcttttatttttaagggttctgatgggggtttaatttgcaaccgctgcattaatcatctttttggccatggcgactaagggttggctaaaggaagtttccagaagaggagagattttgtgggggattttcatctttggttccttaaggatatttctgttggcgaggtgggtttgggaattcccaaggccagggatttttttggccgatttactttttttaccatcaacctccatggt

SEQ ID NO: 111357 - DNA, 371 bp, Arabidopsis thaliana columbia
gggccggcccaactcgtactttttttcctccgattttttttcccactgtttttccccccccagggccaacaccgggggtcggtttttcatttttttaaccaaaacccactttcccttaactgaccgagttgtaaaatcctccaggacaccttcccaggttgtccaaccaatcaacggggacccttttcatcgaagttgtgaaactccgctgccataaacccaatggaccgctcggttcttttccaccctccttgatacccttccctccttaaaccctatctaccctggtgcgaaaggggcccagccccatggttcttcattcccggcccttttctaaaaacttgtccctccaagaacccttctttccgccg

SEQ ID NO: 111358 - DNA, 393 bp, Arabidopsis thaliana columbia
  unsure (1)..(393): unsure at all n locations
gggcccgcccaccgcgncctaaaaaaggaaacccttaaaccaatgtttctttttcctccccaaaccagggctttgtgggggggtgcttttcacggaagggctgtaaaccctgcctattaaaatgtcctggaacgcggcctttcgaccatatgtaaggttgtggccaagccaaaggtcccataagccttccaatggaccggatctacccaagttaagtacttgggccaattcccagggatgcccccttcttaccttacaggggggttccctgttttctccaatgggtacatcgttggttaatccccttacccaaatccctttgccagtaaccttgggcttgatgtatatcaacacagcttggacaaaccttgaatcccaaggggggattttcct

SEQ ID NO: 111359 - DNA, 237 bp, Arabidopsis thaliana columbia
gggggatattaaaaaaacggggggggactcagagaaccaaaagggaaggggaaccagggaaggcaccaaaatcaaacgcccaggaaagggagggggccaaaggacctttccaggacaaccaaagaaaaaaggttaattgacattctaattttcaaaggttttggggaaccagaaacctgaatccgttcaagaatttgggaaaagtactttttaaaggcgtaaccaacattaataaat

SEQ ID NO: 111360 - DNA, 413 bp, Arabidopsis thaliana columbia
cttttaagaagccaacgccggttttaaaagtttaagccgtttaagggtttaatcctttggtggggatccaataatgggggttgttgaaccaaaggttgttgttgttggagttccaaagaggaggacgtttaaaaagtttgctttaaagggagttgatttcgatgtttttttcgatttgtttactgaggatctggcaaggttttttttttttggatttcgaggaaggttttttagaggtttgccagggaagccaatggttttgattaagaagttgaggaaggcgaaaggggaggcaccacagggtgggaggccagaaccagggagaaccaatttggggaacatgatcatggtccttgaaatgatgggaagcataattggagggtccaacggaaggactttaaaccaggttggga

SEQ ID NO: 111361 - DNA, 214 bp, Arabidopsis thaliana columbia
acccgggccgcccaaggcgtccgaagggtgtttgtggaaatctttggccttttttttagggggttgggggttgttccacgggtggaaccaaatgtctttcttttggctgctccaaaacgtgttgtagccatctaaatgttgggggaaaattttgttgaaaccggggtttgtgttgtaaaagttcttggtgtcttctattggaacttgggggtgg

SEQ ID NO: 111362 - DNA, 155 bp, Arabidopsis thaliana columbia
cttccgaaaaaaccaaaaaggttttttaaagttttatttgagagccggaaggtaattaagagggggtgttattcgattctaccaagttcccctataggaaacctttcgaaacttcggttataattgccaggtcctacaaagggccacaacttgtc

SEQ ID NO: 111363 - DNA, 418 bp, Arabidopsis thaliana columbia
ggaataccgggcccgaccacacgcgtccggggggaagtccggggacgggttttaacagtgtgttgttgcccttcctcgaagaaaccatggaaccatttttaaggtttgggtggatggaaaagaagggattccattagcattcccaacgttggggtttttttaaagagaaaggagacctcaacataatcataacttaaaggttggagcaatgaacgcattgttgggggttttttcgaaaattacttgggggaaaataatactaaactgggactgggatttgtccgcaaccacctaaaagtaaacacgcgacgcgttttgaatcctcctggatgggaaagagggaaaggagattgttttcgggcagtttccgaagtgttttgccattgtaccaggaaatgatttgtttggaagcatgatg

SEQ ID NO: 111364 - DNA, 406 bp, Arabidopsis thaliana columbia
cccacacgcgtccggcccggttacttaaagcgtccaaagggtggtttgttgcggccaggaaactgaaagttttaggcaggaggggccattaagggaactaatggagaaggctttacggaataagaaagatgattttacctttttggataacaataatctggaaggcataattaaaaggctgggatggttataaaaccaagatcttttaagggaaagcattactggggagaaggggaggataagatcccaggccagtaggtcagaagaggatttggaccaaaccgaacagttgttagaacttgttttgggcatccgggaccacatgctaaaaactgagttttttgaagtggttaagggtttttcgatacccccgaatttccgtggtcctttgtaaacagaactaatg

SEQ ID NO: 111365 - DNA, 425 bp, Arabidopsis thaliana columbia
aataacggggccgacccacccgtccggaaaaatcaaccacaacggttaactggacttttaagttggggggaatggccaggcgtgtaatggaggggttcaagaaggaggctgttgaaataaccaagaggcccttaaagtccccttgggtgtgggccaaacttaaggccgaccgtgggcgtggtttaaccatcgattttgttttatggaggttcgggaccaccaagtcctactgcccagtcattgatgccccaggccatcgtgatttattaaagaccatgtttcctggtccctcccaggctgatggggctgttctaataatggactccaccactgggggtttgggggttggtttctttaaggatggtcagccccggaggccccttttttttgttttaaccctgggggcaaagcagatgatttgttgt

SEQ ID NO: 111366 - DNA, 419 bp, Arabidopsis thaliana columbia
gaaaccggggcggacccacgcgtccgaaacgttttgtttttggagatcgggaggacttttgggttggtttacaccgcttacgcaaaagcggtggacccaaagaacggtggtttgggaccaatggaaccaatggccataggtttaatggtgggggttaacatcctggccgggggggttttaaggggggtttcaatgaacccagccgttgttttcggaccagccgtcgtaggttggacgtggcccaaccactgggttaactgggctggtcctttattgggggggggactggccggaattatttacgactttgttttaatggatgaaaatgccaacgggcaattgcttaccaccgtttactgaagacgtaaaattcaacgttgttaatttgatgaatttttcgggattggctttttaaattt

SEQ ID NO: 111367 - DNA, 439 bp, Arabidopsis thaliana columbia
gaatccggggcggaccaacgcgtccgaaaggagttggaggtttcctgaaccatgattttgggtaaagaagaggtcaaccagttgggagaggttgttgaaaaggactcctacttccagatgtcctatgaggatctaccaatttggggattaatgggaagggtggccagggttttaaaatttgatccgggggaattaaattttttttggtccaagcccattcagttggggattttatccaatagggcccgggggatcgagatcagggttggaagggatcctaattcgttgggggatctaactggggtaaaggaagttgatgcatagtttttgtccactgtgaagtggaaggaaactgaaactcctttggggaaaggaatggaaaagtcttttatgttttttttttttcccaatattttggaaatccattggttttcctttt

SEQ ID NO: 111368 - DNA, 447 bp, Arabidopsis thaliana columbia
ggaataccggggccgccccacccgtccgaggaaccattgtggaagtttttgaggcagattataagcggggatcctccttaagggccgttcggccggcaaaagggcagggttcttaaaatccttcgttgccggacccggggcccgtggttccggccattgcttggtggccggactgaagaagtccccgggcaaggtcttccgcaaggcctaagcgaagaagacggcgaagaaatcaagggtgaaaggtttcatcaggctcgggatttcccagcttttgatgcctccacgttccacgctcgtttgtgttttgaaggaggtggcgcttttggttgctttaaggagtagggttaggagggtgctctgtttaagggaggttaaggttaggctgggggaacgtttaaggactgggaggaccagttggttttttactaactttatggttttgaa

SEQ ID NO: 111369 - DNA, 375 bp, Arabidopsis thaliana columbia
  unsure (1)..(375): unsure at all n locations
ggaaaacggggccgacccaggcgtccgntgaggaaaaaggtctggttgggaaggaaattttggttgtggacctgcctgaaagtccgggggcggttttgtaggttgcaaaatgtcccctgcctggggattttccggggggccacccacaccggagacttttgttttgggcgtggaaccggcgttgaaaaataagtccggggtttaaggggggagtaacaccgttgggaacgatgttggcaggggtggatctgcctgaagggtggatcctggcccctgcaagggaggaagcctttttaaataagcagggaaaatcgggtctctttaattaattaggtttttcaataggtaaaccttttttgggttggggtttttggg

SEQ ID NO: 111370 - DNA, 398 bp, Arabidopsis thaliana columbia
tttaagacagttaaaattaattccaaggaacctgggttgggttgggttccaaaggaggtgggggttaaggcaaaaatgtccaccggaaatgaaatttgtagagggaagacaaagggtttcttaagggaaatttttatgccaaagggttaattaccatggagggatttaaaaaaggttggttttgacagaaagtaaggggttgtttggttgaagcagaaaaagagctttattaacaggttaacagagatggttaagttggtttcttatggaaccgaagcaccagcctttgttgaaaccggtaaaataaagaggttaattggagtaaaagccaaggaatttttaattggggtcattttaaaggagatttttacgggggaacccctaacaaagataacttt

SEQ ID NO: 111371 - DNA, 367 bp, Arabidopsis thaliana columbia
gggccgccccacgcgtccgccaggtacaaaaggaccaaggttagttggggctttttcaatggcaagccagttaaggagcgggtgggcttccgtttttttttttaagggtctcgccttcccgaagggcttttccggggctcctttcggggttattccgcccaaaagagctttttccttaattgtccgagctgttaaatccgccaggacaccattccaggttgttaaaccattaaacggggatccattaatgggaggttgggaacctccggtgacttaaagccctttgttcggtgggaacttttccaacctcctgggttcccgtaccgcctaaaacctttttctccggggtgtggaagtggccctggcc

SEQ ID NO: 111372 - DNA, 311 bp, Arabidopsis thaliana columbia
aaaaaaggaggataaccacaacattttttttggtttccgctagccttccctcggggggggggtttccatccctggttaagccccccatggctgttcaattaacagctttaaaaacatccgttaaattcctggccaccccaaaaaccaacaaggcaataatttcaatttaaagcaacggggaaaaagttagttcaataaagttgtggccaccaattgtaaagataaagttagaaattttatctaacttccttaacctttttgactttaaatgggttaaggaagtttcttacttactccaaaacaggagaatt

SEQ ID NO: 111373 - DNA, 376 bp, Arabidopsis thaliana columbia
cggggcggccccacccgtccgtttttttttgtttttatcaaaaccttcctttttattttttaaatccctatttttttaaaattcaaaggtattcctttttgaaatttgacctagttatttttttgggacctcagttaaggtttaggtattatttaccatcaaggggttatggggccctcatttaatcaaaattattcacctttaccaattttaaatttattttttttttttttaccttccttttttttttttcccggttttaaattcgggttttaataaaccggggttattggggaaaattcctgggttccatggtccggtaaaattttaagttaaatccatatttttatggtcgattttaaaaaaggatcggttt

SEQ ID NO: 111374 - DNA, 208 bp, Arabidopsis thaliana columbia
ttttcaaaaacaataacaaattggttgggggggtaaattgtatggaaaattcctcgtcaaccctccagatttcaatactccaaagttccaaatatgtaaaagaggaagacttggaatctctttcttttggggcctctttttttacctactggttacatcttggcccctacccttactttcttggtccctcctgaaaccgatgggggtg

SEQ ID NO: 111375 - DNA, 405 bp, Arabidopsis thaliana columbia
gttggtggttttgggttttttaacacagcaggaaattaacaccaccaaccgggccacgcttaacagatcaattaagtaggatcgccatggaaaagggtttttccagacgtttgggggttaacaattttaaggtaaagggttccttggttaagttaactttggccaaatcctccggggctgggtgggggtaaaagaccaggtttaactatggttttttaagggcaggactaaggcttcccgttggattggcctttggggtgggggtggcttcttattaataaaccgcagggccttatccgaaaggccccgccgggatagccatagaatggttgggtagaagtaggaaggatgattggccgatccagccgattgtttttgcaattggaagtccttgaccgggaaggg

SEQ ID NO: 111376 - DNA, 371 bp, Arabidopsis thaliana columbia
accggggcggcccacacccttccgaccttgggggaagacccattggtgttccaatttacagaggaagggttaaccagaaaactgggtgggaatccaatccagggggttttgcaggtggccttccttgagctggatggagcgatggagccaatcgttttggttggtcgggaccttagaacagggaagtaacatgctttcaacaggagaggggagcaactttgaataaaagcgattcgatggggtgggctaaaaagaaaaactaaggcagagaagaagctggcaataactgttttaagtttcccacctgtaaaaggtaatgtagggactgaagcttacctaaaggggttggcttccattttttcggggttaaa

SEQ ID NO: 111377 - DNA, 254 bp, Arabidopsis thaliana columbia
ttttgtattctttataggctttccaccacggggggggtatcttccccgattaaggccacctaggccgttcaatcaaccggttggaattaatccgtttaatcccaggtatcctgaataaccaaaaagtacataatttcaatattatgacatgtggaaatagtaatctctttaaaggtttgcccaccaattgaaatgaaaaatttagaacttttttttacttccctgatcttagtaatttcaaattgtttaaggaa

SEQ ID NO: 111378 - DNA, 263 bp, Arabidopsis thaliana columbia
aaaagtaaacctaaataattttccactttgttttcaacgcctccaaacaaacaagggggggggttttaaaacaaggaacctgcccctttttccagactttagttgggttccaggtaaagccaacccgggggatcctaaagcagtcctcttggggggctaaccaaaacccggtttggattttttaccatagccaaccttgcttgttttaatggaaacttcccgggcccattttcgggcggttaacccggtttattattgacaag

SEQ ID NO: 111379 - DNA, 411 bp, Arabidopsis thaliana columbia
accagggaacgccctaatgagtgggggcaccttaaacggcaaccgggcggggggcttggcctactggccccggggggttccatttacccaggggggctgcaccggggttcctaaccttaaaaccatggccggtccaaccccagaccgtaggaaggttggccgtggccttaaatttgccgttaaagccgttggtcccggtttaaacattgcccgtgcggttggccttcttagcgcttgcaaggtcatttttctttccaaaataagggccggaaccaactgcaccaccggggggtgttgagcgacggtcaattgaagttcctagcggttgtttcgattattttttattcgtggggatattattaattaaagatgttcgaagggcgtgcctcttttaaatttccggcctttttt

SEQ ID NO: 111380 - DNA, 421 bp, Arabidopsis thaliana columbia
accaaaagcttaaccggggatcaaagccccttatattggggaccattccaaagccaaagaccacttcctgtaggaccagggaatgcaaaaggcttcctttgcccagggttccccaatccaggaggggtaaggccagttttgttgttaagggaaggcgtctttttgcccgaaaccaatttggttttgggggtcagactaagcctgtcttccacaaaagggttaagaccacgaaaaaaatggttttggggtttaagggtcaaagttgcaggcccttttggcagggtcctatcaagaggggcaggcttttcaggatcgggggtgccaggaggggaaggggaccatttttgtttaaggtgggtttaatctaattttttgcgattttggtcctggctggattgggaatccattggttttagctttt

SEQ ID NO: 111381 - DNA, 437 bp, Arabidopsis thaliana columbia
ggccgccccacccgtccgcccacattattaattccagtttgtttgggctttatttctttcatcataacctctcctgggggattcatggttattcaaaaggctctaaccgttccttttctaatatctctcttggtcctccacctcgtccaggctgttgtcgaaacctcccagaggaaaatggtttccccaaagaaaaccttttggggaagtccttgtgtaccccggtccagcctttcagggggcccgaggttgtttaccagagcgtccggaccttgttgctccaggtccacctgtgggcctccgggtccgtccggaacctccgccaggggccagggttccgctggcctaaccacccccgggggcccccgcaggtccccataagaggaaccaaggcttttattggctgcggttaaggggccaatgtcgttttgtttgtt

SEQ ID NO: 111382 - DNA, 341 bp, Arabidopsis thaliana columbia
aaggaggaggaggaggaagttttgggggggtttcatgggcgatataagtggcagtttcgtcgtttatggccgggagggttcaacgggttccggccgattcaaccctttgttccgccgtccttaatattcctcctggttcattgggccgatcctttttaaccgttccgtggaagttggtttaaggaattggatggaaaaaagttgaattgttgaaaacaggagtttttttagaggaaacctgttccttggttccaaacgaactcttaacagttttgagggaaaagtgggttggttttgagaccaaatctccggtcctaatatatggggggggggccatggtg

SEQ ID NO: 111383 - DNA, 336 bp, Arabidopsis thaliana columbia
aacggggcggcccaaggcgaccaaaaatgatcgggccctgggttttttttttatttaggacggggattccatgccaggggtggggcgtgtgttttaagggggaattaatgttcggtaaaaaccatttttaaccgaaatatttgaataggattttgaattgaaatttggtgtaggaactttaggccatccttggggtattgcacttggggcaaattttaatcggttggtttttgaagcttttgtccaattttctaacaaagggctcgtaactttttttaaaggtaaaaaatttatccgatcagtttgtaaaggaagtcttaaattagccgagttttt

SEQ ID NO: 111384 - DNA, 432 bp, Arabidopsis thaliana columbia
  unsure (1)..(432): unsure at all n locations
aaaccgggnccgcccacggcgtcggaaaaggaaaaaaaaaccggttttgggaggatgtttttaaacctcaacttttttttccttctggtttggtttttaatcctaacaatttggtccggggccgcccaagcttgggtttccgtaaggaaaccacttgtgggccaccgcaccaaaacggggttggcagccgtcgccggaggaggggggggaaaggagatgttgaagggggggaagcaaccaagtggttgtacctggtttaaggggggaggggttttggaggttttttaccttttttacgattaatccacgtgccttttaatcgccggggagttcgactgtttaaaattgggccgaccagccaaacagttctttagagcctttgggcggcctgattaatgcaccgtcccagggttgtgtggggaagcgtttttg

SEQ ID NO: 111385 - DNA, 350 bp, Arabidopsis thaliana columbia
gccccacgcgtcttttaataccggtttttttttttccttttttgtttctgcaaaataactctttctcggggggggtttacttgcaaagctctcgatttttccttttgggcataataatttccttgggttcatccaccaaatgttggggttttgaaactccaccaccggattggggtggtcaactttggatttccccttacatgttattttttgtcgccccttattccctggttccagttttcggctcctcccaggtgttggaccattgatgagataaggattggcgtttttgttaagggtgtcgagacatgggccgccttcccttaatcaaaccttttgaggcttagtgt

SEQ ID NO: 111386 - DNA, 400 bp, Arabidopsis thaliana columbia
  unsure (1)..(400): unsure at all n locations
ggaaatnccggggcggccccacccgtccggttgtggccacacaaccacgcggttaactgtaccaccggccaggaggggggacttaatatgggaccttccttaaaggatcgaataaaactgggaagcaaacctccagggcggggtaaggcaactttttgcttccaggattaccgttaagtcgaaaatggttaagttgggcggggccaaatttggccttttttccaggtggttcttttggaaataatgtccaaaaggcttcggatctttaagttcgtccaagaccgttgtttaaccagttcctcccgggggggggctggttccgcccagttattacgttcctttttggcccataatcggtttccaatgatccgcaccgtttaaatcctggtttggggggttt

SEQ ID NO: 111387 - DNA, 380 bp, Arabidopsis thaliana columbia
ccgttgggggttaagttactaaaacccgggttttccaatggcccaaacctaaattttacgaatttttaaggattcatttggggatattaaatcgggaccgataaataaaaggtgggcctttttttggggctttttttcttcggtttttcggaagtttttcggatccgatcctttggggggctcctaggggtggtggggagggggttttggaacctggaaggcattagacacttttggtttcgcaagggggccgagtttatttttaattttttggaacgagctcagatttgttccaccgttgttcctaatgccagggatgcctttattttggaggggtttaagggttctttattggagtttttggttggggaaatggaaag

SEQ ID NO: 111388 - DNA, 432 bp, Arabidopsis thaliana columbia
gggtccgcccaggcgtccgtttttttttttaaatctggatggtttttttctaaattaatgtcgaggatgggggttttccagggccggattttgggggtaattgtggttgggggccaaaaattgaaagaaacggatgggttttaaggacaggatcaatacgtggtccttgagtttgggggcagaagtaaccgtaccagaacctgaacagttgggggaaggaacgttgttttcaaagagaggttaattttaattttgatggaagggtttagggatcttaaggtggctgcctggaatagaaccattttttcaattgttgacttaattggcattgcaacgattaaattgcagaaggttttttttaaggattacaacaacgtgccctggattttgcaaagaaaaactgggaggtaataacattggctttactagttt

SEQ ID NO: 111389 - DNA, 309 bp, Arabidopsis thaliana columbia
gaattcgggacggaccacacgcgtccgcccacgcttccgccaacgcttccggaggatgttaaaagggattaagggtaacggttcctaggaggaacttgtggtcccaatcttggggaccacagcttttgaaattgaactaccagattaacttaccaaagttttagaagcctttccaaaagcaacagcagggttgggccgcaataacggggttaccattgggggggattttgggatccatgctaagacacaggctgaaggttaccatattttgttggatgctgccataaagcttaataaactgggtttgga

SEQ ID NO: 111390 - DNA, 395 bp, Arabidopsis thaliana columbia
  unsure (1)..(395): unsure at all n locations
agaaaaccggggccgaccacgcgaacgaaactagtcccttttacctggttttttttaccccatcaataannnnnnaatgtngggatttatttcaaaaggggcaagacccaacctccanttataatggctcaacccatcaataccaccaacagccaccttcctgtattagcggtaaccaaacattgtaacaacaaatgattcatcaaatatgccaacagattgcaaacagcaatggaggctccggtcaacaacaacaatcactttctgttcagaacatgatgaattgcattaccaacatttgaagaaacaaaacatattattttcccgcagtagttgaaacaccaatcacctccaacagattcagaggcatcaaggggttataccaaaaccaaaac

SEQ ID NO: 111391 - DNA, 438 bp, Arabidopsis thaliana columbia
  unsure (1)..(438): unsure at all n locations
ggttatatcggtcttgagttcagttatgttttcacggccctnggaagtgaggtaacttggttgaggactggggaactggtgcctgaatttgatcctgagatcagtaagctggctcaaagggttctaataaatacaagaaaaattgactaccatactggagtatttgcaagcaaaatcactccagcaaaggatgggaaaccagtgctgattgaactaattgatgccaaaaccaaggaacccaaggatactttggaggttgacgctgctctaattgctactggaagagctccattcaccaatggtcttggcctggaaaatataatgttaccacacaaagaggttttataccagttgatgagcgaatgcgtgttattgatggaaatggaaagctggttccccacttgtactgcattggtgatgccaatggtaaactgatgc

SEQ ID NO: 111392 - DNA, 251 bp, Arabidopsis thaliana columbia
  unsure (1)..(251): unsure at all n locations
ggaagaacaatggcttcctctatgctttctttttctactatggntgcctctcccgcggagggctttatatgtaggtcctggtcaggggaccataaaacctccccttccttcccaaccccccccaaggctaacaacgacattacttccattacaagcaacggcggaagtattaactgcatgcaagtgtggccctcgattggaaagaaaaagtttgagactttttttttcccttctgaccttacccattccca

SEQ ID NO: 111393 - DNA, 363 bp, Arabidopsis thaliana columbia
  unsure (1)..(363): unsure at all n locations
gttatataacataaagagctctttatacttgcgctttctactttctaccgacaatggccgctctcaacagagggctgctttccatctccatgctgtggaccggaaaggcacnnttaagctattccccggcnggcctccgaagtattgtggaaccggccgaatcacctatgcgcaaagncctcacaagcccacccggtccaatccgtgcagcccatggtaccggatcccgaccgagtcaagtaccttgggtccattctccggtgagctctccgagctacctcactggagagttccccggtgattacgggtgggacactgccggtctatccgccgatcccgagaccttctttaggaaccgtgagc

SEQ ID NO: 111394 - DNA, 437 bp, Arabidopsis thaliana columbia
  unsure (1)..(437): unsure at all n locations
ttttgcagcgattgaagccgattttttttttttcgaaacagcggnaaatcttgggacagttttcattttaagaggggtggttgaaaaatcatncctnnttacatttcataccgaatttttcaaaagctattacgcttgctagtttcatgtactgctcaatttcatttttgtttttctaccgtagctactgccattttttttttttacccaacgcctttcttattttcttgaccgttatttttattaactttcctttcttcttttatttcaatctttctttcattttatcttgttctcactgctctttttattaaatacttttatcttttatttctttaactacttttttttttttatactattttcttttttacttctttttttctctctatctatcttttttcatatcttcttattatatttttctttcttctttt

SEQ ID NO: 111395 - DNA, 245 bp, Arabidopsis thaliana columbia
  unsure (1)..(245): unsure at all n locations
aaggttctctcccaaatttttttcttncnacnncncccccccacggtccgtttcaatatccataaagtctgccccactacccaaaatccatcatccacttttaccatcaatcttaccaaaaaacattttaatctttcaattctaacactttttttttattgtttcttttcgaaaaataaacccaaatccttttaaaaactttaaatattcacttattccaacaattccttcactcttctcatacc

SEQ ID NO: 111396 - DNA, 430 bp, Arabidopsis thaliana columbia
gaattcccgggcgggcccaggcgaccgcagaccaaaggtatatagacacgtcctctattatgcatttaatccagcaactgtcaatatggagcgtctgttgtggaagtgggtctgggcctatcttcttctagactgttatagaagcttgctactgagaaaaagtgatgaagaatcgagcttttctgatagccctgttcttctatctataaaggttctgattggggtcttatctgcaaacgctgcatttatcatctcttttgccattgcgactaagggtttgctaaatgaagtttccagaagaagagagattatgttggggatattcatctctagttacttcaagatatttctgcttgcgatgttggtatgggaattcccaatgtcagtgattttttttgtcgatatactttttcttaacatcaaactccat

SEQ ID NO: 111397 - DNA, 312 bp, Arabidopsis thaliana columbia
  unsure (1)..(312): unsure at all n locations
aaaaaanaaacacaaatccaattttttttttttctcccccaaccannncnnnggcccccggtncttttaccagaggggcgggtaacccaaccccatcanatttcctcnnaagcggccttgtgaccataagtaaaactgtctccaagccaaagggtccatcattcatcccatggtacggatctgaccaagtcaagtacttgggtccattctccggcaagcccccgagctaccttaccggtgagttccccggttactacggatggaacaccgcttgtctatcctccgacccaaaaaccttctccaggaaccttt

SEQ ID NO: 111398 - DNA, 411 bp, Arabidopsis thaliana columbia
  unsure (1)..(411): unsure at all n locations
ccggggcggaccacacacgtccgatcaaaaatccgattgggaggaaaatggtttttccggaattcaaaaaatcnccgggggatgttttaaaatcctgagagtccgggcaaaaatccgnttgcaatgttgtatattaaaaaacacattgttcttgataaatttatccatatctagaaggctaaaattttactttataaggttaaatgaataatacctcttttaatgtttttaccattaccataaattttttcattttgtttactatatttctcatttccactctcctcctttttttgtttcaaaaaacaaccttacttattttttttttaactgtccttaattccatttacttttttaaaaaaactttaattatttttttttttctttaattattctttttttaatattaat

SEQ ID NO: 111399 - DNA, 280 bp, Arabidopsis thaliana columbia
  unsure (1)..(280): unsure at all n locations
aaacccggggcggaccgacacaaacggaaaaacctagaattctctagattttttattttagagagacggaaggtaaaaaacgagaggttataatataaactaagattgtcccaaaaagccaacctatcttaacttctgttcatagtgacaaggactacaaaaagccaccacctgcgccgttgttcaatcctcttctatctagcttcatggaccttctgcagagctgttatttctgagtttatagttacgtttttgttcctttacataacttntttttact

SEQ ID NO: 111400 - DNA, 245 bp, Arabidopsis thaliana columbia
  unsure (1)..(245): unsure at all n locations
cgctactcgaagaaaccatggaaccgttcttcaagttggggtggagggaacaaaaagnaatacaatagcaataccaacgttggtgtatttatcaagagaaaagagacctcaacatcatcataacttcaaggctggagcaatgaacgcattgctgagggtttcttcgaaaattacttgtgggaaaatcatactaaacttggactgggatatgtacgcaaacaactcaaagtcaacacgcgacgcgc

SEQ ID NO: 111401 - DNA, 462 bp, Arabidopsis thaliana columbia
ttcccgggccggcccaggcggccggtccggttacttcaagcgtacaaagtgttgtttgttttttgcaggagactgaaaattttaagcaggagggtacattaagggagctgggggaaaatgctttacggaatcagaaagatgatattacctctttggataacaatcatctggaaagcataattcaaatgcttggattgatatcaaaccaagatctcttaaaggaaagcattactgtggagaaagagaggataagatcccaggccagtaagtcagaagaagatatggaacaaaccgaacagttgatagaactcgtcttgtgcatccgtgaacacatgcttaaaactgagtttcttgaagtggctaaaggtatctcgatacccccgaatttccggggtccttttgcaacagaactcatgctggatcccgtaaatagagcttcaggacagacatttgacagaacat

SEQ ID NO: 111402 - DNA, 418 bp, Arabidopsis thaliana columbia
aactgaactcttcaaatatctgtatggtatactcaacctccggattctcagtggggtcacttaaagggggcagtgcaaagaaaataacctcaaaatgaaaggagattaccacaggtaccttgctgagtttaagactggagctgagaggaaagaatctttttatagcactctggttgctaacaagtcagctcaggatattgcacttgctgatttagctcctactcatccgattagactgggacttgctcttaacttctctgtcttctactacgagaattttaacttacctgatcgtgcctgcagtttctcaaaacaggcttttgttgaggccttttctgagctgtatccatttggagaagaatcattcaaagacagtacttttttaatgcaacttttccgtgacaatctgaccctttgg

SEQ ID NO: 111403 - DNA, 480 bp, Arabidopsis thaliana columbia
  unsure (1)..(480): unsure at all n locations
gaaaccgggccgggccgaagcgaacgaaatgagtctgagttatattgcaattttgattttagtaaagaagaggtcaaacaggggagggttccttttgaaaggtgctacgacttccaaatgtcctatgatgatctacctatctggggattcattggaaaggttgacaaggatatcaaatctgatccgagttaattcaaatattttttgtacaagcacattcagtttgagattctatacaataaggaccgtgtgatcgagatcagtgctagaatggatcctcattcgcttgtggatctcactgaggataaggaagttgatgcaaagtttatgtacactgttaaatgtaaggaaactgatactccttttgagaaaagaatggagaagnactctagtgttcttctcttccacaacatttggaaatccactggttcttcattattaactcctttgtcactgtcctttttttgactggatttcttg

SEQ ID NO: 111404 - DNA, 397 bp, Arabidopsis thaliana columbia
  unsure (1)..(397): unsure at all n locations
cgaacgcaagacaaatagaacaatttccgttagtgttcatttttggccagccacctaanaaccgggtngggttccaatgatgggtcgcgggggcaaaccaacccnaagggcatctccggtgctcctttcggtgtttctccgaccaaaagagtctcttccttcactgtccgagctgttaaatccgacaggacaacattccaagtagttcaaccaatcaacggtgatccattcatcggaagtttggaaactccggtgacatcaagcccattgatcgcgtggtacctttccaacctccctggataccgtaccgccgtaaacccttttctccgtggtgtggaagtgggcctggcccatggtttctttttagtgggcccatttgtcaaagctggcccattaa

SEQ ID NO: 111405 - DNA, 317 bp, Arabidopsis thaliana columbia
  unsure (1)..(317): unsure at all n locations
aatcaaaaaaccccnaggacccanccccaataacagaggaagatctgcttcaaataccgcgaggagggcgtacactcgagggtttaaggctgaacacacgtgtaggaattcaatacttagccgcatggttaacaggatcaggatctgtcccactctataacctaatggaagatgctgctacggctgaaataagccgtgtccagaattggcaatggattaggtatggagtggaacttgatggagacgggcttggagttcgagtgagtaaaaagtttgtggggagagttgtctaaaaaaaaattgaaagaatttaaaaa

SEQ ID NO: 111406 - DNA, 262 bp, Arabidopsis thaliana columbia
accaaaacccttccattcaccttctttaattcatccccttcattcctcttcacccccatgaccaacggggacattattttttttttatgcatcgggggaagaaaagcatcatgaaggtgtggccaccaattggaaagaataagtttgagacttttttttacctccctgacctttattgacgtctaatcggctaaggaagttgtcttccttttccggaacaagtggatttcttgtgttgaatttctctttttaccacggtttt

SEQ ID NO: 111407 - DNA, 429 bp, Arabidopsis thaliana columbia
cgtacggcaagaataccaatgttaaatcattttcattcaattttcctttggctccaaacaatcaagctgggatcttataaaacaatggaggtgccgatttttccagtagtcagtctggtttcttttcaagccaatctggagcattctccagcagtccttctggtttgatatccaatagccagactggatcttttagcagtggccagtttggtacgacaaaaagcagccaaccaagcctattttccggcagtcaagccggagcaatctctaatagccaacctggaactttctccagcagtcactctggtataacatctaatagccagacgggatcttttagtattggccaatttggtcagacaaaaagcagccaaccaagcctacttttcggcagtcaagcaggagcaatttctagtaaccaaccttttt

SEQ ID NO: 111408 - DNA, 438 bp, Arabidopsis thaliana columbia
  unsure (1)..(438): unsure at all n locations
ggcgggncgaggcggacgtacacttgtggcaataccactggtgtcccagtctacttaggaacggctaaacagcacactgggtcgggttccaataaagggagcgcggcggaaaaccctccctgagcttgatggagcgatggagccaatcgttttcgctggtcgtgaccctagaacagggaagtcacatgctcttcacaagagagtggagcaactctgcatcagagcgattcgatggggtgagctcaaaagaaaaactaaggcagagaagaagctggcaatcactgttttcagtttcccacctgataaaggtaatgtagggactgcagcttacctaaatgtgtttgcttccatcttctcggggttaagagaccttaagagagatggcttcaatgttgaaggccttcctgagaatgcaaagacttttttttgaaaaaatta

SEQ ID NO: 111409 - DNA, 327 bp, Arabidopsis thaliana columbia
  unsure (1)..(327): unsure at all n locations
aaagganaactctcttcttcttttttttcttctcctctccncnnaatttactaaggtgggtcactttataacatgggcctcgcctctctatctttctctctctcaatcacaattttcanttacacaccttaacccaaattatctcacattctnatctaatcataacacttttttntctttaaaacataaacaaactatcctttttttatttaaaatttaattaaacattctctattcttctacacttttttattattacaaacattttatattcccaaaatacacaaacccctttcctttattcttctcaccctttctttttttttt

SEQ ID NO: 111410 - DNA, 373 bp, Arabidopsis thaliana columbia
  unsure (1)..(373): unsure at all n locations
aaccggggcggaccgcacgcgtccggtttttcctttaatatttgtcctattacttttttggggaatatctgtttacttgaggctggtaccattaaaggtttgaatggtttccttacttaaatctaanttgctttatgttgcgtttgattaatgggatcgtacttttttaaagttttagccttttatactaaaaagcaacttttcgtgattttcttcaattgaatagctaaaattaggaaattttccttttcagtgttgattttcttttcctattttctttcttttctcttcttcttttttttcaagcgattaaccaaaaaagtcttgattttgttttttgttaaccactaaagtgttactcgatctgtggttt

SEQ ID NO: 111411 - DNA, 273 bp, Arabidopsis thaliana columbia
  unsure (1)..(273): unsure at all n locations
taaacatatcccanctctgaccaaaatctttggaaattattctgtattgcaatttgnnggaggaactttaggacatcctttgggtaatgcacctggtgcaacacctaatcgggtggctttagaagcctgtttacaagctcttaactaagggctcgatcttgctcttgaaggtaatgaaattatcctatcagcttgcaaatggagtcctgaactatccccagcttttgaaatatttaaagcgatcaaattcgatttcgagcccgtagataaact

SEQ ID NO: 111412 - DNA, 408 bp, Arabidopsis thaliana columbia
  unsure (1)..(408): unsure at all n locations
caggcggacggaaaagaaaaaaaaaaccgttcttggaagattggttttaaactcaactctcttttccttctgctgtggttattaatactaacgatcgggtccaaaaccaaccaatccttggcttacgtcaagaaaccacatgtgagccaacgcaacaaaacggcgttagcagccgtctccgtaagaggaggaggaaaagagatgttgaaagggaggaagcagactagtggttgtaacttgtttcaagggagatgggttttcgatgcttcttaccctttctacgattcatccacgtgcccttttatttacggtgagttcgactgtctcaaatttggccgaccagacaaacagttccttaagtactcttggcagcctgattcatgcaccgtcccaaggnttgatggggaa

SEQ ID NO: 111413 - DNA, 420 bp, Arabidopsis thaliana columbia
  unsure (1)..(420): unsure at all n locations
gccgagcacgcggacgccacgcgtccgcccacgcttccggtagatgttaaatttgattcaaggtcacnnatactaggatgaggcttgttgtcccaatggtggaggacacaccatattgataatgaactacacagattcacttaccaaagctatagaagcctatccaaaagcaacagcagtgttggtacgcaatcacggagtttacatttggggtgattcttggatccatgctaagacacaggctgaatgttaccattatctgttcgatgctgccattaagcttcatcaactgggtctggatgctgctaccccaaaccacgggcctatccggggaaccatacattcacagatcaaggattcacaatacgaaagagaatggccttggcgatggattgtccttcgacattgaaggaacaacta

SEQ ID NO: 111414 - DNA, 323 bp, Arabidopsis thaliana columbia
ggtggtggtattagggttttggaaaacccttattttcacctgagaaaagcttcatccttttgtgacttttaaacttctcttacaagttttctccgtcatcctcctcctgggttcagcaattctcgccaaaattgtaacctctgagctaacagttctgcaactggtggtgtgctattgattcacaccaagatttagggattaagggaaatggtggaaacccaaaagaaatctgataagcttgagaagattaaagtggaaaccgaggagaaaacttgatagcttgagaagattaaagctaagcgtcttcgcctgagttgctaaaa

SEQ ID NO: 111415 - DNA, 229 bp, Arabidopsis thaliana columbia
  unsure (1)..(229): unsure at all n locations
gggncgaccaggcgtccgactatattcagtactctaacagaagcgccattttgtatccccaagactaaagctgtcttcaatgggggaagaacccaaggggggtgctttcgatctccaagagattcccgggcccttgaaagacctatgatttttttccccggaactgcagttaagagcctgaatattcggtgttttcctattcctagacactgttggattatgatatcct

SEQ ID NO: 111416 - DNA, 175 bp, Arabidopsis thaliana columbia
gaaagctgaaccaatatcccccaaatttttatatcaaactcataagctcaataagggggaattttaatttggggggcgggcgctgagcttccatggaagctctaaggtgccccaaagggtttaaccaattagctaagtaatacaacaatgaacacccccagaacttatctatccg

SEQ ID NO: 111417 - DNA, 497 bp, Arabidopsis thaliana columbia
ataaaagctaataattaactgattcgaattggttaagatgtaccggaagttggcactctgcggtttttatgtaggacaggaaggttactacaataattataagggtttaagaaaatgtaattttggtcataattacaatctttatattttacttatattaaattactttttatttatattgcttttttttattctttattattattctatatctaatttattttccttaatgtaatatattatataattatttatttatttataataaattaatttatattttcttatattttacatatattattatttatttatatctttaatatatattatattgatttaaatatttaatatatattaatattattttataattattttttatctatatgatatacttatttattttatataattataataattcttttatattaatatatatataattctttatattattatttttaatatttattatttattattatttatat

SEQ ID NO: 111418 - DNA, 326 bp, Arabidopsis thaliana columbia
aacatcctcctccatattattaccactcctatccttttccggtgaaatccccaccaccaccgtacgtttactgctttctacgaccgccggtaaaatctcccccaccttctgtctacatttactctattcctcaacctaccacacatttctaggctcatcaatttcaacataatttcccctttattcaagttttctcttaaaaatataaataaaggatggttctaatgtcaaagataataagatgtgaacctaataaggttcttggcttgtaattcataaccaaatcatttttaacaacgatccacatcacttcctatttttttaat

SEQ ID NO: 111419 - DNA, 214 bp, Arabidopsis thaliana columbia
  unsure (1)..(214): unsure at all n locations
ggcgggnggaagcaaacgcaaagaacccgccttagctccanttttttctttatccccccgaaccaccttcccagcccgggttctaacaaataggtgcctcaacccaaacctaaatcctcctcaagattctttttttccaatcacaaatcctcttccttcacacctcaacctataaaacctttttccttctccttcaccctctttaccatcctcc

SEQ ID NO: 111420 - DNA, 166 bp, Arabidopsis thaliana columbia
  unsure (1)..(166): unsure at all n locations
cttataaataccaatacaaagacgangggaatgctatcatggccaaccaagaaccgtatcgacggggtttttatgtaggcggaggggcacaaaaaanctagattcaaatttgaaaaccgaacacaccaccgcatgattgaaaatttctacccaactgttcaaacaa

SEQ ID NO: 111421 - DNA, 355 bp, Arabidopsis thaliana columbia
cggggcggaccaacgcgtccgctaaaaaaaagaaaaaggaaccacgcaaatatatatttaagctccggctgatctcaagcgcggaggataattttttgctgcagggggtactcaatagtccacaacccacccccaaggatgttacacatgaaacgttaagcaaaaaggctacccatctttttgaaaaaactaaaatgagagttgtttatgtagttccaccattaccactattaccgttttaggaaggatctgcattggaatacttatttagggtttgttgcattatactatggtattgccatccatttttctgtttttttactttttatcgctccaaacttttattctttaattt

SEQ ID NO: 111422 - DNA, 419 bp, Arabidopsis thaliana columbia
cgaacaaaaaaagctttgaatatccgccatggttgttggacgaggctttctctttcttctatgaccaagtttcttcttctggccttcacaaacgcagagcaccgattcattcacatcggttctcgtatctcaaaacggactcgatttcgtcaaaaatcttctagttaacaaagctatcgcgtcgattatacctctccagattcccagaattgagaaatctatgaaaatcccgttccttggaggaatcgatgttgttgtctcgaatctcacgatatacgagcttgacgttgcgtcatcttatgttaagcttggtgagacaggtgttgtcatcgtcgcttaaggtgcgacttgaaatttgatgttgaattggcattattcttacaagccttggctttcttcctattgaaatattctgtcag

SEQ ID NO: 111423 - DNA, 334 bp, Arabidopsis thaliana columbia
tttatttttcaaaccgcaaatctagttcagagcagggtttttttagaggggaggacgtcaaataacctctaatacaatgtcaaagacatttttaatgccaatttcggtcgtctagaactctagcttgccaaatttaatatgcttgtacacaagtcttgtctatacactaaaatggaccttttaagccattcaaaggcgcttaaaacaccggatctatttaacataaccatccaaacctctgtatctaattaaaccttaacttcttctcatactaaagaaatatggtgttcttgtaaaatcttttccatataatactcactcattcaaatccaat

SEQ ID NO: 111424 - DNA, 218 bp, Arabidopsis thaliana columbia
  unsure (1)..(218): unsure at all n locations
ggccgggcccacgcgnccggagaagcaaannaaaaaaaagcaactgtcttaaagaagaagaagncaaccatggcagggggggtgaaagccgagccggggggagggaatcaaacaagagactaccaagacccgccaccagccccgttaatggagggagcggagctaaagaagcggccatccaacagagcagtaaccgcagagcccgaaaccaccccccc

SEQ ID NO: 111425 - DNA, 239 bp, Arabidopsis thaliana columbia
aacctaaaccatctcttcatatgctaatacctgctgtttcttgtgacaataactaaaagaaaaaaaccactgcctgtgatcacccacaccaaccgtatttgagttccgatttatagttctttcaaattccttgaaagcttccatagatcctgaacatacccttcattcccttgtactcatatttttggctcatttactttccttgacttgttgaaataaagtttaatcaagtctttcct

SEQ ID NO: 111426 - DNA, 253 bp, Arabidopsis thaliana columbia
cccacgcgtctcaaaaaaaatgaaacctcaaaaccaattttttttttggcgtcctcaaccaaggcttgggccggcttttattatagccggaggggctgaaaagcctgccacatcaaatgtcctcggaagcggccgtgtgaccatgtggaaaactgttgtcatgccaaaggatccattatgtattcaatggtccggatttgcccgagtcaagcacttggttccattctccggcaagccccctagcataccttac

SEQ ID NO: 111427 - DNA, 253 bp, Arabidopsis thaliana columbia
ggccggtaaaaccaacaagctatcccccgcggcatcaaaaatcccagaaagcggccgtgtgacaataaggaagaccgttgccaagccaaagggcccaacaggcagccaatggaacggaactaaccgagacaagaactagggcccatactctggcaaaacaccaagctacctaaccggaaagatccccgaaaacaacggaggggacaccaccggacttacagttgaccccaagacatacgcaaggaaccgtgaa

SEQ ID NO: 111428 - DNA, 429 bp, Arabidopsis thaliana columbia
ggcagaaggtgggggccattgcccatggggttgttgcaccccaaagtttcttaggccttgctggttcttttgccaaaggggtggggctaaatgccttggggtccttccgggcccgtccggaaccaaacaggggggtcctggttccaccaccgggaggactcaccaggggggcccaaatggtccttaaccaaaaccattgggggggaaaccccaaccggttccctattttattaaatattttccagattgctttggtggccgggagggttaaatattagggttttggcgggtttcatttttcatggttaaccattttcatttaaaatcttttttgtttcttccacgtttggttcttttggtggaagccaatacacaaatggttgttggcccttttaattgggattatttaaaatttttttttttaattgg

SEQ ID NO: 111429 - DNA, 412 bp, Arabidopsis thaliana columbia
cgtccgaaaatgcctattggggggttcatcaaccttttttcttaaccagggttccttacaggtttgggccttaaagcgcgtccaacgcccaattttacacaacaaacgggggggctccagtttcaaacaccattttttccttaaccatgggggaaggaggtccggtttttttgggggatattaattggaccgagagggtggctattttaaccagaggggggatccctggggggggggttaaggctggaggattcagggctaagggtttttttgaagcaacccatgccatttaaaacctaactggtgctgtttttttaagagcccctggggttaaaactccggtttttgtccgtttttccaccgttgtcacacgaccgtgccagtcctgaaaccatgagggttattcggggtt

SEQ ID NO: 111430 - DNA, 287 bp, Arabidopsis thaliana columbia
acccttccgttttttattttttaaacttttatcccccggttttaacctcctaactggcgcctatggctaaggggaggcccgccataaacaaaccggcttccgggaagccgtggtgggggaaaccaaaccccacgtaggctccggcgctataaaaaccaagggccggaaagaagctccttaaggaggcttgtcccgggggccccaggagtaaaacgtggactaccttaggtcccctgcctttcaggtcctactttttgacggtgcttaagcaggttcttcccattttt

SEQ ID NO: 111431 - DNA, 209 bp, Arabidopsis thaliana columbia
ccagtattggagggagaggggtttgttaatagttgcccaaaaaggacctggcaggccactggcttatttgggccttgtaattaagggtctaagggaaaaaaaccttaaaggccacacaaaatggcctccggggggtcctcgagtaattgttctggtcccacctgaaaagggggctcttaaggttctggctaactgagaaccaatttcaa

SEQ ID NO: 111432 - DNA, 332 bp, Arabidopsis thaliana columbia
ttaatcaatttctccctaattttgattcaaccccattacctttataggggggagggcaattttgggaagctggccctaaccttccatggaagcttttagggcccccaaagggtttaaccttttagcttaaaaatccaccatggttaactccctgaactaatttaaccggccttgattataatgatttcttaaaccgtcccgtttaaagcgtgggggtgtacaccgaaagtaatggaccggcggtggggctcgttccttttcaaacctaccaaggtctaatatcggttcctcctttactatttaggttttggtttttcttttggccattcagg

SEQ ID NO: 111433 - DNA, 369 bp, Arabidopsis thaliana columbia
tcccggtccgaccacacccgtccgatttttaacattttcgtagccgcaggactcctttcagatcctacctggcagctatgggtaaggggaggtttaccattaccatgggggccatgggccatgtggattctggaaaatcgcccccacctggccactggacctataagctggggggtttggccaggcgtgtcatcaaggggtccgggagggaggctgctgaaatgaccaagaggcccttcaggtccccttgggtgttggccaacctaaaggccggccgtgggcgtggttttcccatcgatttggctttatggaggtccgggccccccaagtcctacgtgccatccattgttgccccaggccatcgggttt

SEQ ID NO: 111434 - DNA, 450 bp, Arabidopsis thaliana columbia
aattcccggtccgcccacacccgtccgcttttttaagtccactttttttaatccctaaggagactaaacctggttgggggggatttaggggggggttgggttcttgggttaccattttcccaaactgaaaagggttaagcattttggggcttttttcctttggcccctaattgcccttttaatgcttaaaaccatggttttggcctaaggtggttctattgtgaaggggacccagaaccgttttggcccaggaggcctgaaccgtccccattgcccatcggattgggttggggggggtaaaaggccccagtcccacagggtttgctttccgttctgcaccaaatgctgcaggaggggtttttggttgcctccgggttactttgggaccaaccaagtttgctcctgttccaccacctggaaaactcaagagggtggcccaaatggccctgg

SEQ ID NO: 111435 - DNA, 262 bp, Arabidopsis thaliana columbia
aagtccagaatctttccccccatttttattccccaaacctaaagctttctgcgagggaggatgaaacccactacggtcctttcgatctccaaaaaatttgcagcccctgaaaaaacttctattcctttccccgaatttgctaataaaagcctgtaaattcgtgtattcccaattccaaaaccttgttggttaaaaatttggtccttaattttgacccaatggtgaaagaatatgttgaataatccgcagttgtggattaatt

SEQ ID NO: 111436 - DNA, 412 bp, Arabidopsis thaliana columbia
gtccggtaaacctaaaaataaagggggttccacttttaaatttttttccactccaaacccggaaggaaggaaaaaaccttcattcttgccaccaccaccaccgaaaaagccgaccgttttggtgttcccgtttcaacattccggtaacttggttcaacatttggacctaacccttaaattttttttccggggggccaccgtaactgtcctggtaaaacccaaaaacttttcctatttggatgctttccgtttttttaactcccgggaccacttaaaaaccctaatccttccttttccttttaaccctggtttaccttccggggtcgattttttccagaaacttcttttggaagctttagttaacatgtttgatgctttttttggtttccacgacctttttgttgacttttta

SEQ ID NO: 111437 - DNA, 192 bp, Arabidopsis thaliana columbia
cccgggtcggccccacccttccggtggatgctatggtggggttccatggccggttgggccctggcatggatggaaccggggggtttaacgctcaatttccaccttttcctcctcttcaagagaaactccaaggccatggtggggccggtggaaatcctggggacgatggggctttcaaaaatgtgaagaaaa

SEQ ID NO: 111438 - DNA, 360 bp, Arabidopsis thaliana columbia
ttttgttggccagggctccggttccttcttttgtggccaaaccattttttaagggttttttggggttttaaggacttcaaaactcctttgtttttccttttgccaaaagatctttttccgatgggttggtttccttggtaagtttccaaacttttgcattgggaagcattgggggttccaggaaaggggtgaccgaggccaaaataaaggtggccatcaatgggttcggtgggatgggtaggaactttttggggggttggcatggccgtagggactttcctttggatgtcgtggcaattaacgacactggtggggttaaacaagcataacatttcctaaaatacaactaaacttttggaa

SEQ ID NO: 111439 - DNA, 276 bp, Arabidopsis thaliana columbia
tccgggtccgcccacacccgtccggtgggactaaaccatggcgtttttggctaaccatttttggggatggagatgttccccactcttttttttttttaggttatcggggagggcttcgaagaactttccccagaacaaatttgcctttgtttttccgacttttgtcgccccggttgcattgtttagcggccaaccaaaggaccgttttgagctgaaaaaaatgttcgaagatgcttttgaacgatgtaaaacttttcctatggaaggggtggcttt

SEQ ID NO: 111440 - DNA, 320 bp, Arabidopsis thaliana columbia
gacccacccttccgttcgaaagtttaatcaccacatgtaaaaatgttggccaaaaacctaaaaccaaaggcccgaaagttggtaatattacggtttttgcaccccaccgaaggccgtaaagcgctcccttaaggcccttaactttccggttcttccgtggcccgtccttaagttaccatttcttccgaggaccgtccttaagttaccattccttccggggaccgtccttaagctacccgttcttcctgtgaccatccttaagctccccgttccaccagaagctgtccctagattacccgttcctccggtgaccgtcccaa

SEQ ID NO: 111441 - DNA, 152 bp, Arabidopsis thaliana columbia
aaaaccgggtccgcccaacccttccgttatgttcgttgggcctaatttttgggaggtttaaacctaaaaagttgtgtgtcctgaagggccggaaaggattcgtgaactgattgcaatggaagcatattttgatcacggcgggtatggaaatt

SEQ ID NO: 111442 - DNA, 189 bp, Arabidopsis thaliana columbia
accctccggtcaatccaaaaaagggggttattccagagagggctattccagaaggagagggtgtgggccgagaccattatacctatggggaaaaaggtaagcccaattgaagttaagttaacgggcaaacaaagttttgtttggtaggaccggtaacctaaaaaacccaaaacctttgtgcaggggggg

SEQ ID NO: 111443 - DNA, 221 bp, Arabidopsis thaliana columbia
aaatttccggccggaccaacccgtccggaagatggaagagaggatttaaaaagtttttcaaatgccgtctaatataataccaccggggggtgttttttaaaccacttctaccacttccgttactacctttaaagctgctttcgttaaacctcctttggcctttccgtctttgtcaaacccccttcgtttttaacaatctccttggtaatatccgtcgctcc

SEQ ID NO: 111444 - DNA, 380 bp, Arabidopsis thaliana columbia
cggatttccgggttcgcccacacccgtccgcgaaaaattcgaaaaaggaccggagaagaaccagacctgaagatggagggggtttttggcctagtggggatgggatccgttatcggggcggcggttccataagcagttaacagttttttttttaacaggaccaaaggggccaggtccttgactttggactttaacaggctcgtcgccgttggtggtgggcctggtgcccggtttcagtttacggggtttgtccagaagaatgggtaactgtttcagttccgtaaggggatcccttggagtcctgttgctgctgttaacttaactcggggggaactggccactgttttgagaaggattccattttcggggaacatcctgtt

SEQ ID NO: 111445 - DNA, 338 bp, Arabidopsis thaliana columbia
cgtccggtttaaggttcctttggggtccacctccatagccaaaaaaggggaaaccataactctggaggaacttatgaccaatccaggagggccaccggcggtaaactgcattaatgggttccattccactcctgttgaaactgggtcattggactttccaggggccacggttttgaagcttttcaaggttttaaatcctgccctttttgtgtttgcagggattaacggatggtccaactttccttttttaatgacagggttccaggaggcgctttttcattacttttaactttttgccatgttggccaccccattccacgcaggggttgagtccaaaa

SEQ ID NO: 111446 - DNA, 357 bp, Arabidopsis thaliana columbia
ccccacgcgtccgtgggggggggacccaggctggccgaatcaaggggttaatgggggctggaccaatgcttgggtttctttggggacccagttttcagaggaggcaggtgccgttgagaaggctcgaaaggggggggagaccagggagaagctcgtggcctgggcctaaaaaactggaagcctgttaaattggatgacacctctgggtcccaaccgaggaaatctagggaattcccgggatttttagaattctgtttttgtggcgaagttttttaatcctaataagggcctgtggggggcaaatggctgggcaggtggcccccattaaggaaataaaatgggcgattctttagcttt

SEQ ID NO: 111447 - DNA, 233 bp, Arabidopsis thaliana columbia
ccggtcggaccacacgcgtccgaaatcctaaaaagcctatttgggggatcattttctttttatcataaccatggttccttacagggttggtccttaaagcgcgtacaacgcccaatcttacaccacaaacggtggtgctcaatgttccaacaccatcttttcccttaccatgggagaaagaggtccggttttttttgaggatttatattttatcggaaaggttgctaatttat

SEQ ID NO: 111448 - DNA, 368 bp, Arabidopsis thaliana columbia
aaatacccgggccgaccaacccttccgatttggagaaaccggttccttaaaaacttatttggttgcaggatcctttaattccaggggggtttaagaatgcccaaatttcccccattgttggcaggcctttgaccgttgaatggaacgtttactcaaggggttttagaagtctgtggaagtccattaaggccaaatccgcaattccggaaattttgaccatggaaaacggttttgggaaaaaactaggggcctaaaattctgtggctgtggtgcccgctgtccaaaacaggaaatttttttttaaaaggcttttttgtggtttgcaagaagcggttggcttcgccaaagggattgttacaggatccttt

SEQ ID NO: 111449 - DNA, 377 bp, Arabidopsis thaliana columbia
ccccacccgtccgttcgtccccatctccgtttttgatcctttatttattcctcatggaaaaaatcaatccgacctaaaaaaattctcgaaggccttggcccgtaatttcctccttaatttggtcccaccggataatttggcattacctctttcctttttgggggccgaaaaaattaggttttttttggggattctgtggatggcgacgccaccaccaccccaggggcagcaaccggcgatggcctcggcggtcctcgatgttttattcaggcgactcccgggggtccggttggctggcccaggaaggcaggtccagctttctgaagctgaaaccaaccagctttgtcctccagctggggatattttccttcagcacc

SEQ ID NO: 111450 - DNA, 424 bp, Arabidopsis thaliana columbia
gatttccggggcggaccacagccgtccgttttcaaatcaataaacggggggggtttggctgttggattcccgaatctattaatcaacaccgcacatgatttccgaggccagcacgtggcgtccctggcttaattaagttccccggctgcaatcttggagcagatctttgccattaactggctccctcgatggttggtggcgtccttaacttgggggtggccttttttcccaactggctcctttgagagaatggaagaggaaggggttgtaccacctgcttttaccatggcagggatggtctttaatttccccatttaacgcgggggtccgactagggtgtgaatttatgacatcaacgcttggcaggaagggttttactttgccgatcaggtccttccttggttggagactggaatcccgtggt

SEQ ID NO: 111451 - DNA, 326 bp, Arabidopsis thaliana columbia
cgaattttctaaggaccccgccaaagcgcctggtgggtaactttccgggcgattttggtcttaaacccgggacctaccaaatctttaactaaatccgtccctaattcctccgaaggattggctggttccgttgccaaatcctcttcctcaacacctaattccatgaaggctttttccgccgccgtggcccttttttcaatcctcctttttgttcctatgccagctgtggctgttttttaaggttggactcctggcagggcctcaaaccagttggttaaaggagggaagcaccagtccaggaggctggattttttttttaggcttta

SEQ ID NO: 111452 - DNA, 200 bp, Arabidopsis thaliana columbia
ccacccgtccgaccgtcgtctgagcccaatgagtcttaagctttttaaaaaacccaatagttcctggctgcgaggccgccgaagagaaattccaggaagcgttgcttctaggaggaggatgaggttatgtgggcaaacaaagccgcattttcaggggaggaagggaggcgaaattgggcgttggaggaggtgaatgtttt

SEQ ID NO: 111453 - DNA, 248 bp, Arabidopsis thaliana columbia
accaacgcttccgttaaccctagggggaaagtttaaaatcttttttttaggaccaaacaggttcctgggaggcgcgtctaatttgaccataagttcaacctcccaaggactccatggaaccaccaccagttccgtttttagacccgggtaagcttctttatatggcttttggaagggcaggataccgtatggtcaatcgtttcttctattattctcaacattactgtctcgactggtatggaatttaa

SEQ ID NO: 111454 - DNA, 366 bp, Arabidopsis thaliana columbia
aaccggtccgtccaacccgtccgttattgaaaaaggttattcaccaatctcttttgcctccttcccaggaccatcgggggggaatcttccgtccgatttatgatgaacctttaccccgccccaacaccaaaaaccgcctggaatttaaaaccacccttacccgaaaagggagaaattggtaaacaagttaagcctttccactccaaaggatcaagctttaaccaattgattccaaaattaatgtttaaaggaggtgatttcacagccggaattggtcccggagttaaatttatttatgaatcgaagttaaaatactagacctttataaaaaaactataccttaccattttttttgcttatggttaa

SEQ ID NO: 111455 - DNA, 101 bp, Arabidopsis thaliana columbia
ttttatttccggtccgcccacacccgtccgttctagtccaccagcttcctcgtggccttgtcattccaaaaccggcaaaatggagggaggagattagtgtg

SEQ ID NO: 111456 - DNA, 268 bp, Arabidopsis thaliana columbia
gccgaccacacccttccgttaaggcaaagacaaaagctttaatgaagctttttatttagaatcgaaggcctttgggctcgggggggtcctattatggtccaaaagggtcttgtggcctcttttgtgggagagacttttaacaggaggggttttgggttcccttttccgtttttaaaccacccatggttccagggtttgtggaaccttccggaggaggagtcgggtttcgcccttcccatggagggtttactctatccttttcccttga

SEQ ID NO: 111457 - DNA, 327 bp, Arabidopsis thaliana columbia
cttccggagggcgagggtgtccaatgattaagggagtaagttcgttgaaagcctggaagttaaaaagaccggaaagaggctggttaactaaaggaagggacctcccgtgttcgagcaacccaggatgactaatgagaagctaatggaatccggaaccatgctggtgttggaccaggagaatgtcaggagagtccaacttgccgggacctacctaagccaggctgttttggaagacccaaaccctgaccccttgggccgcggaactttctacggtaaaccagaggaaagggagcccagcaggtaaacctgccagttcctgaagggggt

SEQ ID NO: 111458 - DNA, 290 bp, Arabidopsis thaliana columbia
cttccgttcaaccttatacgctcttttaatccgggttggacttttggagaagttttactgggcccggaccgttgaagaccgtttggtggtttgcaagggttttttaagacctgccaggatcaaggccaaagactttgtaacacttgtggttcagttccctgtgaaatctatcaattttttcgtggctttaagggcaagagtgtccgatgttgaagggaggaagttcgttgagagccttgaggttaagaagaccggaaagaggctggttaactaaagggaaggacctcccg

SEQ ID NO: 111459 - DNA, 308 bp, Arabidopsis thaliana columbia
ggtccgacccagcttccttttattttaggcccttatatataaattttttttgggcctaaacaaaaaactgaaccggggggctctattttctttgtgcccaaaaacccgcttaaggactcttgctctgttaaattctttgttatggacctaaccaaaccaataaggcacccctgggcttttttcgtttcaaggaataatttccatgagacctttatgatggaaaccccaatgaccaattttatagttcctgtgtgtaaatcttctgctgccatttgcaagaccttacataactcttaaaaatctcctta

SEQ ID NO: 111460 - DNA, 387 bp, Arabidopsis thaliana columbia
tccggtccgacccacccgtccgttattttattaagtggcaaaaaaaaaatcggggttttttaaaaaagggtaggagggaaatggggggttcagttaaccgttgaccagatttaaaagttaagggaagcctttagccttttcgttagggatggggttggtggtttaaccaccaaggggctgggacccgtgttggggtttttggggcaaaaccaaccagaggctgagcttaaagacatgaccattgaagttgttgcaattgggaacgggacctttgttttcccggagttcctgaacctgttggcagggaaattgaaggccactgtttcagaggaggagctaagggaagcttttagggttttggttaaagaccagatgggtttaattttt

SEQ ID NO: 111461 - DNA, 373 bp, Arabidopsis thaliana columbia
tccggtccgaccccgcgtccgccttggtttggaaataattagggttccggcgtttttgcactttcctttttggtttttccagctggccattgcctggttttgatgaccgttttggaaccactcgcctttatgtgggcggttaataatttagaactggtcccagagacctggggcgtttttttagcaaatccggagggtttttgggggttggcctaaccgggagatgttggttgaagggggggcctggggggtaatggggggaaattctcgccgggggtttaaggggggcttgggcgatttggttggtggattaatggcatgtttttatgggaaatggcctcaaatctaaaaacctggggttgggaagtccctt

SEQ ID NO: 111462 - DNA, 347 bp, Arabidopsis thaliana columbia
cgtccgaaattttgaattggggggggccggagaaaattggcgtcgtttttgaaggcattaatggacccgaggaggaacttcctcgttggtttgcttttgaaagccatttttacttgccttggcagttccggtttggggtccgatgttctgtccgttcagttttccagtttggccttcaaagaggttttgaccggtttgcccaggggggtggtggttgctggtaaccagcgtttaaggcgtgcctgggacctttccttgaagaccgatgccctccccatggttcttaaggcggggcaaacccaattccggggttattttaaggccatgcttgcttttgttgaggggga

SEQ ID NO: 111463 - DNA, 273 bp, Arabidopsis thaliana columbia
cgtccgaaagggccaagagggaaaagggttcgagattggcggccgcattttctgggagtagttggttgttggccaactcttaacaattttaataatcggattaatatccgggtttttccgtttccgggcaacttttttaatccaattggcaattttttaaattcaaaaggacgtgggttctttcctctttcccccaaatttaacgaccttgtcgttaacccttccttttcttatttatcctccaggctttttccaattggaacccattctttt

SEQ ID NO: 111464 - DNA, 165 bp, Arabidopsis thaliana columbia
gcgcatttgaccctcttggatactcgaaggtaccccaagaagctcgaggaattgaaagtgagaggtttcaagaacggggtgcgcgacacatcaccttacctttcttgatcaaactaatttacaaatgtatatttaaattcggcgtattttttatgatcatttttt

SEQ ID NO: 111465 - DNA, 255 bp, Arabidopsis thaliana columbia
tcttcgtctagtagattggggatcgatgggatattggtgaagctatagagatcatagacaaatgaatggttgaagagacgtgtgatgagggccaattaatgaagtgcttacacattgggttactttgcgtgcaagaaaactcttcagacagaccagacatgtcctctgttgacttcaagttaggtcataacgccattgatatggaatttgcgaagcatactgcatttacggcgtgaaggaggagaaaccccaaaa

SEQ ID NO: 111466 - DNA, 264 bp, Arabidopsis thaliana columbia
agcaaacgaagatgggtaccaccaagacgcattcttggctgcctctatgctctcctccgccgctgaggttacatccccgggtggggccaccatgatcgctcaattcaccggcttgacgcaatgccctggattcccggtcacccgcaagaccaccacggacttgactttcatcccaagcaacggcggaagagtgcgctgcatgaaggtgtggccaccaattgcaaagaagaagcttgagactctatattaccggcgtgaccttag

SEQ ID NO: 111467 - DNA, 205 bp, Arabidopsis thaliana columbia
ttttcttctacttctccttccctttgcttcaaaaagggggtggtcggatctttatcgctcaaaaatcttcactttcagatcaagccactcctttatggaatctttcaccgcattcattactcgagagtaaaaacaagttctttaaatcccacggaaaaaagaattggtgtttaaaattgccctgcgttaataatggcttcaaaaa

SEQ ID NO: 111468 - DNA, 452 bp, Arabidopsis thaliana columbia
cgaccgacccatccgtacaaccacactcaaaaacccaattaatgggttttttttgaccttctggccaatctccacaatttaattcttctaaaacaggaggcgggtctccaaccccttcttctgcttactcaataaacccatctcgctcctataagcccctcctcatccaagcgctactacaccaacatttgtatctactggcctagccccctaatgaacaccacctggccatcctcaattccctttacgattacatgtgcggaaaccaccccccctttgccagcccctatttctaattacccatttaaccatcgcctacacgcataaaaattgttttcactccatcttcaaaatcttaagaagatgtgtcataaacgacttattttattcaaatggggaaaaaagctttttgttcaaagattttacacttagatgataaaccatccattttt

SEQ ID NO: 111469 - DNA, 282 bp, Arabidopsis thaliana columbia
  unsure (1)..(282): unsure at all n locations
catctcatggcccttcctctcatccctatttttttttaaccctgatctattanctataaacgggtttattttcggagaagggagcactatccaaacccgattaacacttcttcatatacggataattgccctactaccccaaccctacctttgaccacccaaacaatatttaagcccttaaggctactaaatttatcctcatgccagctacttaatgctccagaatccccgaaaattacccattgccaaaagcaaagtactagctttaccaaaaagacacat

SEQ ID NO: 111470 - DNA, 237 bp, Arabidopsis thaliana columbia
cgccgacccatctactttcacaaaccagaaattggacccgtgtcttctttctcactgttccttccttcacaaagagaccctattataaagaagtgggttcactttttccctattaaaatggccctccttttatacgaatttccaagattgtacctcaagttttcgatgaacgtttagcttatcaccgccataacgttttcaaactcgcccacactgcaacctgaatgccattactaa

SEQ ID NO: 111471 - DNA, 278 bp, Arabidopsis thaliana columbia
tcacatccaaaaaaaaaaaaccacaatcttttatttttaatggcttcctcaaccatggggtgttcctcccatagctgggggggaaagtctttaaatcctcccatatcaaatatcttccaaagcgcccattttaccataaataaaactttcgccaatccaaatgtttcatcatccatcccatactacggttcttaccaaatcaagtactttactccattctccatctagccccccagcttccttaccgtttatttccccgtttactacctattttacac

SEQ ID NO: 111472 - DNA, 290 bp, Arabidopsis thaliana columbia
agcttccataagagtcttattcccaacttgtattacacatatttcactctctctgaccggggtttcttttagccaccagagggccaccactcctttctccggcttttttctcacttcactttctccttcccaatcttctctccagaaactctctcttcgtacttcttccaccgccgtttgcctcccacccgccttttattattcctcatcttcctcctcctcatttacccgttccgttccaacccttatccgtaacaagccattttttgccgtttcctactcctaccatt

SEQ ID NO: 111473 - DNA, 337 bp, Arabidopsis thaliana columbia
ttatggtcgctggtgctcatctttgtgattttttataccgtaagagttgtgtgtactgaagggcctgaaaggattcgggaacggagggcaatgggagcatcatttgatcacggcgaggatggaaatttgcatttggccagagagggtggtcactcgcattgtaggatcgttcacgctgctgatatgacaggaagagagattgagagagctttacttgaagctgtacttaatgatcccaacatatctgtcttcaaacaccattttgcaatcgatctgttcacttttaaagatggcttgaacacagtttggtatggtgtggacactttgaatatcaaaa

SEQ ID NO: 111474 - DNA, 273 bp, Arabidopsis thaliana columbia
atctttcatcctgggggggcgccaccacctctcaatccctccaactacctcatccaaacttttccccaatccacctacatccatccaaccatccttcttaccctctaatttactccccaaataatcacctttactccacaccttcccaacaacttctctccattcttatatatcacaccttcttactaatcttaaaaatactccaaatacttcatctttcacacccttttactccttgttaacccccagacattcactaataaccctcacctt

SEQ ID NO: 111475 - DNA, 291 bp, Arabidopsis thaliana columbia
tcttcctttcatttctcgatccccaattcgagttccatggttaaaaaaaccatttttattctcggggggcttcttcaaatggggaggcgaacactattatgatatccaaatgccttttaaaaagttttacattgaaatcagagggaataaggtgacggatcttccatgctatatcaaatcaactttttcaattgatacctttaaaaccttttttaatagagtactttttaactacaactaaaattacattcaaaccatcttccgttatcctatccttaatactttctttta

SEQ ID NO: 111476 - DNA, 351 bp, Arabidopsis thaliana columbia
ctcgaaagatttatcatacacatgcaaaaattttgtcccaaaagctaaaatcaaaggccgatgagatggtagatgtgcgggtgggggaacccaccgaagggcttaaagcactcccttaaagcccctaacctaccagttcctccggtgaccgtccctaagctaccagttcctccgatgaccgtccctaagctaccagtccctccggtgaccgtccctaagctacccgttcctcctgtgaccatccctaatctacccgttccaccagtgactgtacctaagctacccgttcctcctgtgaccgtccccaagctacccgttcctccagtgaccgtccccaagctacccgttcct

SEQ ID NO: 111477 - DNA, 221 bp, Arabidopsis thaliana columbia
tcaaataaaaaaaacccattgttaatttttttcacaagctattctccctggggtccttaaggtgggcggtcccctctatctaaatcctgagcgccttttacaatagaatactttccatccaaggtcatatcatcatgtcgaccaccgataagtcttgttccattcttgcaagtcacctactccttccgagatcccctaactcgatggacaccttgacttta

SEQ ID NO: 111478 - DNA, 306 bp, Arabidopsis thaliana columbia
aaaacccccgccgacccacgcttcctaaaacactttctcctccattaaccaaattctatcctttccccttccctcaaaaatccggggaacttcataaaccagggggggccctcatctctaaataatccttatagtaaagaaaaacccactcctcaaacttctttccatcatctaccaacagtttctctacaaatactacatcaaatttaacatatcaactctctcaatgtacaaacattttcccatataccattaaattatccacaatttcaacgttaattacattctctggagtatctacccata

SEQ ID NO: 111479 - DNA, 405 bp, Arabidopsis thaliana columbia
  unsure (1)..(405): unsure at all n locations
gcgatttggagaaaccctgatccttcaaaactatttttgtgatgcaagaattcttcttattacagtggggagtctaatgaatgcgcgagagggtgacggccattgtgtagcaacgcctttgacccgctgcattagaacgtttacctcgaggaggttttagaagtcgtgttgaagtacatttaagagacaatataccgcaattatccggaatattattgatcagtggaaacacggatantggagaaagaactagnggcgcctcagtattctgtgtgctgtgtggtacccgctgtatcatacacaggaatatattattcttcagaaggcatctttttgagtattgcaagaaagcgtgtttgcattcgacaaaagtgaattgttacaaggatacttttgtatggtcat

SEQ ID NO: 111480 - DNA, 162 bp, Arabidopsis thaliana columbia
  unsure (1)..(162): unsure at all n locations
tttacgctttttgtcatttaacaaaacccatgagtttgagctaacaagttcccncagaggcaacctttttgaagataagctcagccttacatggcctacaattaaccaccaccagctccttttttctaacctgttaagctttcttcatggcctttttgaaaa

SEQ ID NO: 111481 - DNA, 328 bp, Arabidopsis thaliana columbia
atcgtcgtcgtcgtctcaagtcgcattagctttttaaaaaatccgatagtttctggctgcgaggcctcctaagagaaattgcgggaagcctaccttctaggaggaagaagactatattgatgtaaacaaagccgcaatttcagaggaagaagagaagcgaaaattggcgttagaggaggtgaagtttttgcagaagctgcgagagaggaaattaggtatcccagctttatcttttacggcgcaatctagcatgggaaaagtgaaaccagtgctgaaaactgaaactgaaggcgagaaagaggagcttgtgttgcacgatacttttgct

SEQ ID NO: 111482 - DNA, 452 bp, Arabidopsis thaliana columbia
tcccggtcgaccacgcttccgaagggcgagagtgtacgatgatgaagtgaggtttttcgttgagagccttggagttgataagatcggaatgtggctggttaagggaaggcaaggacctcccgtgttcgagcaacccgagatgacttatgagaagcttatggaatacggaaacatgcttgtgatggaacaagagaatgtcaagagagtccaacttgcctagacctacctaagccaggctgttttggtagacgcatacgctgacgccatcggccgtggaactttctactttataacagagcaaaaggtgcccatcatgtaaacctgccagttcctgaaggttctactgttcctgagcttgaaacctttttccaactcctaatattgcaattgaaccttttttttactacttttgggcattattataccccttttttatattccttgtttaactc

SEQ ID NO: 111483 - DNA, 167 bp, Arabidopsis thaliana columbia
cgggccgacccacgcttcctcaaaaagcttttaacctcatcctttaatccttcctccaaccatgccgaccagaaacaaagccattttttaagaagaaaagaaagtctatcaccccaactcacttatggcggccctcgctaattttatctcaactttaatcttcttct

SEQ ID NO: 111484 - DNA, 342 bp, Arabidopsis thaliana columbia
cgtccgttcatataaaaaaagaaatttcaacaatttttttttctacttcaacatgaccatcaggagaaaatcttccgaaggtatggggagggaccttaacccccccacaacaccagaaaccgccgataatttcagagcactctgtaccgtatagagaggaatcggtaaacattttaagccattacactacaaaagatcaagctttcaccgagtgattccaaaattcatgtgtcaaggaagtgatttcacatccggaaatggtaccggaggtgaatctatctatgaatcgaatttcaaagacgagaactttatcaagaaacatacaggaccaagttttttttt

SEQ ID NO: 111485 - DNA, 341 bp, Arabidopsis thaliana columbia
  unsure (1)..(341): unsure at all n locations
gccgacccacccgtccactctagtccaaccagctttctcattaccattttcaatccaaaaccaacctaaatttnaggcataagattacttttggaaaaagaaaccacaaaaanaccccntcaacaacccaaaaaaaaaccccgcccaatcaacaaaaaccaagcccaaccaccgcaaccatccgacctattaagtgcccctttaaacaaaccacccaacaatccacccccccccttttaccaaccatcttaaccgtaaaaccccccccaatcaccaaactcaatcccctcccaacaacaaccccacctgaaaaaaccccttttcccccaaaataaccaccc

SEQ ID NO: 111486 - DNA, 371 bp, Arabidopsis thaliana columbia
aataccggggccgcccacacccgtccgattttaattctaataattattatcaatcagcccaccaccaaaagggggttaaggggagggggtttcataataataaataaatccttaatttattggatctactaatatttggatttttccttttatctttccctttttttccatctttttttttttgggtttccccgattggaaaagcgtgccaaaggaagaatttttatttaaaccaaatttttttgttttaattttggaatggcctcggggggcttagagcctattgccggggttggggaatttactggaaacgttcctgatgctgttagataacccggggggatgaaggccttgaaatttcaagatgttaa

SEQ ID NO: 111487 - DNA, 388 bp, Arabidopsis thaliana columbia
cgttctttaaccactaggttcagcatttagaaagggtttacccaccaagaatccaaattcataagggggtatagttgcaggagccatagtttcagaaccaggagagcaaagctgtaaaatcagtaatctttttagccgaagggaagcatggttttgggtcctcggggtttcagggggattataaatgggctaactggcggggtttgcagctggtttacctccagaggataaaccaagactttgggaagcaaaaggcgggaaagagctggaaaaggttccaagggtaactccagagccggggcttcagtatagggtttttaaagtgggtggaggcccgagtccaccggtgggttttcaggtggcggctaattatggggctttggttcca

SEQ ID NO: 111488 - DNA, 261 bp, Arabidopsis thaliana columbia
ccggggccgccccacccgtccgtttggtaatccacaataaaatggctggggattttaattaagggggaccaaaaaggagaggggcgcggggctaaaagcctaccatggcataccccaggtgggcaccaggattaactccttgggtggcaagttaccaccaaataatccattcgacaaccacctttccgttttggaccttaagacccggcctgggcccatttttccagccaccgaatacttccaacactttttttgttaagg

SEQ ID NO: 111489 - DNA, 400 bp, Arabidopsis thaliana columbia
cgaaaattaaaaaggaggaacctaccaaaccaaaaaaaaaatggggggccgggaaaccaccacggccgccgccaccaccgccggggaagaaaccgggccaggggaaggccaccgcctggccgcccgatggcccttccttggggccgggtccttgggaggattccaaatggaaggcttttggggccgagggtcaccaagggcctactccgggtttgggggggggttccaccgttgctcctactctttttggggacgcacccgccgccattaccaccgttgcgaaggctccgtgaaaaaaaggaaggcctttattattgaccgggtttgggggttcgccggaaaccaaacccatattggtggtttgttcaatacctgatccagcttggttttttaccgtttt

SEQ ID NO: 111490 - DNA, 332 bp, Arabidopsis thaliana columbia
aaacggggccgaccaaggcttccgtgtactcgtgggcttaaattaaaatccttattttcttgccaaaccattaatccaaaccttgggcgctgggcccacccaaggaagcctaaaccagtaaattgaaatccaacccacaaaataatttgaccgggggtcagaatcattggggaaaaggtcgtattgccataggaatatttcccgaagggattattggggggggtcttaaccttttttcccgtaaattaaatttcctcctaattgcaaataccttttatggtggaatcgaacctataaattccacccttaatcaaaatgcttacattttttta

SEQ ID NO: 111491 - DNA, 403 bp, Arabidopsis thaliana columbia
  unsure (1)..(403): unsure at all n locations
cgggnctggaataccggggccgccccaggcgtccgttttttttgggcaaggtttttttttcttttattttgggggggaggtccaaaaccaatttgaaatttggcattagtttttttttggtcgatccgcccaaagaaggttttttggatctcctttggttttggttttcttccaacctgcccagggcaggattaatggtttttcttccggttccgtttaagggtttccggagaagtttcgggggtcgttggatctttgcgtgggccattttctttaaaaaggttttaatgtttttaagtaaactttttgctttaatgggtaaaaagttaacatatgggttaaaccttttaacggaaaatggaggttttttaaattggttacttaaccttatgtaaggaaagtt

SEQ ID NO: 111492 - DNA, 328 bp, Arabidopsis thaliana columbia
aatcccggggccgccccagccgtccggggatggatccagccattcttagagggttcaacggggcaaaaatttttgattggaagaaaccaagggcccaattggtaaaagatgtttttttggtgccaaagttgggggaaccagccaggtttggggcccagagccaaattaggttttttcgaaaggggttggttggcaaggaaaagggggttgttgttgaagaaaaattaggcccagttttgaatctggggcttaggatcagtccaccttggcaaacccggagggaaatttttactggcactgcgtccggtttttccatggaaaccgcctt

SEQ ID NO: 111493 - DNA, 324 bp, Arabidopsis thaliana columbia
gacccaggcgtccaaaaggaggttggagcaaaggcaaatttttccacctgttttaagaaaggaaaagggaaaacaagggggggtcttaaggaattatttatgcccaatggtttattaccatggagggttattaatgaggttggttttgttattatgtaacttgctaatggcaggattaatatttatttttccggtaactttaaaaggttatcggaaaagtttcttaggtttagtgattcttttgtttggccttttttttttaaaaatattaaatgtttttaagtaaacctttggcattatttgttaaaagactaccatattttt

SEQ ID NO: 111494 - DNA, 308 bp, Arabidopsis thaliana columbia
ggaaaacggggccgaccacacccgtccgaaaaacccgccgaaaagaggtaaatccgattcttctttttgtggaccatggcttaactttgcggtccaaggctttaactcaaaagaccccccctaacctaaaacctttcttttttcccctcgtttccaagtctcaaggcatggcccaatccgtctttgcccctgtttcccaggagttttttggcctgagtggttcttatggggaagggttcttggttatggttcctcatcccaggaaggtgtataaattgccttttgaggttctggtttttgttaaggct

SEQ ID NO: 111495 - DNA, 413 bp, Arabidopsis thaliana columbia
aggccaaccaggaccaggatatgggttgcaataaaatggacggggaattactggccgacctattggtggttaacggttaccattgggactaaggtaatcgattgttttggttataaattcgtttaaggtaccattcccgattaactttaaggaatttaaggataccgaaaaaaaaaaaaaaggggcggggttggggatttagcctaacaaggttaattaagttggtgaggggcttaaggaaggatgttgttaaatgctgggttgggtccaagaggggatcacggtcaattaaaaggccattattaattgtaaactcaacgggggtcgggaggtggcaaggaccaccaggagggtttgttggccattgaactttttgaacttttgggttttctttttccaaccaattttttttt

SEQ ID NO: 111496 - DNA, 133 bp, Arabidopsis thaliana columbia
  unsure (1)..(133): unsure at all n locations
ggaanacccgggccgaccacacccgtccgaaatttaacagtttaacgtcttcgcctttatttccccggacctgaacttcctgattgggtgccagaaattgaatccacctttgaactttacccctttttaactt

SEQ ID NO: 111497 - DNA, 311 bp, Arabidopsis thaliana columbia
gggaataccggggccgaccacacccgtccgttaccccaaagaatcctaactggttaaaccgtgaccgttccgtcctttttgttgaccatggatgcatgttgaaataccctctgtttaacctggttggctacaccagcgttggggaggaagatttgaagagcttccgccaagggggaagaaagactccaggacatcctgggaatttggggactcctggggttgaagccactactggtcctttgggacaaggattggcaaatgctgttggttaagctttggcggaaaagattttggttgttaatttaaacaaa

SEQ ID NO: 111498 - DNA, 194 bp, Arabidopsis thaliana columbia
cacaggcgtccggggtggacaccccgcaccctttcaccttttttaacccatccaagggaaccaacttcaaggggtcattaaataccgttggaaggaaaagagccgggggcggttttattggttccaccatgaaaaatggggaataactctaccacttattcgggggttccaagtcctaaaagacggcctaaaac

SEQ ID NO: 111499 - DNA, 388 bp, Arabidopsis thaliana columbia
aattccgggtccgcccacacccttccgccattttattttttttaaaggaaattcgtaggtcctttcaagaagcagaagatggcccaaaggggggaggcccagggggggaagggggccaacttttgggccgttggttcgccccatgacgccttgcccaaaattaagttggcagcaggcttagccggaattaaatttgttcagtttgtttttgtaaagaccggccaacccgaccaggttctttttgtgggtcccaaaggccgggttctcccagttgacccgttggggattaaccttccagccgaacatttattttttgtggaaggttggtttagccttgaaggttttattcaaggatttaagttcttttccaacaagaagacttttgttg

SEQ ID NO: 111500 - DNA, 429 bp, Arabidopsis thaliana columbia
  unsure (1)..(429): unsure at all n locations
cgggnccggaatccccgggccgcccacacccgtccgtgggtttttttggccgaaaccaggcctagattcgttttccaatttggtccttttttttttaacacgggggaggaggaagaagaagttggattccttaccaggcttttaatttaaatttccgcttaaatctccttaataatataatctttttccttcttttacttggaatttgaacctgccaaatcgttactattatggttttccctttttttcctggtgggtcctttggttcttagttggttaaccggaggtaggattcgcgtcggttttggtcagatttgggggccggaccagattaacgatgggtaatccacggttaccgaacgtgaatccaggaggaaatcggggaataagcgatctaagggttcgccgaaaggcgttaatccgccggaa

SEQ ID NO: 111501 - DNA, 261 bp, Arabidopsis thaliana columbia
acccaggcgtccgacaggaataatgcccaggggtcctttatcaaatggttttgatgcacggggccatctgtcccagagggcttcttttgcctggccattgggcaagcaataataaggcttaatttgacaaacctttttgacctttgggggtggcattgtccgagggggttacaacccggcttggttccttttccgtatagggaatagtcgtccctctaagtggcctagtgtcggaaaaaagatttggtacaccaatattct

SEQ ID NO: 111502 - DNA, 317 bp, Arabidopsis thaliana columbia
ccgaacccaatttagccggagatggctgaaacattttttttttttgaagttgctttttcattcatgggggctgggtggcatccggtattccatcccggtccaggtgggttaacagccttgtctgttttcggaaggaaaaaggaatttccaaaaaggagtgccaaaaagacgttgcttccgtaccggcttttttggtccccaggctcctttatattcttattggttaagttggtactttgtattgtgattactgttttttatccttctggtttaggtaatctggcctattttttttaaaatttttattttgttttaat

SEQ ID NO: 111503 - DNA, 270 bp, Arabidopsis thaliana columbia
cggggcggccccacgcttccgaatctgccaaatcctttttttatccttttttttatctcacctaataatttcttaggttaaggaacctgggtttaaaaattaaaaggcctcttcgggttgtttaaaaatcctgtttcaccgcagtatttaatttaaaaatacctgccgttgacggggcatgcccttaaaaggaacctgccttgattccaaaaacgttgggttttcccctacgccgggttactttcggggccttgttcgttaaacaaacgg

SEQ ID NO: 111504 - DNA, 407 bp, Arabidopsis thaliana columbia
  unsure (1)..(407): unsure at all n locations
cgggncnggaataccggggccgaccacacccgtccggggaggcggagctgaaatgttaaacctgcaattaaccgggaggacaacctaatttagtttgggtggtcagaaaaggatgtcgcttacttgtttttcgaccccatttgggccgtccaaaatcgatccccgggaggggttttacgcaccgcctttttttaatgccagggttaatctccgcccgttttttcctggccatgtccttgtctgcccgagaccccttgggccacgatttactgattttccagttgatgagaccagggccctgtggcttactgttaaaaaggtgggctttaagcttgagaccttccataaggcgtcttctttaccataagccatccaagatggcctttaagcgggccagactgttcccc

SEQ ID NO: 111505 - DNA, 429 bp, Arabidopsis thaliana columbia
  unsure (1)..(429): unsure at all n locations
cgggnttggaataccggggcggaccaaggcgtccgaaaaattttgaatttggatttaaagggagtaacgcgggctgttacgggcaaccgggaaggtggtgggaattccgaaatggagacgaccaatcggggcgatcaaccgtaaattaagaattgaatggttttcttggttttgggttaaacaaatggggggaatgggggggggggcgaatttgatttcgggtggtaagtttggtcaaattttttttttggattggtgggggatcaaggggggagggaaaggagaaattttaaaacgggttaaggccgccgttgttgaaggtggagatacggttgggtaggagggttgttaaagttggattcctggccaggtttcaatggttaggaactggattcttctttttaatgtggtacttttggaatgtgattt

SEQ ID NO: 111506 - DNA, 292 bp, Arabidopsis thaliana columbia
aaaaaccgggccgaccacaggcgtccgtaccaaacaaaaagggttttgaaaaagtttcttttaatggggcggctttggctccggacgggggtggcttttcaagaaaaggcagatggaccggttggcccgccgtgaaacaaactaagccggccaggtttccttgagggttttaattgggaacggttactggggattaccaggtcgaaggtccgattaaggaaactggtcgtggcccagcctaatgggcctattacttgaggaagaattccaaaggggtccaataacgttatcg

SEQ ID NO: 111507 - DNA, 435 bp, Arabidopsis thaliana columbia
  unsure (1)..(435): unsure at all n locations
acgggnttggaatcccggggcggaccacaggcgtccgccgggtgagtttaatggaggttccataaatttctcttttttttggggtttaaggcgccaggaatttggaaaacttaaaataacaaaaccgatggtgatgataaaaaattcgattgccgaagagaaactggaataagagtcgttggtaattggttttaatccggggcaaatggaaccctttgaggcttaagatttctttttttacaatttccattggattccagttctttggtttttggtttaatttactcctgagctggcttaagggggttgttttttagttgcaccagggcgacaaaactcatttttgatggatcttgttcccaatatgagatttttttttggtcggggaacgataaaactttacgattttgtgggcacgccgaacagttttttttc

SEQ ID NO: 111508 - DNA, 366 bp, Arabidopsis thaliana columbia
  unsure (1)..(366): unsure at all n locations
acgggnctggaaaaccggggccgaccaacgcgtccgggaatccggggccattaatccagaaccttttgggttgtccatgggggaatttttgaccaaggttggaatcctttactgtaatatgatggaacccaaattgaaaccagggggggaattagcagggggttttaacacattaatgccaatgggggaggcctttagggggactttaatttttgcaggagatttaacgggggaggttgggattgaggcctgggcaaagggacgaactgtttttggggttaatggccgagggtttttagccaaccaagacttgccaaaggggttccaactggttgcaccgttgattaaatccattaggtaaacgtt

SEQ ID NO: 111509 - DNA, 380 bp, Arabidopsis thaliana columbia
aaattttcacagatttttttaatggacgatggcgcttggggctactactaaaaggactatcggattggcggcgaccctccggcgggtggttcgacctttggttactgacgcgggggtggagtcggataccaggcgtggggggaccggaagggtctccggaatccaagaggggcatttttttggaagggggataaaatactaacctgttagaacagttaccaagtaaggatctggaaaactcggaaaagggaagataaacttcgtttcaaccttaaagtgggagaatccgttgtggggatggccttttacaggtgacccttaggctaaggtgggggactttgtttttgttttggatcctgagaaagctgttaattttttgg

SEQ ID NO: 111510 - DNA, 203 bp, Arabidopsis thaliana columbia
cgattaaatccaaagaaacagtgatgttttggtttcctttggaggtgagagctaaggcagagaggtggggggtatataaaatttgtttagggaaaccaattggtttcttaaaggaaaaattaattcccaagggttatttcccattgatggatttaaataaggttgggtataacaaatagtaaggtgtttgttggttgaagcat

SEQ ID NO: 111511 - DNA, 171 bp, Arabidopsis thaliana columbia
aaactacaacaattcttacattaacattttttttaccaaccctttgtgttttactttcgagagagatttcatttcctaagtatttttgttctgttttgtaggaccaatgtaaggttcctttggggaaatggggtttagttccggggtgggttttgcttttaggttaagggt

SEQ ID NO: 111512 - DNA, 274 bp, Arabidopsis thaliana columbia
  unsure (1)..(274): unsure at all n locations
ggcgtccgtnaacgaatttccaggggccaaattggcttttttttttgaaaaaaattccttgttccacgggtgggtctgtgtatccgccaccattttcccttgcaaccggaattccggattaagaggaagaaaaaccgtccggaaaatggaaggtagtcctggatcgataaaagaatctttgaccggagccctgccaggctgataaaatcctgtcagccttgtatttactgttaggttctggaaaatctttgtctcaacggcttcccttaattct

SEQ ID NO: 111513 - DNA, 328 bp, Arabidopsis thaliana columbia
gccaatccgttatcaatactttttgccgtcccctttaagagggaaaggcctgggtcgggtgcgggggccataaatactcaaaaactcgacctttcaaccgaatttggttcaactcgaccccaatgggtggctgttgttggtggttgcccaccattcgcgggggtttcttttttaagaaggctttcaagacctcctcctttggtttccctttttgctttggttttttttgggaagaaggaagttgggtttcctgaaaaagccccagctgttttggaacctaattttcaggccattaaagccattattcgggttttttatttaaggggtt

SEQ ID NO: 111514 - DNA, 431 bp, Arabidopsis thaliana columbia
cgggcccggaattccggggccgcccacacccgtccgaccgggatggcgaagaaaaggaggggggttaaggccgttggaaaacgggccattaacggggatcctttaaccaataaatggaggaccagaactccggtcccttccgtttccggaaaacgtaagagaaggttctttcgaaaagggcccaaagggcaaaaggatttgggggggaagggtttggttcctttggaagatgtggggatggtttttgttaaggctgcataagaggactccaggaaatcccccagaaaatttagcgttaagaagagctggaggttgaccaacctaattattaagggcaaaaggaggaaaacccggaaggccaggggggaaaaatctgttgatgtgttgctagaatgagtgtcgggtttactctgaaacccattttttttaac

SEQ ID NO: 111515 - DNA, 201 bp, Arabidopsis thaliana columbia
gggccgaccacgcgtccgtttattcttttctttaattttttccgttgttttttaagtccttgggatctggcgtggggtgtgtggttggtaagatcaataaatccatttttctaaccgccgccgaaaggtttgggcatttttattctttccttgggggaatctgggatatgggaaaggccatttttcctgccatgtttaata

SEQ ID NO: 111516 - DNA, 211 bp, Arabidopsis thaliana columbia
  unsure (1)..(211): unsure at all n locations
aacggggcggaccaaggcgntcctaaattttaaaggggaaatttatttgttggttttgaaaaccaacgcggccgatcaaggggggggggctttataaaggacttgatgtgtctatttttgccggtgctatgtttttatttaaactttttggtaaatgttaaaaatcaaattctactatagttgttgcttggttgttaatttatgtaataaa

SEQ ID NO: 111517 - DNA, 268 bp, Arabidopsis thaliana columbia
ggttcggaccacaggcgtccgttaaagttccaaccaaggaccggttggttgttttctcctttaacgggatggactttgcctagttagggtagttttggggatcttgaccgttggggattgtgtgtgggtgtgtgttggttttggctctttattgttttttaattttttggtgtttgtttatttttttttttttttttagttattttttcattttattatgttctttttgattttatattttttttatttttttattcttgtttatttt

SEQ ID NO: 111518 - DNA, 430 bp, Arabidopsis thaliana columbia
ccggggccgcccacaggcgtccgaaccgttccatccacggccccatccccttgtttgtaggattccgttaaggggggggggcagtttaaaatccttccatgaaaccaccgttttataggaggactaattttttgaaacgaactaaattccaggggggacacattttaaacgggggatcgggatcgtccttttttccacacacccccacttgcaaagttggggaggaggaagtgttggccaagtttggggtttggaaggatttgggagttggaaattttgggggggctggtttttttagccccaaagggaccaaagggctggttgttattgaaatacattggggggggtcgcaggattgatgagaatgtggcaggggggtttatatatatggttaatttaggcttcctaattattaaagatttaagggggg

SEQ ID NO: 111519 - DNA, 453 bp, Arabidopsis thaliana columbia
  unsure (1)..(453): unsure at all n locations
cgggnctggaataccggggcggaccaaggcgtccgaacaatttatgtttttggtgggaagggttggtccattaaaacatccattaaggggccggggccggattttgttgattatccgaccaaaaccgttcttaacagggtggaacacctttttttggttaagcagtcccatgccagaaggcaggggggggcaggattgagcttgaccagggaagaggggccaaaaactccgttgggggactacttaaagccaataatggccgacggagacaccggttttgggggaacaaccgcaaccgtaaaactttgaaggtttttcgttgaaagaggccccgttggggtcaaaatgggggaccagtcctccgtaaccaagaagggtggccacatggccggaagggtcttggtggcagtaagggaaaaaataaaccgctttgtgggggttgggttccagttc

SEQ ID NO: 111520 - DNA, 363 bp, Arabidopsis thaliana columbia
aatcccggggccgaccacacccgtccggtttggtttaatggcaggaatcttaaattcatgactggaggggggggcctattgtcaccccaaccggggcctaaggcaggggtggggttcaaggctggggttaaggagattaaatggccttactatcctccggaatatgaaaccaaggttcctgttttttgggcggctttccgggtaactcctaaacctggggttccacctgaagaaccaggggctgcggaggctgttgaatcttctactggtccatggccacctgggtggcccgaggggcttaccagccttgatcgttccaaaggacgatgctcccacatgaggcccgttccaggggaagaaact

SEQ ID NO: 111521 - DNA, 322 bp, Arabidopsis thaliana columbia
  unsure (1)..(322): unsure at all n locations
gggnngggaataccggggccgaccacaggcgtccgaattttttaaccaggttggaccacaatgtttgtccttggttccgtttttaacggtggttggggctttttaattcttttttgttccctccataaatccaagcaggaccttttttctttttttctccctaaaactaaactttttctttttttttttgggtattggccccaggccattccggttttttaaaatccgttcttctttgccctgggaatctgaattggattccgccttaaatgcttttgcagttccagttgattggggtgggaaacttggtaatgcaaatgag

SEQ ID NO: 111522 - DNA, 330 bp, Arabidopsis thaliana columbia
  unsure (1)..(330): unsure at all n locations
acgggnctggaatcccggggcggaccaaggcgtccgttcttggcttaaaaaggatgtttaacaggatgactaaacaccgccactggtccaacatggtggtaaatttaaaacaattgtcaaaggaataatggaaccagaaggggaaaacgaagccttttttttggaagctttgatggtgaccgacgggttagggaaaccgttgtttaggtttgaggggaggaacaaaccttttgaacggttaacttaacatgaacaagccttgtttccggtggttgaagagcccgatgactttcaaattaatggaagagaagaatctttggttggaaaatt

SEQ ID NO: 111523 - DNA, 145 bp, Arabidopsis thaliana columbia
  unsure (1)..(145): unsure at all n locations
aaacgagtacgagaagcaccaggatgtagttttggctnacccaatgcgctcctccgccggggaggttacatacctggctgaggccaccatttacattccagtcaccgacttgaaaaaatccgcagaattcctggccacccggaag

SEQ ID NO: 111524 - DNA, 248 bp, Arabidopsis thaliana columbia
  unsure (1)..(248): unsure at all n locations
caaaaggggtaaagagggaggttcttatcatcaataagccttcattttatggactactcatatctggattcnccttcttatctccccttttctccatctcttttctctgggtttccccgattgaagagcgggcaaaggaagaatcttttataaaacaaattcttttgttttaatcttgggatggcctcggtgggcatagagcctagtgccgcggttagggaatctactggaaacgttactgatgctga

SEQ ID NO: 111525 - DNA, 205 bp, Arabidopsis thaliana columbia
aggcagagaggctttcttttaatgagagaggaaaagagacgacgaggggtttcctaaaggaaatagctaggcccaagggttaataaccatggaaggatatagaagaggtggggtatgacagagagccaggtgctgaatggctgaagcatataatgagcattactcacacgttctcagagatggataagcttgcctcctaaggaac

SEQ ID NO: 111526 - DNA, 282 bp, Arabidopsis thaliana columbia
  unsure (1)..(282): unsure at all n locations
cccacgcgaccgatacagagctcaataattaaactgattcgaattggcgaagatgtacgcggaagttgccactcgtgcggtgtttatgggaggacagagaatgggacaacatatgtatatagagggtgtaatgaaaagtgtattgtagggtcaagatctcacaccgaatcatcttacatcanagtttgagtaccttgcaggatagacggcgaatttaataacaacctgaatatgtggactccataatcagcaacccttaaagatgtttgtatattcaatacc

SEQ ID NO: 111527 - DNA, 143 bp, Arabidopsis thaliana columbia
  unsure (1)..(143): unsure at all n locations
caggaggatattactccggggactggagaatttacagagggggtgggcaagaatataactgttgaaaancaagatggtaaaggtgaatcaactgatgcaaagaatgaaacacttgcttgagaaagcagaggaaaagcctgagg

SEQ ID NO: 111528 - DNA, 310 bp, Arabidopsis thaliana columbia
  unsure (1)..(310): unsure at all n locations
caaccacccanagtttttttttttttgcaaaaatttctcatttgaggtaagtttttttcaaattgggagggtgtttctttnccccaaanntttaggaaacaaacaattctgtgtaccataaccaaaataagtattttctaaatggtttattttttcaaagaataaagagttgtcttctaataattaatttccccaaattttaatcttgagcttaggatcattccaccatttcatatccaaagtgaaatttttactttcacttttttcttttttacatttatattccctattaattttttattttaacctt

SEQ ID NO: 111529 - DNA, 495 bp, Arabidopsis thaliana columbia
  unsure (1)..(495): unsure at all n locations
caatttacacagcttcacgtcgncgtttttttttcgccggagctgtagctactgatgtggtaccagaaagagagtgcgacgggggacaatnacgctttttcactttttcaactgtgcgattctaacattctgtccttactctgtctactatcttaccactccttttattttattttatacactttgaaccttccggaaattctctgctgattacttttttactgcatttgttttagttttgttatttggttacttttttttcaagttttctattacttatattttttnttctcatttttttatttgttagtatttttttttttttttttaataaattctttttcttttttnatatattattttttatctattttttattttttttatttattttttatattttattttatatattttttttttctataattatctttttttttttctattttacttttcttttttattttatcttttttcctttttttttttttt

SEQ ID NO: 111530 - DNA, 394 bp, Arabidopsis thaliana columbia
  unsure (1)..(394): unsure at all n locations
ggaatcccggccgaccacgcgtccgacaatctactctctttaaaagaaatttttttttactatcaagaagcanaagatggcccaaggggtgtaagcacaaggggggaagggagccaacctatgggacgatggatcgacacatgacgccgtgaccaagattcagctcgcagcaggcatagacggaattcaatatgttcagtttgattatgtcaagaacggacaacccgaacaagctccttttcgtggtaccaaaggccgtgttctcccagctgatccgtttgtgattaaccatccagacgaacatctagtttctgtagaaggttggtatagccctgaaggtatcattcaaggaattaagttcattttcaacaagaagacttctgatgtcattgga

SEQ ID NO: 111531 - DNA, 447 bp, Arabidopsis thaliana columbia
aaacccggcggacccacgcgtccgcctgagagttttattgagcgccattatttttttctctctttggggttttaagcgccatgggtttcgaaaacctgaaatcacgaaaccgatggtgatgataaaaaattcgactgccgaagagaaactggaatcagagtcgtttgtcactcgtattaatccgaggcaaatcgaaccccttgaagcataagatttccttctttaccacttccatttgattccagttccttcgctattcgcttcatatactcctgagctagcctcagcgagctgtattttagcttgcaacaaggcgacaaaactccattctgattgatcttgttccccatatgagactctcttttcgttagggcacgataaaactttactatttttggagcacgccgcacagatctttttccaagtgttctttttgatggaagtggt

SEQ ID NO: 111532 - DNA, 212 bp, Arabidopsis thaliana columbia
  unsure (1)..(212): unsure at all n locations
cgaaaaacggcgccgnatcaacgangattaccctatcatgtaatgtcgnaacgcccattgncggcctcgttttcttagtagggctgatcgcaagtgacatgncatttacctcgctttgggaatcttgttttcctttttctttgtgatctgccggtttaatttattctacatattcttttcttttgttcacgttgatacttgtcgtggaaatt

SEQ ID NO: 111533 - DNA, 284 bp, Arabidopsis thaliana columbia
  unsure (1)..(284): unsure at all n locations
cttatatcctctctctacatctcgnccgttgttgcataagtgctatggatctcgcgtcgaatgttggtgtgtaagatcgggaaagccgatgttctcaccgccgtcaaaaagtatgagcaatatcatgtcttccatggaggaaacgtgtatgtgagaaaagccaattttacttacatgtttaataattactaagaccttgctactagctttaattagttcttattgttagatttttttcttttcgctcattttttgtaaagtatattttcttttttagactttta

SEQ ID NO: 111534 - DNA, 279 bp, Arabidopsis thaliana columbia
  unsure (1)..(279): unsure at all n locations
atacccgggccgccccacccgtccggaagaccaccacgcctaaccaaaaaggaaaggttcaggccgggggggccaagggcatgagcttcaacaggctaaagcagtgatttacccccaccaccatccttgggccagacaaaagccttaagctttaaaccctttgtttattgttcttntnnaggatntccaaggtcccctatgggaaaggatcttggnntggccctgtcatggtgatttcttgaggacctttttccgttcaaactccgtttaacctaactg

SEQ ID NO: 111535 - DNA, 367 bp, Arabidopsis thaliana columbia
  unsure (1)..(367): unsure at all n locations
aattnnggggccgccccagccgtccgcgggggaggaatagttggatcatctggggggaaaaataagggcggtttaagggaggctattttgggggccattgaaaccagctggtttaacgggggaaaaaacggcggttaggggattaccgccgttaacaaaagctggtccttctttaaaaatggccgccgggggcgtaaaaaaaatcaagaccgccaggcccttcggaattaacggcagcttggccttgggggacggggtcaccccctccggcagaaggggcaggggatccggggtttccaagtccgtcgccaggtttggagctaacgtcgatggatccagccctttttacaacgggaccaagtggtca

SEQ ID NO: 111536 - DNA, 370 bp, Arabidopsis thaliana columbia
  unsure (1)..(370): unsure at all n locations
cggggccgacccagccgtccgccaaatcggatcaggggggtgtggttgatgttgttgttgaggtggaggaggctttgaggggtggtgactgatcttggggggatggcctggcttatctgggggccttgggagcttcctgttgtggcaaagttaaccccaagggattgttcctnctcgagnnttccggaccgaagagttgctccggtttttgtgccgaacaggccgcccgtttgcggttcctgtaaggcaccaggaaaggaccgaccggtgttggatccccttacatgggcttggtgtggggtggggaaaactctttttgttttatcagaaccattgccccactggggatcaaagctcctgggattttgcc

SEQ ID NO: 111537 - DNA, 437 bp, Arabidopsis thaliana columbia
ggccccagccgtccgaccacatttcttttggaaaccgaccttaaacccttccctaggagaccaatttggttggggggaggaagtggccttgctggttttgggccggcaggatggtggccggtccaataacatggaacgctgcgctaagttgtggttaagttaacagcacctgggcagcgtgcatgggctacgggctccaagggggggtcattcccccagcgggtggttccggggttaaaaacctcaccagcttagccaagacgaccccagaccgtaagcaggcttgcaattgcattcagggggccgttggagccttaggctttggtttaaacgctggccgggcagttggaattcctaaggcatggggggtcaatattccttacaaaatcagcaccgagcccaactgcaaaaccggggggggatgagctagcaccggg

SEQ ID NO: 111538 - DNA, 286 bp, Arabidopsis thaliana columbia
tttacttggacttaagaatgccatatgtgggtgctgggatgattggtcctaattgggggaatcggccgtggcttttcggggccatcctttcggggggaataatgtggcctttaatagcccggtttaaaggcaattggttccctgcaccattgaaggataatatgttgcagggcttaaacggctccagggggttaatatccatggcactgatcttaggagaggggcttaataacttcgttaagaaactctttttaactggaagaagcttccactttagactttccaa

SEQ ID NO: 111539 - DNA, 442 bp, Arabidopsis thaliana columbia
gccgcccacacccgtccgaaaaaaaaaaaaaaaaaaaaaaaaaaaaaaaaaaaaaaaaaaaaaaaagggggcggccgttttaggggatccaggtttccgtcccctggcttgcaacgtaatagtttttttttggggcaacctaaattaaattaattggccgccgtttaactacgccgggcctggaaaaccccgggcttacccaaattaaatggcttggaagaaattccccttttcgccggttggggtaataccaaaagggcccgaaccgatcgcctttccaaacagttgcccaccctgattggcaatgggacccccccctgtaccggccctttaaccccgccggttttgttgtttccccccagggtgcccgtttaatttgcaagggccttagcccccgttcttttggtttttttcctttcttttttggccacgttcgccggtt

SEQ ID NO: 111540 - DNA, 379 bp, Arabidopsis thaliana columbia
agaaaccccaggagttgccagggaaaaggcattgcaggaggaacctaaaatctttttttttggttcctgaagtctgttaatggcgatgtcggaacctttccattggacttttgcctttgtccctggttccacactttaaaccggccgttgtttttttaactttgttgtttaaagaaaaccacttgccatataacctggtttttcctgtttggatcacaaaattgggcgtttgaaatctgtccccaataaaagttttttggggtgccaggcaggttttggcggttttaggagaaatcctgatttttaaggacttaataggcatggttcccggggaaccaccaggcaaagcggggggggagaagattttgttatcgaaacc

SEQ ID NO: 111541 - DNA, 397 bp, Arabidopsis thaliana columbia
  unsure (1)..(397): unsure at all n locations
acctaaactaatatcctccatcctcttccttcagattaaagagaaccctaaccgnaatatcgcccctcccctttccttttggcctcccccaggaggaaggcaaatttttttttttcaggatggcttgaaacctgtagaaatctttagggtttttttcccccaataggggtcagggggggggggggggggggaaggggggtccttttcttaaaaaggccgggtattctcacctccggggggatacctgttttaccatttggggggattaggaggaggaggaggaggaggcccagcctaaggaagggtggctttttaatcagctgggccttgggaaacctttggcaatctcaagtttcttttttcccctccattagctgcccaggtggggtcctcgggg

SEQ ID NO: 111542 - DNA, 427 bp, Arabidopsis thaliana columbia
cggggcggccccacccgtccgttttccagcggtggatccttaagatccaccgtcacctttgctccaccctcgaatcgtgggcggggaccattttgaacctgcccaccaggtaaaccaaactttccaccgttccagggggcttcaggccattttagttatcctggggtgggttgaataatccgagggggatcgcttaaccgtgccaggagcccgaaaaatggaccgttttttataccacccttttttcgtagcaaaggtttttccaggttctccgggaaaatttgttggtctagcggaaccaattagggggtttaattggatcctttccggagaatttgatttttttcccgaccaggccttttacttagggggtaccatcgatgaagctcctgcgaaggctccaaccttagaaatggagagtaaattg

SEQ ID NO: 111543 - DNA, 383 bp, Arabidopsis thaliana columbia
cggggccgccccacccgtccgtattaggagggttttaggctttggaaccaaaaaaattggcttccagggcttgggtcctgtggggccttttggctgtccttttcgccgcctaaaaagtagccgcggctttttttgccacagggaattcagagggtagggaacctgtgaaccctgaccaccgtggttccggggccaatgggggaaattccaataccggaggaggttcccagggaggagggggtatttcccaagggggggggggtatttcccaagggggggggggtaattcccaggggggagggggaggttcccaagggggggggggccggtcccaaggagggggaggccgatcccaaggaggcggtggccaccatggaggaggg

SEQ ID NO: 111544 - DNA, 423 bp, Arabidopsis thaliana columbia
ggcccaagccgcccgaaaaaaaaaaaacctaaggagggccttgggggcctgggaagcttttttcaaatcaacggttgctttcttccagtgggggaaaatggccaccgttctttttgggggaggttttaacttccgatcgattaaggcgcggggaaaatttttggggctggaaacttcctgggttggcctaattggttctttccagcctgcctttaaggccttaaccggtaaaggctccgccgctgtcaaaatcgccggattcgttttggccacctttgttttggtcggttgggaggcaagtgcggggggggctccaaggggatggacctatgatgggattcagggcaggccttacatggaagtgaagggacctggaccggttaaccagggccctactattgacggggggttttgagacttttg

SEQ ID NO: 111545 - DNA, 162 bp, Arabidopsis thaliana columbia
gaaaccggggccgccccagccttccgaggatccaggggacctggaaggaaggtggctttttgcattagagaaggcagttccgcgaggcggggatgtttgggttgaagcctgggaccagtaaaatgatgggaaaatccctaaggaccgtgcaacttttcggtt

SEQ ID NO: 111546 - DNA, 413 bp, Arabidopsis thaliana columbia
  unsure (1)..(413): unsure at all n locations
ccccgccgtccggggggaaaacctggaggccttttcgtccttttttcgggccaaagcctttgccaaaatccgtgggcctccgataaatccaagggatccttgcttttcaacgctggtttttatggccgngaatcttccggaaaggcttttaaatcggcgggttaacgctgttgtgccgccatatttggccattttggactcccttaagttaatgttttttcctgcccaggtggaaggaccaggggtttttaacgggccccgaccgagaactcttccaccagactggccatttatgctttttgacgggggaatggtttccatgggaatgccttttgggccggcggggactgacctagtgtgcgttggcctaatgtttcttaaggggctggatcccagggaccccatttcccttt

SEQ ID NO: 111547 - DNA, 433 bp, Arabidopsis thaliana columbia
cggggcggccccaggcgtccgttaaacctattttttaaaccaaaggttcattggtttccaaaatggcagggggctttgttagggaaaccaactattttttttccttttccttcttaagttttttttccaaacctaatttttttttttcctaacgcacccaaggtttaaggactttaatttttaagatcaaccacctaataataataataatccttaacgttggaccttaccaccgtggactttaactcctccatccttttggtttttccggctgaggcttgcgaggtaatcaggggttccgctggttctgttgattttaaccctgaggtcaggctggatccaaagccggtttaaggtccgggggtttaagagccggttgccggggattccgaggggtttaccagccccaaaccggttttccgggagggggcct

SEQ ID NO: 111548 - DNA, 355 bp, Arabidopsis thaliana columbia
cacccttccggtgggaaagggtacccttttcttttaaaccgccgggcaggagccttccaccggcctggtggccaggtccaagctgtttatggcctcggccgcaaaacggggttaaaacgtttcggagatcgggtccacgccgtcaccgatgggttggtccggggggactaaggccgaggcggaccgggtttttaaatggatgccgttttatctggacggccccgttattttgtttcttagacctattgagggattgccgatattcgttaatcttgatgagatgaaggtttcggagtttaaggccaggtcaggggttcctatgcccatagctaacggaccggagtccgcgttttgg

SEQ ID NO: 111549 - DNA, 422 bp, Arabidopsis thaliana columbia
cggggcggccccacccgtccgtttttgggttccgattttaattttataaaccaggttctttaaccattaacccccccccccgagaaaaaaaaataacgcttcaggaggggaccattaggcccccaattaattaacaccttacttggctggtaaacagttttttttttttcccaaaaagggtttaaggttccatagcttttttttgggttttaaatcttttttttttaacaccattttccgcctggggtggctgacctccgggcgggggaggtggcccttttcccaagccaaagccaactcctaaaccaaccccaagccttagttttggttggggcaagtgccctaaagacaccttaaagttcggggtctgcgctaatgggctaaacggcctcctggacttgaccctgggcaggccaccggtc

SEQ ID NO: 111550 - DNA, 391 bp, Arabidopsis thaliana columbia
  unsure (1)..(391): unsure at all n locations
aaaaacccgggccgaccaagccgnccggaatttaaaagatcttttttgaaggacttttttcctataaatggncccaatccaattggggcagtttcttttttgtttgtccatgcccaaccagacccaacttatttttttgggaggtcatttctaccaattcattttatccatnattaaacttatttaaatattatattcattacccaattaattccgaccgaataaattttcgaataaaattgtaccatccttaattggttgttataactatttttggtccttcttttttttttttcaaataattttttaaataaaaaaatatccgtgtattattaaattaaaaataaaactgttttaatttaattttcccattctattgaatttatttttt

SEQ ID NO: 111551 - DNA, 448 bp, Arabidopsis thaliana columbia
cggaaatcccggggcggccccacccgtccgttattttgggtccaataccaggggatttttacctccggttggaaaccaattttcctctccataaaaggcgtgattgagattttgatggattcgaaggctggtattaagaagtcaggcgccattagttccttatgttccgaaccacccttgggttccagcattgaagccgtccgtcctttcgggggaatcaagaaattcaaattttttgtctactccaactgccctaggaggccttcctgggtcctagccagttccttccatagcttttaaataccaccaatctccttttttaaaagctctggttccccaaatcctttcgcttttggttggccctaacaccaccaccaccaccgcagggttggccatgtctgtcttgggcttcgagggttccaagaggcggtttgaagttacttttttt

SEQ ID NO: 111552 - DNA, 146 bp, Arabidopsis thaliana columbia
tgaaatcccggggccgacccacccttccgggggaggtaggtgagatgaaggaggaggaggtgttcggaaacccagcgaacccaaaagccaggaaggatgttgttcctgggaggttgatggatccctatgctgaacagggcgatacc

SEQ ID NO: 111553 - DNA, 154 bp, Arabidopsis thaliana columbia
gggccgccccagccgtccgctcttttaacctgaaccccttgcattaatcattttttccttaccttccaatggattctccgggaaaggcttttttaaaataatgatgagggttcaagctcctatcaaaaaatcttggtcctcggattctttttct

SEQ ID NO: 111554 - DNA, 390 bp, Arabidopsis thaliana columbia
accctcccggaaccaaaccttctttggaaaaaaaccaccaatcccgattttaattttaatcaacccgaaaaaatgggaaaaggcgtccgagagccaccccgtctttttggagcttttccgaccttttttttttttttggaacaataccaaggcttttttatcggcttttgttggctgggctggggccagggctgcttataaaaggacctttttttatggagatgatgttgccattgtcccgcgccataggactccactttgcaggtccaaccgtggcattttcaaggttccatatcccgatgattggctcgcacctgtttggggggcattgttggagaagacgattttaaccccaagtgaagtaggtgccattgttgggggtcctgtttt

SEQ ID NO: 111555 - DNA, 204 bp, Arabidopsis thaliana columbia
  unsure (1)..(204): unsure at all n locations
aaaaccgggccgacccacgcgacacgaaaaaacgccggcaataactagggttttgtttggtaccacgacactgacgtcnaaggcgcgttctcttgaaaacgcggcggggtccccaaaacgaaaaggcatatccaaacacacgcctgaagcacaaaccccagctagcttccccggagaaagggaactcactttttttttccgctc

SEQ ID NO: 111556 - DNA, 426 bp, Arabidopsis thaliana columbia
  unsure (1)..(426): unsure at all n locations
cgtccgtcatactttgacttcagtatgacatatgttgtttctgggatgattggttctcatttggtgaatcggtcgttgttctagggggccgggctctcnaaangaatcatgtggcctctcatagcccggcttaaaggcgaatggttccctgcaacattgaaagataatagtatgcatggcttaaacggctacaaggtgtttatatgcattgcactgatcttaggagatgggctttataacttcgttaagatactctttttcactggaagaagcttccactctagactctccaaaaccaacagcatcagcacattggtagaagttccagaagatagcacgaaagaatccgataacctgaaacgagagaatgaagtgttcgttcgagagagcattccgctatggatggcttgtgtcggatacttattc

SEQ ID NO: 111557 - DNA, 408 bp, Arabidopsis thaliana columbia
  unsure (1)..(408): unsure at all n locations
aaaaaaaaaaaaaaaaaaatttctcaanaattatatcttttccaaaaaacnngcccncccccccgggcgttttttttcaaacattcgccgccccccaacaaacaaacctcttctatacnaccacccaaattcaatccacttcccctctttttacaacttcgtgactggaaaaccctttttcttccccaacttaatcacctcccaccccttccccttttccccacttatcttaataccaaaaagtcccacacccttctcccttcccaacatttcctcacccttaattcccaatcttcccccccctttacctcctcattaaccccaccacttattctctttacctcacatcgtaacccttacactttccatccccttaaccccccctccttcctttttcatcctctcttt

SEQ ID NO: 111558 - DNA, 399 bp, Arabidopsis thaliana columbia
gcgtccgagatagtcaccaaaaaaaaaaaaaaacacatatggtttcaatggccgcctccacaatggctctcggctcccttgccttggcgggaggggctgtaaacctttcccccgcggcatctgaagtcctcggaagcggccgtgtgacaatgaggaagactgttgccaagccaaagggttcatcaggcagcccatggtacggatccgaccgagtcaagtacttgggtccattctttggcgagtcaccgagctaccttaccggagagttccccggagactacggatgggacaccgttggactttcagctgatcccgagacattcgcaaggaaccgtgagctagaagttatccacagcaggtgggctatgctcggagccctaggctgcgttttccctgagc

SEQ ID NO: 111559 - DNA, 163 bp, Arabidopsis thaliana columbia
tttctaaaaatcctttccccaaaaagttgttcttaactagacctaggacgagcattaacagttttttttattccgcaaatcccccaaaatttcaatttccaccttccctatcgcatgatcgcttcctttccatttccgccaaccaatcttaaatttattgcct

SEQ ID NO: 111560 - DNA, 444 bp, Arabidopsis thaliana columbia
ccggggccgccccacgcgtccgagatacgtggaggtggccaaagaaaagaacttatttcgccactaggagctaccatctctggtgggtggctatttaagctcggctgccataactcgtcttaaaacaaaggcgaaagagtcaagagacatgcatgcgaagacagactcggaggcaacaagcatcgacgcatttgctttgtctacgccgcgttcagcgattagacctctttactatgtacagagtccatcaaaccatgacttggagaagatgtcatttggttctggttgcagcctaatgggttcacctacacatccacattactaccattgctcaccaatccatcactcccgggagtcatccacctatggtttatgtgaccgagctctcttttcttacaagtccatccgcgaacgtcgccgatacatcaacgacggagacgacaa

SEQ ID NO: 111561 - DNA, 316 bp, Arabidopsis thaliana columbia
  unsure (1)..(316): unsure at all n locations
aaatatctccacaaatccttagggtgattttttaacaaatgaggcctgatcaactaaantagtctcttggttgtcttttatcttcacccctaccgttacatccagtcataccaagtcgatcttagtcttttttttttcgaataggctttcatatcctacaatcaaattggtgaagaatttatgttcataatcctatcacagagtcattgtataaaaaagttatttgatatacccatatttatacttccattattttaccaccaccaagttaaattcttaacattttttcttttattaaaaattcctcttaaggacc

SEQ ID NO: 111562 - DNA, 302 bp, Arabidopsis thaliana columbia
cgcgtccgatctcaactgatagaccctatccattcactttaaattaagcaacaacctcaaatcgatggcggggatcattttgaatctgggccgcccgcaaaacaaactcaacaacgtttcaaggagctttgggacataatctctatcctggggtaggatgaattaccccaataggatctcttaacgcgagcgagagcgcgaaagattgatctgttctaataacaaccctttttcgtaactcacgtgttgtacagcttcttcgcaataatatgtggtactagcgggaacaattagagggccaa

SEQ ID NO: 111563 - DNA, 306 bp, Arabidopsis thaliana columbia
gcgtccgaaataagagagttttaagcatttgaaacaattaaattggcttccaaggctttggttctgggggggctctttgctgatctggggggcgtctaaaaaatagccgcggcattttctgccacagtgaattcagagagtaaggaaactgtgaaacctgatcaacctggctacgttgccaatgggggaaattacaataacggaggaggttcccagggaggagggggtaattcccaacgaggaggaggtaattcccaaggcggaggaggtatttcccaacgaggacgaggaagatcccaaggtgga

SEQ ID NO: 111564 - DNA, 327 bp, Arabidopsis thaliana columbia
gaaaacccgggccgaccgcacgcgtacgaggatccaagggaactggaaagaagttttctctttggaatagaagatccaaatacggcaagcagtatttaataaggcttagcccttgaaacaggtaaatgatgggaaaatccctaaagatcgtgcaactcttcggatgctgcatgaggaaatgatccgttggccatttttataggttgaggtttcaaagaagcatcgtggaaagtcattgtacgctaaatccacagacactggaatagatccaaatgaagcagccttgatactcaacttttaatgggattcagcttctgcaattgaaga

SEQ ID NO: 111565 - DNA, 381 bp, Arabidopsis thaliana columbia
  unsure (1)..(381): unsure at all n locations
aaaaaaagaaaccacaaaaccaaagatttttantttttcctcaaccatggctttntcctgcgcggccttttacaaaaggggggggaagcctaccacatcatatgtcctcggaagcggccgtgtgaccatgaggaagactgtctccaagccaaagggtccatcaggcatttcattttacggatctgaccaagtcaagtacttgggtccattctccggcgagccccctagctaccttaccggtgagttccccgttgactacggatgggacaccgctgttctatccgcctacccaaaaaccttcgccaggaaccgttagctagaagttatccacagcatatgggccatgctcggagccctaagctgcgttttccctgagctatt

SEQ ID NO: 111566 - DNA, 270 bp, Arabidopsis thaliana columbia
  unsure (1)..(270): unsure at all n locations
aactacattttcttctcatttttcaacaccataaacaccggaccnncccttctctcctgggaggtttttttataaaaccgggtcgtaccctacaaaaattctcctccctttcactcccttttccttctctccctcgccttcttttttcatgtcaagcctcctctcttatttttctcttcttctccttccaatatcaaaggaaaatcttacctttaagacttcctttcattacataatttttacacacccaccatcaaaactattttatac

SEQ ID NO: 111567 - DNA, 421 bp, Arabidopsis thaliana columbia
  unsure (1)..(421): unsure at all n locations
aaaactatgtttacttcctacacaaaaactttacttatccgcgtcctcaaagaantcnatgcagggttttacatttacatcggcctggacaaattctcaactctttttcnctcgtcttcctccgccgcaaaaatccgtgaccctttctatctctacgatcaggacatattcttactgatctccgcctctaaacttaaccagttgcttaaccgtctcggtatgtcttgctctgttgaaaactgtactcctatgatcggacctttggatcctgacggctatggaaatttttaatttcctagagtttcagaaaattttgacttcttctttttttttcaacattaattaatcctccattccttcttagacctaagaaggtttccacattttaaatttttttttttttttaacaaaaacttttcaa

SEQ ID NO: 111568 - DNA, 412 bp, Arabidopsis thaliana columbia
  unsure (1)..(412): unsure at all n locations
cgggcggggccgacgcgaaacaaaatttannannacctttttagaaggtctccttttactatagnanaggcacctatccaatttttgctggttttttaaaatgggtgtcgcatggacaaaactacacctaccttttttttttttgggtcaatatcatcaattcatttcatccatctttgaacctaatccaattatttttttttttcacatttaaataactaactaacaaagtgtttaattaaattgtaccattttttattggtggttattactaatttttttactctcttgttttttttttcaaatttattcctttctatttttaaatatcttctttttttttttatatatttatatattttttaatatttcttaaatttaaaatttattccctattcccttatattttttt

SEQ ID NO: 111569 - DNA, 223 bp, Arabidopsis thaliana columbia
aagattatcaaccaaatatttacaggatgaacctatggccaacgaacgaggtccttccctttttcatgtcctggtcctactaaaggacccaaaataaggttatgaagattaatgtacagatcctacccatcaactagatcttttataagaacccaacaactatcaaaaattttggaatcttgttcatataccagagccgtacatgttaccataacatttacaa

SEQ ID NO: 111570 - DNA, 419 bp, Arabidopsis thaliana columbia
gtccggggaaagaaggtcaaataaaggaagaggagtttttttcaaaaccagcgaaaccaaaacccaagaaagttgttgctcctgggaggtggattgatacctatgctgaacaacgcgttacctgtcacaagtggagggtgattgatagctcggtggaatatcaatatttcatatgttaaatgctcgaggagcctatataactgtcatacgaatcagggcttgtattgagaaaagcctgcttatattgactacgattctttttgtactagggtcattgacaagcctggtctccccaaaacgcctaagggtttcaagagaagcttagttcttagaaaagatttctctaagatggatacctacttactttacttctaccgggaagaagcttaggagtctcaatgaaatcgctgccttctttg

SEQ ID NO: 111571 - DNA, 249 bp, Arabidopsis thaliana columbia
  unsure (1)..(249): unsure at all n locations
cccacgcgaacanacaaacaaacanaaaccattccataaattttttttcccaaccacccaaaccataccccgcggggcatattcttaaagtgaggcggatcaaaaccaacccctcccacatcattacctgactcaaaattatctcctccgatatccattacaattactacaacctcatttttttttttttctaacatccaataaactgttaataatacctaatctcatcttatattcacctccatatat

SEQ ID NO: 111572 - DNA, 190 bp, Arabidopsis thaliana columbia
  unsure (1)..(190): unsure at all n locations
gctnnncanccaaaggnccaanagagcccngaagcccaaaacacgcncncncngggcgcncgggcncgcnggcgcaaggaacccgccggagaccggcncgannccnccgncaccaccgcaacaaaccggcgaaagncaanccggcngcagnaccgcacaacgcagagcngcaanngcncccncgcagaag

SEQ ID NO: 111573 - DNA, 259 bp, Arabidopsis thaliana columbia
  unsure (1)..(259): unsure at all n locations
ggccgggggggcggggctctgggcgggccggctttgcccggnngggccgntnngctntccccggcggcctccgtggtttttgggcccggccgtgtccccttgcgcgtggcctccttgccctccggtccttccggcngcccnntggccggttccgcccgggccnggtccttgggtccgttctccggtgggcctccgggctccctccctggngngttccccggtgtttccgggtgggcccctgccggtctttccgccggtc

SEQ ID NO: 111574 - DNA, 162 bp, Arabidopsis thaliana columbia
  unsure (1)..(162): unsure at all n locations
cgaccaaaaagaagttagccaaatgttttctgttccatcctgttcatagtgtttggggcatggctcatgttttggttcatcttgtccctcatccacttnctctaccacaaagctaagatggatggctgggtaagcttcgcctgtcttggcagcggtaacggt

SEQ ID NO: 111575 - DNA, 447 bp, Arabidopsis thaliana columbia
  unsure (1)..(447): unsure at all n locations
ctagctctttcgttgtgatgcaaccatctccgtctttgtcgaaaaggctaggaacactgatgagatcattaggtcaaaatccaacagaagcagagttacaagatatgataaacgaagtagatgctgatggtaacggaaccatagacttccctgagtttctgaacctaatggctaggaagatgaaggacactgactctgaagaagagctcaaagaagctttcagggttttcgataaggaccagaacggtttcatctcggcagctgagttaagacatgtaatgacaaatcttggtgagaagttaactgatgaagaagttgatgagatgatcaaagaagctgatgttgatggagatggtcagatcaattatgaagagtttgtcaaagntattgagggcaaagtgaggaaactattctcatatcttttctctcttttttttttctttcttt

SEQ ID NO: 111576 - DNA, 459 bp, Arabidopsis thaliana columbia
tgaagtatgttgacgaggcttaaacttcatttttgagaagattagtatcaaatgtaggtctaggcttttatcaaaatgcagctggtgcatcatcctctgcgcagctgaacatgtctgtgacccgtgataattaccaatttagtgatagaggaaaggaagtgttgtggaggcagccttcaggaagtgaggttggtgatcgtgctgcttcatatgaatcacgagggcctagtactcgtaaacggagcctggatgatggtggaagcactgttgataggccttatctacgaatacaacgtgcagatagtgttgaaggcactgttgtcgaccgtgacggtgacgaggttaatgatgattcagcaaggccttcaaagcgtacccgatgttctgatgcgcatgaagcttatcctttcttgtatgggcgagatttatcagtaggggggccaagtcactcactggatg

SEQ ID NO: 111577 - DNA, 259 bp, Arabidopsis thaliana columbia
acaaccaaggccaccaaaacccaggccggagttctttaaaaaaggaggggcagcgccccaccaactcgcaaagtctctcgagcaatccacctcgctcccaacgccacaatctccggcgtagcaagccggtctttataaaaagccaaagcctttgccaccgccaataactacccataatcaaccaaaatccaccactcttacgaatctcttctcgaatacccatatatcgaagctctctattgacctctccccactaatc

SEQ ID NO: 111578 - DNA, 454 bp, Arabidopsis thaliana columbia
  unsure (1)..(454): unsure at all n locations
ccctaacttccttcatcatttttcccattctctctccgaaacagagaacatttngaggggggtcttattctaaatcctgggagcaacaatggtgaaggcaacaaaagcagagaagaagatagcgtatgacacaaaactatgtcagcttatcgacgaatacactcagatcttagtcgttgcggcggacaacgtcggatcgactcatcttcagaacatcaggaaaggtcttcgtggagactcattggttctcatgggtaagaacactatgatgaaacgttccgttagaatccactccgagaactctggaaacactgcaattttgaatctgcttcctcttctttaaggaaacgttggtttgatcttcactaaaagtgaatctaatgaagtgtgcgaggaggttgccaaatacatagttggtgcttcctgctcgtgttggtttagttgctcctattga

SEQ ID NO: 111579 - DNA, 281 bp, Arabidopsis thaliana columbia
cactctctctctttgcgtcgagcttttcttatactgtgggggcgctctctatccactccacctaaaacgaacgtactctacgtcgtttcatctctccagcaaacacaaactatcctctcactcgacccgactcgttcctcactcaccaccaccaaacccgaatccctattctacccagttttcttcaattcattttcaccactatctctagaacttcactctcgagacactttcgtcgcgtcacaacacatagactacaaaagcttaacactcattctact

SEQ ID NO: 111580 - DNA, 376 bp, Arabidopsis thaliana columbia
  unsure (1)..(376): unsure at all n locations
gacagagaagttcaaggagatggacacatcttactcaggctcagctactttcaactacgaaggcttcatgctcaccgtcctccccttcctcatcgcataagttttttttacggtaacccgtttgcacatcttctgtttttttgtatgttctttgttgtgtgaatgctattgtcaatggaagcttttccggtttagttgaactcaagagtttataaaaaaaatgtgaaatgtatagtgagagatcttgtgttataaaataatcaaacaactcattatggttggatnttnaaaaaaaaaaaaaaaaaaataaaaaatatattaaataaaaatttaaaatataaatttaatatatatatttatttttttatatatttta

SEQ ID NO: 111581 - DNA, 282 bp, Arabidopsis thaliana columbia
  unsure (1)..(282): unsure at all n locations
gagaccagaagggagatatttttctttcaatgacgtgaggcctantctccnttcattaaaaatctcggcatgtttcatgttcgggtggacttcttatctgaggatggtcaaacgattgctatgttttggcgttcgtgcatgttaagattcacaagtgagcctattcggctagttcagacattcttcaaaatggctccgttagcgacatgatatgtctctgaaatccaaaccctgagctagaaatttaaaggctttgtagaaaaagacatttccactgcttgc

SEQ ID NO: 111582 - DNA, 160 bp, Arabidopsis thaliana columbia
cagagccagacccagggagagagtttctttaagaagagaaagggcccccacacgacccctgcttgtgatacgagataatggaacctcctttaagatcatacacctatgtgaaaaagatgacccaacttcttttattcaaagagaataattaaccaacact

SEQ ID NO: 111583 - DNA, 488 bp, Arabidopsis thaliana columbia
  unsure (1)..(488): unsure at all n locations
ggtagagtttgacgagggatttgtaaggttttttgnatgtaacaccagaaggagagactgcgtgaagacgtattttatagagtgtgaggggttcatacctagcccaacaagagttagtgaagattggcagggattgctctggtgccatctccatttatgaagccatcccgatttccaaacaccatattattctcacatcagtagcagagtctatcatatccccattaaacaagttggctccgcaaattcggatattgtatgttctttctagttgtttcgcacttcctcacatacagttagcttcctcaagaggaataatttcattagcatttttgtgtcttacaagatatgcagagacctgatttacccttcaaatccgaacctaaagccttttatactgtatctttttatgtcctattagattgagatattccttcgacatgtatgataaatacgagcctgtcaacgagccatatttggactactgc

SEQ ID NO: 111584 - DNA, 305 bp, Arabidopsis thaliana columbia
ggtcatttctggtatatggttactagaattatttttcaaaacattacagagccttcaaaggaagactgctcttgagaccggtgcgaccagcggaatcctttattccatagtataatatgtagctgtttttggagctaaaattcacatatgtgacatatccaaaactttgttcaatcaaagtttaagcgaatggaaaaataaaaggcttcaaactaagtggtcaatatgttatgtaacctttcattcttagaaaaaaaaactaattcataccatctcctttatttttctatgcaaactcaacattc

SEQ ID NO: 111585 - DNA, 353 bp, Arabidopsis thaliana columbia
  unsure (1)..(353): unsure at all n locations
ggccggcccacgcgtccgctcagatctgaccagttagtaagaaacttcttgttaagaagaagaagactgaccnaggggggcctttttcaaaccaccggcggccactaatggacctccaccagttggttccataccacctcctccagctccggcgactgtaaccagcaacggaacaacaaacggaatggctaatcagaaacctcaagtctacattccagctaaccgtccggtttaccgtccacagccttacagtcgccgtcatcaccaccaatctcgaccaagctgccgacgaatttgctgttgttgctgtttctggtcgattctgataattctgatcttaactctcattactg

SEQ ID NO: 111586 - DNA, 328 bp, Arabidopsis thaliana columbia
cttcctttctcctttccatgtctctccgaccaaaagagactcttccttcactgtcccagctgtttaattctttcagacatctaaccacctattacaaccaatcaactgtcacccattcatcggaagtttgcaaactcctactacatcaatcccatttatcgctttgtacccttccaaccttccctgataccctaccttcatcaacccttttctcttcattcttaaatctacctctcccatagtttctttcttatagacccatccatcataacttacccattaaggaacactatttaccccctgtcatatcattctttcacctcttcta

SEQ ID NO: 111587 - DNA, 274 bp, Arabidopsis thaliana columbia
  unsure (1)..(274): unsure at all n locations
gggaaccatgggttttctcaaaggcacataactctcaccaaagctgggtgtgatgtgactgaattttttcgaactaagaacgaatgccatcccctcgntggattaggagcaaagtacaagtcttctcctgaagaattgactgcaacttgagatctcacatttgcattttttgctgatcctgatagtgcaactcatgttgcttgatgaaattttaatatcctttattttttattattttactttttgatttctctatttctttatttatttatct

SEQ ID NO: 111588 - DNA, 322 bp, Arabidopsis thaliana columbia
  unsure (1)..(322): unsure at all n locations
ccacgcgccggccctgcactganattttttctaccgtttgtgatatcaccgaggagaaatggctcnaaaaaggaatttttaaagaggatgtagggacactcctcctctcaaactgaatctttcatctacgactatagattcagtttccaaagtccatttatagaatatgaaagagaatttcttaaaaccacctgccaatgcacaagttataagattgccatccttacgatctttccgcatgaacgtcatgttcatccataaaccgaccaccttagatgccacctaacgaaactattagacttctggctacatttgatccacc

SEQ ID NO: 111589 - DNA, 450 bp, Arabidopsis thaliana columbia
tcggaaaactctgagatgcatcgcggcgcgtgttgttttcggacggaaacgtagactgatgcgtctccatggcagcagaaactgggccagatccttttgctcttcttcttcactatctgaacatgaatgtttcattaaggatatagcaaaagctcagcctcctaagcatctgatgcagctgctgaatatattcacagctagaggtaaatccatagtttctcctggtgccaagcaaggcttgttacctcttactattccgttggtgaaaatgagcccgggttcttcaattgctctattacggtggccaacagctccttctagtatggagatgcctgtggtggaagttcagaaacatggggtttggtttctagctaataatgttgatcagttcattcacagaatattggtggaagaagatgtttccaaacccgaagaatgcagccaagaaat

SEQ ID NO: 111590 - DNA, 366 bp, Arabidopsis thaliana columbia
cgtccgtgaaattgcccactagcatttgctctaccactgattactgaagacgtcaaattcaacgttggggagctgttttatgtttcgtgagtggcttttttaatttgcatcgtaatgggtttctggccgttggatcatttttagatgaatctttgtctattgattgatcatttatgtgtctttgggtttgttgttggagttgtaatatctctggaaggcttttgtgcaattgtattgtacggtttaataactataattgagaaaaccagggaatgtgaattatgaaaatgaaataattttcttattttaaatagagttaaacttattttaattataatttatttatttattatttcccttttttta

SEQ ID NO: 111591 - DNA, 285 bp, Arabidopsis thaliana columbia
  unsure (1)..(285): unsure at all n locations
gctatagttggggtagcctctcaggatagcacaaattccctgaatattcttctccaaagaacgagtgttaatattcggaagaagccgtgtgagttcaagagcaggctctcaganttttctcagaagagaggtcttgatttacctcggaaacccctatacttgattccacgcgcaaagctatcttagccatctgtggctagttctagttgtgcttcatgggggttcattgaaaagctacaagaatcgggaggttggaccacttcggagaaggactttgacccgctt

SEQ ID NO: 111592 - DNA, 374 bp, Arabidopsis thaliana columbia
ctcaaatccaaaaagaagaaggcttaatttcattcaactcttgccgaaagacaaagttctgtgcttgtttcttaagttgtccctacattgttttggtctttcagaggtttagtccggaaactttaaatgggtgtcgttgaaccgtacgagactatatcttattgactctaaatacatacacatgttaagctcaaataaattctcgagagaatatatactaatgatgatggattttaggctccctgacacagatagaattctatcttacatcttttgattctatttattacaatcaccagtactgggttcggcttgtctttgtcttcttgtgtacatcgcgttctccgtgtttggggtatcttatattggtttgg

SEQ ID NO: 111593 - DNA, 422 bp, Arabidopsis thaliana columbia
  unsure (1)..(422): unsure at all n locations
gaggcgtccgcaactaacaaaaatacttactttcagaaacgattttctacacacgaggaagaagatcgaagaagaagaagcttcgctagagaggaaagaatcnanagaacgatggaagcaaacgcggcgcagagagtgaggaagatgaagaaacaagcacaaaggaccaacgattcattcattgaagaagatgatacagagattgattcctctaaatcgaaaagcttcgaactttactcagattcttgagaaaggtacttctttattacactattctagtatcaccgaagcgaagctttcttataaagagagattaaggaatgggattgttgatattaaggttaatgatgctattgatctcttcgaatccaattttttatattttaaatatttaatttatatttattattttaattttatat

SEQ ID NO: 111594 - DNA, 277 bp, Arabidopsis thaliana columbia
cgcaaaaacatattcattttactcataaggttaaactatcgttatcattttagatcatagatgatcaactaaatacgaattgggttcttcgatgttacgaagccggttttcgcttttcgtgtacaagaatgatgaaaattaagagagaaaaatgagactaaatgagtgtagtgatcatatagtaatgggacttcataagcatgatttgatttgttcgtgtgatttgtttctttgtgatgtgtaatatgtaatgtaatatcaatgttgatgtatattc

SEQ ID NO: 111595 - DNA, 406 bp, Arabidopsis thaliana columbia
aaaaaaaaaaaaaaaataataaaaaaaatttatataaaaaaaaaaaaaaaaaaaaaaaaaagaggaaaaatttaaaaaaaaaaggaggaaaaaaaaaaaaaaaaaaaaaaaaaaaaaaaaaaaaaaaaaaaaaaaggggcgccccttttaaaggtcccaagcttacttcccctttcttgcaaccttttagcttttttatagggccccctaaattaatttcactgcccgttttttaacaccttgtgacctgaaaaaccccttgctttcccaaatttaatcgctttgcaaaaaatccccttttccccagttggcttattaccaaaaaggccccccccaatcgcccttccaaaaatttgcccacccttaatggcaattggaaccccccctttatcggccctttaatccc

SEQ ID NO: 111596 - DNA, 364 bp, Arabidopsis thaliana columbia
tatcagtccttcttgtgtctttgattgttgttccgtttcttttgtatctcatctatcctcctacggtgaagagcagtcctgatgctcctaagctggctcaggaaaagcttgacaagatgggacctatgtctaagaacgaattgattatggctgccactttattcctcacggttggtctctggatctttggagctaagttgggtgtagatgctgtgactgcagccattcttggacacactcacctggttcgctgctctcattgcgatggctggttatcttaacaaatatggtctcattgagtggttcagccagaccgtagtcaagtttgtgggaggattgggtttgtcatggcagctatcttttg

SEQ ID NO: 111597 - DNA, 402 bp, Arabidopsis thaliana columbia
  unsure (1)..(402): unsure at all n locations
gttatcatgcccatgatgagtttgttattgatancggnactcggccatccaccggaaaggagagatctttcgacggaacggagacatgtatggaatacccaaaccgggaaactaatatctttgttctccgagtcaccttcggatcaagatcaagcttcatcagatccgtcctcaaagaataattccaatccgtgtaatagacatgcgtcacatggattatcaagtgggatattcgatgagaacttgtatacatgtatgcattatttagaatacatggatcagctcattgttggaaccggatttggtgccctcaggtttatcgatctagcacgaggccagaagcttgaactttgtggaggagaagcttttgaatctggattcacttctttcgtatcttgctct

SEQ ID NO: 111598 - DNA, 405 bp, Arabidopsis thaliana columbia
attgaaaacaatctgtttcaccaaaaaaagttctaaaaagcatgggttcgatttcaaagagatgcaggtgaagatctccgatggctttcgtccatggcaacgctcttttcaattctgggttcgagctactaatatctacacaggctacaaggtgtttcaacttcgagtaagtttagtaaaagatgcaaagaagcaagaggaaatgtgggaaagacaacatgaacaagctgctgataagatttacttcatgtgctctgatcttggtggtttcttccttaagattgctcaacttttagcaaaacctgacatggcaccagctgcgtgggtgaaaaagcttgtcactttgtgtgatcaagctcctgcgacgccgtttgatgcgattcaacttgttctagagaaggagtt

SEQ ID NO: 111599 - DNA, 231 bp, Arabidopsis thaliana columbia
acgcaaggcattaacttggcgctcctctaatcgagacaattatatcggctgccagacggaaagcgctcaagggtgaacggtccaagggacactgacgactggttaaacatttatcagccgcaaaacgttaactacataaaaagcgagttgctagatgatacattctagggcaccgacaatactgctgtttgctgtggctatgcaatatttcaagtcgtgacccttccatga

SEQ ID NO: 111600 - DNA, 354 bp, Arabidopsis thaliana columbia
ccgggccgagcccacgcgtccgaattcttagaatatgatgttccgataatgtgcttatactgcaacagccactgttaacgtgcagaaagattttcttgagtcactggacctgtcaaaggaaacaaaaattgtacttacttcatttttcaggccaaatctacaattttctgttaaacatagtcgaaccaagttttcatcttcatatgcaaaggacttccaaaacttagttgacttatactctgaaaagaaaaactctaccgggaaatagctagcagtaatctcacgagagtcagaagagcattctgattttggttcttacaatttttaatacattcatgagaccgtcttattatt

SEQ ID NO: 111601 - DNA, 390 bp, Arabidopsis thaliana columbia
  unsure (1)..(390): unsure at all n locations
caacgatgatgattttgatgattttgatcctttgggaacttccagtaataagccatccacaggcagtgcctaccaagtggacgtttttggaggagatctgattggtgacttcttggattctgggccaacagaaacatcttccaccaacaacaacgagaactttcaagaggcggacttgtttgctgatgcagcttttgtatcagcctcggctcaaggagctgaatttgggtcacagacacagaaacaagttgatcttttctctgcgtctgaaccttctgtcacagnttcttcagctcctccgacggttgatctctttgcatcttctgaatcagttgtaagcccagaagccaagatatcaatacctgagtctatggctactcccaacattgt

SEQ ID NO: 111602 - DNA, 462 bp, Arabidopsis thaliana columbia
  unsure (1)..(462): unsure at all n locations
ggggcgccccacgcgtccgtttcgtcacatccccactagagaaagaaagagttttttgtctctctctctctctcgtttgcgctggcatattgagttggactctncgccagccaccgcctcctttctatctctctccatcaatggcgacaccatacctctcccttcaacctcttaagtaaaaaaaaaaaaaactttttgctttctctttctcctctcccatacacttcatttctcaaaaccctagattcaccaaaataaacccttctcttcttcttcttgtctttatgttcttgtttctttcatgtccacatggattcttgtaacagtggaagcttacaatcttcgagcgatgatcacgagtcttcatcaactggtgctccacaagatcactcctntttcttcctcccacccttccaaccaccaccgtcttcctccacctactacggtgacccaacaaccctt

SEQ ID NO: 111603 - DNA, 410 bp, Arabidopsis thaliana columbia
  unsure (1)..(410): unsure at all n locations
ctcggtaattgntnanacatttatagtctctcattttaacttaaaaaaccaccgagttcgcatggctgctggttataagcaatggggtcagtcatacacacatacatgggaaacaaaggtgccaataaggcttcttattgcttcagagnatgcgggtgtgaagatcgaggagtccgcatactttcagatgggcgtcactaacaagtcacctgtgttccttaagatgaaccctattggaaaggcgcctgagcttgagactcctgaaggtcccatattcgagagcaatgccattgcccttatatgtgagccgtaagaatggttacaactctatgtatggatcctaccttatagtatactctcacattgagcaatggatcgtattctcctcattggagattgatgcttacatg

SEQ ID NO: 111604 - DNA, 319 bp, Arabidopsis thaliana columbia
  unsure (1)..(319): unsure at all n locations
acccacgcgnccgaaaagcatcaagaacacggttgagactcaattttaggttatcactagtaaagctgctgtcgggtggggtccaaaagtgccgggggtaatgcaagaaatatgcgtcgatcctcctttttttatttttttccgngnnaaaatcctttactcctccatttgccacaccgatctcggatgttggaacggcacgaacgaagctgaacgagcatttccaaggattcttggccatgaagctgtcgggattagtagagagtgttggagaaggagtaaaagatgtgaaagaatgagactacgtgattccgacttt

SEQ ID NO: 111605 - DNA, 226 bp, Arabidopsis thaliana columbia
acagtttcggggtagtgatccttgagatagttactaggtaacgcccggttgatccacaacttggggagaaagatttggagaagagggagtactctacattggaccaaaaaggcattgaacatgtgatagacccgtaactcgactcttgcttcaaagaagagataagccaaattcttatccttggactactttgcacgaggtcgttgcccattaacctaccttccat

SEQ ID NO: 111606 - DNA, 241 bp, Arabidopsis thaliana columbia
  unsure (1)..(241): unsure at all n locations
atacaatacaatgtctactctagttttatttttccaactnnnnnccatcctaccagtancaggtgaatttaaccagggcaaagggaacccaaccaatactcaagaccaaagctctaccctaagaatcttccacatagacagcccttgctcccccttcaaatcatcatccccactctcatgggaagcgcaagtactccaaacgctggctcaagaccaggcccgtctccagttcctgagcaat

SEQ ID NO: 111607 - DNA, 252 bp, Arabidopsis thaliana columbia
agcttagagatctggctgaagctctggtctctactgataaatttagaaaaaaaaggtccatgtgtgataatgataaagctaacgacctccggtgttataacacatttgggtttcaagagacaagtctctgattcatcatccgggggtcggatgtgattctcacgccttaatgggtatttcgatccatcaaaattatgttttgtgtagtattagaagtccgatgacttacactggtttctgttggttatttgt

SEQ ID NO: 111608 - DNA, 436 bp, Arabidopsis thaliana columbia
atcatactaactaaagagactaacacttgctcgacactgtaacgagaccggccggctgtacaatggctatctcctctactgctatgaccgaaaaggacgatcagctatccgcaggaggctgacaagtatttggaaccgaacacttcaccatgcgcaaagccttgaagcacacccatacatacggcaggcgatggttcggatccgaccgagtcaagtacttgggtccattctacggtgagcctccgagctacctcactggagagttccccggtgattacgggtgggacactgacggtctatacgccgatcccgagaccttcgctaggaaccgtgagctagaacttatccacagcatatgggccatgctcggagccctaggctgcgttttccctgagctattggctaagaacggagtgaatttcggagtaaccgtttt

SEQ ID NO: 111609 - DNA, 467 bp, Arabidopsis thaliana columbia
  unsure (1)..(467): unsure at all n locations
cgtacggaacatatcaaattcgaggttagatctctatttagatttttgcgcccaaatctcttcacgtgaggaagtttaatttagattgagcaacaaatagatnggtcactggaattccaaggttgttccataattcaagaagttattcgagaaaaatagtgctaagaaagctgcttctgcttaatctaccaagtcctttgatgaatctaaagaaacattcaacaaggaaattgaggagaaaaagacagaactccaaccaaaggtcgtggaaacctatgaagccacttctgcttaagtcaaggcttttatgagagaccctaatgtggctggtttgaacaaattctcatcggctgttcagaattacctcaatgagcttttcaaaattgaattccccagatcaaaatcggtgagagaggcttcgtctagcttctgagctggctttttctcatgaccggtcacgtttcatt

SEQ ID NO: 111610 - DNA, 447 bp, Arabidopsis thaliana columbia
cgatggtgtccctaaggctttgacatggcatggggttgtgatcgatatgattggagattgtcttatggatatggctaaacagggaattacgaccaaggaaaagatcgaactgttcagtttgcccatatatattccgcatattagtgaattcaaggcagaaatagagcgaaatgaaaactttagtatcgagacaatggagaagataagtcatcctatggattataagccactaaccaacgacttcatcacttccatgtttcgagccattctcaatacgattattgaagaacactttggagatggtgtggtcaatgagctattcgatcgatttgctaagaagctcaacaagtacccaattgatttcaaaaggtgtaaaaagtatgtgaattattttatcgtgcttaaaagaaaataaaaatggagataatgacaaaactagttatgtca

SEQ ID NO: 111611 - DNA, 357 bp, Arabidopsis thaliana columbia
  unsure (1)..(357): unsure at all n locations
cgatggtgtccctaaagctttgtcttgtcttttggangagatcgatatnattgagaataagtttatatttataggggaacagggaattaccaccaatgaaaagatcgaactgttcagtttgcccatatatattccgcatattagtgaattcaaggcagaaattgttcttatttaaaacttttgtatcaagacaatgtttaagattagttatcctatggattataatccactaaccaacaactttatcactttcatgttttaagccattcacaattcgattatttaataacactttgtatatgttgtggtcaataatctattcgatcgatttgctaagaagctcaacatgttcccatt

SEQ ID NO: 111612 - DNA, 360 bp, Arabidopsis thaliana columbia
gttttgattaaagtagttgcggcggctctttttcccgttgatgctaagagacggcaagggaaatttagtgccactgattcgcctctcccgactgttccgggatacgacgttgccggagtagcggtaaagtgggaagtgcggagaaggatttgaaagaaggagatgaagtttatgctaacgtgagcgagaaagcatagcaaggtccaaagcaggttgtgtctttagcggagtgcacgggcgtggaagagaagttattagctgtaaaacctaaaaacatccgattttgcgcaagctgcacggctttcgttaggcgatagaaaccggtgttgaagggctagttaggactgaattctcagccgg

SEQ ID NO: 111613 - DNA, 334 bp, Arabidopsis thaliana columbia
  unsure (1)..(334): unsure at all n locations
aaaanngggcgganccacgcgaacgcacaagcaaagaaangaatttcgttttagtttttgnagaacacaaacagaacaaggaaaaagtcaattttaaagtgtgtcagggcgcacctaaancacctagactaatagctttctttactaccttcgcttatactgtctccttcgaattttctgttctccttcttaattttaccttttccacttatactactatttttggttttccttcattcactttattctttcttaccttttgtcatttttgtttttttcattcttatttacattcactctctttaatttttttttttatatcttattttgctaa

SEQ ID NO: 111614 - DNA, 264 bp, Arabidopsis thaliana columbia
agcaaagaagaaaaatggctgcatcttttgctacaccatcgacggagataggccgcggagagtcattctttaccaggagaacggttctcttcatcctttttaaaaccaacattaagcgccaagaaccctttgagactcgccggtgcattgggaggatgagttactttgatttgtttggttacttattttaattaatattttttcactttatttaattctatatttcgtatatcatttttatattccttttcatttttttctttt

SEQ ID NO: 111615 - DNA, 132 bp, Arabidopsis thaliana columbia
  unsure (1)..(132): unsure at all n locations
gactgagatccatggacgtggttttcggtttttaaaacagacgncgnnagaagcgggagttccaattttaacgagtctgggacctcacatcgccttcgtcccctctgtactgtgttctactcgatctgtatt

SEQ ID NO: 111616 - DNA, 449 bp, Arabidopsis thaliana columbia
gacacagcagccaaggtgaaacaagagattctgcatggtttaggtgaattatatgtgcaatcatcgaagatgtttgatgataaaatgtacatgcaattgttgggaattgttgatttggctataaaacaggccatcataaatagcgaaaatttcgaaactgaatatggacatgtaccccctgtactacgtcatgttttggaaatcttgccctctttggggcctcctgaacacctttcgtcaatgtggctaatcttgcttagagagttcttgcattatcttccacgggttgattctgttctgccaaatgacgaaggcagtgaagtattggaacagaaagctgatgcttcgtctgaaacaattccaaccacaagaattacgacttatatgtttgcagaaaagctgatccctgccttgatagagcttcttcttcaggctcctgcagttgaaaa

SEQ ID NO: 111617 - DNA, 361 bp, Arabidopsis thaliana columbia
atttgtgaaaagctccttgtctgagttaattctagggctagaatttgatgggaaagaatcggctttctacttatcatttcacctgaagttagtgtcaggtagagatccggacggtcaagaaatgctgactcacagggacactgacttctgtatcccggttggttttactgctggtcatccattgccgctaggcctttcttccgggccagatgatgattcttggaatttttcgttcttttcaagaagctcaacgaacgtggttttatgctagtatgatgatagcacaacagataaacctgctttagaacttgatcttgatccttattgtaaccgaacaggtgattgttggcatgcttcaatt

SEQ ID NO: 111618 - DNA, 450 bp, Arabidopsis thaliana columbia
  unsure (1)..(450): unsure at all n locations
agcaactncagctctagaatttntttcgtttcagacttacggatcgaaacttctcaaccagatcaagcgcatctaacctaaggcgcgggcgcatatacaactccacctactctacctgtcaccaatcagcaagctgttcaatctcagcctccaatcaacacacctgcttttcttactttcttctcacgtctctccacctcgatccgtgatggcttgtcacagcgtcttccatggactgagctcatcgatcgtagtttcatttctagacctgaatctctcacctattccttgtcccggataatgaattaatctcacttacttcatagttaactacctcgtcatcttctctctcgtactctcttttacttatttttcttattcattcttcttatcttttcttattatttcttctatgcattaatgtattttttttttccttaacttttcttt

SEQ ID NO: 111619 - DNA, 314 bp, Arabidopsis thaliana columbia
  unsure (1)..(314): unsure at all n locations
gagattctgatcgacgaaatctaatctctttttttttttttcacancnccntactanagaagcgtggtggcaattattaaggaggaatcactgccccaacggcggccgtaggagtagattccaggcgtcctgagacagctatggaagaaacctgtaacgtgaaaagagtttcttttaaacaaggggaaagacttaagcagtactatctccagcacatccatgagctccagctccaagcttctcagaagactaataacctcaatctcctttaagcttaaagaatataactcaattctcgagtgagaatgctcata

SEQ ID NO: 111620 - DNA, 451 bp, Arabidopsis thaliana columbia
  unsure (1)..(451): unsure at all n locations
atctatttataaatttacattcacaaccaatanataatttaggcgccgccccaatcccgagagtccagtgtaaatttaagagaggtccagcactttatccctccnggtctctgaatctcaaatcgtctccaaccaatcctccattttctcaatcataattttctgcaaacatttacttatctttccatccatcctgaaatttcctgatgacatatatccgctcctgtaaatgaaacgagcatatgataaagcctataaacatatccttcctgagccacacttgtttttttacttttctattctccacataatttttcgaatcttttctctcattatttaacatctcaacacctatcttctttactcctttttattttttactctatttcctatctcttattcttttataataattcttgcttaccacttatattaatttcccatccttata

SEQ ID NO: 111621 - DNA, 371 bp, Arabidopsis thaliana columbia
  unsure (1)..(371): unsure at all n locations
acctccagagctcttgccactttagacggtccattcactccccccaagncatccccttctttcccattcacccgcatagccaacaactacattactttcatcacaagcaatgtttttaagagttagcttcatgaatgtattaccaccaatcttaaagaataaatctgatactctatcttacctcccttaccttactttcttctaattttctaaagaagttgactaccttttccccaacaaatggattccttgtatttaattcatatttgatcaccttttttttttccttgagcacttaaactcctcccttatactacaatttaacttactttaccatatataaatcctatcattgttctaatgcaccctcc

SEQ ID NO: 111622 - DNA, 448 bp, Arabidopsis thaliana columbia
gaaagcccaatctaacaaggttggtagcggtgcatcatcaaatgcttcagctcctgaaaagactgaaggaaaggatgaaaactcatcgaaagacccttcttcttcgactgatttagctacagaagagtctatctctgagttccttacccaagtaacaactctcgtcaagcttgtggattcgagagacattgtggagttgcagttgaaacaactcgactgtgaacttgtcattcgaaaaaaggaagctttgccacaacccgagtcccctgcgcaatatgttatgatgcagcaaccaaaccaatcatcttatgtgcaatcagtggctcctccttctgcacctgctgcatcaccagcaccttctactcctgcctcttcacctacaccatctccacctactccagctaaatcatcgctttctactgttaaaagccccatggctggcacattc

SEQ ID NO: 111623 - DNA, 463 bp, Arabidopsis thaliana columbia
cggacgcgtgggctagttcttccccctctctctgtctctctgtccgtcctcaagaaccctaatagtttccaagtttcttcgtattcaacgatctgactttccttaaaaatcttccgatatggtttagaatctctcatcttaatggaagctgacgtgtcaatcgtctgaaaaaaataaatcccttatcgcgttcaaattttccccagcaaaaagattaaatctttttttccaccgtttgtttcaatctgtgaaggaagaaggttagggacgatgaagatgatgatgaatcgtgctcttgtcctcctcctcctgctactcttccatctcctcaccctctcttctttagcctcagccaaagtgattctcatcaggaacaacatcactcgctccttcgacgacatcgaagccaacttcgctccgtctgttaaagctgctggtgaaattggattgctttacgtggctg

SEQ ID NO: 111624 - DNA, 392 bp, Arabidopsis thaliana columbia
cggccggaacccgggtgacccacgctcgccacctcgccacctcggacacacacacaatgcaaggtacagactgttcgggcgcactgtgctttgctctctaccaacgcctcattccgaccgggcgattcgcgaaagacactccgccaagtggcattcgcacccaaaagccaagggtttagcagacacacctaagctgccacaggatccgcgcaactgcgacacttacgaaaccagggggtctagaggggccgcgtaccggcatgtgcacggcttacagagacagggcgttgcctcttgaacagcgcaatcagtgggccaggacgacggccatcagtcaccgattaccaacgtagaactgcaacgtgcacatgacaatgaacagccttatgcat

SEQ ID NO: 111625 - DNA, 464 bp, Arabidopsis thaliana columbia
ctgaaactctttggtgacaatttaaagctgttggaagacaatctcccacttgacagtgtatacaaatcaaaagatgtgtctgctgctcctattcgggtcatccagttaatctacaattccggagatgtgaaaggtcctcagactgttgcttacaacttgccaaacgatgagaaaatcgtcgaagatagaggaacatcaatggttatgctcaaaaacgttcaagaagcaaagtttgaacatattctaaaacctattgctgaagtcatcatcagcaaggaacagcgaggatttgttgattttgattccttctttactcacaccatttgccatgagtgttgccatggcattggtccgcataccataacgcttcctgatggtcaaacctctacagtgagaaaggaactgcaagaacttcattctgcaatggaagaagcaaaggcagatatagtgggtctttgggcatt

SEQ ID NO: 111626 - DNA, 494 bp, Arabidopsis thaliana columbia
  unsure (1)..(494): unsure at all n locations
cgccctggagggatccaacagttccagcagcaacctcccatgatgcagcaccagatgcatccaaggggtcggaacatccggtactcccaagggcgtggtgttagtggtggcgatgtgcctccatatgacatgggcaacaacaacatgccattgcccattggaactttggcttcaaatctggctaatgcttctccagagcaacagaggacgatgctgggtgagaatctgtacccgttggtggagaagctcgaggcagagtctgcagccaaagtgactgggatgcttttggagatggaccagaccgaagttctccatctcttggagtctccagaagctctcgaggctaaagttgcagaagcaatggatgttctgaggagcgttgcagctggcggtgcanccgagcagctcgcttccttgaacctctcttaacttctcgtgtttccaagttgatctttgctttttattatgttctctctccccccatacaatcacag

SEQ ID NO: 111627 - DNA, 454 bp, Arabidopsis thaliana columbia
gaaaaaccgggccgaccgacgcgtaacgaaaaaacacagctctatatgtcccatgttctttcaaaactcactatctctctactgagtaggcttcattactacggttggtggcgcctcacactaatgaataagctccactgctctgttatattcgaaaggctccgaatctaaggtgctgcacgaaaatggctttttatagatcccaatctgagctctgacctctctcgacgtgaccctctctaggcaacttcgatgaacggatcaaagacgcatgtcgtttcctcgtctcagctgatcttggaacagatctctgggagatcttgaactttttgctcgctcgtaggggaacattgtttagtgcactcacaggagccataataggccaagaaacacagagcgggtataatccgggagcggctaaaggtgccatttcacggactgaattttcatcgga

SEQ ID NO: 111628 - DNA, 564 bp, Arabidopsis thaliana columbia
  unsure (1)..(564): unsure at all n locations
nnccggaaaggacccaatactaaccaaggtgtggtatgctggttgctattcatacaaatggcccttcagctttccttgaaaaggacgtgtaagtgaaagggatgagaaacgtgcactcgaaacgaaacccttcnnttcttcgacctgggatttagctaccagaagacgtctttatctcnnngagttccttaccccacagtaaaccaaccctctcnngtcaagccttggtgngnnattcgaagaagacaattcgtgnnngagttgcangttgggaaacaaacctnctgactgttgaacctttgtcatnnntcgaaaaaaagggaagcnntttgcccacanacntnccgagtcccccctggcgcannatattgttatggatgccagcaaccccaaacccaatnncatcttatggtgccaatcaagggggctccttcccttcttgcacctgcttgcatcaccaagcacctttctacttcctgcctcttcacctacanccatctccacctgactccgagctaaatcatcgcttcctactgttaaaaagccccatggctggcacattct

SEQ ID NO: 111629 - DNA, 440 bp, Arabidopsis thaliana columbia
gtgcgtacattctaggatcatctagtcgcgagggcgttatcttctagcaacagatccagcgcccgagaataggtgagagtgatggctaccggagaggagaaaccagtgatggtagtgggtgtggacgaaagtgagcaaagcacctacgcactggagtggactctcgatcgtttcttcgctccctacgctcccaatttccctttcaagctcatcatcgtccacgccaaacctaacgccgtctccgccgttggtctcgctggccccggaactgcggaggttgtgccttatgttgatgctgatttgaagcataccgctgttaaggttatcgagaaagccaaagctctctgtctgagcaagtcggttcatggcgcaatgatggaagtttttgaaggcgatgcaaggaatatcctgtgcgaggttgttgataaacaccatgcttc

SEQ ID NO: 111630 - DNA, 430 bp, Arabidopsis thaliana columbia
cccacgcgtccgctcagtaatagtagcagcggtcttgcgaaaatggtgaagggacgccaaggagaacgtgtcagactctacgtcaggggaaccatcttgggatacaaaaggtcgaagtcaaaccagtacccaaacactagccttatccagatcgaaggagtcaacactacagaggaagtgacatggtacaagggaaaaaggatggcttacatctacaaggctaagaccaagaagaacggtagccactaccgctgcatctggggaaaggttacaaggcctcatggtaacagcggtgttgtccgtgccaaattcacttccaacttgcctcctaagtccatgggaatgagggtcagagtcttcatgtatccgagcaacatttgaagcgaaagtagaacagcataaactttgatttagctgttgttttttgcac

SEQ ID NO: 111631 - DNA, 518 bp, Arabidopsis thaliana columbia
aacgcagtctcccactgattcagcagctctttgatttactcttcgacaatggccgaacgtggtggtgtacgtggtgttgagcgtggtggaaaacgtggtgattttggacgaggattcggaggccgcggaggtcgaggtagatctcagaccacgtgtactagttggccctattttcttatgtattagtttaatccatgtttaaagtattgtttttgttacattaacttgtattttcacatatgtcttgttgtttttatttttggatcattaaactttctttcttttttgttatttagtttttttttgcttttttttggtcttgtttttaaactttttttttttttatattctttataattttattttatctttctcaagtttttcattatttagctattctattttctgtattttatatttttatttttcattttcatttttttctctatttttttgatttattcttctttctaatttgtttctttatagtttacacttttttttttaatattttattt

SEQ ID NO: 111632 - DNA, 440 bp, Arabidopsis thaliana columbia
cccacgcgtccggtcaaggccagggtttccgtgacatgcaccagaaagtagagcacctacggtgcggtgacaccatagcgacggcacctggtgtagctcaatggttctacaacaatggaaatgagcctatcattcttgttgcagccgctgacatcgcaaataacctgaaccagcttgaccgcaacctcagaccgtttttgttagccggaaacaacccacatggacagcaatggctacaaggccgactgcaacaaaaacaaaacaacatcttcaatggcttcgcacctcagatcttggctcaagcctttaaaatcagcgtcgagacagctcaaaagctgcaaaaccagcaagtcaaccgtggcaacatcgtcaaggtccaaggtcaattcggcgtcattagaccacccttgagacaaggccaaggcggtcagcaaccacag

SEQ ID NO: 111633 - DNA, 502 bp, Arabidopsis thaliana columbia
aaaattcatttatctatttcttccatcttctttcaaaactctctctctctctactgagtaggctccattactctcggtgggttggttcctctatctattgaataagctccactgctctgttatattcgaaaggcttagtctctaaggctctgcaagaaaatggcttcttatagatcccaatctgagctctgccctctctcgccgtgtccctctctcggaaacttcgttgaacggatcaaagacgcatgtcgtttcctcgtctcagctgttcttggcacagttctctcggcgatcttgaccttcttcttcgctctagtgggaacattgcttggagcagtcacaggagctttaatatgccaagaaaccgagagcggcttcatccgcggagcggctgttggtgccatctcacgagctgttttctccatcgaagcctttgaatcttctctcctactctggaaatctaatgagtcacgtttccgttgcctactctactagattgatg

SEQ ID NO: 111634 - DNA, 397 bp, Arabidopsis thaliana columbia
gagaaacacaataagcttatggtgacttactcttaactgcaacatgactttcaagcgcaggaactgttgcatgaacaagcacaaccggggtcatgtgaagcccatcaggtgttccaactgcgggaaatgctgctccaaggataaggctatcaagaggttcatcgtcaggtacatcgttgagctggctgccatcagagatgttcaagaagccagtgtctacgatggttacactctttccaagttgtacgccaagacgcacgactgtgtctgatgtgctatccactctcacgttgcgagagtccgattccgcaccaaccgtagggtttgtacctctcccccacgtgtcgtcagacgcaaggaggatgctttcatgcactgacaacctgttcagggtgat

SEQ ID NO: 111635 - DNA, 424 bp, Arabidopsis thaliana columbia
gaccgatccaagagagagagagagagtgtgatgaagagagatatggcacatgaaagtcagggggagctaataatggatcaggtggactagcatttctctatatccaagaataacacgccattcctatacaatcttatgatctacaaccctctcgaatggccctctctcaccgtccattggttcctatcagcgccaactccttacgctgcagacccatacttcaacgttcacaagctcatactcggaacccacacttgctggggtgcccaatacttcctcatgatctacgacgccgctataccaactgccgacgcctaacctggcttacgcggcacacatcaagatcccatagtccctaacgtggaaattaggcataatatacgtgttgatggagaagtgaacaaatctcggtgtatgccggaaa

SEQ ID NO: 111636 - DNA, 309 bp, Arabidopsis thaliana columbia
cgggccgaccgacgcgtccgatcgcagtctcccactgattcagcagctcttttatttactcttcgacaatggccgaacgtggtggagaacttggtgttgagcgtggtggaaaacgtggtgatttcggacgaggattcggaggccgtggaggtcgtggagatcgtggatgtcgtggacgaataagctcttttttttttcttttatggattattattttttgttcattaatgtttttctttgtccaaacttttttacaattcttgttggtctttttttatctactttttatgtgttatttctattttttat

SEQ ID NO: 111637 - DNA, 450 bp, Arabidopsis thaliana columbia
cggaaaccgggcgacccacgcgtcgccacgcgtcggcaagccagggtttctgcatgcaccaaagtaagacctcgggcgggacacatgcgcggcactgtgtactaatggtctacacatggaatgagccttcattcttgttgcaccgtgacatgaaataacctgaaccagttgaccgacctcagaccgttttgttagccggaaacaacccacaggacagaatggctacaaggccgacagcaacaaaaacaaaaaacatcttaatggcttcgacctcaatcttggctaagccttaaaatagcgtcgagacgctaaaagctccaaaacagaagtcaaccgtggaacatcgtaaggtccaggtcaattcgcgtcattagacacccttggacagggccaagcggtcagaaccacagaagaagtaatggtttggggagacttgtgcacatgcgatgc

SEQ ID NO: 111638 - DNA, 499 bp, Arabidopsis thaliana columbia
ccggccggaagcgggccgacgcagcgttcgtaactcacacaacacagacaatgttttacaaacgaaatggatctcctcgtcgtttcttcttactgactgctgtcgaagagacattttatggaacaggtaatgtgcaagttactcagaaagatgttctatctggcaacaatgaaaaaattacgaagctgtataaaacggtattcttcttagacattactgcactttgctacgaacgaaacaaacccaggttggaagcttttggtcactggatatcactcttcttctctgaagtcagcctcactgatcctgtcatagctgctatagatggagcagaaggtaacgaacgacgcatagaagtggtgccttcatataaagctcataggacatcaccaaatcatgggagatactctgagaggccacatgagtttgctgatgaagttcttaaaaaatgcaatgtgccagttggtcgaatatgaaggcatgaagcacacgatgtact

SEQ ID NO: 111639 - DNA, 474 bp, Arabidopsis thaliana columbia
aaaatgggttcttattctacagctcaagaagtgttttaactagtagatacacctgccattggtcgttctccgttagctcaggaacgctgacaacgatgtcccggcgccaggaaaccagtttgctgagtttgccgccggttgcttctggggggtggagcttgcttaccagaggatccctggtgtgacagagactgaggttggttacactcagggtatctctcacaatccttcttacaaggatgtgtgcaccaacacaacgaaccatgcagaggttgtaagggttcagtatgatcctaatgagtgcacctatgagactcttcttgatttgttctggtctaggcatgatcccaccaccttgaatcgtcagggaaaacttgtgggagctcaataccggtcaggtatatacttcttcacaccagagcaagagaaactagcacgtgagtctcttgagaaccagcagaagaactggagaag

SEQ ID NO: 111640 - DNA, 485 bp, Arabidopsis thaliana columbia
tctcttttgtcgatttcgcagtagaagagttttttcgccgtctccgagaaactcgttgcagcgtcacgaccaggtttccttgtcacttttactaaattttgtaattgctcggttttttgtttagtgcgagtttactctggtctgaagagaacattttgggtctgcttatttacagttggagaaaatgtcttctagaggaaaaaggaaagacgaagatgtcagagcatcagatgacgaatctgaaacccacgcgccggctaagaaagtcgcaaagccagcagacgattccgaccagtctgacgatatcgtcgtctgcaacatatctaagaataggagagtctctgtaaggaattggaacgggaagatttggattgacattcgtgagttctatgtcaaggacggaaagactttgcctggcaagaaaggtatctctctaagcgtggatcagtggaacactctttggaaccacgcagaggatatcgaga

SEQ ID NO: 111641 - DNA, 494 bp, Arabidopsis thaliana columbia
gcaactgattcagcaacatctttgtggttttagtttcttgctaaagctatctaacaaagctttaccttggaggattaatggctgacgttcgcacacatgcacaccaggttcaagtgcaccctctacgccagcacgaaggaggcatcaaagtggtttatccccagagcgggccttcttccactcaggttctagcagtggtcgccggcgtaccggttggagggacgctgctaactctggccggtttaaccttagccggttcggttataggactaatactggcattcccgctgttcctcatcttcagtccggttatcgtaccagcggcctttgtgatcggtttagctatgacaggattcatggcgtcaggggcaatagggctcacgggactatcgtcgatgtcgtgggtactgaaccacatccgaagaagtagggaacgtataccggatgagctggatgaaacaaaacaagcgtttggctgacatggccgagtacgt

SEQ ID NO: 111642 - DNA, 162 bp, Arabidopsis thaliana columbia
gcccacgcgtccgaacacaagaaaacacacacaaatagcaaatgtgtcaacaagatcttcctcgtgtgcgcaactgttgccttctgcgtgctgctcgggaacgcttacatctaccgcaccgtcgtcgaattcgacgaagatgacactaccgaccaaataggc

SEQ ID NO: 111643 - DNA, 475 bp, Arabidopsis thaliana columbia
cccacgcgtccggttgcggttactgatctatcgcctacgcatccgatcaggctgggtctggctctcaatttctcggtgttttactacgagattctcaactcttctgagaaagcttgtagcatggccaaacaggctttcgaggaagccattgctgagctggacacgttgggagaggagtcgtacaaggacagtactctcatcatgcagttgctaagggacaacctaaccctctggacctccgacatgcaggagcagatggatgaggcctgaagatcttgtttgtggaagaacagacggttatgtaatttccccgcaaccatgaccgaaaatctagttcaaactcaagaaccccctttgctgtaaaacttgtcgaaaaaatggtctgtttatgacggttatgtgcacagctttggtgttatctgcttctctgttccaacctctgttttcttttttaaattatcatcatcttttgcct

SEQ ID NO: 111644 - DNA, 384 bp, Arabidopsis thaliana columbia
  unsure (1)..(384): unsure at all n locations
aannaagaaagcngaggggaccaattcatgttctttttttctgganggagcacaaagtcttggcgcgtgcctaagaatgcgtgccgcctcagacagtggtatagatatttccaaatgctcaatccattggtaccgtgcagcatctgagtctagtcgaagagaagctatatcttgtgccaaccggacagtatatgctccagaaccatttgatgtcgggcgagtgatacaagcagacattgtttcaaatggccagaagtttaccgttacaaccgatggtccaattaatactggttgtcgtaacaagagtatgctatgtttatgtacttctgtcaagtcaaatcagattatatgttgatattgtaaacataatggcttacttatcac

SEQ ID NO: 111645 - DNA, 445 bp, Arabidopsis thaliana columbia
ctctcaacttctgctggatctctccagcagactgacgatcttcttcggagagattcttaggggaccgaacgatcgatcgatccatgcttctcgggcaaacagaagtgcagaaatggaccacgacaagacaggatgccaaagcccacccgagggtcccaagctatgcatcaacaactgcggtttcttcggaagtgctgccacaatgaacatgtgttccaagtgccacaagactatgttgtttcaacacgaacagggggctaagctcgcatctgcagtgtctggatcacccagcaacatcctaaaggaaaccttcactgctgctatggttgatgctgaaaccaaatccgtcgagcccatggctgtctctgtacaagctgttgcagaagtagtagcaccagaagaagctgcagcaaaaccaaaggaagggcccagccgatgtactact

SEQ ID NO: 111646 - DNA, 368 bp, Arabidopsis thaliana columbia
  unsure (1)..(368): unsure at all n locations
ccgtccgcccggacgctttacaatgggtatcgattttgatctgctggagggtaagagcanagaagaaccaaaagtgactagcttcccaacgtcgcgattgattggtctaccatcaagctcaacttgtcaagctttacacaggtttctggtggaggagaacctcagagcaacgttcaattgcagttgatcctaaagaaggcttttcattgagcaaaagtcaacaaacgctcctctttctctatctaaggctcgtcgagttcatgactggcaaggaagataagattgctgttttggttggaaccatcaccgatgatttgagagtacacgagattccagctatcaaagtcactgccttgaggttcacggaa

SEQ ID NO: 111647 - DNA, 503 bp, Arabidopsis thaliana columbia
gaatacccgggatgagaaatagttatactgaatttgacggaacatatgtaacacaatttacccacaaatgagtaactagatcaatctaatttttttatacaaagtcaaatattaaataaaaaataataaattttcatttgtagtaatatttttatacatataaactatagatgactcaaaaaattattaaataaatacgaaattctcaaataatattataaatatagtaactaattattacaattaagtatcattgttatgtttatttatggaactttaatcgatcaacactttagtttagtttcactctttgattctcaaaataacatatattgaattatacataatcttattaatatatatatatatatatacaaatctaagacaaaaatcaaactacatgaaaataacaaaagtaatcaaaattttaatatgtaatataaaaatatcttagttgaatcgaaaaaagtaatgttatctaatatattcaaataataatcaaa

SEQ ID NO: 111648 - DNA, 481 bp, Arabidopsis thaliana columbia
  unsure (1)..(481): unsure at all n locations
aaacattatccgagtccaaggcccattcagtgtcattaggccgcctttgaggagtcagagaccgcaggaggaagttaacggtttagaagagaccatatgcagcgcgaggtgcaccgataacctcgatgacccatctaatgctgacgtatacaagccacagctcggttacatcagcactctgaacagctatgatctccccatccttcgcttccttcgtctctcagccctccgtggatctatccgtcaaaacgcgatggtgcttccacagtggaacgcaaacgcaaacgcggttctctacgtgacagacggggaagcccatgtgcaggtggttaacgacaacggtgacagagtgttcgacggacaagtctctcaaggacagctactttccataccacaaggtttctccgtggtgaaacgcgcaacaagcgaacagttncggtggatcgagttcaagacaaacgcaaacgcacagatcaacaca

SEQ ID NO: 111649 - DNA, 312 bp, Arabidopsis thaliana columbia
gaaaaaccggaggaccgattaccagttttattcttaacaacacataaccggaaacagggtgcggttttaacaacctctggtgggtggaacaacgtctgttaggcaagtatacaaaaatgatccgtgactacaccaaaatgatccactataaaggctacactacaacgtctcagatgcgaatatctgcactgtgaggacccatgattaacactgataacctcaccacagctgaccggtttaagtccaacctgggacgggctgccaacggttatttctacaccttacccatgtcgtagaacatccaactcagaa

SEQ ID NO: 111650 - DNA, 175 bp, Arabidopsis thaliana columbia
  unsure (1)..(175): unsure at all n locations
tctctttcgagattctttggaggattatataacaaatcagtcccagacacctcttttntnacaccaatatcgctcttaccacaaaacaaagaatctcagattcgagaagcaaaagaagggaggatgggttttactttctcgggaaacccttcccttntcttcttcttcttcttct

SEQ ID NO: 111651 - DNA, 341 bp, Arabidopsis thaliana columbia
ccggcggacccacgcgtccgagatgctagagacagacttggagatcaatgttgcagccgataagtttcaccacatgtgcggtgggaaaccacacgatgtgggaaagcaagtccaggcaacattcatggatgagatctgcacgaaggctactggcgcacagccggctctatcgcctaacggaactacttacatggatgggaggcaaagggggctaaagagaggatctgggcggaggagccagataagaacttgatcacgtttaggggtatagaaggcgatctgaggaaacggtaccaaagcttctttgctcccatccaggtgacccctaagcctggatgccc

SEQ ID NO: 111652 - DNA, 428 bp, Arabidopsis thaliana columbia
acggcacaaaccaccaccttcaagaactagctaccttgctggatttgaaccaaacctagaacataaatgaggagacgtggaggggtaggagattcggcaccatgttgatcctcaggtaggtatttatcctttcccacaatttgtaaaacgttgttggagaacccggggtgattacaagacactacaactttgctctctatgtcgactaagaaactcaacccaaaacataaccctaaatgatagcggtcatcaaatttcgacactgtcaggaacttgctctatgaaatggcttcggactctccatcttattcgctatccatacctgaaagctctgagcagcaaatatacaaagttgttgcgcttctctagtcattgacaaagtcgcacaacaataagaacgaggcgatcttaaatattaaccaaagaga

SEQ ID NO: 111653 - DNA, 368 bp, Arabidopsis thaliana columbia
agatattattcacagagaggctcatggctgaggtaaacggagatttccccgttcctagtttcgccgacgggaccggatctgtttccgccggacttgacttgctcgttgagagatcgattcacgaagctaggttcacagaggcagatgcttcaactcaacttactattatctttggtgggaggtgtagagtcttcaatggtgtccctgcacaaaagggtcaagaaatgattcgcatcgcttttgctggtaaacagacgcagaatgtgacacgggtcaatccaacacttgacagaggtctttgtttctcaactggagctgatcttccaattgctaggagacggtcgcttcaaagatttctcgagaagaga

SEQ ID NO: 111654 - DNA, 449 bp, Arabidopsis thaliana columbia
gaagaatcaaaacaattaatcgcgaggcttgagaatcaatcaatggatatgcagaatgaaaacgagagattgatggtcttcgaacatgctcgcaaagtagcagaagcaacctacgtcaaaaaccctttagatgccgagaatttgacgagatgggcaggagctttacttgaactatcacagtttcagacagagccaaagcagatgattctagaggctattttgaagctgggagaggccttggtcatcgatccaaagaagcatgatgctctttggttaattgggaatgctcatctttcatttgggtttttgagttctgatcagacagaagctagcgataactttgagaaagcttctcagttctttcaacttgctgtggaggagcaaccagagagcgaactctatcggaaatcattgacattggctttcaggctccagaactacatacaggc

SEQ ID NO: 111655 - DNA, 185 bp, Arabidopsis thaliana columbia
ctctgataagcctgacactcggcgctggctaggttggcaccgtaggattgttgcatgagaaccacaatacttacttcgttaaacggttttctgattctgctgtgttttggcttcagcgtttgctctattcccttgagagtgggatttaggtgacaacccaaaatactaggtttttgggaacccac

SEQ ID NO: 111656 - DNA, 394 bp, Arabidopsis thaliana columbia
  unsure (1)..(394): unsure at all n locations
attaactaaagagctcttttacttggcgccacatctctcatctcgcaatggggccgcctcgacccaatggctctgctgcctcttcctgggctttgacggcggaaagggccnnngttaagctattcctccggccggcccttccgannagtattnntggaacnncgcgccgaatcaaaccatgcgcccaaagctnctccannagccctnaccggtctcattccgnngtcagctcaaatggtaccgcgatcccgnatccgagtcaaagtacccttgggtccccaattctccggtgaagggcctccgaagctactctcaactggagaagttctcccggtggattacccgggtgggacaactgctncggtctatcttcgccgatccccgagaaccttcg

SEQ ID NO: 111657 - DNA, 440 bp, Arabidopsis thaliana columbia
caacaatggcgtctcttcaacaaactctattctctcttcaatccaaactcccaccatcctccttccaaatcgccagatctctcccactccgaaaaaccttcccaatccgaatcaacaacggtggaaacgccgccggagcaagaatgtcagccaccgcagcatcaagctacgcgatggcattagcagacgtcgcgaaaagaaacgacacaatggaattaacagtcacagacatcgagaagctcgaacaagtcttctcagatccacaagtactaaacttcttcgcgaatccaacgtcctcgtcgacgcgaatcggatcaatatcgtgacggagatcgttaaggagtttgagttggtttacaataagctaacggatacacaattggcggaggttaggtcggtggtgaaattggaagcgccgcaattagctcagattgcgaaac

SEQ ID NO: 111658 - DNA, 394 bp, Arabidopsis thaliana columbia
acggaacaacaacactaagcaaaaaagataagctcaagccgagagagacaatggcatcaacatgcacgagctcaagcagcgggcggaccccaacaacattccttggccagactaaagccttaagctttaacccccttcacgatgttgtctatctccgatctcccaagtaccctatgggaaatgatctttggtatcgacctgacaaagtgcattacttcatacccttttgcgcctaaactctctcttactctgaaggtcacaggtccttacggttagggcactgacactctatttttctatcccgagaccttagctttggaccatgagctagaaattattcacaacctatgggcgcatgctctgagccctaagctgcgtttttcctgagctattg

SEQ ID NO: 111659 - DNA, 345 bp, Arabidopsis thaliana columbia
gtcgagaaaccgatttataaccatgtcactggacttcttgacggatacgaccttattcaggcttggaacattcttgtgatcgacggtgtcaacacaatgtttgatgaccaagtaaaactcttactacacttcagtatctactttgacagttacagcaaaatcaaattatgttataaaattaacaggcgcatggctgaaagacgtcacaatttgtagagccttaaagccagtatcgaagcccgacagcccctcttagatccatacatcctccacttaaagcagaacgcaaattccgtcatagaacggattcctacaactctgatcccatattacaactaatggaaa

SEQ ID NO: 111660 - DNA, 420 bp, Arabidopsis thaliana columbia
gccgacccagacccacgcgtccgataagaagcacaatcacatacatatagatttatatcaaagataaagataaagacacggccgcggtacatataagaaggacggaaggggccaccatgattccggtgatcattctaagaaacatcatgataagaaaaggaaacacgatggagatgaagatcttaatgacgttcataggcacaaaaaaaacacgcataaaagctcaaagcttgatgaggtgggtgcaataagggttgctggctaaaaaagctgtagacatttcaatttctgtattttgcactcgcgtaggtgtcattggttactttagaagcacttttcaacttactgtagacagcttattatggtaaaagcccaaactttttaatacattccttgaagaaaaaagggtttatttgacaa

SEQ ID NO: 111661 - DNA, 302 bp, Arabidopsis thaliana columbia
aaataacacaacttaagaaaagagtttaattctcatcgcggcaatcactatcgcgggcggggttaatatatacaggggcttgtaaagacttacttttagatcacttactgaatcttaactcttcatcaaccctattcacctgagctataaacccaaatccatttcctctaatgatgtggtggctaaatattgatacaaaaatctttactttcgtcttaaaacttttgcgtaccacaaccggtttatcggacctatacggctcttaggctccttggtctttacaaactcttcatcacaagttt

SEQ ID NO: 111662 - DNA, 271 bp, Arabidopsis thaliana columbia
ccgaccgaaaccggccgacccacgcgtacgaaaaaaacaaaaacaattacaagcttatatatacgcgaacataacaaacacaggtggggctaattaaagaggcgggggggataccaacgagcagaggatctaaaaaatccgaatattcaaacgggtcaacacacctacatgaaaaagaaaatgacagttgagcttactatggaattcacaacctatgattactggtccaattggagagcttcactatatgctatatggaccatgaaatgaa

SEQ ID NO: 111663 - DNA, 304 bp, Arabidopsis thaliana columbia
  unsure (1)..(304): unsure at all n locations
gggccgacccgacccacgcgtcccgaataacaggcatttaactctcaactttttttttacgggnggacagacgatagcgggccggggacgaataacaagtgcagagaggggcatgaccgatagccactatgttgaccatgattatctgcgacgttctaacgcttaacgtataaagattttaacggcggagctcccaactctgtgggtacaccttttttgaatcaacatgccatgtggtaaatcaattggcgttgagacgaaacaacggaaactgagtcttaccctgaacgaccaggagagcctg

SEQ ID NO: 111664 - DNA, 143 bp, Arabidopsis thaliana columbia
  unsure (1)..(143): unsure at all n locations
atcggagagaagaggagatgttctactagactgatatgacagagagtgacacttttcttcagaaggaaggctannncaaggggaatatgccattgaagctatcaagcttggttctactgcaatgggagtaaagacaaaagaag

SEQ ID NO: 111665 - DNA, 343 bp, Arabidopsis thaliana columbia
  unsure (1)..(343): unsure at all n locations
cgaaaacccggccgacccacgcataccgcggacgcgtgggcgacaatgtactctacttgttgcatgcgactgaggaggaagccggtcggagaagatatattggtcgtcggggtccttattttacttggggtaaagggcgtgttacgctgctcggggattctatccatgctatgcagccaaatatgggtcaatttttatgcatggccattgaggatagttttcaactagcattggagcttgatgaagcatggaaacagagtgttgaaacgactacacctgttgatgttgnttcctctttgaaaagatttgaggaatctagaagactgagagtcgctattattca

SEQ ID NO: 111666 - DNA, 378 bp, Arabidopsis thaliana columbia
tcggaaaacccgggccgaccgacgcatacgcaactcaccaagctcagttcaaaggccgatttggttgcagaggagaaacttggatcccacgtcgatgttcttgcatcgatcgagtactgaaaaaaatcagcatctatcttttggtttaactcttgttttggtttttatctattcagattttgttttcttccttgtatcactgttgaagtttatcacctcatttcaattttatttatcaattgatacttcaatccaaaaaaaaaaaaaaaaaaaaaaaaaaaaaataaaaaattatgggcggcccttctaaaggatccaaacttacctacccgtgcatgccacgtcattacttttctatagggtcacctaaattcaaat

SEQ ID NO: 111667 - DNA, 282 bp, Arabidopsis thaliana columbia
cctccacttttttttttaacaaaagcaagcatacacacacgagggggtatcatcaaaacaaggcaggcgcacaacaaaataaatgccaactacaagaaaaccgaaacctccccattttaaataccaactgaaatctaagctataccttcaaatatctcagaccccctcaactcctgtactaatcataaaacacacaaagatactctaaagaaacttttacgatctaccaagaataactacaccgttttcgctaaccataataattttatctattgaaaactt

SEQ ID NO: 111668 - DNA, 381 bp, Arabidopsis thaliana columbia
accctaattgctctctgccttctcacagacctctcgttttccttcctcgtcttccttctcgctccctccgttgccgcgccggcgctgatattccccttggtgacggaatccgattacctcgagaagcggattcaacctctgacacggcgaggtctcgggatgtttccgtcgccgccggtgggaatggtgaaggtgctaagtggaggaagaggaggttgctctggtcgaaaagtggagagagttacttggtagatgatggcgacgcgcttcctcttcctatgacttatcctgatacatcccctgtgtcgccggatgtgattgaccggaggttgcaatgtgatcctgtagtcgaggattgctcggaagtggtttttgaatgga

SEQ ID NO: 111669 - DNA, 330 bp, Arabidopsis thaliana columbia
  unsure (1)..(330): unsure at all n locations
ggccgagccacgcgnccgcggacgcgtgggcggacgcttggtctattgttctatcttagngaggatatctacagaatgagaggtgttctctccgtacaatgcatggactagagattcgtgtttcagggagttcatgaaatatttgaaggatcacctgaccggttatggagaaaagatgaaacaagaaccaacaagattgttttcatcggcaagaatttgaaccgtgaggagttagagatgggtttcagagctttcttgatttgattatatgaccaaatatttaaaattatttccattttgtaattaactgttcattatattttttaacat

SEQ ID NO: 111670 - DNA, 232 bp, Arabidopsis thaliana columbia
atcaaatctatcttctaaatttctcatttgatgtctcttcatgcctctggtgaatggggagctttgataagtgttttgcgcggggtctcttgcgatgttgttttttctttgttcttcttgcgctctattttcataaaggaagtttgtttctttctcatcattactcttttttttctaagtttttaatttctttatttcttttggtaaaattgaattatctgtcttttttttt

SEQ ID NO: 111671 - DNA, 154 bp, Arabidopsis thaliana columbia
accaaattcaatagttggctggaggggaaaaaggaccaaaatttccaaaggagtgagccaagaagggcaaacccaccatgggaaagactacctggatccctcaacaacttctttttttgacatgggtgagctcaaatcctggtctttctacaaa

SEQ ID NO: 111672 - DNA, 384 bp, Arabidopsis thaliana columbia
gagttacctccggtagcgtgctagcttttttcttttccccgtcttttgggccagaaagtcgagtgttatctcggatatgtgaaaacacacgaacagagaaaaaatgcatcattttcatgtgacagagagagagagagagagagagatatgatttgtggtcttggagttgttatttcacggagacctcattaactttcaaagctcagtttccaagttgtggctccaaaaaaaaaaaaaaatataaaaaaaaaaataataaaaaataataattaaaaaaataaaaaaatttaatatatatttgatataaataatataaataagggggcggccgctttagaggatccaagtttacgtacgcgtgcttgcgtatgtaaatagtttttt

SEQ ID NO: 111673 - DNA, 305 bp, Arabidopsis thaliana columbia
  unsure (1)..(305): unsure at all n locations
gttcgattcatatctgcgcttagcttttttttctgtcaatctccgncgtgtttaacaggctggtcttctttgacaaaatggctcgcttcccataataagcagttctctctcgaccattttcctcagatctcacgtccgatcaaagtcatctcgagaagcgccatggagactacggcggatacaattaccggctgtgttcccaacaacactatgatattattgttcgttgagatggttgtttgttactatcagcacttggcatgtattttacatcttcttcgattaattcttgttagaatgcaatt

SEQ ID NO: 111674 - DNA, 467 bp, Arabidopsis thaliana columbia
  unsure (1)..(467): unsure at all n locations
attccgatatgaatgagttcgtcgccgctgtatagaagctcgtgaaagacgtanggatgcggggcggtgtaggttttggcacggcagtcctccaatgggccgcttcaatcttcgctatttatctgttgatattggatcgtaccaactggaaaaccaaaatgttgaccacccttttagtaccatacatctttttcacacttccttcggttatcttccagttctttagcggagactttgggaaatggattgctctcatcgcgatcatagtcaggcttttcttccctaaagaatttccagagtggctagagattccggtagcattgattcttattgtggtggtgtcgccgagccttatagcttggacactaagagaaagctgggttggagcagtcatatgtctaataatagcatgttaccttttccatgaacacattaaagcttcaggtggattcaaaaactcttttact

SEQ ID NO: 111675 - DNA, 401 bp, Arabidopsis thaliana columbia
  unsure (1)..(401): unsure at all n locations
aacgcaagccatccaacaatggtgtgatggttgttatctcttccacgagtccctattttgatttgactagaacgcagcttttatgagagatgcggtgggctggaanagctanatatcaatccccgtcttcatattcgcannagtggccatgtaatgaagatcgtgaggaatataggttcaacatttgaaggaaatgtgatattggctaccttgtgtaccgtgatgaactgtatgtggtctcaggtgacatcaagaccatgtccgttaaaggtagccgcacagggtggatcaacatgagccataactggggagcttcgtaccaagccttttcttctctctacggtcagtctctctcgttccggctcacctcttacaccactcgtcagaccatatacgcttat

SEQ ID NO: 111676 - DNA, 444 bp, Arabidopsis thaliana columbia
  unsure (1)..(444): unsure at all n locations
ctccgttgctagaataacctcaaaattctatttccctacagaaaacgcagatatagagagcgttttattaaacagtagagttcgaccaaacaaattcctanatagacaaccaattttaacattatcttaattatacaattacttcatataactattaccatttctttttttttaacctttttatcattacaatattatctttctttataactttcttctctttatttatcttttcttttcattttttctacatctcttttttaacttttattacattctaatattcatctaactatatttcttttgtattatttcctttttattcttttacttatatttttttcaattttttttttttatttttatttttattctctcattattttacttttttatcacaactcatttcattctactttactaatctttctccttctttatttt

SEQ ID NO: 111677 - DNA, 460 bp, Arabidopsis thaliana columbia
catcttgcatcagagatcttcaactgcgaaataactcgagtctccgatgaatctgtgaatcgaaatctgttcttcgatgcatgaccattctgaaatatcgagttcgtactaaacgaatcactcaccatcaacctcggagcaaccaacgaaccaccggaattaatcgccgtactatcttcttcatgagcctctcgacgattcgtcatcatctgtagctgaagaacatactcaagatcccaaatcacatccctcatactcgaacatcacccattccgatagattcacttcttcgtgaggaagataaggatctatagctggtctcgcgaacagtacctcgaggaggacgactccgaatgcgtaaacatctgatttctctgttaatttatgtgtttggagatattctggatccaagtaaccgaatgttcctttgatgtttatgctgatattgctttcatcttga

SEQ ID NO: 111678 - DNA, 327 bp, Arabidopsis thaliana columbia
gtggaaatctgtatgatatcagctcgagggctccgtgtgggaattggaatcggatcctctctactgaaacaccaatggtacgccgttggttggcttgatccagaagacaaatactgcaccacaatcgatgcttcaagagcagacaatcctgtctggagaacaaagtttgctactttgctcgatgattccacgattcaggattcgaagttggctttgcaagtcgaggtttatagcagagaacccttgttcttaaggaagaggcttcatggctctgctactgtttctttgaaggagtttctgactaagtataagcaacaacagagttct

SEQ ID NO: 111679 - DNA, 466 bp, Arabidopsis thaliana columbia
cgagtctcgacgaatacgactctcttcctccgatctcatcaaaaactctttcgctaaagctctgtttctgggcgttcaaacaattccggagtttgtcggattctcaacttccgtatacggagaaggtcgagcaacaagtagtcaaatttgtataaattcaatgactgaagaaaacgattatggaggtaatcagaagatacttcatcaaggaagtggaactatacctgctctagcggatgaagaactgatgggagacgatgatgagtatgatgatttgtatagcgatgttaatgttggtgagagtttcttccaagctcataatcagcctcaaccaccagctcaggtcaatacgagtaatgcaagtcttcaagctcagaatagtcatgttgctgctgaaccgaggatgggaattgtatctggaggtacagttgaagggaagtatcgaaatgatggggggcataatgga

SEQ ID NO: 111680 - DNA, 437 bp, Arabidopsis thaliana columbia
gtgaaagtggctcctgggacggtggttagacattctagagaggttgggagtgaggtggagggtgaggaagttctttcaaacgattccctattattacggattctcaacttccgtatactgagaatgtctagcaacatgtattcaaatttgtataaattcaattactgaagaaatcgattattgaggtcatcagaatattcttcatctatgtagtggtactttaccttctctagctgatgaagttacttttctagtcatctatttattttatcatctgtatatccttttttatttttcctttattttcttttatgctcataatcattctaatctcctaattcattttaatttctataattctttttatatttttctttattttatttttttatatttccttttctctatttttttctcttttactttttatttatttt

SEQ ID NO: 111681 - DNA, 261 bp, Arabidopsis thaliana columbia
  unsure (1)..(261): unsure at all n locations
ggccgaccaggcgaccgcaaaatcaatcctctaatgtatttctncaatttatgtcttcttctacttcaccaacccaatggctggtctttaactatcgtctggggcgcaaacccaacttctgatccgcatcgatttccatggcagccaacaccatttctctttccaacgtctccgccttcaagaatctcaactcctttcaaagccgtgcctatattgctccaccaactattttttgccctgcggcttttgcaaagtctatac

SEQ ID NO: 111682 - DNA, 429 bp, Arabidopsis thaliana columbia
  unsure (1)..(429): unsure at all n locations
ggcgaaggaggtgctgattgccgtccgattcaaccgggtgccacgtgttataatcctgaatcgttagaagctcacgcttcctacgcgttcaacagttactatcagaagaacgcacgtggagttggcacgtgtaattttggtggtgcagcgtacgtggtctcgcaacctcctaagtatgggaaatgcgagtttccaacagggcattgaaatggatatagagaagaagaggatcgtgcggatttatttacgttatttattttgatacattgttcttttgtcattcgagtatatgatttgcgtatatttatttttattattgtatatttggttggtttcatcggataaatagtcagattttctttcccccttnaaaaaaaaaaaatatttcttattttatatttttttttcattttatatatatatttcttt

SEQ ID NO: 111683 - DNA, 448 bp, Arabidopsis thaliana columbia
aacatgagagagacggcgaaaagcgctgtcgtattagatgatgatgatcttgatacaggcatcgcagtcattatatcaagagcgggtcgctactcaagattgcaggatcgtagatgaaccgaacgtgcaacgtggtacaataagctaccatactgactgatatcccatactccaattactgcgttcctgtttgttcgcctagcaggattgtggacagtgctgataacatgggagaagtgcttattgtgaccgtattgagaatgccccatactcgtagaaaatgcgggaggcacaaatgtgcaatattctcggacgggtcactcttgatgccaagacagctaaagcgtttaacgaaaagatcgatgatgagtaccgggtcaacatgatcctcgacaaccttcctctggttgttccaattgaaagagtcgaccaggcgtctccctctgtt

SEQ ID NO: 111684 - DNA, 181 bp, Arabidopsis thaliana columbia
  unsure (1)..(181): unsure at all n locations
atctcaaaaagatcaatttatttagaccattatatttaccgaaagagcttctaccgcggcgtttatttaaacacggctgaccaaacccaanccncttcttttcttaaaccattaccccttaaaccatccaatgcttttttttcacactcccaaactcctctaattttctacgtatcataat

SEQ ID NO: 111685 - DNA, 390 bp, Arabidopsis thaliana columbia
  unsure (1)..(390): unsure at all n locations
cacgcgtcagctgnattactacccatctcttctatcaccctttacattccaagacgctgtaaatacctgtggcgcgattctatattaaacaggacggcattacactcctnctgccaacaccaaacatgataaaattttacctatcaataaacttcgacactagacgcttgccactcatttttattaacacagccagtatacaacccgcttatgtaccgactatactcatcttagacattttccatccgcctcatgactttagaaactaacatcctttgatctttataccaccatttactcgcaccttactatggttataggcgatgatatgatcaagatccctgcttcatatcataacttgagggattacattcttatataagtttcttt

SEQ ID NO: 111686 - DNA, 255 bp, Arabidopsis thaliana columbia
cgcgtacgactaagctgctgcaatcattacccattacatcctatgccgaggagtgtttataaggtggtttcagtgttcggattctgtgggtcattagatgtccatataggtcttggttactggtttaattggggttttatcaaggaaataaagagtggttagggtttgcattttcgtgtttgcagatggcgagcgatatcatcattgttgaggatatctttccggtcgatcagttagaccctgatggcaaaaagt

SEQ ID NO: 111687 - DNA, 336 bp, Arabidopsis thaliana columbia
aaagggcccattccaggccttgccaggaccaaaggttcattgccttgctcaagtccaaaggttgggttattcttgggccagaggtcgaagatttcatttgggaaagcactttttacgttcgtaacctccttaaatccaatctaaatgccatttaaaatgtgtctgttgaatccaggccggccatgaaagactttggtaggagactggggaatcttgctggggatttgttggatctactgggggggaatttagggttagggaaggggtttttgaagaaggggtttaatggaacaaatggcccaacctttggaccaaagggtggcatttttccccctt

SEQ ID NO: 111688 - DNA, 430 bp, Arabidopsis thaliana columbia
gggccggaatccggggcggcccccgcttccgatcactttttaccaaatttaatcgccgccttccttggaactcaaatccgttcaaattttcggccattcagttccaatccagggttaaaattcaacaccctattttccagaccaaacctccaaaccatttggggcaattccctataaccatggggcgtgttttttaaaccccccccttgacccaaaccggaaccacattccggaacccaaaccactggccaaccttaaccttttaaatatttttggtaataatgggccaatccatagcgaaactcctggaaaccttttactacgccaaaaccaaccgaggcgattccaccgaaacccgccaaaccgttggcgttgggactcaatcttttttccaaactgttggtttccctttcctttttttcccgttcct

SEQ ID NO: 111689 - DNA, 457 bp, Arabidopsis thaliana columbia
gaggtccgggcccggatttccgggttggcccacagccgtccggaggaggttaaggcaaaccacttccaaccgcattcaccttttttatggcctcctttttaaatctaatggaattcttgaccttttaagagcctaaccgccgggggatctccaggtcccttttaaaggggggggtttggttggttaaaagggatttaaacttacaacaccatccttggatggagggggtcccaaatctgcaggttttaaagtggttgcaaggtttaaaatttagggattttgggggggagaccttggttgggttgcattactacgggttcctaacaaatgaaggtttggcctttttaaggacttaccttattttcccatctgggatggttcctgctactttgaagaagcaccagaggcctttgggtcgaccttttgaaggtgtgggggaccgtcccgggggccctcc

SEQ ID NO: 111690 - DNA, 468 bp, Arabidopsis thaliana columbia
ccggaggtccgggcccggatttccgggttggcccacacccttccggaggaggacggagaaggggtccctgcctttcttggcggaattaaaccggttggcgccgggggttgtgtttttgaccaccctggccttgccggccgtggggctgcaggtttggttggccggcccggccaaagtgttgtcggaggaagggaaggccaagccagggcaggtttcctttctgtccaggttagatggggtgggaaggaccagcctgttaacagtaactggttcaaggaccaggctttacgcccatttggtaaccgcccttgcgcccggttggaaccgggcccacgttccattaaccaaccttggggactccttaaggactgtttttttttttggaaatttaatggttggcttgccgaatggtttttatttggtggggaccgggattgggttccataaacgggagtttgtttggggacc

SEQ ID NO: 111691 - DNA, 399 bp, Arabidopsis thaliana columbia
tccgtttttggccaaatctggtaaccactgcctgttaactcgaagaaggttccaggcgtaaaattggtgggcgactctgacctggtttggacggcttttgctgccaagacagtccgtttctgccggaatcctggggttgggaatattgctggggggtttccatggaatgaccattctggggagggccaggctgtacctgggcatccaacaaataaatacttgggctgggatttttttgatggtccatggggcttttacaatctggcctttggctcatgccttggccaggtttcagttgtttcaaggaatgtagattccccggctgctggttttaatcccgagggtctaattctcggaaccggtccttctaaatctgttgttaaaatttgggccgttaaa

SEQ ID NO: 111692 - DNA, 351 bp, Arabidopsis thaliana columbia
acagccgtccgttctaatctcctttccttcaatggaggttaattaaaggattccgatattggcaccataaggtgtccagcattcttccttggcgggccaaccggttttaaagccctccaacgaactcttccgaagggttgttgtatccgttggtggcctgttgaccatccgtgttccctgaaagtttactcctaaaagcatttgttccggaccaacccgtccaaagttcttaggacctttttcggggatatcaccgtcctacctaaccgtggatttcccctggtacctccgattgtgccaccatttgacttttggttgacccggtacacatcgtctaaaaccgggggcttg

SEQ ID NO: 111693 - DNA, 282 bp, Arabidopsis thaliana columbia
  unsure (1)..(282): unsure at all n locations
cgggccgggaatnccgggtcggaccacaggcgtccgttcgggggaccggttttgcttgattgggccgccggttttcctaagaggggcggggggtttttaaaattaatttaaaccattcttttacaaaacctttccaggtacccggggcttagttgggaaattccaacaaggccacccttggccggggggcgaggggcgcactcagccatggcgggctttactttttgggcggccgggggactttaatcctttgcattcagatccagatttggcaaaacttgc

SEQ ID NO: 111694 - DNA, 372 bp, Arabidopsis thaliana columbia
cggggccgaccacacccgtccgaacccaaccactaatttttcacacatttggggagaaaaaaccagagcaggttttttagagacctaagggcgatggcggcctccggggctgtcctaaggggcctgggttcttcgttcctaaccggaggcaggagaggtgccaccgatttggcaggcggcgtaggccctggagctaaaagggtgggcaggaaacctttaatggtcgttgttgcggttgttaagcctaagaaatctggatcccctgccgttaagggggggggcacctcccttgcccctgaagggctcgtgggctcgttaccagaagatttcggtttcaccccatgggttttggggaaggacccggcttttttg

SEQ ID NO: 111695 - DNA, 439 bp, Arabidopsis thaliana columbia
tccgggtccggatttccgggttggcccacacgcgtccgggtgagggaagggttccgctggcagttttaaacgtcctgggaggagtaaaagggtccccgtttgggcttgacccgaaccgggtggttccatttttgaccgaaaccgcttaaccgcccaatgccggtccaggcatggtaaactaaaaggccttaggatggcctgtttcgaagctttgagttaggtttgaagaaggggggattgggaggaatcctttaagggaatttatgagggggccaagtggggttattgattggattttgaaccaaccatgtgggatcatttaaataactcctttaaggggttccatgggtggtgggtcttttagacgattccccactctttttatttaataaattggctagggcccaaaaattttaaggtattattttttggagttatt

SEQ ID NO: 111696 - DNA, 128 bp, Arabidopsis thaliana columbia
gggtcgggatttccggggcggccccaccgtccggaggctgcaggggggccttttccaggggggtcgtagcagtttaatcccgccgtttattccgcgattcaccaaaccccattgttttatcgccgcct

SEQ ID NO: 111697 - DNA, 476 bp, Arabidopsis thaliana columbia
ggtccgccggcggtccgggtccggatttccgggttcgcccacacccgtccgcgggtcatcaccggttccaggaggggggaggccttcaattcctccaatctttcggacctggggtgtaccccgggcgttttttcgttggatttcggccaagggatgttcgaacctcgggaaaccgctctggccctcgtggttggcaccgggccattgggtcctaactggtcctgcggtaaagatgggtcaaggatgctctaaaacggccttttccgggccgggggaggctttgttctgttacccaccgcagctgggttcaagacccaggctttgttgaagctcgggccaggggtccggcctcatgttggctcaaacgacagggcctacttgggctgcttccaaatgggggccagggttggtcatccaggcttttttttaaccaattccctaaaaaaggccgcagttggggccctaaccaagaacct

SEQ ID NO: 111698 - DNA, 323 bp, Arabidopsis thaliana columbia
gaattcccgggccggccacacccttccttaaaaaacaagtttttaaaaaccatcctttttttaaccaaaccaaacctgtccaaaggacgggattaaaggccttggtgggggtggttaataaaattggcctttttgttttggggtcaaagtgttctaaggaagttgttcctgccattaaaggaccttttttctttcctaacctttcatggttcccgggaaggaaagttaattggggaattaaaattggaaagccccccattgtcctcttgaaggttactggtaaatgtggttcttgtcctgtaaaaatggtccctgttccaaaa

SEQ ID NO: 111699 - DNA, 363 bp, Arabidopsis thaliana columbia
gaggagaaggagtgggcctttctgcaccacccatggggcctccttttcaatagctttaactagagggttttggccatagaggaggacccaccttccgttttttcgccacctttgccggtttaaaccccagggccgacccgccggattttcctttcctttcctaatcctttgttttgggtaaagactggaaaaaggtggttaccaggactgttgcacccttggcccttagggcttcaaccgccggtaaaaaccctgttttccctggacctacttttaacaaagtttttggggttaaaggctttgcatcgatgttcctcgaaggggtccttcttttaaacctcctttttccttccagcgaacctg

SEQ ID NO: 111700 - DNA, 475 bp, Arabidopsis thaliana columbia
ccggaggtccgggtccggatttccgggttggcccacaggcgtccgtggggtggtaaggcaggggccggggcctcctttgggtccgttgaagccaagccggggggccgaattttccgcccgggaccggcggttcaggaccgcgacccagttcagggctgttttggattcctgggttccaaaacgaccaattaaaccaattcgaggcgacccgggttttccgggatctttttttgtttccgccaaattaaccgcccttcctgaagctgccaaattccattttttccagtaacaaactaagggtaaggttttgggggggggggattaatttgcagttaaggaggggttccgggaaccagagttttactcaattttaacggcctttgttaggcaccataacacgaccggaggggggttattaatgggggggaaggaggacaccggtgaagattccggggccgtaaccgccgccgaattc

SEQ ID NO: 111701 - DNA, 275 bp, Arabidopsis thaliana columbia
tccgccccagccttccttaaaattttaaaaaggaaaaaaaaaaaaagttttctttatggaacccaaaacccctttagggcctgggttttaaaaaaaaaaagccggtttttccattttttcaaaccttcccccttttttaactctttttaatctttaaaatttgcccttctccttggtcctttccaatccctcagtaccaaaactctaatccttttatatttctctgtaccaatgttttgtctttcctaattcttaaaaatttgtattaacctttc

SEQ ID NO: 111702 - DNA, 228 bp, Arabidopsis thaliana columbia
ctaaaaaaaaaaaatgtcttcaaaaacccttttctttctctctaacccaatcaacctccacccgaggcgattcttaatttaataatgcagcccattaccccctttccatctcccaacctattcaaataactcctcaaacaaacctacctataactaatcccaaaccttctctttccttctctatatcaattatcccactcttattcccacctctcactaatatccaat

SEQ ID NO: 111703 - DNA, 340 bp, Arabidopsis thaliana columbia
gtcctaaataaataaaagaggttccttctaataaaatttattttttctaatcctcccttgcaaactgggggacccttattgccatgggggggcctcctcttcaattcatccattcccagggctaagttaaccccaattttttttgccattccatttccaaccttttttaccatcttccggattcccatataaaccaagttaaaatcggaccctcttttcgctgcaggcatcctttgtttcaactcccacacctgttccgctaatggttgtaatccatggaccctgttggccaccacaccatcttttcaaccataaaaagatccgtctccaaccccaacct

SEQ ID NO: 111704 - DNA, 409 bp, Arabidopsis thaliana columbia
  unsure (1)..(409): unsure at all n locations
aacgggncgggatttccggggtggaccacacgcttccgccgattagttggaccggaaggttttgggtttttttcgggcccacctgggaactttagtggacattggcttggttggaccacacccatggaagatcagaattctgcctccaccaggcttaagtaatttttaacctccatgggtttaaaaaggtccgctcaaaaggatgacttagccggggggcagaaactttaagccaaattttgttttgacaaattcgtttaaaacatggaagcttaccctccaaattgggacgccgagttaaaacctgttcttgtttggtccactcaattccgtccttggggggttgccccgccccctaaagtcaagaagtttggtttgggatcaatcccaaattggcccggggggttac

SEQ ID NO: 111705 - DNA, 203 bp, Arabidopsis thaliana columbia
  unsure (1)..(203): unsure at all n locations
acggnncggaaattcccggtccgcccacacccttccttcctatttttaaaccaaattaaaccttgattttttgaactaaaaaaatgccttcttgggggggttcgaaaatccttgggccgccccttaacttcaggccatttccaaaatcgtctgttccgttgccttaaaccccatccacttccaaaactgttgttttttttttt

SEQ ID NO: 111706 - DNA, 303 bp, Arabidopsis thaliana columbia
ccgcgccacacccttccgttaaaagatcctaaaaaaattgaccattaattcgttaaaggtaagaaattggttcctttgggcgtatttttaatcggggttagggataatttattacctaaaggaatcccttctactgttgtttcaaaaatcttaaaccataatcgtccaccttccaatccaacggcggtaaaaaaaataaaaaatttggttggaattgtttttggtaaaactaattttgatgattttgtaatggaaattcccactaaaccttatgctttcaaggtaacttcaaatccctagaat

SEQ ID NO: 111707 - DNA, 408 bp, Arabidopsis thaliana columbia
attccgggtcgggccacacccttccgttaactaaccaaataggagcttttttggggttttcaaccgaaaccaccgtaactttaaacggccgaagccgccgaagggaaggctaataatccgccggggcatttttttggggggtccaaagcattgcctatttgccgaaccaggaaatggttaaaaggcatggaaggttttgattaacaagatttataatgtcgcagggcataaccggtttcaagcatgtttgctccttttttttccggggttttgttttcgttttttacaaacattctggaggccttggtgaccctaaactttttgggggggggacaggttttaccgggggtgaaataaaggcttcttttgggctgtttaaaaaattacaaatgctttgtttggtgttgg

SEQ ID NO: 111708 - DNA, 350 bp, Arabidopsis thaliana columbia
  unsure (1)..(350): unsure at all n locations
aacgggnccggatttcccggttcgcccacacccttccgctattttgtgaacccaaaggaccacgccaggccatttaaggaggggatggccgatctaacggatggcggtgttgactccagttttaagtccatcggaattgtttccgtgttgggagctgctttgaagtgctgcaacaaggaatggggaacttcggccatagttggggttgcagcatcaggccaggagattataactggtccgttccaactcttgactggcctgttgtggaaaggaacagcttttgggggtttaaagagtcgaacccaagtgcctgggctggtgaaaaagtcctttgaccaggggttaaaagg

SEQ ID NO: 111709 - DNA, 430 bp, Arabidopsis thaliana columbia
aacgggcccggaattccgggttggaccacacccttccgttgggatgccaccaaacaggagagggggggggtaaagctaattaatttcctttaaaatgcttcggtattgggttcaaaagacaactaaataactaatttttttggaaaaaaaaaaaaaaaaaaaaaaaaaaaaaaaaaaaaaaaaaaaaaaaaaaaaaaaaaaaaaaaaaaaaaaaaaaaaaaaaaaaaaaaaaaaaaaaaaaaaaaaaaaaaaaaaaaaaaaaaggggggggcctttttaaggtaccaaagttaactaccggttctttgcaagttaaaattttttttttggggccacaaaattaaaattaaggggcggggttttaaaaacgtgggactgggaaaaaccttgggttacccaatttaattggcttggaaaaaattcccctttt

SEQ ID NO: 111710 - DNA, 178 bp, Arabidopsis thaliana columbia
tccaataattaaccaaataaaagcttttttcgctttttcaaccgaaccattttaccatctcaaggagtggcgatctaacatcagagggggttaaccaaaaccaattttcctcccgttataagcgccataatattgctcccttaccaaaccaggaaatgcttaaaagacatgaaaagtt

SEQ ID NO: 111711 - DNA, 416 bp, Arabidopsis thaliana columbia
ttaattttaaagccatttccgttcataatatttcattggcggcagttttggcaccagcacccaggggcttttttttaaacccatttgctcctaaactccaaacccaacccaattccaaacctttaatttccttaccaacccaaccaaacccaaacttttttttggccgtaacaggccccgccctagccggagccgtttttttttccttaagttcctttgagccagttttagccatccaccaaatcgttaagttggctgcagcaaacgccagtggcgccacccggggttaagtttttttctttccaatggtccaagccattgattgggtcctttacaccatcttccagccagcttttaaccagtgaaccaggttccttgggagtaagggtttcgtggtgggtctaggttttgtgggg

SEQ ID NO: 111712 - DNA, 435 bp, Arabidopsis thaliana columbia
  unsure (1)..(435): unsure at all n locations
aacgggncgggaattccgggtcggaccacacccgtccggaccaccatgggacactgaaccttcaagctattccttaagcgccttttcaacctttttccggccttaaggttcctttgttaggccccttaatacaattggttgaacaaaacgcagttccggacaaactactcctttttaatgccctggtttgactacatttacggcccattggttgaaagcccggttccttggtccaagaaaactttagaaggaggaaatgatttaggggacggggggcacttaacttacctgccgaccccggattccatttaccatttgggcattggctgggcctaatttgcctcctacccttttgttattaaatggttaatgccccttttggggcctttaacctttttttccatgatattaacgcttttttacccccgccttttt

SEQ ID NO: 111713 - DNA, 389 bp, Arabidopsis thaliana columbia
acacccttccggcctttgcaaattttcaaaaatggttccttccaattttgtttctaacctttgaaggaggaaccattccaatttgttgggattcctccaaaggtttagttcctggaagtccaaccagaacccttcaattgttcttttcgtaaggcctactcttcctaataaggctcttcttttggtttccaaggccaaccaggctttttttgtttaccgtttccttttaaaacttgttgaacccaaaaggccagtgcctaaggtttttgggtttggtaagccaccaaaccatggattgccacacctaaagttcaagcgtaccaagctttcttttgtttagaaccttcctgccagaaaattggttgtcttaaaaattttaaacttttact

SEQ ID NO: 111714 - DNA, 360 bp, Arabidopsis thaliana columbia
  unsure (1)..(360): unsure at all n locations
aaatncccggtccggccacacccttcctttaaacccccaaattcctacctttttatctctttccggtcccataccttaccttttggcgcggctttttattttccaaggaaggaaaacntttaaatttccttatttgggttttcctttccaaaaaatttaccatttttacctccaaaacccctaaaaaccaatttctaacctttggttccatttttttttccaataaccaaaaatttcaacttctttttaaggtcctttaaaaaaaattttctaaaccccaacctaaacctttccattcctaatttaaacctcccattcatccatttctttttccatccggtttttaaacccctatttatt

SEQ ID NO: 111715 - DNA, 439 bp, Arabidopsis thaliana columbia
aaattcccgtccggccacacccttccaaaattttaaattaaggaaaaaacactttccctttcattctaaaaccaaatcaacccccaaatgtcctttttttttccaaaaagggtccccaaataatcttccccaaattttcaacttttccactttaaaaaaaacaccaaaaatttgcctccttcaaaaaaaataaccccacttaaaaaatggaaaaaaaacctaattcctttaaaccttataaaaaaaaatttaattcctttgttaataaatttccttgtaactaaagaattttttaaacctcctaaaaaattccaaaggaattttgaacccaaaccaaaattaaatcttccaaccattactaatcaaatgccttttaaaaatcctttccaaaacttaatatttaagtatcccattaaaaaagttattaatttaaatccta

SEQ ID NO: 111716 - DNA, 429 bp, Arabidopsis thaliana columbia
  unsure (1)..(429): unsure at all n locations
gggnccggatttccgggtcggaccacacccttccggttgagatagctaacattgttgacctaattgttttgccgttcgaccatgtggaaaaaaggcggtttaaaatgatcctggccaggaaatttccaggtccctggaatcaaggggctggttgcctaataattttcgaagccccaaaggcagttgctttttactcggttcccttggaacccattgcaaccttggggagggtcgtcaccggcctttatttccgtcctgccaaattaatgtcctgagagagtgagtgagttggccgattgaatctaatcctatcgtcctttctttctggtttaagatttcgttgggactaaaagaaactgttgtttttaattggagaaggtaaacttggttgaatggtcaacattactcgtttggcttatgaccttatta

SEQ ID NO: 111717 - DNA, 439 bp, Arabidopsis thaliana columbia
  unsure (1)..(439): unsure at all n locations
gtccataattaaaaccccattccattcattttatttttctttttcttcctctaaaaacctcctttggaccgttttttttaatatcacgagacgtccccaacctttttcaccaccctatcccttaatcttaaccttttcaaataaacaccattaactaaccctccactttaaacattccaaccttttcccaaaaccactttcccaccttttccttttttaccaactccagaccaccaaacttttccccatccccaaccaatttttccacatcctactttttttcccccattcctcttcccactattcctatatttgcccaaccatnttcatcccccaatccttaccttcccaaaaatcaacttccttaccaactttccctctaactttcttttaaacattcctttccttactcaacaccctttaaatttaaaaaatttaa

SEQ ID NO: 111718 - DNA, 267 bp, Arabidopsis thaliana columbia
  unsure (1)..(267): unsure at all n locations
tttttaacccactacctacctcttttcttcttttttaaaaacctccnccctaaacagagatttttttctaaattaaaagaacttttaaatttcatatccaaaattttccctttaaacctcccccttttctacaacccataccccttttttcctttccttttaattttttaccaaatacctaaaaaacctaatcctattttttaaaaacttccattctatcatccaccattacttaactcttattacccttacctcttttaatatacc

SEQ ID NO: 111719 - DNA, 310 bp, Arabidopsis thaliana columbia
tcccccccaaaaccaaaatgggccagcgatttttaaaaaaaaaatgtgccccccaccctctccctgttgttcaacccacccaatctcctaaacctttccaccttccacctcctccagttccagttaagcccatctgtgttgttgttgccatttcctaagcctttgttccacccattcctcaggtattgccttttgtacctgaaagtccatttccccccaggccttttaattctttaatggtcccccaacccattcaccataaggctgtggagccttcttcttcatcttcaacccttctttaaacccccat

SEQ ID NO: 111720 - DNA, 363 bp, Arabidopsis thaliana columbia
gcccgcccttttttttttttttttaaaaccaattaaaaaaccatgccaccaaattttaccagcctcaaaaaaaaaactttggggtaaatcctcggaaaaaaaaagccccccaaaccaggttcctgcccaattgacctgcttcaaaccaccaaaaccgggttgccttttaccaaagggtccaattccgttaccatattcttaaccagaaaccttttgcctttggttaaccacttaacccaaaacacaccagggcccaagttaacttccattaagccttatggattcttccaaaccatggtacctatccctttttgctttggttttaggttaccaacccccgtatttttttgattttgaagtacc

SEQ ID NO: 111721 - DNA, 438 bp, Arabidopsis thaliana columbia
gaaatatggggaaatatctttgagggaattaaaaggcctttgaaaactattgcaggattaggcggggttgtgtccattcctgggggggtgtctgttccagcttttgccaaaaatggcctttgggggtcccagcccattaaatttgccgggggagccacattacctgggggggacttgtttcctactgcctttgaaaccactttgatgaataacctcgttgcctttcctccggttgccatggggaagaccacttacattgttccagctggccaatattcgtttaaggttcccggaatagagcttgatttccaggggatcaaaaaattttacaccatgcttaaaagctggccttgccgtacccttaggccagttgcttaaaagcttgttgccgttactcctttacttacggggcagggggtttttgatgcccttttccct

SEQ ID NO: 111722 - DNA, 355 bp, Arabidopsis thaliana columbia
  unsure (1)..(355): unsure at all n locations
cgggnctgaaattcccggtccggccacacccttccgtttttgtttgaaaaccaaaatcttccaaagaaaaaaatgtgcctctcctttggaacctcaaggtttttttgttaatccaccgggattttaggttccaatccgcttccagtagcaattaactttaaccttcaatacggttttgccctcgtttaataacaagtttaatttttacttttaacagttgctttccttgctttttttatttaaaaaaaaacccgtgttaccggttggtaatttttcaataaaaccaaccttaagttgctaaataaatggcctttcaaaggcaaaaaaatcatccatggaaaaccttttggaataa

SEQ ID NO: 111723 - DNA, 307 bp, Arabidopsis thaliana columbia
gggccggccagccttccaaaaagtctattttccaaaattcaacccgttttcttccaataatctccaacctaaatccgatgcggaattacccagttggggtgctctttcctgaacctccagaccaaatcggttttcctcttgtccctataattgcaagggttttaatccttgttcctacccaaccttttttcctccacattttgatttttcctccacctgctgaacctttaaccgttgttaaaattaatttaaccaatcctgttttccctctctttaaagtgtttgttgctccaactattcccttttt

SEQ ID NO: 111724 - DNA, 311 bp, Arabidopsis thaliana columbia
ccgggcccggatttccgggtccgccccaggcgtccgagtccggtttttttccttttaatccttttaaccagtttggttcctaaaacaccaaatttttccttttttttttggccggaccgaccttaaaggggtaggaaaatggcgggaccaggcgactggctttttagctgcaggctttttaccataaagcaggggggggtcataaggctttgttcaacattgggggaccaaggaaggattggaaggcgttggggagatccggcaggggccggagtttgagggagaagctgccggaaaggaaacttccggtg

SEQ ID NO: 111725 - DNA, 306 bp, Arabidopsis thaliana columbia
acacccttccggaggaggatgataaaaatacaggagggggatggtggatttccatggagaaagggtccttctggggaataccagggctcttaataccactgaattggttaagatcctgaaaaagtttgccaaaggacctggtgacctaatgcgtttacctttaatccaaaaggtttttaagaaccctttttacactactgactaattgttcaagctggcaaaggaatctgaggcaatgcttgatcagattttcctggctaacgaaactgattttgggattttccaaccggggttttcaaaccttat

SEQ ID NO: 111726 - DNA, 459 bp, Arabidopsis thaliana columbia
  unsure (1)..(459): unsure at all n locations
gggnccggatttccgggttggaccacacccttccgacacaattagaggggggctaaaggaatggatctgtggaaccggttttgatgttggatttcggcccgaagccaaactaaatcctacggtttttcccttggcaactggttaagacctaatcttcaattatataaggaaatggaaaaatttaaatctggcttgggggaaaaaaaaaaaaaaaaaaaaaaaaaaaaaaaaaaaaaaaaaaaaaaaaaaaaaaaaaaaaaaaaaaggggggggccgttttaggggtccaaggtttacttccccgtgcttgcaaggtaatagtttttttttggggcaacctaaatcaatttaactggccgtgtttttaaaacgtggggccgggaaaaaccctggggttcccaaattaaatggcttggaagaaaatccccttttggccagttggggtattaccaaaagggc

SEQ ID NO: 111727 - DNA, 368 bp, Arabidopsis thaliana columbia
gggctcggaagaaagccctctgggctgaggttccatctttgaggaaatccaagccccttaggaagggtgtccttagatggaaaggaatggaaaatgtccccccagtggtcgtggcccctggatcctgttataaaacctatccaggggtgttgagaagggaacctcagcctgcttgaggaacctcatgagtttcttaatctcccttttaaccatcctcaaatatccatctggtacctaatgttgggcttttgattaatcgaaaaaccgaaagggattttgtaatggccctatggcaaaccctggttttggctttccaaaattccaaaccgttttccttggaaccccgacctaatgtgttttttgaattc

SEQ ID NO: 111728 - DNA, 245 bp, Arabidopsis thaliana columbia
aagaacctaaccgttttgcttaaccaccacaccaaaaaaatgggcccgatgttaaccgaatgggttaaaccagttccggctgaggctcctttccaattaaccgtttttgttttttccaccccgttttttactaggccccaaaggacccaaaccttccattttttcgttccaaccccttcgtgctgcgaagttggaccacatgatccttatggtggcggtttcccaaccttccattcaaggctttc

SEQ ID NO: 111729 - DNA, 406 bp, Arabidopsis thaliana columbia
gttaaacgttgcgaatccaactactggttgccaaaaaaagctggggaccgacattaaccaggaactacttgcgttttacgacaggagaatttttaaggaagtaaggggggatgcttggggcaaggggtcaaagggatccgttttaaagaccaaggggggttgcgataagcagggtttccaaatgaagcagggggttttgactccaggccgggttcgcctttggtttaaccgaggaactccttgtttaaaaggacatggaaggggaactgttaggaggagaagaaggtttgttcgtggtggcttggggggccctgttctttttgtttttaaccttggatttgggaaaaagggggagaccgactttcctgggcttaccgatcctgagaggccaatattgggggggcca

SEQ ID NO: 111730 - DNA, 437 bp, Arabidopsis thaliana columbia
aaaggttaaggcttccgtaatattttccttaacctcgtttgccaaaccaccaaggtggttggccaattaccgtccaaggtggcccgtcttttttgttgtaattccccgacttacaacaaataagttgaagtggacctttaccgaaccctttaaggcagggcagtaactaattgccaaaggtcttttcccaatgcttgctgatcctggtaaccctgcggattaaacaagtgcaccaaatgagtcggttcttaaaggggctttagaccatggaaagcaggccgaagtgatcaagtaacatgacaaagttgtggcctgccaaaaaggggaagatccgtccggggccaaaatcatcgacctagaggattagaaaaagcaaagtgagccgttgcctcggccttttttgtcctgtaactaataaatttaatttccttaactaa

SEQ ID NO: 111731 - DNA, 328 bp, Arabidopsis thaliana columbia
cgaccccttggttccttgcaaagatggaccctttttgggggaggagatccagacctaaagcgggtcctttattggcggtttactgggcgttgggaaaaaaaggacccaagtcgaattcaaataacccgcgttggaaaggcttggatctttcaaggcttaatccttggcctgaagggttaacggagtccgttgccggggggaatcaaaagagtccaggcggggctgccaaggcgtataactccgctgttttgtggggcctagctaatggggttccacatttggggccggttgcttcaatggtcctgacgctggaaattaacccgggaaa

SEQ ID NO: 111732 - DNA, 377 bp, Arabidopsis thaliana columbia
ggtccggccacaggcttccgccgttgtttgccacaaagatgtgaaaccacatattttttgggtggacccctggaccaatggggttaacttttttgttttgggaggtccaaaatttttggccaagggtgacccaaccatataatttatttgctcccgttttattcgggctccaaaactgatctttggccccccagagtttccagcttccatggatttatggccggttggtggggaccgggcagagctttttttgggccagccgttattcccaggagaaaattaagtggatcagttggtggggaccataaaggttctggggcctccaactggggaaaaaattcattgtttgaccccctaattacacaaatttttagtgt

SEQ ID NO: 111733 - DNA, 440 bp, Arabidopsis thaliana columbia
tccgcgccacacccgtccgttccccggaaattggggggaggaaaccaaaaggcttattttaatttaaccttggaaaggagggttttggtttttggcctccaggggggcctctaaaaagggagattggcttcgggtggtggaaatggcccgtagatttcgtcgccgccgtggcaaattcaatcgaggtagctttccgccttcgccctccaccggggatccaatattctcaagggttgtttggccgccggggtatttcccccgccgttcccattcctttgggggggttccggtagttaatatatcctcctttgggggtcctttggtttttggtcaatcctggtcctataataattcccttctggccttggccaaaaaggtttatttttattgaaggaccaggtgtggtttggggtttaacccaaaaaaatcacgaaaggttt

SEQ ID NO: 111734 - DNA, 309 bp, Arabidopsis thaliana columbia
aaattcccgggccggcccacccttccgaataaatttaaaaagaaaaaagtgttttatttttttattccccacataaccttaaatgtgggggttttttttcctggagtagggaataaaaataaaaggtgtaaccatgaaaaaaattaacccatttttgccattatttccactccaatttggttttccagccttttccataataaccatgttctcgttcaaccatggcatgacccattggttccttgctacataccgtcatttcttacccacggtttccatgcctccctttgctctaatgttcaaaagaaa

SEQ ID NO: 111735 - DNA, 251 bp, Arabidopsis thaliana columbia
aagaaatcttattataaattcctataattggttaagaaaaagagttggaagttttaataatggtccattttttttggttaggtggccaccattttgaagctttctaacgtttggctttttttatttgttcaagtaattgcccttttgcctttcctttgcctatccgacaattttgttaactttagagctacttattttggcagccccgtttgcaaagcaaatcctgggggccatggggggtttggagaatt

SEQ ID NO: 111736 - DNA, 410 bp, Arabidopsis thaliana columbia
ttaattcccggggccggccacagccttcctcttaaacctaattccaaataaccattatattttttgtttccaaagaagttaaaacctaagggagagttttccaccgtaattgagatgtttaaaaaaaaaccaaattttttcctaaagaaaatatttatccccaatgtttaattaccattaaaggttttaaaaaaggttttttttaacaaaaattcaattttttattgctttaaccaaaaaaaaaccttcattcacaatttcacaaaaataaataaacttgtttccttttaaaccaaattaacatccattttttaaacccgaaaaataaaaaagctaacttgattcaaacccaagaaactttttattttgtccactttcaattaaatctttacccatgaaccccctaccaa

SEQ ID NO: 111737 - DNA, 174 bp, Arabidopsis thaliana columbia
ttccgtgaatctttttaattcaacatgggttgcaacttttttcctttgtccaaacctcttctttggaaaagccttttttttatcaaaacgctaaaaaccccttttgggaggatcctaaggttgattaataaaaggaaaacctattgtccccctaaaaaaccggttatttctttt

SEQ ID NO: 111738 - DNA, 368 bp, Arabidopsis thaliana columbia
  unsure (1)..(368): unsure at all n locations
aaatncccgggccgaccaacccttcacaaaattttaacctttttactttttcctttattactaaacctaaatgcccccctaaccgagggttttttcttcccttgccgtggccgttaagccctccaacctttcccccccgcattttaaattccttgaaaccgcccttttaccattaagaaaaacttttcccaacccaaaggccccatcagccacccaatgttccgattctacccttttaaagtccttggttccatcctttgccaattaaccaacctaccttaccgaaaatttccccgaaaactactattgtaccacccccgaactttaagttaaccccaaaccattcccaagaacacctaacctaaaat

SEQ ID NO: 111739 - DNA, 411 bp, Arabidopsis thaliana columbia
  unsure (1)..(411): unsure at all n locations
taaanncccgggccggccacacccttccatccatcttttaaatcctccaaatctaaattctttccggtaaccaaaacccctatttgggagcgttttattaattaaaatgggggcctcctcccctctcttttttaactcctcctaattcttctttaaatctcttttttcctaggcctcccttgtcctaattcctttagtttaaccttgattgaaaccaaaaccattcctttaaattccttaaaattttccaaaattcctttgaaaccttaaaaccaccctccccctttaaaatccctgcctaaacctcttcttcttaacccaaatttcccattcaatattctcctttctaaccttaccaccaccaatttatccaacccatatcctccaaaatctccttattctccatcacca

SEQ ID NO: 111740 - DNA, 433 bp, Arabidopsis thaliana columbia
  unsure (1)..(433): unsure at all n locations
ttaaatncccggccggccacccttccacttttgcttaatttccagttattccgtattttttggaaaagaaataatttaaaaaatcggagagcttctttaaaaaaaaggagtgttattccttttcctccgaccttcctggttttattacccaaaaaaaataaaattttaccacttattaattgaccctccttttttccctttttaccacttttttaaggaaccgccttgattcaccttttaaccttttccctgaatttcctcttaaaccttgccaaactttttggttaaccaattaactaataactttcacttccaccttcttttgttttaaatttcaagcttaaccaaaaattcaacccctccaccctttctttttaaaacctaaaaaaagtaaaaacttcctttccctttttaccaaaagaaagtttttttc

SEQ ID NO: 111741 - DNA, 403 bp, Arabidopsis thaliana columbia
ttttgatcattaaacttttcgaaattttgtttaatggctttcgcaatcgcttttcggtggaattcttaaaccaaggcctttttttttccgtttttttccttggccgccggtttaatttccgactcccgggggattgggtccatcggggaaccagggccggattctttactccggcgtcccgacaccaaaaatgggttttggtttttgggattctaggaaaggaggggattcctttgtggttgggggtggcttaaaaaccgttatggtcagggtgggtcaggggccggaggtcgttagggccacgtttgggcccatcgttaaagccgccggggaaaggctggtcgaactggccatgtccactcaaggggggggcccatgtaaggggatggcccttaaatccaaa

SEQ ID NO: 111742 - DNA, 426 bp, Arabidopsis thaliana columbia
aaacgttcttttaacggccgaacaaaatcgcgacgttgagtttaattcggttggaataagccggaaccataaaagttgggggttccagtccgtgggcaatttcaacggttggggacgggccatacacggggttaacaaacgccgccactgacggtaacgacaggggtaggatccttgagcatggttgggggttgggttggggtaaaaaaggccagggtaccgttggtcctagcgccaaagggtttttgggttgggacaggacatgtaaatttccaagtttggaaggtggcgatccaaagacatttaattacttaaagatcgaaggagctgttagtttaatgccaaaaattaacgggggatcatcaacaacggaaagggcttttggggccaagtgtccaaaagatggcaaaggtttagggttttttt

SEQ ID NO: 111743 - DNA, 432 bp, Arabidopsis thaliana columbia
aacgggcgggaattccggggcggaccaaggcgtccgaggagggaaggaaggaaggaaggccttgcctttttttttttttaaaaatagaaattggtgtttaaaagccattattgtttgggaggggccaagcttggaccatttccttgggaaccggtggttaattggttcttttggcaaggggattaacaggttggggggggtgggccttagaggacacggcttgaacttgtggcagtcgccggatttaaggttttttgttttaaaggggaactccatcctttctttaaaggccgtttaaaaattccttttcgattttttcgaattcgatgttcaggtaaccagagatggttgcccaatatttttctacgacgactttatttactccggggaacaggggggggggtacgagaagggggtaacgggggtttgttt

SEQ ID NO: 111744 - DNA, 305 bp, Arabidopsis thaliana columbia
aaagcggattacgggtcccctttttttaagttaattttttccccgattttctttttttttgggtggatacttttttttttaaatgggggttttttttcgttggcctttaaattttttccagctgatctgatctccgttcccgatggagtttactgttaacgcactcgtcgtcaaggggggctttggaggtgggcttaggggtttaagggggcctgttaaagttaatggccagctggatcttgaaatggttggtcttaaggaaaagaccgctgttttttttaacctttttgcggatcctgaatggg

SEQ ID NO: 111745 - DNA, 249 bp, Arabidopsis thaliana columbia
gaaaacccgggccgaccacacccgtccgtttttttaatttttttggcaaggaagcttttttttcgttggatctcagctgttctaataaggtgcatgatattcgtcgccactgggatggaaccagcaactggggaggcacccacttgggagtcgcaaagccataggttcaagggtccatgcgggagggcataaaactgcgccaacgggggccacaacaaaggctttgtcggaggaaactgccggggattc

SEQ ID NO: 111746 - DNA, 186 bp, Arabidopsis thaliana columbia
tttttggaaccacctggcttaccgccatggttggaactgccggaggggccccacctttttaagccatttttactttttttaggagcttccaaaatgtccactttgttcgatgggaactcctttggccatggttaaaaaaacttccatcggaatcttctggatatatttcaaattttcaagggggct

SEQ ID NO: 111747 - DNA, 361 bp, Arabidopsis thaliana columbia
  unsure (1)..(361): unsure at all n locations
aaaanngggccgacccaggcttccgagaacccttggccaaaacaccactgtaagtttcttccaccaccacctatcctcaccatccgccagtttcacaagccttggttggacctcaaataaacgntaaattttttttgctttttttttttaaatattgaatgaaaagattcttttttatttccgccgtcgaagaaggaaaaaaaaaacctttttcttcgaaaaaaataacttttgccggaccaccgtctacttcagttgcagttgcagcaccaccattggcaacaagaaggaacacctcttggaaagagagggagaccattcgaaaaaaaaaccgccggaaaaaaccttttccgccaaaaat

SEQ ID NO: 111748 - DNA, 455 bp, Arabidopsis thaliana columbia
gaattcccgggcggaccaccccgtccgcggacccgtgggcggttttggagaaaaattatgggcctaaaattctgttgttgtgggtccggttgttcttaccaggaaattttattttaaaaggcattttttgggtttgcaagaagctgtttgcatcgccaaagggatggttccaggatactttgtttggccatggtgggttaacttcggggggcaggagggttccaaaaccagattgggactttactacgttgatttcaaaaaaaacctaccacgttccgggaaagaatccggcaggttttccagggatttcctcagcaaaggggttcgtccatcccggctcaaaaaggatgagctttaagcttattcggtttcaaggggtttttcctatgttttactttgggggggcccaaatatcatggaggtttggttctaataaaaggagttatttttttttt

SEQ ID NO: 111749 - DNA, 245 bp, Arabidopsis thaliana columbia
ggcgggccaagccttccaaaccaaaaacatgattaatcttccattttgtaactttcgggaaaaaatcacacaattgcgcggatttttttaactgtttggggcaatctaccttcaaaacccaaatataaactacggaaaaatgttattcgttaccaccattttatcatctaaaggttctgttaaaaccaaaaaacaaaatttcgttatgaattctttatatgtcccatcaataatcctttgctctt

SEQ ID NO: 111750 - DNA, 436 bp, Arabidopsis thaliana columbia
gggcggccccacccgtccgaaataattggcgggggcgggggagggtttttttaaaaaaggttagaaaacagttttgtcggattttgcaaaaaatttccaaggatcgatgggaagtgggggcaaatggtaggaagggttaaggccgggacgactccaggaggtgggggaaggctttttgcgtgggtaaggcaaaccaaatggttgagagaaggtttggtaacaagggataccggcctttaagtttccagtcccagttggtccaggggcttccataatttgattggagggccgccattgacggatggatgcttaactccgtagggtcccatgagctgatttcaaccacacgtccgttcatgcggaaggttggggcagaaaatatggaatggggggttcccatcaaaggaaggaccgggaaattaatggtcagaaaatg

SEQ ID NO: 111751 - DNA, 459 bp, Arabidopsis thaliana columbia
gaaacccggccgccacacctccgaaatccgccgttgttgggctgcttttctatttgggcctcgggggctcccgggggcattccggttaaggggggtgaacagccagtccggttccgaaaaaaaaggcgttcccaaaaggagggccaaaagaacgggacttacggcccggcctttttggcccaagccgccatttttctggactggttggagggtcccttggtgggggattccggtttggatcctttcggttaaggcaaaccgcccgggttttttaaatccgatatcgattaactaaaccaaaatttggttaaaaccttgtccgtagccttaatcgaaacccgtccggaagttgccgcccccaaatcaaccccgtttaagccgtccaggggggtttccggatttcattgatttagggaaggtaaacttttccacggacggtggtcgatctttcatattctc

SEQ ID NO: 111752 - DNA, 430 bp, Arabidopsis thaliana columbia
gggctttagaaaggggcaggaccagaagttttgttgaaactttccaaaacttaccaggatttttccaacgccttaggcaaaaggtttagtttttttaccttaggtaaataaaaatggccattttttttatttactaaaccaggaccctttttataatatatggttggaaattggaaattttattttttaggcacctttggcccccagggaatgaaggatttcttgattgggggtaaatggatcgatcttttaaacggatcagattttgttccaacatatgaagataaaaatggcgactggttgcttgtaggaaacttaccgggggggatgtttgtggtttcatgcaaacgtttccgaataatgaagggttcagaagcaattggactttgtttaagggctttagaaaagggcaggaacagaagtggggttt

SEQ ID NO: 111753 - DNA, 342 bp, Arabidopsis thaliana columbia
ccgggccgaccacacccgtccggaaaaggttaataataccaacaacttccgttgcttagggttccacctaggaaatcctggggagggaggaaaaaaggtttgggttcaaagatccccaaagaaaaggaggccagggttgttttccaagaaaataaggtccaaggaccttaaatggaatccaaaaaaaaggcctcccttgaaaggatggttcgtaacaacacctttatttggtgtggttaattaaaaaccttatttatatttggaaattaaaaaaacctggttttaattatctttttttggggcatttaattttggtagatttgtaactctttcttttttttg

SEQ ID NO: 111754 - DNA, 329 bp, Arabidopsis thaliana columbia
cgggcggaccaacccgtccggttccgttttaaaatccaacattaacatctttaaaggtccggttaatttccttaccctggtttttttcaaaagaaagggttacttaaaggcctttttaacggaaataatccacaatcctggtctgggggttctttttgttcgtgtaattttccgtaatcctttccgtttaaagaaacaaaaggagctttttgtcgccgccaaaggtttttccaccgttcagttttggtattgcggaaagaaagctattttcttcgttggaaatgttttcctttttaattttattctttaaggagttgttgtttgtatct

SEQ ID NO: 111755 - DNA, 463 bp, Arabidopsis thaliana columbia
  unsure (1)..(463): unsure at all n locations
ggaaaancgggcggaccaaccttccgngaccccttggaatcccaattaattttttttaagaaaaaaacctgctttaactttgggggattttttaaaatccagcgtttacccaaattaaatggtccaaaattaataccccccccacctttgttcctaacggtttttttgaaaaggaccaaccttccttgaatttaaccgtcaataaaaaggtcccaataataataaaacctgtccaacccattgccaatcctaacattgtaaaaatgattaccatttttccaagtgaaggaaccactttggtttttcaacgtattctttcctggattaaagcggttgtcaactctgtaaagtccctttacttaaataggtatggaaattgagtttgattctggtaattggtttggtttgatttaaaaaatgctcacttaattatttttaacccaccctttttttatattgtttt

SEQ ID NO: 111756 - DNA, 449 bp, Arabidopsis thaliana columbia
ggggcggaccaacccgtccgcttaaagctttttaatttgttttggttaattttgaaaattttaataccaatattcgggggccctttaccaagatttaggggattttccaagtttttttgttaaaaaaccaaaattaaaaaaaccttcgcccagaaaattaaaaaattggtggaataaactaaaaaattggttggccctttgataactccattgcttaagttaaagggctttcaacccaccaaaatttttgcagttcttgtccaaggcttggcaggtgttcaccctatgaaacccagggaaattggacttttggttgcaaggggggccttaatcgtttaataaacaaatttgttaatggtaacgtcaacaaccttgttgtggttccgggggagattcgaccttcgcccttcagccatttggaaggcaacagctgaccttaggttggaggc

SEQ ID NO: 111757 - DNA, 444 bp, Arabidopsis thaliana columbia
cgggcggacccacccgtccgttacactgataaccaaaatgtctccgtttttttctccaaccacaaacctaaaccgggctggatcctttgggaaaaggcggattgttccatcccttccgggggattcaactcaagacccgccattccgtacttcaagaaccataaaaggccgttccctaaccaaaaggaaccccccaaaaaaaccctttttttccaaaaaatgaaaagggaaaacctggaaaaaaaaaaaaacctcaaccaaaataacctaaatggtaaaaaaggaagtcccaccaaaaaacctgaaccaaacaacccaggagttaataactaacagtttccaaaatccgtccataagccaaccataattaaaaaccaataatcccttgaaccaatgttcttttttggtataaaaaactcttgccttgtccaaaaatcttaaacc

SEQ ID NO: 111758 - DNA, 294 bp, Arabidopsis thaliana columbia
aaaaaccggggcggaccaaggcttccaaaacaattttggtttcgtcgataaacatattttgaaaaatctaagtaataaatggggtgggactcttttggcggttgttagtaacaataagattaaatccaagttttttggacttaaaatggaaaaaaaaggtgagaaaaggattagcttacggtccaaggttcttttcggtgataaccaaccgaagttaattgactgaagaaaaaaagaacctctgcttaaggtaaaaaataagggtggtttccggaagttgttggccattttaaa

SEQ ID NO: 111759 - DNA, 399 bp, Arabidopsis thaliana columbia
cggggcggacccaggcgtccgtttccaccaaatttaaggcggttaaccattttccttttttacattttcaaacgagggccggaaacgcactttggtttttaacggccgttaatccggttttgtttcttaagccattactccttaacggttttgtttttccgtgggtttttttgggtttttccagaaaggtgggcggcggcagaccaggggtcgttgcagcggttccgggggccacaaccaacatgccgatgaccggagtggggttccagcctttcgaagaggggaagaaggccgatcgggccattccaataacatttaatgcctttttggttcgccagaggtttgccgccgttggcggggcagtctttattgagcaaatcaatggggaatacaacgttt

SEQ ID NO: 111760 - DNA, 332 bp, Arabidopsis thaliana columbia
ccgggcggaccacacccgtccggaaggtttttggtcggaggcaacgggaattttaccggaccggttgaggaggggaaaaagatggggaccacttttaaggaagctaaggttccttaacaggaggttgaaaaggttggggttagccttccttttgttttttttccccgggttaaaaccccattggggtctgatttttttgttgcggaccaaaactgtgggtttaaaaagggaggggctttaactggggaagggggtgcggtaatgcttttaactttggatattccatgggttttccttggtaactttgaaaggagggcaatctttattgaata

SEQ ID NO: 111761 - DNA, 372 bp, Arabidopsis thaliana columbia
gggcggacccagccgtccgagttaaaattaattccaaggaaccagtgttttttttgtttccaaagaaggggaaagctagggcataattgtccaccggggatgaaatttgtaaagggaaaacaaagggtttcttaagggaattattattgcccaagggttaattaccatggagggttttaaaaaaggtgggttttgacaaaaagtaaggggttgtttggttgaagcaaaaaaaaagcttaatttacaagttaacaaagatagataagttggtttctaatggaaccgaagtaacagcctttgtggaaaccggaaaaataaaaaggttaattggagtcaaagccagggaactttttatttgggtaattataaatg

SEQ ID NO: 111762 - DNA, 475 bp, Arabidopsis thaliana columbia
cgggcgggaattccggggcggccccacccgtccgttggtttaggcctttccacttaaggccaggagttggattcgttttgggtcccaagtggggccatcttttctttttttttttttccgccttaccaatccaatatccaggtcgtggtggtggtttggaccttaaaggggggtaataaaaattccctttttaaaaaaaaatataaaaaaaaaaaaaaaaaaaaaaaatagtaaaaaaaaaaaaaaaaaaaaaaaaaaaaaatgggggggccgttttaggggatccaagttaacgtccccggccttgcaaggtattagtttttttttggggcaccttaattcaaattaatgggcgggggttttacaccgtcgggctgggaaaaacccgggggttcccaaattaaatggcttggaggaaaatccccttttgccaggtgggggaaaaaccaaaaaggcccgaccggttcgcctttcc

SEQ ID NO: 111763 - DNA, 399 bp, Arabidopsis thaliana columbia
aaggcccgaccaggcgtccaattttccaatggcaatttttgttccaccctttgtttcttcctccttaaaaattttttgccgcaactcttttaattttccggggttttacccccccatttcaacctttggtaaactaaaaaccttaacttttttttcctccttcctccctttttactaataaaccaccacctccgtttttaaatcaactcgtggttctttaaccgtccgccccgttcttggaaagttcaaaaggaaaaaccctaatgtaaccatcgaacccatcggtcatgttgcccatggaaaaactactttaaccgaagttttaaccatggttttggtttccattggttccaccgtccttaaaaagaccaacaagattaacctctccccgaagaaaaa

SEQ ID NO: 111764 - DNA, 441 bp, Arabidopsis thaliana columbia
  unsure (1)..(441): unsure at all n locations
aaacccgggccgacccacccgtccggtcgggcctcncttttttttcctcctttttttttttcaacccctccccgaatcccggggggcttttagaaggcaaatgtatcacattcgtaattttaggatctttaacaaacaatgaatcgccaccccaatcccaatcctttctatgaggccaaaaaaatcgtaaatcctttttcaaaagggggggaaagggttcctgttgcttttaggccagttgaatatggtcaaagcctcaatcctcctgtggatattccatggaataatatgaatgacttttcacaaaaacaaaaaaagcttgttgactgggaagttgacctcaggaaaaaagaaatggttttaaaccgaaaagaggaagcttttgttaaatttggggggcaaatagataataaaaactggccaccgtttttcccaatcatc

SEQ ID NO: 111765 - DNA, 461 bp, Arabidopsis thaliana columbia
cgggcggaccagccttccgttttgggttggaccaacttgaacttgtatattttccaccaaaccttaaaaaatccaaggggtaaaacttaatccatggtggatggcttttcttcgttgttcctggaattttggtcccaaaaccattaggatttggaacctgggttaaggttaagaattggccacaattaccagggggtaaagccattaactgggaaaaccaagccccggggggtactttgccaacaattttgcccatggagtttttacccatggcatttgttgaccaccaaaaaagtttggaaaaaaaccctaagaggaagaagaccccggaagccccatttaacccttttggttactcaaaggaccccaaaaggttcgaggatttgaaagttaaagagatcaaaaacggccggtttgccctgttgccgttggaagaattttttttccaacattcggtttac

SEQ ID NO: 111766 - DNA, 413 bp, Arabidopsis thaliana columbia
acgtaatcgaactaaatcgacctaaaaggtttttcgataatttggttttatttttggaagggcctgaaacttatggccggggaactcgccattgtggttccaaaaaccctggttgaaaaggctccgaggctccaactaaattaacaattaatgggttttggcctgcctttaacaagggttcggggccttaatgtggtaatcgacctgcctttaaagagaaggagatttaaacgttgttggatggttttgaaaagtactggcctagtttaagtgggggttttccataataatccaagggggggaaggggtaattttggggccacaagtggaagaaacatggaactggttcttttcctgtttttaatgaggagattaataacttccttaccacacttaatttttacttgaagcat

SEQ ID NO: 111767 - DNA, 373 bp, Arabidopsis thaliana columbia
  unsure (1)..(373): unsure at all n locations
gaaaaccggggcggaccacagccgtccgttggatttaacatagggggggatggagggttttcgccggaaccggaagttgtacttcggggaccggtaagcaccggcggaggcaaaggatgttgcaggtccgggggtccgggttacggaattcttttggccgttttttttggtccatcgaagaaactaatttacgtacccgccgtttacaccggacctggaatagataaaccggatttnnngccaccgggggatgtagatccaagctcgccttcgttttaaagggtatttaatagattcccaatgccttttgttggtattaagcttaataattctggttggaactcttgtagtttttgcccatggaatgcttttg

SEQ ID NO: 111768 - DNA, 407 bp, Arabidopsis thaliana columbia
gtccgtaaattttcgatctttaaagaaaagttttttttattcaaggaaaaaaaaaccaccggggggttttttaagaaaaggcggcgtcccaaacttttttttgccgtttttgaaaaataaaaaaaaaaaactgggggaaatcctattttgaaggaaaaccccccaaaaagccaagtggagtttcctcaaccaccgtttatttttgtaaaaaaacctccttattttttttttgcttaaggtccaaaaggtaagctcccagtttcaaccaccgataaagttttaggaaaatggccaaaaaaggaagagaaagcttacctgttaaaaactataaaacttccaaagctaaaagaagttccaaagaccacaggaatcaaaggttcctcaaagttgaggaaaagtgaactttt

SEQ ID NO: 111769 - DNA, 414 bp, Arabidopsis thaliana columbia
  unsure (1)..(414): unsure at all n locations
aaaaccgggccgccgaggcttaacagaacccttggcccgtttttaaaccttttcttattaaaaacaacaaccccnattccacccgcctaattattaagattgtggagttnaaaaacaaaaatttttcccgtacccttagcttattaacctaacccttgttacccaaaattaacaccataaattgaccagtccactttttaaaaaccaccacttaacttcttggaatccaaccaaattgttccggcctcctagaaaaaaagtttaaaaattttttcgaccatccagccagttcaattttggaaggtttcttgtaaataaaaaaaccccaaagccttgggttcctttactttttaacttaaaatttaaccacctttttataaatccattcttttttacttgaccaattccatttac

SEQ ID NO: 111770 - DNA, 266 bp, Arabidopsis thaliana columbia
aaggaagccaatggtccggttccgaccgagtaaagtacttggttccattttttggcaagtaaccgagctaccttaccggaaagttccccgaagactacggatggaaaaccgttggactttaagttgatccggaaacattcgaagggaaccgtgggctagaagtaatcaacagaaggtgggctttgctcgaagccctaggctgggttttccctgagcttttggttaggaacggagtaaagttcgaagaggcggtttggttaaaggcc

SEQ ID NO: 111771 - DNA, 250 bp, Arabidopsis thaliana columbia
aaaaccctaattcaaaaaaaggggcctggttttttaaacctttcctttttggtcctcctcctccttggttttgtggtcgtctcctatgcttgcaactgtccccttcctaaaccataaccagcactttacaaacaaccaaaccatccagtcaaaccgcctaaacctcctgcgcgtaaaccacttaaaccaccggcggtaaaaccacctactccaaaacctcccaccgggaaaccccatcttaaacaaccaa

SEQ ID NO: 111772 - DNA, 178 bp, Arabidopsis thaliana columbia
agaggggggggatcaaaggctgggaatcgtttgtatttaaagggaaatgccaggtgtggggttctggattgtcaacactgttttccaggctttgaaaatgtttccggttttgccggatattaggttccaaatgggtaaggggttgcctgggggtttaggggctggaggaaatccagaa

SEQ ID NO: 111773 - DNA, 278 bp, Arabidopsis thaliana columbia
  unsure (1)..(278): unsure at all n locations
ccaaaaacagaaacatggggncttaatcttcctaatgggcttttttttggctttaataaattttttccatcgggggagtactgattctaatgtgttcaaccgctgaatcagggaaataaccgtttcatccttgggatttgcttccgcatttgcccagccaagtttaatggccgattttaaactttttttacggggccgccgatctgcttcctactttaattggaacagcgggttttgggaacgattccgttgactggaaaggggcttgtttttttggg

SEQ ID NO: 111774 - DNA, 402 bp, Arabidopsis thaliana columbia
tttccgggttggaccaaggcgtccgaacacaagttttggcagaagctggggtgtttttgtttttggggtaacctgttttacaaagccggttgggatttgttcggttaaattgggtgccactgggctgggggtttggaaatattgggctggaatctggggcctttactttattttggtccggtcccagtttaagcacccatgattgggtccaaaggactgaaaaacggggcgacttacatctttgattaaggggctaagctggtggtcctttaccaaaattggcttaccgagttaagcaacgttgggttttaaaaaatatatttttttatttaatttaatttgggggggccgtttttgaggttccaagtttacgtccgcgtgcttgcaaggtatttatttttt

SEQ ID NO: 111775 - DNA, 335 bp, Arabidopsis thaliana columbia
gggatttccgggtccgaccacacccgtccggccttcgtggggttaatggaatccggctgcttccaacggcaggattggcgtcccttttgtttggttttttttgcgtccgggtggtgaacggagttcgtcctttttaactttttccgttttttggcaatggcttaattgttcgtttttttgggggcctgtttccctagcgcctccattttttggttggtccattgcgttggatctcagcagccaaactaggggactgattggccaaagccccaaaggccttggggttagagctggaaaagctgctctgggtcaaactaggagaggcagtccaagaa

SEQ ID NO: 111776 - DNA, 190 bp, Arabidopsis thaliana columbia
  unsure (1)..(190): unsure at all n locations
ggcggaccaatccgtccnaaccaaaaaaaaacccgggaaaccatttctctattctttctattcaatcaacaccaagggcgggggttgccttgggttcctgggataattaattcagctgggctttttaaagagcttacctggttgagtccatctccacttaactctttgttctcgtggggttgggctttgc

SEQ ID NO: 111777 - DNA, 321 bp, Arabidopsis thaliana columbia
cggccccgtgggcaatttttaaaaaccttaaaaacttcttttaaatcctctctaccgggaccaagatgcaaatctttgttaggactctaaccggaaggccattaaccctcgggggggaaggctccgcccccatcgccaccgttaaggccaagacccaggttagggggggctttcctccggatcagcaaaggctttttttcgccggcaggcacttagaggatggccgtccgttggctgtttccattttccagaaggattccaccctccacttggtcctcaggctccgggggggtttgcagattttcgttaaaaccctaacgg

SEQ ID NO: 111778 - DNA, 289 bp, Arabidopsis thaliana columbia
acacccttccgagaaaaagggggtggccaatcaatgctcttttattcgcttcttaaaaaaaagctgtggtgccattgttggaaaagggggtttcatccaaaactgccaatgtcaatctcatgaaaggggaccagaaccagcctgggtttttggcgattcaccctttcggtaaattcccattcctggtcgccggagcctccaaaatcttcaagtcgcggccgaccatgaggtttttagcagagaggtttagttcacagggccctgttcttttggggaagccttttgaaaa

SEQ ID NO: 111779 - DNA, 407 bp, Arabidopsis thaliana columbia
aataatcctggcgataaataaaccaccattcggttgtttggtttcgttccaaagttgagggaggaacctaaggttacccaggggctgcagggaccagttcctggttttaacggggggtttttttaatccttgtaaggaagatccgtagttgttaatccatggcttgatcttgggatgggccctggagctccacagattttaatgggggtggtggggaccactaagggaggcagggtcaattccgagcttgccaaaaggacaggactaataagggtggatcgtttcctttactaataagtggggtcccctaccaactttggttttgttcctggaccattgggggaggacattgaccccattgttgttttagtcatattgcaggaacctgggcttccgggtggtttttt

SEQ ID NO: 111780 - DNA, 227 bp, Arabidopsis thaliana columbia
  unsure (1)..(227): unsure at all n locations
ccctcttcccaacctaattnctcctctaaaaccttccttccttaaaattccggggaaaccttgtttgacgccgggccccactttggggccagcgattccggaccttccaagaccaatcctaattcagccggtaacatccgtaaggggggcaacatcgtcttcaaaaaccgcccctcgagggttgtggaggtttcacacttccaaaatctggaggctcggcctcccca

SEQ ID NO: 111781 - DNA, 353 bp, Arabidopsis thaliana columbia
ttccgtatcgccgactaacctccggggtttctttcggcggcctttcctttctgtttcctacttggggttcctctctgcgctaacttttttaatccttgggccatatttcccttctctaacttaactcaccaaatttttaggaatccttttcctcctgggatttgggcttttaattaaccttaattcttctgttaagtagaaattttccatggcgaatctatgaaataatttcttcttgttaagtagccattgaaatttgttccattggcgattcgggttttttttttggtggtctccattttttggttttgctccttaaaaatataagacttttttggtttttatattatttt

SEQ ID NO: 111782 - DNA, 371 bp, Arabidopsis thaliana columbia
aaaaaaaaaaaaccacaaaaggtttaaaggttcctttccacaagggttttttcttccctggccttggccggaagggttgggaccctttcccccggggattttgaggtcctgggaggcggccgggtgccattggggaagactgtggccaagccaaagggtccataaggcagcccatggtccggttccgcccgggtaaggtccttggttccattttttggggggtaaccgggctaccttaccgggggagtccccggggccttcggtggggccaccgttggactttaacggttcccgggacatttctagggaacgcggtgctagaatttttccccagaagggggcctatgttgggggccctaggttgggttttc

SEQ ID NO: 111783 - DNA, 327 bp, Arabidopsis thaliana columbia
gggaattccggggcggaccacacccgtccgaattaaccctaaagttaaagctcaatttgttgttaacacatgggttgtaagtggtccaccgcatacaaaaaaattgcggggcatccttcctaaaatattaagccaacttggcccagttaacttggccacccggaagaagctggcaaagcaattccagaaccaagctccaggtgcaggtgttgtcccagcaccattccaagaagaggccgttgttgttgttgtcccaaaccttgtttggggggagactttcgagacccctgctcctgaaaaggctcccaaagctgcttgtttttaaag

SEQ ID NO: 111784 - DNA, 294 bp, Arabidopsis thaliana columbia
aagctttgtgaccaacctctggcttctggctaattttttgagggggagggttttaaatccgttggtgaatctttggggccgaatcctttgcatctggtgggacttttaagggccgggggggtcaactctggtttggaccaactccagtggtggtttaagggacctgctgaccggggggctaaaagattcagagtcctttttcttactgttggtggggtggttttggagggtcctggggtgggatttggggaaacccttgaagccgcccttgttggtttacgggggattggtgtg

SEQ ID NO: 111785 - DNA, 285 bp, Arabidopsis thaliana columbia
cgggcggaccccccgtccgttttaaagtacccataactgttcgaccattttttgtaagaagcacctaaggtaccaagtggtgaggtccctgtattgaagggggatgttattaaccttaaaacagctgttttttccgccaaggctgtaattggaaaattcccaaaggaggaaaaagaaaaggaaaatggggaatcaataaaagttgaaaaggaagcttttgttgccaaggatgatccggaaaaagcaaatcatgttcctgttgaaaagcaaaaggaagtatttgaa

SEQ ID NO: 111786 - DNA, 333 bp, Arabidopsis thaliana columbia
atttcgatcctgatttttcttaagggatccttttggccaataggttttttaaattttcaaaccaaaacccccatcaaattattttccggcccagtttttttttcgattaagccggcccggaaaaccatgggcgtttgggaaccctttcgttctttgggacgttgccgcaaaggttcccagccggatggtggggtttaagccattgagggtgggggttccggttcaaactgctaagtctggtaggaggccgactaagccgcctcctccttttaaagctggggggggggcagggaacgctcctgggggaggccggggtgctggccgtgggggggg

SEQ ID NO: 111787 - DNA, 197 bp, Arabidopsis thaliana columbia
cggacccgtgggcaatttttaaaaatctaaaaaactttgtttaaatcttctctaccgggaccaagatgcaattttttgttacgacttttaccggaaggccaatccccctgcgggtggaaggttcgcgccccatctccaacgttaaggccaggttccaggttatggagggctttcctccggtacagcaaaggcttttt

SEQ ID NO: 111788 - DNA, 353 bp, Arabidopsis thaliana columbia
ggggcggacccacccttcctaatgagctggaggaaatctaaggccttttctatagggggttgggggtgcctccacggggggaaccaaaagaccttcctttggttgatccaaaacgtgctggaccactcgaatgttttggggaaaattatgatgaaaccatggttctgttggataaagtcccgggtgtctccatggaactttgggggggcactcttgtggccaatactgtaaaattccgatcccttcaagttattctcaaaccagggctttgcttctgtaatccgccgtataaaaccggttgcgggtgaacctttctttgatttctttaccctacgtgttttttttaatatccc

SEQ ID NO: 111789 - DNA, 329 bp, Arabidopsis thaliana columbia
gagccgaaggtccacagctttttttgtaagatgttgattaatgaggaactgcttgcaagctgggatcagccaccacattccatcgctttccatgaagggcaccacaccaatttccaatcttgggctttccagttaacggaaaacctctcgattttggcagaaggcattgagggggcatgggattctagaaccgggggagggggtctggtcctgagtccagggggaagggccaccattcaggactttgcaggaccagcatcagggggggggggtttttggcaggccagggcgatttccggccatggattccaaggcaccaaatcaggttt

SEQ ID NO: 111790 - DNA, 325 bp, Arabidopsis thaliana columbia
ccttttattaaggaaccaaagaaattgggttttttttgtttccatagagaaggctgggtgcattgaaaaatgcaagcccggtttgggggggggttttttcccttttttttttaattttaccagggggattttttactccttccgactggttccggtttcgggtcccggccaccccattccggtccgttttcaatcgttttcatttgtttgggaaaaatttttcctagagcaatccttttctttatgttggggatccgctcttaattattttaatcgattccaaaaaatttttattgattttaaactaaagggatcttttccattt

SEQ ID NO: 111791 - DNA, 343 bp, Arabidopsis thaliana columbia
ttaaaattaccaaactttttaaaaacattctttttacttaacaaacaattaaccgagggccaactggcgggtggaataaactttaaggcatgggcttcgttgaccttgacggttacctttttccgggccgtggccaaggttccttaagccaccgggggccgaaggttttccgtagtcagggcctccacgggggacaccacacccagtttagaagtcagggaccagagcagcaccccattggggggggacctattgttaacggttgcagttgcaggggttggttttttggttaaggtagccatggttgaagaagaaaagcccaagcaggggacagaggcggcca

SEQ ID NO: 111792 - DNA, 256 bp, Arabidopsis thaliana columbia
ccagaagtcgacgccaccattggccccgatttaggtggttaagggggcttcaaggaagaagccggggaaggttaccaccccattgtttgggggacgcccaaagcattccggttttgttggcgctttgcctcctaagaaggatctttttggttccatcaaatggcctaggtcaatccgccttaaagggcagaagcgtttccttaagcagaggtggaaggttcctccagcttttaaccagttaaccaggacccttgtt

SEQ ID NO: 111793 - DNA, 202 bp, Arabidopsis thaliana columbia
gttacaccaccgtcaggattaagggcataatttttttgtgctttttttgccatcgctgccattttttctccaagtttctgggggggtaggaaactgaggctgaagaagaagttgcctgttccagctgtgtccagcccagttccgttgttgcccgccttttcagtttttccagatagcccattctggttccggggaggcactc

SEQ ID NO: 111794 - DNA, 205 bp, Arabidopsis thaliana columbia
gggcggaccaatccttccgatttataatcctttcctttaatggttttttttcatatattccaattatggccacatgggggatccaacaatcgtccttggcgggccaaacggttttaaagccctccagtatcctaatccaaaagggggattttttgggcggtttccgtgtgactatgctttgatccgtatagtctactccccaaag

SEQ ID NO: 111795 - DNA, 278 bp, Arabidopsis thaliana columbia
  unsure (1)..(278): unsure at all n locations
gcggangaggcgacccaaaaggttccaaaggtattcaagtttttatttgaccaagtaaaaacttgttcaagtgtttttaaaccccataggacctaacaattaatttccccgataactacggttggacaaccgttgtttaatccgcctaccaaaaaaccttttccagaaaccttaaactaaaattaatcaaaaaaaaatggacaatgtcctaaacctaagtttgattttttactatctattgattagaaccggtatgtattcttataaaactaatatta

SEQ ID NO: 111796 - DNA, 249 bp, Arabidopsis thaliana columbia
tgggaacgtacgtgacggaggttccgttgtatggttgggaggagaaccactacaggagctggaagagcgggaaccattttttcattgccgccattggccaccaaatccaaattgtcgtggtttccgaaggcgagcatgactgtaaggggtttttcaggggtgggggctccacttttgttggaaggaaggggatgtccaaggagaaagtggggattgctgttcggattaaaccatggccgaaagggggac

SEQ ID NO: 111797 - DNA, 185 bp, Arabidopsis thaliana columbia
gcctatggttggttacgacaatatgtttgttggtgggggcataaaggggacctgggacaactttagctgggaagggaagaccggttaaccgattatttacaaaagaaaagcgggcaaccctttggttaaccggaaaaaggaatacaggggatttttttggcaggaggagataattccgttcttca

SEQ ID NO: 111798 - DNA, 219 bp, Arabidopsis thaliana columbia
gatttccgggtgtggaccacaggcgtccgagggggtttagcgaaaaatggcgatggccttggttcttcgaaggctttctctttaaatggacaaacccattcgtccttttattcgacccacttaatgttacatgttttttttgcccagtgaagctgttgttgggaaggaaagacctgggtgtacttggccaaaacagcttaacgcaccttaggagggggt

SEQ ID NO: 111799 - DNA, 316 bp, Arabidopsis thaliana columbia
tgaaacgggtgtaggccagaccgtcagggtttgatgttggaaccgaaaaaggactgggtcgggcccgagccctccgcctgaaaccatagggccgggtttcttgggaggaccaaagggtaacaggatggcgtttcctgatttaaagttgggttttactgtttgggggaatgattttatgttttttggcgggggcgtttccccagggcctaatagcttaaaaccgccgttgggggaagaggtgggttttactagtttccggcctttcgtggaagggcttaaagggatggttaagggtcagggcgaggtttaaaatgct

SEQ ID NO: 111800 - DNA, 225 bp, Arabidopsis thaliana columbia
tgaatttccggggcggaccaacccttccgaaaaaaagggtgttgccatcctaggctccttttttttctcttcaaaagaaagcttttgtgccatggttggagaagggggtttattccaaacctgccattgtcgatttcatgaaaggtgaccaaaaccggcctgagttttttgggattcacccttccggtaaaaacccattcctgggctccggtgactccaaaattt

SEQ ID NO: 111801 - DNA, 310 bp, Arabidopsis thaliana columbia
agaagaaaaataaactctttttattataaccaaaacctaatgaatctgggtccctcccaaggtaaaccttgggaaaaccccattgaaccagaattggcttaaagctaatcctttttgagcgcggtgggccaaccaccttgccggaggaaatccttgtattactggccggtttcttccatggtattagggaggttttccacctaaggaagaatctaaacccaaccccctttaaaaggcttatggcatggccaaaaaattttcctcatggggaaaaggagaaaggggggagctaagctggtgtgcaattttt

SEQ ID NO: 111802 - DNA, 276 bp, Arabidopsis thaliana columbia
tggaataccggggcggaccacagcgtccgttaggcttttggttcaaggattctttttttttttaaccaaattccccattcttcaaggcggggtttcaaggcccggttgggagggtaaaaaaagcatcttgaattaaattggggaacgcattgggtctttttaaaccaaaaggacttggggccaaaaccctggtttggtcggctaagtccgagttttggaaggtcgttagaactggggggaatattgggaaggatggaaaggaggtgggaaccaaat

SEQ ID NO: 111803 - DNA, 380 bp, Arabidopsis thaliana columbia
ttcagaaggatcattctagggggcccaaaatgggttcggaggagagggcttttacctccgggaggtattgggtaacacaacttaaccagacccgtcggtttcttttctttaagccattacctttgaaacaatccagggtttgggtggcaactgggggcagagcacaaaggcttaaagttaaggccctaaagatggacagggttttgacgcggttttccggggttgcttttactgtttcgatggggattccggagatggctgaagctgctggttctggaatctttccttccctaaagaatttctggctcagaattgtttttgggggcctggtcctaactgcaataatgggggtggcgcgcggggtttccaactttgaccct

SEQ ID NO: 111804 - DNA, 314 bp, Arabidopsis thaliana columbia
caactccgcccgccagagccagcttttttaaaatcaaagatgtcggcaccccttccaggaccgggaccggctttggggttttcgggttcctcgaaaatctcaaaaggagtttttttttaaccagcttttaaccgaggctgcataaaaaggtctgtttccgtcgccaagaagaaaaaaagtttaagccttaaaaaatctgaggaagctttcaatgctgttaaaaatctaaggcctgggggggggaattccccggttcaggctttcaaatccgtggggggccaaccggtttggatggatcctgtaaaaggctcaaa

SEQ ID NO: 111805 - DNA, 329 bp, Arabidopsis thaliana columbia
accacttgtttaaaaggagcaggcaagggtttcttttggggtgggccctataacaaaagggattagctggatggttccagaatcttggatgctaataaaggggtttctaatacggcccttttatgccactgaagtccggggggcattggttcggccaagctggtgcgtggatttggcagtttaccttgcattcatcgtttatctaataatgcgaaaaacctaacgtgtttttggcctccgttcagcattgccaaaagagccatgagcgcctcaagaagttttttgaccaaaaaaagggcgggccatttcccttttcggccttaaaaact

SEQ ID NO: 111806 - DNA, 281 bp, Arabidopsis thaliana columbia
ccaaacttaagggcgctggcggccaaggttgcagtttttggattttatgtgggggttccggattactttggtggaaatcctaatattccttttaaccaggacagaccaatccttgtttggataaaagaccatggttgggttaagggctttgaaaccacgaaaccagtccttgaaaccttaaagaccaaaggcttacctgccattgtagccgcagggttgtgttggggtgcaaaagtagggggggaactgtttaaagaagagctttttaaagcagctgggtg

SEQ ID NO: 111807 - DNA, 212 bp, Arabidopsis thaliana columbia
ggataatcgcccttaaccaattccattttttttgcaaaaccaggggaagcccatgggggaccttctaagggataaaagaaaccaaggccaatatggctcggcctcaaaaaattaaagctccaaagtttcatcttggccagttcagggcaaagtttgcaaaactaaggacacactgtttggagcctccaaaagtgctttttgtaggcggtgaa

SEQ ID NO: 111808 - DNA, 265 bp, Arabidopsis thaliana columbia
ccggaagggggcggctgaccaccttgtggactcggcagagccaagggccttcctctaaacccatattagtcctcgatttacttgggaattccctattggggatggttccaaccgcgatcctagggttaagtcctgatgaaaaccctgtggtccctcttaggtgggggatcatgggttttatggtccagggttggttccaggtgggatgggccattgctgagtttaaacgtcgccgggttgctatttctcctcctcctagggggga

SEQ ID NO: 111809 - DNA, 239 bp, Arabidopsis thaliana columbia
ggcggacccacccttcctaaaaaccatgtggaagctttaaactttgtttgtttgggcaaaaagggcaccttcgggaccgtcctttacggaggttcggttaaaagaaccgtcctaaaattcctccagaggggggaggaccatgacccatgttttccctgttgctttcggccaccacatccaaattgttccctgtcacaaaggcaaacatgactctaacggttctttctggggttgtaaca

SEQ ID NO: 111810 - DNA, 326 bp, Arabidopsis thaliana columbia
tttttatttttttccattggagctggaagcatccttagcctaccaaacccttcaccattggcttcaatggctgccgttttaggcaaaactccattcctttttaaaccactaaccaattattttccaaactccgttctccctttggccggggtttccttcctttccaaatccttaccccgccggttaggaccaatccaggccggtttaatcgttcccgccggtggtaagcttgtaaagctcatcggggaagagccaaaccggcaggggaggaaccacaaggcggcggttttgccactttttgagctgacggcaattgacttgcattg

SEQ ID NO: 111811 - DNA, 373 bp, Arabidopsis thaliana columbia
tggatttccggggcggacccacccgtccggtttggataaaaatctttgaatctctccatgtttttttttaataaaaccagggttccttccaggtttcgtccagttggtttttacacctttccttttttaacaaccaactttggtgctcctgtttggaacaccacctcttccatgaccgttggacccaaaggtcctatccttttgggggattcccatctggtggggaagcttgccaatttcgacggggaacggtttccaaagcggttggttcatgccaaaggagccagggctaaaggtttttttgaggtcactcatgttatttttaacctaactggggctgactttttccgagctcccggggttcagactcctg

SEQ ID NO: 111812 - DNA, 220 bp, Arabidopsis thaliana columbia
gggcggaccacacccgtccgaaatcctttcctttaatggaggttaaccaatgttttcttttttggccacttaagctttcggggcattcttcctttggcgggccaaccgggtttttaggccctccatcgacctaatccaaaaggggggcgttttggccgggggcctggtgaccatccggcgtcccgccaggtttactccccaaggcttttgtattgtccca

SEQ ID NO: 111813 - DNA, 368 bp, Arabidopsis thaliana columbia
gttggaattcggggcggacccacccttccgattttaactgggggaccaatcgaaaattgttttgaggatcctaccaaccatttaaggggtttatattttaccccgtggtaggcaacctgttggcttgtaacttgtggaccgaccacttgatcttataactccctgcttgaacggggattaacttttcaaccggttcttttaatttttgcctgggccagaaagattttcttaacaagcccagtttaaccaaggggtcccaagcataaatcgtccttttttggatgtccaagtgccgtttggggaactgtttattgaaaaaccaaccaggattcgggatttgggttttcctgaaggaattgaagcttttt

SEQ ID NO: 111814 - DNA, 328 bp, Arabidopsis thaliana columbia
tccgggcggaccccccttccgtaagaaataagagcccctctctaacttttttttttcctttggctaatttccaaaagggacgttttctaatgattcagggaaacccccaacggttgaggaaatgccggaaaaggccacccctccaattgaggaccgtgggattctttcctaaccttccacctagttcccccctttgtcccaggatttggaacccccctccaaaccaccgccggtttttgtggtgggccagcaacaccccggttaaagtccccttgtggaacctcttttggggtttaaatttacccattccgctggcgtacccaaaact

SEQ ID NO: 111815 - DNA, 386 bp, Arabidopsis thaliana columbia
ccgttttggatttccgggtccgccccacccgtccgtaccaatgaatatcaatggtcctccattgggttttttaattcaactctccttaatggttactttttttgcaccacaggtaaaatttagggctttctttgcctttggggactctttcgtcgccattggaaccaccgactacctggtaaccactgcccgtgccgccatttacccgtttggtttcgactacccgccccgttgacccaccggccgtttttttaacggccttaacattcccgccattttcaggggggctttaggcttgccgtcgactttgccgtaccttatcccgcttttaaccggagaaaatcttttagtcggggctatttttgcctccgcaggattgggaatcc

SEQ ID NO: 111816 - DNA, 266 bp, Arabidopsis thaliana columbia
  unsure (1)..(266): unsure at all n locations
ggggcggacccacccttccggaaaaggttaagaaaaaaggggnggttatttgtaaattccccaaaaggttcgaaaccaagaggggttcttatttgtgaaggaacccccccatcccccgaaaaataaatttctttgtccaaaatttttaaactgaacctaaccaaaacttgcagtttccagtttcctttctccaaccaattgctgaacttaataggtcctttaaaggtttctctccaatttggcaaaccttccaatccttcaatttt

SEQ ID NO: 111817 - DNA, 348 bp, Arabidopsis thaliana columbia
  unsure (1)..(348): unsure at all n locations
tttttnatttccgggcggccccaccttccgaagcctgtgaagttggggccgcctttgttgtttgtttttgcggttttcctccctcggttgaggatccttccgaaccaccatgctgggaaccaattgttagaagagtccccaaagtccaaagcggttgttctccaagggtgggtgggaataatccatgacttgtttttgagcagaaaaggaggggctttccaggctgttggagggaattttaagccccttaggttccaatgcgttgcgaccatgcctgtttaaccagagctgccggttaccttttggagggatgttaccatttgttctggggttttgctttcttaagca

SEQ ID NO: 111818 - DNA, 295 bp, Arabidopsis thaliana columbia
ggaattccggggcggaccacacccgtccgttttataaccaagattaagctggagaggggtttttttttttaaaaggaatggagtttttaggaccatgtttgtgagtttctttacctaactcaattctttttactaatggccctcggttaccaatcaacacaaatatttaattagtaataaagctggaattggtataagctgaaaggtgtgttggtagatgccagcggagataagagtcccaaacttgaatggagaaggatgggctcctaagcttaggaagactctactaaagctt

SEQ ID NO: 111819 - DNA, 250 bp, Arabidopsis thaliana columbia
  unsure (1)..(250): unsure at all n locations
ggcggaccaagacgnccgaaaaaagaccaccacccctaaccaatttttattatttttaacccaaaaaaaccattggggcgagcttttacaacctaaagcggggtcctaaccccaccaccattctttgtccaaactaaagcccaaaacttaaacccctctcctaaagtgtcccttctcgaatctcccaattccactttgggaaatatcctttggtttgaccctgccaaatttaattacttaggaccctttt

SEQ ID NO: 111820 - DNA, 419 bp, Arabidopsis thaliana columbia
ccaaaaacagaaacatggcgtcttcatcttcctcatcgtcttcttcttcgctttcatcaattctctccatcgtcgtagtactgattctaattgtatcaaccgctgaatcagtgaaatcaccgtttcatcctcgcgatttgcttccgcatttgcccagacaagtctcatggccgattctcaactctctttacggcgccgccgatctgcttcctactttcatcggaacagcgagttctgggaacgattccgttgactggaaaggtgcttgtttctttgagaacaccgcttggttagagtttcataacaagtctggtagcgagtttggtggaggcactcttcacattaaggcggataaggcacatagttggacatgtatggatctttatgtatttgcaactccatatcgtgttacatggact

SEQ ID NO: 111821 - DNA, 175 bp, Arabidopsis thaliana columbia
ggaccgacgcgtccgatttaaattatccataattttactcgcatttttttttcaaaacaacttatgaaactagaggagaggtaccttataaaaagggtgatactcaccaacctttttacagattaaatcggacctaaatatcaatatcgtcatatgaaccctttagatcatttta

SEQ ID NO: 111822 - DNA, 228 bp, Arabidopsis thaliana columbia
gaccacgcgtccgaaaaaggcacctggtcgtttctcttcttacttttatgctaaatgccaagacggacgatcaggagactattcttaccttgggagctcacaatctccttatctctcacgcagaagcagttgaagcttaccggaaatgcgaaaagctgtaaggtgggaagatcggaattgctcataattctgcttggttcgaagcacatgaccttgctgattcataag

SEQ ID NO: 111823 - DNA, 417 bp, Arabidopsis thaliana columbia
cctatttataaggaaccaaagaaattgagttttctatgtatacatagagaaagctgtgtgcaatgaaaaatgcaagcacggtttggggaggggttttttaccttttttttttcattttaacaaggagattatctactccatccgactagttccgggttcgagtcccgggcaacccactacggatcgtattcaatcgtattcatatgatttggaaaaaatattcctagagcaattctatttctatgtatgtggattcgcttctaatttatttcatcgattacaaaaaattttttatgaatctaaactaaaaggatcttatccattttacattggtagacaagggaaagaagtgtatcgaggaaacttagaccgagatgtctgcagagagacctgtctttattctttggagcatcgaat

SEQ ID NO: 111824 - DNA, 264 bp, Arabidopsis thaliana columbia
gctcaacaacgtcaagaataatgtcatcatttttttttgcttcttctgccatcgctgccatcggggtccatgtttcttgggtgggaagaaactaatgctgaagaagaagttgactgttccagccgagttcaggccagatgctttgttgcgcgccgatctatctgatccaaatagaccaatttggttcccgtgaagcactccttttatagtggctagacttgtactctcctgttgactttcgcaattattcctcttggtctttta

SEQ ID NO: 111825 - DNA, 421 bp, Arabidopsis thaliana columbia
tgaaacgagtgtaagccagtaacgtcagggttagaagttggaaccgcagagagactgtgtcaggcccgagcactccgcctgaaaacatagggacaggtttcctcggaagaccagagagtcacaagattgcgtttcctgatttagagttcggttctactgtatcgaggaatgattctatgtcttcttgcgggagcgattccacagggactcagagcatcagaacgccgttgggagaagagggtggtattactagtatccggactttcgttgaagggcttaaagagatggctaagcgtcaaggcgaggtctcaaatgctgaggattctggtaaaatgaggagggacattggtctggactccatggacagagaatttgagagacagcggcaagagattctggagctatggcaaacttgtaacat

SEQ ID NO: 111826 - DNA, 321 bp, Arabidopsis thaliana columbia
  unsure (1)..(321): unsure at all n locations
cgacccangcgnacgaccattcgtccgaataaatttttttancgttttttttaccgcaaccaccgncacctncaagcgcggtttcttacgtaagggaggctcatcatccaccgtggcaattttttgaggtgtacaaagcattgcctattttactaaccaggaaatggttaaaaggcatggagagttttgatttacaagatatatcatgtcttaatttatatatattattatgtatatattctttctctattatttcactgtttattaatttttatatataattttaattctttttttttttttttattttccttaattttt

SEQ ID NO: 111827 - DNA, 253 bp, Arabidopsis thaliana columbia
  unsure (1)..(253): unsure at all n locations
aaaacngggccgacccacgcgtactttgtttgaanggatttatttactattttttttttcgccaagacaagaangaaagaggtatgttttatttctgaggtgcggccgaacacaacacggcatcttcgtaggaaagcttgtaaaccacactatcttcaatatatatctttggtcacccgtgttaaagaaaaaaaatgacataaactgataataaatgtttcttctgtatttgtatatttttcttcaacttttt

SEQ ID NO: 111828 - DNA, 422 bp, Arabidopsis thaliana columbia
cttcgcctctcgctccaagattcttacaaactcctaacccaattccccaattctccattcctctctccatgctctgttttgaagttaaaaaacgcatctttactcaacttgagaactcgaattgctcctcttcaaccacaacgacttcggtccaaaacccttgttttgtctgctcagtccagtttcttgaaagttcttagaactgcgtggaatattgggaaagatggaattgaagctggaaccaatcttgtacctgtttctgtgcctagaccagtagcgagaatctctgtgacaattgcagcattggcggtttcgttggttgttgtcaagtcggttctatcgacagctttctttgtattgggtacaatgggatttgcatatttcttattcatagctttaaacaaagatgaagctcctaaact

SEQ ID NO: 111829 - DNA, 340 bp, Arabidopsis thaliana columbia
cttccttcttcaactctatttcacttttctatatatggctacatctcctacttactcagggggtatatttctctggagcgggggcgtcaaaatcactaccttgttattccaactgtaaactccgttacaacggtggttacactctcttcctcgccgttcctctctccttctcatttacctggtagatatacgctctcgatctcattgtcaattttgaattacactataaaaaaaaaacgaaatcggttttgtggaaagagaaatttacgtcacacttgtggtgcttttaatcaaaatttgtctttaatatgttttaaattattcttctgtcttactctga

SEQ ID NO: 111830 - DNA, 288 bp, Arabidopsis thaliana columbia
cacacttgtctcaaaggagcaagtcatgggatcatttgtggttggtcctatcacaaaagtgattagctggattgttacagtattcttgatgctcatcaatgggtatcttatactgtccttctatgccactgaagtccggggagcattggttcggtcaagcttgtgcgttgtattggcagtttaccttgcattcatcgtctatcttatcatgcgaaatacctcactgtattctcgccttcgctcagcaatgaccaaaagcacattggcgcctttagaaggtttttgaac

SEQ ID NO: 111831 - DNA, 231 bp, Arabidopsis thaliana columbia
gcaaagatcaagatctgcattcatgttttatgtatcatccagagctgctcctatagggagcgaagtttttatgagtggacggggtcataatctcaaacaggagcagaattatatgcgcaacaaagagggagcaatgaaagctagcttttttaaccttggatgagttgttgccactgcccgaagagacaaacacccacaagtctatatagtaaaaacgtttgatcagatccc

SEQ ID NO: 111832 - DNA, 229 bp, Arabidopsis thaliana columbia
  unsure (1)..(229): unsure at all n locations
cacgcgtactatcttattaactaaatacctctctattttttttacactcacaccgaaanggccaccgcgggaatttatattacatggggggcgcagaccccaaaggccctcaagctatcccacttgtcctccgacttatatgcaaccccacgaaaaaacatgcccaaagcatacattccaacctttccatcccataacccaagctaactatccaaccgagtcaaaaaca

SEQ ID NO: 111833 - DNA, 425 bp, Arabidopsis thaliana columbia
gaaaaggtttaggaaaaatgtgttgttgatttgagatttctcgaagtgttggtgagcgattagggttctgtattgtgaatctatcgcgtcgttcgtcggagaatgaatttcgttgtacagagattttagactgaacctaagcagaacttgcaggttacagtttcctttcgtcgatcgattgctgaacttgataggttctttgagtgtttctctgcgatatggcgaaccttccgatccttcaatttgaagagaagatcgtggaaacagtggagaagaattcagtggtagttataattggagaaaccggttctgggaagagtactcagctctttcagatacttcatcgacatggttacacaaagtccggcgtcatcgccatcactcagccccgacgtgttgctgccgtttccgttgccaggcgagtc

SEQ ID NO: 111834 - DNA, 384 bp, Arabidopsis thaliana columbia
  unsure (1)..(384): unsure at all n locations
gaaaaggattaggaataatgtgccgtttcatttcatcacaagctgcgagtacctctctggacgtctcagcttcttaagaaacatgagctagagtagaagcttctagtgacccgggaaccctctttggtggtagttctatgaatnatatctatnntctatgtgagagaataagcttacttacacctcggacaaatggaaaagagattggccccaaccatggtgaacaaattgaaagcacgctactttgtccgtaaggctaccagtttgttgatacacaggttacatttttcgtaggggatggctgttgtctttgaaaggactccgaaatgaatacaaattaagtatataggttcagaagactatgcagcttttagaggtgatctg

SEQ ID NO: 111835 - DNA, 272 bp, Arabidopsis thaliana columbia
ttattgttcgtttctatctcaacatgtatttttttacctaggctaagaatggatcgactggtaaatcttggatggaaattgctcttacctatttcccttggtaatctattattaaccacttgattccaactctatctactctaaacttaaaatgaatctaatatattcattatttgtttttaacaagacacagaaccaaagataaaatttttcagagatatttacattatgcttcctattattaccgggttcatgaattatggtcaacaaac

SEQ ID NO: 111836 - DNA, 388 bp, Arabidopsis thaliana columbia
ggcggaccaaggcgtccgggatatgaaaaattttccggggttggggaagaaggagcttaaatcagttcctaagcaggctgtggggtggtttaaggacaattaccctgggtttgttttaaaacaggctttaatcaaggttcctggggggaacctggggtttaatactgggatgggcccgttcatgcccccaagatcaaggggcaggctggggttggctggtccttcgggttcagttgaaaccttattaaaatccatataacccgggcaggttccagtccaatttgggggatggggggtggatccttgcgactgcaatccaaacttttggtgggaggattcagcctttgagatcactgttaagcccggaccaaaccaaactgttgggatc

SEQ ID NO: 111837 - DNA, 381 bp, Arabidopsis thaliana columbia
cggggcgggccacacccgtccgttggtaaaggcataaaggcaccggtttgattttaggttaagcatccttaacatttggaatgggatatttgttatggggggggggctttacaatcccattttgaaccacgtccaacaccaaattgatgaaacccaaatggtgtgggagaaactccaaaccatgaccatctttaactaaccaaattgccattaccgaagtccaatgccaactttttttttccttaacggggttgcctttgccatagtccatgctaacttaaggtttgaaattggtttaaaggcccactacgtgatacttggcctttaatgcatccctcggatttccaagtcctacattaacacaaaggacacaccatccaa

SEQ ID NO: 111838 - DNA, 448 bp, Arabidopsis thaliana columbia
aacccgggcggaccaagccgtccgttcttcaaaaggagtttcaataatggcttttttaccctaacccttcgccgcattccggcggtccaattcctttaaggcgggacccataaaatcatcttcaactatccgaagcaaaacggtggtgttggattaaccaaagttatcatggacgtaatccataatgaattttggagtggggttcaaatcgtaacgctaatgaaatggtttgggctggaaccgcacatgttataacaggtctttattggagaaggggatggcttaattattttttgtaccaaacgactactttataaatgggggggccaaggaggacttaatggccagtttggggtcccataagaacccaaaatctttttacatcataatcgaacttgcttcgttttggccaatttccagtttgagaaatcaactgtatttcactgaa

SEQ ID NO: 111839 - DNA, 325 bp, Arabidopsis thaliana columbia
gtccgttgaaaatggacctggtttttttacatttcccaaaagaaaccttaatgtccacaccaatttaagtccacattttaatccaggaagccaaccaccatcaaaaccaatttccatagccatccttttttaattgaagctgatcaaacagtacccttccaaatgaaagagaagatcctttgtttggagctaatgggaatggactaaggaaaggccttttttttaaaccaatgtttttgttaagcccccttggattcaatcaaatcggccttcaatttctttaattaaaagggattttccccaatggccttccaaggattttggg

SEQ ID NO: 111840 - DNA, 402 bp, Arabidopsis thaliana columbia
actttatggaagggggtaggagtaggaggcctaaagggccggttcttaagtccgatgatgggtacttaaagtttttggtaaggtttaaccgttttttgggggggggatttaacagcaccttaaaggttgggattttgaaagggtttttaatgagcaaggtaaacaaagttcctttttaattttttaggttggtaaagttaatgattggcagggttgccaggatggttgggtgggtgggacctataactgatgattggggggttcatgagattccggccatgaaggtaactgcttgggggttaactgagggggttggggttggaatggaaaaagctgttggggagtgcttaacttttgaccagttggttttaagagttccattgggccagaccacagtttttt

SEQ ID NO: 111841 - DNA, 454 bp, Arabidopsis thaliana columbia
cggaaatcccggggcggccccagccgtccggcaaggacctttttttccaccatggcaaccatcgggaggggtcaaggtaaataaggtttaagatttagccccagagggggggattaacgggtttttttccttttaaggcgacataaaccacatggaaatccaaaaggaattgggccggcttcgaatcgaattggttccattaactgaccccaaagccttcgaaatggcctggttataatggggggcaacaatgggggcccagatggttccaataccacgggctgaaacctatgttcaggggcgtgggacacaggtttggggtggtttggaaccaggttttaactaaggtccggccaattggaggcctaagttcctgtcaatgtaggaggtaagaatgttggccaccgcgatgcctttgggttctaaggagagtcctccccagcctaaaccgacc

SEQ ID NO: 111842 - DNA, 457 bp, Arabidopsis thaliana columbia
tgaaaaaccggggcggaccacagccttccggaaaatatccaaattttgcaattatccaagatcgtcttattggccaacttaggggtttgggggtaataactttggttgaccggtgggttgttaccaaagttatcgaaaatcctaatgtaataaatggcaaacaggttggaatcaaaaggcctattccaaagggtgttgttggcaataagccaagggccataaaaccaaaaaaaattttcgtggggggtttaccttaaacggttccagaaaatgaacttaaggccttttttgccaagtttggaaccggggggaaccaccagttatttggggaccttgaaccaaacaggtccagaggttttggtttggtattttttgttggcaaaaaagtcttaaataatatttttcccaagggaacctatttctttttggcagaacttaaggtggagatcaagaaagt

SEQ ID NO: 111843 - DNA, 300 bp, Arabidopsis thaliana columbia
gccgggcccgaccaacgcttccgtttttttggatcgacgactgtttttttttttaaccggaaccggggtcacggaccgaatttaatccccggaaaaccgtttggtttttttttcgaaaaatcaattggaatttccgccgacctgatcgggaggggtaccatcaacctgatggggaggggtacccgcaacctgatcgggaggagtaccagcgagcttttaaccgtcaggcctttcgaccttaaattccttttggaatggaaaaaccagacctctggcttcttttttttggccgaacaggac

SEQ ID NO: 111844 - DNA, 328 bp, Arabidopsis thaliana columbia
cggggcgcgaccaacccttaatatatttatttaaaaatacatttcccacttttaataaaaaaaaacactaccaccccataaccgaggcctttttcaaaaatttgagcgacccaccatttaaacttttaacaaaaaccttcttaacttttctttaattattaaaaccctttcattcttttatcaaaaacacccaatttctaacctttctatccacaattaattctaaaaaaccacccttacttaaacaacctattattttattcccataaccattaaaaaaagtttattttcttttccttaaaaaaaaaacatttattcttcctgaaaa

SEQ ID NO: 111845 - DNA, 273 bp, Arabidopsis thaliana columbia
gccgggccaagccgtccttaaattaaagaaaccacataaccaatttttttatttccttcctaaaccatgtttttgtccgcccttttttaacccttaaaagttaaaaacccttcccaataaaatacccttttaacctcccctttaaccataagaaaaactgtctccaacccaaaggttccataacccaacccatatttctaatctaaccaattaaatatctttattccattctccgctaacccccctacctacctaaccgtgaatttccccgtt

SEQ ID NO: 111846 - DNA, 369 bp, Arabidopsis thaliana columbia
  unsure (1)..(369): unsure at all n locations
cccggaanncccgggccgaccacagccgtccggggtcttccttttataatcggaattaaccaatcggattctccggtttttggtttttttaattggcgaatctttaaaccaatggggagtctaacctttgttgggtccttaacgattttaaatctccgatgaatcaaatccatcaaaggatccatctttaaaaccgggttccgtaattcgattggctcggtttttggttttccgtttggaatccttaataaagaacccaaattgggggaaaaaggaggggtgtggttattaagggattgggaggtttcccgtccggttatggttaccccaggggtgggtgttttgccattattcgttccggctctcctg

SEQ ID NO: 111847 - DNA, 386 bp, Arabidopsis thaliana columbia
gggcggaccaacccttccggcctgccgaataaaatgtcctcggagtgtcttttttttgaccataagaaaaacttccgggaggccaaaggttcaataagggggccaatgtaccgaatctaaccgagtaaagaccttgggtcaattttccggcaggcccccaagttacctaaccggggagttccccggtgattacggttggaacaccgttggtttatccgccacccaaaaaactttttccggaaaccgtgagttaaaatttatcaacagaaaatgggccatgctcgaagccttaggttgctttttccttgacttattggttaggaacggattgaatttcgaataaccgttttggttaaaggccggttaaaaaattttaatcatcggag

SEQ ID NO: 111848 - DNA, 331 bp, Arabidopsis thaliana columbia
ccgggcggaccgagccgtccaattcgtccaatttgggggaggggatcccaatcattttgaaataaacagcttgtaatatccgacgtactgttctgaagagggttgggactttaattgaaacctaaccatcaatccaagaaatgttcagccaattaagtaaccatttaacagttattttcaggaggaaggcttttttgctttggtccacagttaagggattggccaaaatggatttcacagaaccagaaaccaccatgaccgattttgtgtcaaagtcccaccattcccaatatccaccgtctaataaaaaaggtacctccggggtttagga

SEQ ID NO: 111849 - DNA, 421 bp, Arabidopsis thaliana columbia
ccggggcggcccacacccttccgcttgatttgggcctgggggatcgaccctttgttcttgattcaaggtttttttgcaggaagggtgccttggttaatgcgaccaggtaagccacaccgattccaaaggaccgcttaaggaaccgattagttttccatgaggggcgtttagcgcaccgtccaactccgttaaacgccattataacatacctatggtttcctttgggtttaatcctttcaataattggggtttacttaaacctcctttaacttgaaggattggtccgttccactaacaggaggttcgggatccacttaaccattcggggtcatggtcctcaacttccttcccttggaactttgggcaccttttatgtccttaacaaccgacccgggctggatccaataatcgtggttttggt

SEQ ID NO: 111850 - DNA, 387 bp, Arabidopsis thaliana columbia
ggaaatcccggggcggaccacagccgtccggtggttttcgtcgccgtgggggctggggttgtttattttttaacatcctcaaaaaaacgcggggggtgttgggatccagggaatttaagggagttaaagttggttaagagccataagtttagtaacatgggggccaagttggttttggaactccaaactttaacttttgggtggggtcttccaatgggccaccacataagtggcaggggaagggttggccaggggggggaggttattaagccatccacccggattccgtaggactttgccgtgggacgtttcgaactggtaattaagaggtttccgaagggccggttgtttaatattttaagggggaggcgtgttgaagaccttttt

SEQ ID NO: 111851 - DNA, 375 bp, Arabidopsis thaliana columbia
aacgggcccggaatccggggccgccccacccgtccgtttaattgggccggtcaggattaattttattttttttatttaccccaccaggaggtttctaacttgattctgttttgtaaagtcccccttttttagccaccgcgtttttttttttttcctggtcctcttccgccgccgccgcggttgccttggaaactcccaaacccaaggtttgcttcttcggaggtggaccaccagcccacacgggggcgatctatgcatcgggggcggagcttaagcctttctttcttaaaggatggatggttaacgccatcgttcccggcggtcaattaactccaccacccgacttcgaaaacttccctgggttccttgaggggt

SEQ ID NO: 111852 - DNA, 436 bp, Arabidopsis thaliana columbia
  unsure (1)..(436): unsure at all n locations
ggnccggaatcccggggcggcccacacccgtccggttttccaaattttcgttaaaaccttaacttgaaagacaattccttttgagggggggggtgttaccaccatcgacagggggagggccaaaatccaaaacaaaaagggttttcttccggaccagcaaaggctgattttccccgaaaggcatttgggggatggcaaaacttttgttgcctccattatccaaaaggggtccacctttaatttggttttaaggttccgggggggtttgcaaattttcgttaaaacgttaactggaaaaactataactttgaaggtggaaagttttgccaccattgataccgtgaaacccaaaatccaagacaaaaaggtgtttcttccggaccagcaaaaatggatcttcgccggaaaccaatttgaagatggcagaactttggcc

SEQ ID NO: 111853 - DNA, 152 bp, Arabidopsis thaliana columbia
aaaaacccgggccgaccaacccttccgacctccaattaaacctccacctatctttttttcaccgccaaccttttccctcctcgggccttttaaaaaatattggccgcgccaccaatttccctttttaacaaatccaagaaattttaaaaacc

SEQ ID NO: 111854 - DNA, 394 bp, Arabidopsis thaliana columbia
  unsure (1)..(394): unsure at all n locations
gggcggcccacacccgnccgctttaatattaatttccttcctccgcctccttaaaatcaaatcttcctccgccattcaagtttgggggggccagaaccggggaaagggtttcttttagggaaaagcttttaacctccttttccaattaatccctcctttcttcaatctttctctctttcgatttcgatccaggggggttggggaaggaagaaggggaacccccccccaccatcggggttgttccggcgggcccggccaaattcccgactcccattttttttttgggcttttgggggggcacggcagcttccggcgttgttttagggtttattttgggccttggttggctttattttacaatgccttaatttgatttccgcgtttttaagcttcc

SEQ ID NO: 111855 - DNA, 385 bp, Arabidopsis thaliana columbia
  unsure (1)..(385): unsure at all n locations
ggaaanccggggcgggcccacccttccaattttatttcccaaaccacaaaccaaaaaaatttgttttccattgttttttaaacccccgggggggaaacttaattaatcgggggttcccaacttccaataagtttccgttcctttccatcagccaacacacaatcctttttcggtttaaaataaggccccgttcgtggtggccgtgtaacagccatggttccttccaaggtcaagttcataacaccagaaggtgagctaaaggttgagtgtgccaccaccgtttactttcttgatcctgttgaggaagctggaatcaatttgcctaactttggccgggctggttcttgtccaacctgtcctggtaaagtggggtttgaatctgttg

SEQ ID NO: 111856 - DNA, 438 bp, Arabidopsis thaliana columbia
cggggcggcccacagccgtccgcggaactgtttgggatgatggtcctaacgttggggttaaaaaggtgtccttgggccaagggcaggatggaatttaagttggtaggtttgtttccaacaaaagccttgagggggtaacaggaaaagaccttggaaggagtcttttattcggattcgaagagttcgtccttgattatccaagtgaatccataaccgaagtcgatggcccttttgataaaatttttgggggtgatggttaagtcttaactttgttcaggttcaagattattaagcaaacgtttcttccttttggacttgaagttggcccagttttcgaactaaaagaggaaggccacaggatcgttggtttcaatggaagagccgttgtcttgttccacaaaattggagtccatgttcgtccttattccaactgatgat

SEQ ID NO: 111857 - DNA, 454 bp, Arabidopsis thaliana columbia
aaatcccggggcggcgccacacccttccggaaagtacaaccttgttttaaaagattctgaataaaaagagctaaaaggtttcctcaatgttggcaataagccattagggggggtggatttaaaatcctaaaatttttaaacgcccatggattaataactaactatggtaatggaagatgatatggtaaaggggatggttgggtttgataatgaagggggtacctaacagagggtggtggactggcttgccattgtggccaccacctggaagtgatttaataaaacttggttcaaggttttccaattttttcctcttcctctttgtaacatgagggttttaaaaatatcggggaaaacggtttaatggtagtagggttttgaaataaataatcataaccttttcaaaaaaaaataataatttcatttcaatatatattttatttattattattat

SEQ ID NO: 111858 - DNA, 323 bp, Arabidopsis thaliana columbia
  unsure (1)..(323): unsure at all n locations
gggngggccaagccgaccaaaaaaaaaaaactttgnccttccatttttctcttatctaccaccactaanncctcggccgcctcctttttaaacaagcggtcgcttattaaaaccaaaaaaccaacttcctccctcccccattctacaaacccttctttaatccccaatcatctttaattttcaccttaaactcttatccccaatcaaccatcctttaaaaaccttcctacctaataatttccctttcctcaaccactacttatttacctcccccatttacttcaatatctcccccttacctccctattaaaccttcaattccc

SEQ ID NO: 111859 - DNA, 372 bp, Arabidopsis thaliana columbia
  unsure (1)..(372): unsure at all n locations
gggaannccggggcggaccaacccttccgaaaggtaacaaagtccaagaaaattttccatgtgaaaagcccaagaacttctttaacccgggtgcaattttaaaccgatggggttntcttaccaaccaaaagcctttctttaatttaaaggtaaaggacttaaaaaacgaaaaattgcttatttcctttatttttgaattctaagttaaaccaatcgcaactgttaaggaacctttaaaaaactttgttaacaatttgcccaatcaattaaaaaacaacctttggtcctttgcaacaaacttggttccctaaaagtaacccaagtcctattttttttaaaataactttttttcaaattttttaaattctatta

SEQ ID NO: 111860 - DNA, 445 bp, Arabidopsis thaliana columbia
  unsure (1)..(445): unsure at all n locations
cggggcgggccagccgncnaaaataaacatggttcctggaggccatttttttaaaaaggggataatatccactaggcgcgggaaaaaaagacccaggggggtttttttaactttaaacagttaaaaaggttcctaaggggttggttccacctaatttaattgcaattttaacaggaggaccagaaggattaggattggaaccagcaagagtcctttcaaaaaaaggtcctaatttgttaatcgttccccaaaccattgcacctgaaaaaaaccccaaatcataattttttaaccaaaccccaaccccacttgtaattctttttaaattaaactttctttccttaaaatccataaaagcttttgttcttaaatttaatgccttcaattttcttataaatttcttaataatcaattcaggattatggttttgcccttaccaactctt

SEQ ID NO: 111861 - DNA, 419 bp, Arabidopsis thaliana columbia
  unsure (1)..(419): unsure at all n locations
aaaaccatgccctcccaaaaccccttttatatttccaccngaccccttctttnccgatggattttaacaaaaattgtgcggaccaaaaaaacaaccaccnttcccattttttccaccaccctttaaatattcccaattaaccccaaatcctaacctttttaaccaactaacttttttccctccttattaaacactttccttaacttttcttccttaaattcctattaattaacttacctttaaaccttttttctcctcctacccaaaaccaacttctttccccttcacttccgttattaatttctacatttaaaacaactttttcctatctaaattttaaattcctcataatatatttttatttttcctaatctcatttaacttctcctttttttttcttttctccctttcttcttttt

SEQ ID NO: 111862 - DNA, 409 bp, Arabidopsis thaliana columbia
  unsure (1)..(409): unsure at all n locations
ccggnttggaancccggggcggaccacagccttccggaccgtatttaagggtttaccaactttaatttttcttctggttccctaatttaaagggggaatttttttttttactggtgggtccataatttccaactgggttgttgttcccaatgaattaaaccgcttttaaacccaaaaggaatttttttgtttaaaaaaaaaaaaaaaaaaaaaaaaaaaaaaaaaaaaaaaaaaaaaaaaaaaaaaaaaaaaaaaaaaaaaaaaaaaaaaaaaaaattaaaaataaaaaataaaaaataaaaaaaaaaaatataaaaataaaattatataaagaggggggggggctttttaaaaaacccaatttttcttcccctggttttccacataatttctttttttttgggccccc

SEQ ID NO: 111863 - DNA, 457 bp, Arabidopsis thaliana columbia
  unsure (1)..(457): unsure at all n locations
ccgaaancccggggcggaccagaggcgtccggtaccttttccagaaaggttcaaccaaattttaaccgtcctataggattaccattgttggattggttccgcccaacgaacgggggttccttccaaccggaaaataaacgttcgtaatcgttttaattccggttttttttttttccacctagaacccttttccgacccccacctatttccgcgggggaggtgaaggatgtcccgatcccaaaaattgataaaaccggccgtttaaccagtcttggacccgaacccaagctcgttttggaaatacttattccccaatccttaaaaggctttgccccaattcgtttttttaagaggggattaaccccaggaggggggcctggttccaagtttgccaggagttctttgttggaatccacccccataacctttgaaggccccccagttaaaccagaaccaa

SEQ ID NO: 111864 - DNA, 346 bp, Arabidopsis thaliana columbia
gtcaaatttgttttatggtggtttttgtgttgaagggcggtccaattaatgggatcggtatcaaaaatttttttgcagggttttaattggtccctgcccttggatttttactttatgggggaaggcttttcctaatgttgcaacggtttccagtaaaatttaaaggccggcccaaaaggctgcaagaggttggttccgtaccacccatatccttaacgtgtttcctaataaaatgaataatgatgggcttggttgctttcaataagggggcaaaccttgattttttaaatcaccccatccttaacttaatatataaccggtgggtaaagaaattaccctccttttt

SEQ ID NO: 111865 - DNA, 364 bp, Arabidopsis thaliana columbia
ggctgacctacaaaatgatatttttattgcttccaggaagatccgttttagggctgaaaattttaagggagggatggtgttaacccatttttggggtttggatttaacacccaccaagttaaggtaattgttaaaaaattggcaaactttgattgaaccccatttcattttaaaaacaacaaacggttccaccttgaggatgttttgcatcgctttaacaaaaagacttcttaaccaagtaaagcgtccttgtacccttaaatccacccaatatcctcaaatccgaagaaggaggagggagattttgttaaaggaggtttaattttttgacctaaaggagtttgtgcccaatttaatccaaaag

SEQ ID NO: 111866 - DNA, 393 bp, Arabidopsis thaliana columbia
  unsure (1)..(393): unsure at all n locations
cggggngggccggaggcgtccgaaaaacggatccgtaccttcggaaaaaggtttgctttttattttttcccaacttccaagggcaaggatgttaactggttgttggtggccaatgtccaatggaaaatgtttgtcaagttttgcaaacttttgccctttttaaagggatctgaaccagttgaacttgctccaagggcaatggaaaagtcctgcaagaccagatcttgatttattattaaaaaaaaggagccttcattgttcaccattttgccgggtcctggatttaatatgaattttaataattgattgtggctatgacgtatttatttgtgttgtaatttaaaatcctggttgggtttatagggcagttttttaccagtaagatgtggccaa

SEQ ID NO: 111867 - DNA, 433 bp, Arabidopsis thaliana columbia
ccgggcgggccacagccgtccgttaaaacttttaataaaaatcttggtttttttaccaccaccgaaaaaaatttcctttttgtggaaaaactaaccaatggcggttaaccaaaatccaaagttaaagcttaacccatggtctgttttggccatgtgttgggaataaccagtccacctgaggaaaccaggaaaggttccggtgggggagactcctttgaaaagactgggacccagcctttttaaatccggtttcgttgccaaacactttgaggtggccaattttcctttgttggaaacaataaaggagcgcatcccggagatgtgtgcaccgttattaaatgtgtcttgtgttcaggtttatgatcaccttgttgctgtctttaaagctgaattgatttcttccacttaaaaatttttttcttttattttattt

SEQ ID NO: 111868 - DNA, 404 bp, Arabidopsis thaliana columbia
ccgggcgggccacacccgtccgttccagaaaaggcattttccaactttttttttaaatctgaactgtaatcgattaagttcgggaaaaagcctaaccaggtcgggataaacttcaaggaacctttgaaggccttttttctttttttccattcaattaaggcaccattaccaaaccgggccactgttttaaaccaccattgtaaatggtcagaaccaccaaatttaaaggaattaaattttgccaaactaatcttaacactttcaaccaaagtaggaaaagttgagttcgattccagagggttaaaaccaaaaggtggggaggccacgggaggattttaaaggttattaaagggattggaagttgagttattagggtttcaagaccaaattacggaaaaaatgga

SEQ ID NO: 111869 - DNA, 389 bp, Arabidopsis thaliana columbia
cggggcggaccacaggcgtccggcttttaaccaatttttctttttaaattaatttttttggaaccctaaaaaaattaagtttcgggggaattccttgccgagccgggggaaaaaatggcaactccaacttcgtcggatcgggaattcagccttgggaaagagttaaaggggcaggaggtttcgttggatgaattgaccagcctttttttttttcgaagtttttaccagaaaaccggtaccttttttttcttaacataagccgggaaggcgaaattttttgcccagaaccacctggattccgctaaatctgaaatcaccaggattcgttcgcagaattaaccattgagaattcttagtggttgaggatccaccagggctgttcctttttt

SEQ ID NO: 111870 - DNA, 381 bp, Arabidopsis thaliana columbia
ccgggcggaccacacccttccgaaaaaaggtaaagagggaaaatggaatcttatattttcgaaaaaaaaggaaagaaagggggggttgttaaccaggggggccgccataaactttaaaaaaccctttaatagtttaccttttaaaaaaaaggttccaaagccaatcaaggaaataaggaagtttcttaaaaagaaaatgggaccaaaggttttaaaattggtttttaaattaaccaaccaattttgtaccaaagttttcaaagttcctccaaggagaattaaattcctatttgttcttataaaaaattttgttgaggttgcaagggaggagttcttcttttttttaattttttgttaaaatcctttttaaaggattttttg

SEQ ID NO: 111871 - DNA, 403 bp, Arabidopsis thaliana columbia
ccggggcggaccgagccgtccgtttttcacaagcactcaatttaaccgtttttttatttttaactaaagttggctttaaaccgtcagagggttaaacccaagggttggtttttttttccataaacgttttcgttaatggcaacccctattaaagcttttttttcttccaccattgggaaaaccagtgatggtttgaaggtccagtctaatgttcaaattggggcaaccattctgttgtttgtggaaccggttgtttttgtcccctaagttccaaaccagggaaaccaggaccatccaaagtctaaaattttggggcgggcggtagcaccaattcattatgttaagttgaaaaatttgggtttaaacccatctttaaaaggacccaattttgggggaaggttct

SEQ ID NO: 111872 - DNA, 459 bp, Arabidopsis thaliana columbia
  unsure (1)..(459): unsure at all n locations
ggaaatnccggggcggcgcccacccgtccggccgaaaaacgccattgtcggccaaatcctttacaggcctgaaaataaaggtaaagagttgggttaacctttaaaattggggaggctaaaatggtttgtgagaaaaactgattcaaaggaaagtcgtcggggacccatggattttgttcatggacctcctactaagtttttaacttccaaacctgtcatgtttgatttgtaaaatcctggatttaatggttttgcacctgactggataggattcgatttaagggccaaaccgaaccctgattccggttttaattccacaaaaaaggagtcccatggggcgtttgataaactgtttgaagtgttaaaggccaaatttcctttttttctggtggttaagggttttttggaaggttcatatggttaaactgggcctttgaaaaatccaaccaggtttgaaaa

SEQ ID NO: 111873 - DNA, 244 bp, Arabidopsis thaliana columbia
  unsure (1)..(244): unsure at all n locations
gaatnnnggggcgggccgagccgtccgtttgtttttttggggtttttttcaattttttttattcgcttaaaaaatgcttcccccgggcccggtaaattaagaggggaggaaacctgtgaaacctgaccaccatggtggtggtttcggtgccattggaggaggaagttcccaaggggggggcggccttggtggccacggaggggggggatcccaaggtggaggaggccaatcccaaggaggcttt

SEQ ID NO: 111874 - DNA, 250 bp, Arabidopsis thaliana columbia
cggggcggacccagccgtccgaccaggagggagattttaaaaggaaccttgattttttttaggttggttccatggccttggaggggtcttttaatctaactggctggcgttaagccgccagttaattttgtccccttcccaattaatcaacccgcggttagcctaaccccgggtttgcctgttccaaaaaacccgaggggtaaggttccaccggtttgttggcccaaagttggtcctctaattaaaccca

SEQ ID NO: 111875 - DNA, 394 bp, Arabidopsis thaliana columbia
gggcgggcccagccgaccgaaaccatcctaaaaccgttacctggaccctattttttaacaaaccagtggaagttttttgggggctttaacacagggagggggcgcgaaccttttgaattggtccttaattcttaatcctgccataaccattcaaggtccaataatcctttggaaactcgttcctaaaagggaaaaaccctttgccgcccattacggttacttgtggggcttcaataccctccttgtccggttccccacaaagcttcctaaactttttaccaaatttggcggcctttttcttttccatttcaacaatcttggggtcttgccccttttttgccttcaaaagaccaaaaacttttcccaatttccatttaatctgcccaccattttt

SEQ ID NO: 111876 - DNA, 358 bp, Arabidopsis thaliana columbia
  unsure (1)..(358): unsure at all n locations
cggaancccgggccggcccacccgtccgttttgatcattcaacttttcaaaattttgtttaatcgccttcgcaatcgcttttttgtggagattcctaaaacaaggccttgttttttccncttttttccttcgccgccggttttatttccgcctcccgggggatttggtccatcggggaaccagtgccggattctttactccggcgtcccgccaccaaaaatgggttcctgtcctttggatcctaggaaaagaggagattcctctgtggttgggggtggcttaaaaaccgttaatgtcattgttgttcaggtaacggaggccgataaggccccctttttccccatttttaaagcccccg

SEQ ID NO: 111877 - DNA, 322 bp, Arabidopsis thaliana columbia
  unsure (1)..(322): unsure at all n locations
cggcccggaaaccccgggccgcccacacccttccgtaaagggggggaggccgttggtaaaatttttttcaccaaatttgaatcgatttttgaagcctccattccaggatttgggggaaatcgnttttaaaagtgacccccctttctttcggaccttggtttcctttcggaacccacttcgttgtgaaagaaccgaattcattttttcattgttgccgtgaccatggagtcatttctttctttaccccttaggttacccctaatgttcccccttggtagtttttggttcatccatttctttacctggtttgtcttcatcccaa

SEQ ID NO: 111878 - DNA, 287 bp, Arabidopsis thaliana columbia
taaacaaacccaattccccaaccctttttttattaaccacttcccgttcccttaacggtggcccttttaataatgccgaaggaatcctaacttaacttatttccaaaaacccctccgccaagtgcaccttttttaccaacctttccacccaccttaatttccaattcataaccaatatccgttaacttaattcctcctataaaattaaaatcctttccgttcaaatgcttttttttttcaaatccccacctttaattttttcttttaccaccaattttttaactctt

SEQ ID NO: 111879 - DNA, 433 bp, Arabidopsis thaliana columbia
ggcggcccacacccgtccgagtgggttcccctgggggaattttaaacccgtttaatttggttcctccccaggaggccagggggaaggacttggcaaccggggggtggccatttttggcttttttggggttgggggttaaccacattgggcctggaaagggcccttttgggaatttgtggcaccattggtttgccccatggcccaccattttggtccaacctttaacctaaggagtgaggccggccttatgatctaatccctatttattttccataactttaatgtttgcctgggggggggttcaattttaaagttttgggtttttgagctggattatttgttgacccgtggtagttccatgaccaaatttggattcttaattgtccaggggacctaggttattcaccaaaaattataaaaaaaaattattttt

SEQ ID NO: 111880 - DNA, 426 bp, Arabidopsis thaliana columbia
  unsure (1)..(426): unsure at all n locations
cggaancccggggccgcccacacccttccaattttaacctaaaaccccataactttttttttattccataggaaatcttccatttgaggtggttcccgaacctgagggggcggtggtccctttaaaatcttaacaatttttgctttaaaacctaactaattttaaactagtaaaaatttttggttccggccatttcccacacaaggagtgtcctccaccacttttttcccttctcgcttccttaatttccaacctgttccctaacctcccaacctcttaaaaccacccaaaaccttttaaaaaaaaattttattggaaccatttgcgagaccatcagaacttttttccacaaaaatccaatttttcgtgtttccatccatcaccgtaaataagccttcattgttttcttaaaggttttaaatctcc

SEQ ID NO: 111881 - DNA, 445 bp, Arabidopsis thaliana columbia
  unsure (1)..(445): unsure at all n locations
aaatnccggggcggcgcccacccttccgcttgaaaaatggaccggggttccttaacaattattggttggaaacggcttctttccccgagcggtcgttttttttttcgggggccccccgaattgggtttccccgtcggcaaccacatcttccccgataggccgttttcgttaaacaacaagttgttttggaccaccggacctgcttttccagagccttgcttaaatcggttggttgttcccgtcggaaggtttaaacctttgccttggttgattgccggtttagggttttttgtgggcctcggcctgttccttgttttaaccaacaaggtttttaaggttccatttacaccaaaggtgtttccatttaacaccctgaaagttgacctggaaggaaagccttaaagccccatttaagtgatctgttaataaaaccaggaagcttttt

SEQ ID NO: 111882 - DNA, 448 bp, Arabidopsis thaliana columbia
  unsure (1)..(448): unsure at all n locations
gaatnccggggcggaccacagccgtccgaaacgaaaaaaaagttatggttgaaaagaagagaacctatatttagggaaatggttttggaggcggttcccgtggaaggtttgagggcaggaaccattcaaaatcctccaccccatccgttaatgaagggggcgaggttaaaaaattgcttttctaacaaaccaattttggcaaagtcggtaaccaccgtccggttttaatacataaccgcttagccagtaatgggtttcaggattaagtccaaacctaatcccgttggcgtaaattgcggggtagttgaaatctcatgattcattggggcgtcgggggtgttgagctaaatccggaactattgaaccggcgggatctttggtggtagcataaacccaggggttccttttggcctatactgggaccgtaaggggtcgttccttagggccg

SEQ ID NO: 111883 - DNA, 421 bp, Arabidopsis thaliana columbia
  unsure (1)..(421): unsure at all n locations
gggngggccggccgtccaatattatataaaaccttttttaccataattttttttttttattaataagtcgccctaaaagaaggtttgtttttaagaagggtcgagttcctttttttaatataaatcctttttgtttaaacttggtttaaaacctaaaaaatcttaattaatttaatttttccaattttgggtacctaatctaccccataaaatttgggttaaattgttttgttcctgcctttcaacccagtttttccattaattaacttcgaattcaaaaaaggtttattttttaaattattattaaaggattccgggttcttaaaaaaaacccttatttttatttttaacaaaaaaggttgttttccttatcttatatctaaaaccaccctttattttccaaaagttcctactttttttt

SEQ ID NO: 111884 - DNA, 452 bp, Arabidopsis thaliana columbia
  unsure (1)..(452): unsure at all n locations
gggngggaatccccgggccgcccaacccttccaaccatttttttttattttttccaaaaatacaaccataactgttttttaatctccaggggctttaatggtttttttggtgggggttttttaaacaatggtaatggttattcttcaacccagggccattgttgtcccatttggccttacctccttccaacctgggccttttacccaccaaaaccatttaattggcggttccaaccttaagttaatcctcaccaaatccactgccccaggatttcaatcaaaggggcaatatttgtttgaccattttagtttccacataaagtttccagttgttgccacacccgaatttgtcacagttttttatttataatttaccaccaatgaccttgccaggatagacttgaagttccttggaaccagaacaggtcacccagtttttttacatccaaatg

SEQ ID NO: 111885 - DNA, 392 bp, Arabidopsis thaliana columbia
  unsure (1)..(392): unsure at all n locations
ggnccgaaatccccgggccgcccacacccttccggcaaaatctttttttttaatgccaacttctttaaccaaaaatcaatttttttccatggggaacttccccaagcaggcggggctttccaaaaaaatgtttcaattaatggaccacttcgtaggtggacttccaccgcccggtgacttacccttaaaaaaaaggaattttttttcggccccttataaaaccttgattgaatctttccttccgcattgaaaaattcttttttcaattgaccaaatggaaaaaagcaggaaaacctaaaaccacttttcttttgcaaaggattacatttttaaggtgggaacttacctttttacaacctgttctgggattttaaggcaccttgattcccttt

SEQ ID NO: 111886 - DNA, 429 bp, Arabidopsis thaliana columbia
ccgggcgggccacagccgtccgaaaccaaccactaatttttcaacatcttgattgaaaaaaccaaaccaggttttttagggagctaatgccaatggcggtgggggaacctgtcctaattggctttggtttttctttcttaaccgaagccaaaaaaggtcccaccgaattgccaagcggcttagccactgaacctaaaaaagttgccagaaaaactttaattgtccttgttgcggttgttaaccctaaaaaattttgaatccttgcctttaaaggtggtgccaacttccttgaccctaaatgcttcaatgcttccttcccaggagatttcggtttcaaccaattggttttgggaaaagacccgctttttttaaaatggtccaaaaaggttaacctaatccatgcccaatggccaatgccaccggtttttg

SEQ ID NO: 111887 - DNA, 452 bp, Arabidopsis thaliana columbia
ccggggcggcgccgagccgtccgaaaggcctcgggtggttttgtttagacctaaaattttgtaaactgtccaaaacccacttcggtgaaacggctttgcccaatgcgccaccttccaagttacaatcgtccaatcttcaaccgtttttaacgatcctcctgccattttagccaaagcggaaaagttttttgggggggcggcaggcaggggaccaaacttggtgttgttcccgggggggttattggggggttatcctgggggttttaggttcggtttaccggttggcgttaataccaaaaaaggccttattaggtttcggaggtcccaggcttttgtttttaatgttccgggccttgaagtaccaggatgggttgacttggttgggaaaaaccatgtgtccttggtattgggagccatagagaaggaagggtttcccttttatggcacagttt

SEQ ID NO: 111888 - DNA, 434 bp, Arabidopsis thaliana columbia
  unsure (1)..(434): unsure at all n locations
gggcnggaatcccggggccgcccacacccgtccggccgaatcggccataatagggtttttttttgttccccaagggcctttttaattgggggtaatttttaaaattttggggcttaagacctactcaccattgaataacttcggttaagtcgcaagcccaatcggttttaacttgctaaacttccggttcgaaggttttttgaccaactgggaggcggttaaccattttaaggcattagggaaaccaagagtaaaaggccaggatttgaattgcttagccccgcttggtttaaagtggcctttaataaaaatggccgcttaaacttggttcggggaatgggcctcaatggttttggtgatccggcccaagaagttttccaggagtgtttttttcaaaaagtttaaggaaaaaccgttagtctccaaaatggaaa

SEQ ID NO: 111889 - DNA, 361 bp, Arabidopsis thaliana columbia
gggcggaccacacccttccggttggaacccagggaatccaatggttttaattaaataatcctccaccatcctaagcggggctaatttgcttggggaggtcgggattcctaaccgccttagaattaaaaacctaaaaaaaggtaattcccctattaagccctttccaccaccggattttgcctttaaaaaacctttaaaaagctttttccactttaccaaaactcctgaaaaggtctttgttcctttaaaaaataaacctgttacctgggttttaactcttcatccaactcaatctgttcgtcgtcctttgttccaaaggtttgaaagaattcctccttgtttaccccaatatttttcaaag

SEQ ID NO: 111890 - DNA, 370 bp, Arabidopsis thaliana columbia
  unsure (1)..(370): unsure at all n locations
gaangaaagncccgggcggaccacacccttccgaatccctttggtggttaccaactaattttattttgtggaaaaaacataacttccgatcagggttttaaaccaaatgggggcgaacaacaatccgaaaaaagttaaaaccagttttggaattcgtcctggtaaaggtaaaatgaggaatctccgttccatttttaggaaaggtcctcttgttgtgtttggacctgaaggacccaaaattgtgaaactttttaggatttttcctggtgttgacctttgtaacgttaaaaggtttaccttgttaaaataaccccctgttggcaacctgggtgggttggtaatttgaactaattttttttttaataacctt

SEQ ID NO: 111891 - DNA, 427 bp, Arabidopsis thaliana columbia
cggggcgggccgacccgtccgcaaaaaaaagtattgcttaaaaccaatccattaatcttgttaggttttgggcttacccctggtggcttaagggaacgtggggttgtccacttaaaatttgcaaagtccaattccttaaacaaacctgatgttttaaaaaaaaaaagtgaactctttttaaaatttaacccaatccacaaaaaagtccttgtcctcctccatgggaacctttcaatttttaagtccttaaacgttgttaaatacgtcaccaaggtttggccttccgttccttaaatccttccttttaatccctataaccgcccatttgttcggttttggcctcagtccatcaataacaagtgttttccgccgttgaatccgttgttcgaaccaaaaaacaacaaagggaaattgccgccggtggaaa

SEQ ID NO: 111892 - DNA, 321 bp, Arabidopsis thaliana columbia
  unsure (1)..(321): unsure at all n locations
ggggcggaccacacccgtccgtttaatttaaggaagcttacccgaaaggtacttttaaggacccccgttaaaaaccctttggggggtccatagccacctccgggagggccaacccctacnaaaaccgaggttgcccttaaagttaagcaaaagccgaacccaatggaggacccattttttgaaccaaaaccaaatcctcctgaggttcaaaaacctaaaaaagctaaagatccattaaaggaaaaaaattttcttgatgttaatcataataaagtatctggcctggaaaagcctaaaaagaaaaaaatcctttttgattcg

SEQ ID NO: 111893 - DNA, 382 bp, Arabidopsis thaliana columbia
cggggcggacccaggcgtccggaaggtttgaggccaaatccttccattggaggaggaggagggcttttttttgtttaaatgggggcccttctttttttgttgggggggcttcttcttcctcgcccctttttaaatttccgcttttcgtttttccggtttggggccttaaccccacccttgtcgggtccaagaccagggtttttttaagggcttccggtttgacctttacccatggaggaatgggggtgaaggcggttgtttttgccttggccggggttgttcttgggggcaggggggacccaaaacctgtttttgctgttgttccaggggttaacctcccgttggattcgaaggaagctaaggggaacctgttttgggattt

SEQ ID NO: 111894 - DNA, 421 bp, Arabidopsis thaliana columbia
  unsure (1)..(421): unsure at all n locations
cggaanncccgggcgggcccagccgtccgaaaatttaaaaatctaaattttttcaccattttcttttaaaaccggagttgttctaaccggtttgggttcaatggccgccgggagagaaagttttccaccgtttcgccaaaaccggcgccgggaaattttccgtcgccaggttcaaagaagggatccggcctttttaaccaccagatttaccagaggaaccagtaccgttgttaaaccatttcgttctagccggtaccggtttcttagatttggccgatttcttcgcccttttccaaatcggattcgggggagggggtaccattcgaaccgccgtgggcgatttgaaagaaccttttgagttttttgatttggttggtattggagggttcttggctaaggagctttatttatggttgaaaat

SEQ ID NO: 111895 - DNA, 419 bp, Arabidopsis thaliana columbia
cccggtccgcccacacccttccgataaaccactacctaaaaaaccaatatggttgaagggataaagttgccttccttccggtgggcctcattaatgggggcggggccaataaaatcaacccctgccctaacctgggcttaagttaccaccacctggccaccgtccatggcttccttcctcaaaggtggtgtaattcccccaccgtgtggttccgcctttaaaaccctaaccagcttacccaaaacacccccaacccgtaagaaggtttgcaattgctttaaaggtcccgttggaccctaagcttctggtctaaccgctggccggccagttggaattcctaaggcatttgaagtcaatattccttccaaaatcagaaccagcaccaactgcaaaactctgaggggataacctaccaccgg

SEQ ID NO: 111896 - DNA, 443 bp, Arabidopsis thaliana columbia
  unsure (1)..(443): unsure at all n locations
gcccgaaanccccgggccggccacacccttccgtaagtcctccaccactgaatccaccgtttttcttattcaaaaaaaatccaattcccaggagtttaaattggaaagttgggggggtccttaaaaattttccggcctggacctttaccctctcttaatcctatttttcctttttttgcctttgattttaaaatattccaaacctttttttttaaataaaacccaaggttttgttgaccttgtagttcctaaaatttaaccggtttttttaatgttttccaattttttctaatcaccaccattaaccttccaaccttaaaaaaaaaaggggggagaggtagaaaaaataaaaaaaaaaaaaaaaaaaaaaatattttcttatataaatataattaaaaataaaggggccgccccttttaagaattcaaattttcctacccctt

SEQ ID NO: 111897 - DNA, 351 bp, Arabidopsis thaliana columbia
cgggcggaccaagccgccgggaaaaaaagaaggacctttccggttttattttaaggggggccagccaataaaaagggagggttttttcttttaacggcgggacctataccctttaccacccccaaaaactaggtggccatccctgggaaattaaaataaccaaggttttccaaaaccaatattccaactgctaaaagggggaactggtcctttaagcccagaatatcgaacggccctaatggaaggaattgcacccgaaaaaacacccctaatggccgtttggcccgaaagaaaaccagtttaatcctttaaaggtgatttgataatatttacatccccaaaggttcatta

SEQ ID NO: 111898 - DNA, 431 bp, Arabidopsis thaliana columbia
ggtggaaccagggttggttaaaaggaggttcccaaacggttccatttttgtttaaccaggaccggaccaaagggcctggggggttaatccttaaatcgtttaaccctaaaaaaagacctaataatattaaaaagcagggtgggtttagttctttaaacgccaagcaacaccatttttttaataaaaccagacaggagtttcagcaaattcttgagacctcaagaggtcctttaaccattcccaccattaccaccaccaggggcaccttgaccggcattggtgttaatgcttttatccaaagaggaagttccagaaatgcataatttatttacactggattaattttaccaaatttttttttgtgggaccaattcatatatttaaaattagatgcttaaaattaatttgttgtgaaatccagcgaccattaa

SEQ ID NO: 111899 - DNA, 443 bp, Arabidopsis thaliana columbia
gggcgggcccacccgtccgaatatttctgcctatttataacttatcttaatcaatttttccccacacaaccaccggtggggatggccttttttttggttggacaacccttttttttgctaaaattgcttatggtttaaatccctttttttttacctcaagctcccatgagggttccttttgcttaaatgcccatgcctcttatgtttagcgggggtggaagctcggttcttcctccattgaggtttccgttcccaatattaactccaccacctatgccatttactccaccacccatccccttgactcaaccacctatgcctatggtcccaccaccattgcccatggtttaaccaccaatgatcccaatgcctccatttccagtcccaagcccattaccagtcccggatatgctttcgccgccgatgccatccgaattggaatt

SEQ ID NO: 111900 - DNA, 426 bp, Arabidopsis thaliana columbia
tgcaattggcaaacggctcaaatctattttctttaaacctttaaaaaaatcttggggaggcctccttccaatgaggggcaggaaggccaaagggctggcaagattccaaagcaaaaccttcttttttttctttttttcgtacctaaaataatttccatttttccccaaaacccattaaaccaggttggaaccaaagaaccaggggtttctttgtttctaaattggccttttttgccccatctttaatctaagcatttttttttttctttttggtgaggcaacttttttacttttttaggaaacgaaacatcctgggcctttttttcttccctccaatcatgggaaacgccgttggccttgttggggaccccatttctttttgggaaaagcattcttccacgttaaatatttaaggctttttttcaa

SEQ ID NO: 111901 - DNA, 416 bp, Arabidopsis thaliana columbia
aaaataaagagaaacctaaggaggttggaaattggaaaaaggtaatgatcataacagggttggccacggcggttccggggggggggccacgaaaaattggaaggagactaccctgggaatccaaactgccaaaccaatgttccggttagttccggggggcctttgggttgcagaactggtggcaatgctaaaggcctttgaaactaaggagtccggtcaaattcttaactcaaatttaacagccttaaggtcctgggggcacgcaaatggaatttgtccaggctatttttttttttaaccagccattgcagcaatccttctttttttttcaacattgcctggggttgggactttttttggtttgaaccagtttttgacctacttggttttggctgttggagcttgttaagttgagg

SEQ ID NO: 111902 - DNA, 446 bp, Arabidopsis thaliana columbia
  unsure (1)..(446): unsure at all n locations
cgggncgggaannccggggcggccccagccgtccgatgccaaccaagaccaggatttgggttgcattcaattcgactgggaattattacccgacctgtgggtagttaactgtttccgctgggcctaatgtaatcccatgtttttgttatcaatccgcttaaggtaccattcccgattaacttaatggatttcaaggttaccaaaaaaaaaaaaaaaggggggggtttgggatttaacctaaccaagctaattaagctggggaagggcttaaagaaagatttttttaaatgctttgatgggtccaaaaagggatcaccgtcaactaaaaagactttcctaattgtcaactccacgggggtcggaaagttgcaaagaaccccaaaatggtttgattgccattgccctttttgcactttttggttttccttttccaaccaatttttttt

SEQ ID NO: 111903 - DNA, 277 bp, Arabidopsis thaliana columbia
  unsure (1)..(277): unsure at all n locations
ccgaaanncccgggcggaccacagccgaccggtttttaattttaacaacgcttttaaccaattttatctgggcaatgacttctaccaaaatgttgtgaaaacaccagagtctgagtaggggtttttttggaacctataatggtttttaattttgttatcgaaggggactagataacttaacggaaggttcaattttgccttaatcctttaaactaactcttgttccaagagttccgttttaatatcaacttgtttttttatttctaattccaatttt

SEQ ID NO: 111904 - DNA, 456 bp, Arabidopsis thaliana columbia
cggaatgccagggcggaccacacccgtccggttttggatcggaggcggccccttttttttttttttttaaatttaccaatctttaatttgttttaaaaaccagactccagggccatttttaataatcgctttttaaatcctttaaatccaaattttgtccaatggtttttccagaataacgatttgcagatggatccctgcatttaacgaagttcaagttttgccacgctaaactggggctggaggggaagatggttatttggcatttgatttttaattcccatcgaaagggtaactgaaggggggcttttttttatacttgccacttttgggaccaactttaagttcctggttttccaaaacaattggccctccggttttggtaacttaaatttttccttttctttttttgccctggtagacgttggggtttgaccttgattgatgggactttgg

SEQ ID NO: 111905 - DNA, 397 bp, Arabidopsis thaliana columbia
atcagtttgggggaaagcaccaaaaaaaaaaattgtcggcaccattggcaccaccatcgccggggatgggcctggggggatcatccataaccaccaaaccttttttttaatcctttttaaacccaactttaaccgccaggacccttttgggactcgccggtccttcggggggaagagtaatttgttttgaagggaactggttggggagggatttgaccgtggtaggatttgggctgatcggttggttagctccgccaggctttccagcgttaattgggaagggcctgccggttttttttttggatggcattggacctgggctggttcactttccgactcttccagttttaatttaaacagtttggttggggttggttcctgggactttaggcttttt

SEQ ID NO: 111906 - DNA, 431 bp, Arabidopsis thaliana columbia
ccaaaaaagctcctccatttaaagggcgacggattaagttttttaataatttttttgagttggaattcaaaaccggagcggtggttttaatttccttttcctccacaaaacccatggtttttttttcttccttcctaaaccgcggtttttaatttttaattttggtaaaagcctaatggcccgatcccgaacccatttttttggaggccgaaccaccagaaatacccgcaaaggtcgctttcgaccaaccaatggctcccgagggattcgtttttcctccgtttttcgccaaaggaggcgccaggccagaggaggagatcgttcccgttttggaggagctttatggacctgcgtttaggggggggggtttgcttgggaaagatatttattgtggggcctcaaagcttaggaggggtccaggattggggggg

SEQ ID NO: 111907 - DNA, 433 bp, Arabidopsis thaliana columbia
gggaatccccgggccgcgcccacccttccgcccaaatttaataactcctttaaaggatttttaataatggcctaagtaccctaacccacgggggcaatcccatttttgacgggccttaaaccctaaaccataaaataatccgccaccgccaaaatccaaactgttgttgtggcataaccaaactttccagtgaagtaatttttaaaaaacttcggattcgcggccgtaccggttgcagtttaaatggtttgggccgaaacccccatggcattaaaagtttttttggaaggaggggttggttcgttagctttaattcccaacaccttttttttagttaaaggaaaaaaaatttttttcaaaaccacccttggttcccaccacattgttgttttcgatgaaaacaaaatccaaagtggcttcgactgggccaaaa

SEQ ID NO: 111908 - DNA, 452 bp, Arabidopsis thaliana columbia
gggaatccccgggccgccccacccttccaaaaccattcaaaaacccctacccaattttttttaatctttaccaccaaaatctttggaggggcaacctttaaggctgggatggtggtcctaataatggggataatctccgccgtgccatcggcccattttgtgcccccacccccaagtccaccttcgggaccaaggccaacctaagcgcctttcggttcacctggagttccaccagccccggctctggttttgggctcacctctccgaatctaagtacctgggagggggattccgaccagagatggtttttgcggattagcccatccataattattcgccgcctcgggtgatttccaaaccacctattaaacctcatttcctattggcccctcttctttttcgtttcttatctaaacctccaatatctgttgaggattttactattcctttta

SEQ ID NO: 111909 - DNA, 112 bp, Arabidopsis thaliana columbia
ctcttcataatagagtttcgattatgggctctgtgacgtcagccatcgctggaatccgatctttcaacggccttaaggcccgaaccatcaaagcatccgtcactgatagaat

SEQ ID NO: 111910 - DNA, 144 bp, Arabidopsis thaliana columbia
  unsure (1)..(144): unsure at all n locations
gtgcagaaacgagctcgactctatacacttctttcatttaaacccgcaggggcacaacaacggggagccacagcgggaagggcgaaaccagccaccatcagnagggaggggcatagccagcctctcttggcagtagctgatccc

SEQ ID NO: 111911 - DNA, 253 bp, Arabidopsis thaliana columbia
  unsure (1)..(253): unsure at all n locations
gcctgccgcatcagatgtcctcggatgcggtcgtgtgaccattaggaagactgtcgccaagccaaagggtccattatgcngtcgatggtacggatatgattgaggtcagtacttgggtccattctccggcgagcccccgagctacctttctntttagattcccggtgtactctgatgggacaccggtggtctatccgtcgacccatagaccttcgtgcaggaactctgagctagcncttatcctcagctgatg

SEQ ID NO: 111912 - DNA, 386 bp, Arabidopsis thaliana columbia
  unsure (1)..(386): unsure at all n locations
cttacaacaacaaatcttaaacgttttactttgtgctgcactactcaacctcaatggccgcctcaacaatggctctctcctcccctgctttctccggtaagggcgtcaagctttcccccgcggcatctgaagtccttggaagcggccgtgtgaccatgaggaagactgttgccaagccaaagggcccatcatgcagcccatggtacggatctgaccgtgtcaagtacttgggtccattctctggcgaatcaccgagctaccttaccggagagttccccggagactacggatgggacaccgccggactttcagcttgccttgagaagtncgcaaggaaccgtgaactagaagttatccacagcaggtgggccattgctcggagccct

SEQ ID NO: 111913 - DNA, 381 bp, Arabidopsis thaliana columbia
  unsure (1)..(381): unsure at all n locations
ccggncagcccacgcgtccgggtttctcttgctgatctacaaaatgatgagtttattttctacaggaagatccgncttagagctgaatatgttcagggagggnnggtgatcacccagttcntgtgtatggatttcacaaccgacatgctaaggtcattggtgaagaaggggcanactttgattgaagcccatgtcgatgtgaaaaccacagacggttacaccttgaggatgtttttcatttccttcataaagagaccagctaaccaattgtagcgttccttgtacgctcaatccagcctaattcgtcatgaccgcataaagattagtagttttttttttattagagannaatcctgagacctcaaggagctagtggctcaa

SEQ ID NO: 111914 - DNA, 187 bp, Arabidopsis thaliana columbia
  unsure (1)..(187): unsure at all n locations
cgcgtccgtttgctacttttgggtctctttgcatttcttttcatcgnnctcaaaatggctgccgcgggcacggtgaaatcagagagtgnngaaactgtgaaaccnnnncaacaggggggtggattcggagacattggaggaggaagataccaacgaggaggcgggcatggaggccactgggggggtg

SEQ ID NO: 111915 - DNA, 402 bp, Arabidopsis thaliana columbia
  unsure (1)..(402): unsure at all n locations
actttcacctcaaaacgcatcagctcttgtaaaatccatagtagatcttccagttttagttgttgccggagctgaaaanacactggttcctttggaatcttcacaagttctggcttcaaaactcactaattctagactagtggagatttntggttgcggccatctgccacacgaggagggtcctacaacacttgtttccgctctcggctccttcattagcagactgataccnaaactaccaaactcctaaaaccacacaagaccatctcaaagaagagtttgttggaaacatctgcgagaacatctggagcnagtgttagttagaatacgattctttcgtggttccatccatcagcgtaaatcatgcatcattgtattctcaaagggattaaaactcccacc

SEQ ID NO: 111916 - DNA, 177 bp, Arabidopsis thaliana columbia
  unsure (1)..(177): unsure at all n locations
ctttctgaagtgaactgttgttgttgttctttttggtttcntcgaaagataacctaaaccctatctgaacgggggcnntggactagactaatgtcntcttgtttgttctcagtcacatctccatctgctgcttcttccgtccatacaancactcaaaccttcttgctcttcccaatc

SEQ ID NO: 111917 - DNA, 286 bp, Arabidopsis thaliana columbia
  unsure (1)..(286): unsure at all n locations
aaacgaaaaaaaagctaatcgcttgaacagaagaatataccttaactatggacaaggatgttgaagccgtaccctgagaatgattncnngctatggactatcaanntacttcaccacctccggttatcgatggagcgaagcttaagcattgccctttcnacatagcaattatctccaagcccgtaaccactctccggttcttatacatcaccgcccacacagtcatggttaacaatattcagtgcaatactgacaccggctgcgtagatcgcgtgggttgttgaat

SEQ ID NO: 111918 - DNA, 430 bp, Arabidopsis thaliana columbia
  unsure (1)..(430): unsure at all n locations
gtcgcatcggtcatcatagggttttgttttggtgcgcaatggcctcttctatttgctataatatctgagattttcgggcttaagtactactcgacattgtataacttcgggtcagtcgcgagcccgatcgggtcttacttgctaaacgntcgggtcgcagggtatttgtacgacgtggaggcgggtaagcaatataaggcattagggaaaacgagagtagaagggcaagatttgaattgcataggcacgtcttgttttaagttgtcttttataataattgccgctgtaactttgttcggtgtattggtctcgatgagtttatgtgatccggaccaagaagttttacaagagtgatatctacaaaaagtttagagaaaaagcgttagctgccgagatggagatggcagcgccggctgcagccagatctacc

SEQ ID NO: 111919 - DNA, 300 bp, Arabidopsis thaliana columbia
  unsure (1)..(300): unsure at all n locations
gtcggaacccacaggatacagttgtgttcacttgcgcaatctccaacatgcttagctgggctaaccgggcatggggngctcaaatactacaccaccttgggtaacataagctcaagagcgggcccgatcgtgtcatactcgctgaacgnccgggtcggacagtgtatagacgtccaggaggcgggtgagcaatatcaggccttcgggagaacgcgagtagacgggcaagattcgaactgcatacgcacgtcttgcttcaagttgccctttataataatcgccgtcgtaactttgaacggt

SEQ ID NO: 111920 - DNA, 304 bp, Arabidopsis thaliana columbia
  unsure (1)..(304): unsure at all n locations
cggaancccggcctacccacgcgtccggtggaaacagggtttgttcagaggaggttctcatacggctccataatgtatcaacatgaacagagcttntggtcttttttttntatcattttatcggtgcttccttgaagaagacctcatcatcatcagaagcaaggttggtatatgtccttcnacgcctagcaacaacactctcttcatcaaaacatacatgagtatctgcaaaatcatgagacctcaagaagtactcttaccactcacaacaataacatcaacaagagcaacatgaacagcacta

SEQ ID NO: 111921 - DNA, 101 bp, Arabidopsis thaliana columbia
  unsure (1)..(101): unsure at all n locations
ccggccggnnncccggtcgaccccgcgtcccatatctctgtcttatatcactttacctttacgactattccacacacaaacacacatagccatgtcctctt

SEQ ID NO: 111922 - DNA, 400 bp, Arabidopsis thaliana columbia
  unsure (1)..(400): unsure at all n locations
ttgcaatttgcaaactgcttcaatccaattttcctaaacctcttagaaaattctgcaaaacccaccaaacaaagaacaccaagatagacaaaaggcnagcaagactacaaagcaaaaccttcttcttcttcttcttctcgttactcaaatcatttccatatatacgcaaaaaccattaagacaagctagaaacaaagaaacatggttttctctgtttctatatttgcctctcttgcaccatacttaatctcagcatttcttcttttccttctcgtcgagcaactctcttaccttttcaagaaacgaaacattcctggctttttgttcgnccctccaatcatcggaaacgccgttgcactcgttcgtgaccccacttccttctgggacaagcaatccttca

SEQ ID NO: 111923 - DNA, 421 bp, Arabidopsis thaliana columbia
  unsure (1)..(421): unsure at all n locations
cccacatcttatcactactctcaaagtttcttcatcatggccccggtaacctcagccaccgttgctatctcaggaagaggccggccttaatgcctntgctgtgaagtcatccgccaccgtcagaatccatactgctgctgttgcatcaccttntcttacagtgaagtcatctctaaagaacttctgtgtctcggccgtatcggctgcagctacaattgctttggccggaaacgccatggcaatagaagttctctttggaggaggggatgggtcgatagctttttttcccaacgacttctctatagctaaaggagttttgggtgcgntcatgaacaacgctggtaacccacacaatgttgtcttctatgaagactatatcccaagtggccgtccttctttgccaagatcttcattgaccatc

SEQ ID NO: 111924 - DNA, 334 bp, Arabidopsis thaliana columbia
cacaagtgagggagttgttggagtcctttggtggcctcaagggctttgatcttgtaaaagatcgagaaacagggaactctaaaggatatgccttttgtgtgtaccaagatctttctgttacagatatcgcgtgcgctgccctaaatggtttcaagatgggagataagactcttacagtgagacgtgccaaccagggaacaatgctacataagtctgaacaagagaacgttttattgcatgcacagcagcaaatagcttttcagagggttatgttacagcctggtgcataggcaaccactgtggtgtgttcgactcatgttgttactggggttgt

SEQ ID NO: 111925 - DNA, 354 bp, Arabidopsis thaliana columbia
tgttcatggactctctagagttagtctgtattttcttaagactgctgcacataacaacatgctgtttcgagttctctgcacagaggggaggccgtatggaacaggagttctgatatcgagtgagctatcgaagctcgatatcccagtgaaactactgtttgattcagctgtggcgtatagtatggtcgagtgtgacatgatgtttttcagcgcggatggagttgttgaatgtggcggttttatcaacatgatgggtacataccatatcgcactcgtggcacacagtatgaacaaacctctctatgttgctgctgagtgtttcatgttcgctaggctttacccatttgtccaaaa

SEQ ID NO: 111926 - DNA, 371 bp, Arabidopsis thaliana columbia
gaagatgggaagaaagagtacaagataccaaaaggaggtctctttgatataatcatatgccctcactatctatttgagatccttgtgttttggagcttctttctcatctctcagaccatttattcattttctttcgctatgggaacaatgctctatctcattggtcggagttatgctacaagaacttggtatctttccaagtttgatgacttccccaagcatatcaaggctctcattccctttgtattctagagttttgttgttgttgtttcatgtgtctgtataatactttgtagaccttatagtttcttttgtctaagtcgatttcattcttatattcttttgaatttcttgtaatctataataatttt

SEQ ID NO: 111927 - DNA, 412 bp, Arabidopsis thaliana columbia
tataaaattaatgtttcatttcggatttcaataatttaactatttgaattactaaatcgaagttttgcaaaaaaacaattaatcatgtgaaaacaccaaaaaaaaaaaaaaaaaattatgtatctcatctggatcagctggttttatgaaattatacgtacttatcatatatatttgtataggtggacacatcaatcccgcggtgacgtttgggctattcctagctagcaaggtatcattggttagagctgtgtcgtacatggtggctcagtgtctcggagccacttgtggagttggtttggtgaaagtcttccagtcgacttattacaaccgctacggtggtggagccaacatgctctccgacggatacaatgttggcgttggggttggtgctgagattatcggcactttt

SEQ ID NO: 111928 - DNA, 481 bp, Arabidopsis thaliana columbia
gcttctctctctctctcggctccgccgattcctagttccccgattctcggattcttctgaagatttctcatgtcaggctctcttgatcgatttgcgagaccttgttttgaaggagtttcaagcaatgatgagagaagagaaaggagatcagatttcgaagtttcagaggatgagaagaagacaagaatcgggaatttcaatttcaagaagaaagctgcgaaagcttcgagcaaactcagacattcgttgaagaagaaaggtagcagtaggagaagaagcagtgatcgtactttctctcttaccattgaagatattcatgatgttgaggaattgcgagctgttgatgaattccgtaatttactcgtctctgagaatttgcttcctcctacacttgatgattatcacatcatgctgagattcttgaaagctaggaaatttgatattgggaaaaccaagttaatgtggagtaatatgatcaaat

SEQ ID NO: 111929 - DNA, 286 bp, Arabidopsis thaliana columbia
gctcctttctctctctcagctccgccgatgttttttttcccagacctcggaatcgcctgaggaggtgtcatgttacgctctgtggaccgatctgcccaactccgttttgaaggagtctccagcactgatgagagatgagaatggagatcacactgagagagatcagaggattacaagaatacatgaatcggaaatttcaattgcaagaagaaagctactaaagcttcgagcaaactcaaacattcctagaacaagaaaggttgcagatggagaagaagcagtgatc

SEQ ID NO: 111930 - DNA, 413 bp, Arabidopsis thaliana columbia
  unsure (1)..(413): unsure at all n locations
ctacaaaatgtttatccaaacattacagagagtgtttttgaaaagaaattgtaagctgtgtttaaaatatgtgtgtgtgtgtgttagtctgaacagagacatttgtgggttagagtagtttcagatagataagagagaagagtctgtagagttgtgatgagtctcgggcaatttcgtggctcattaaaaacgttcaggccaccggtcaccaccgaccattttaaccggttatggagaccgggattggtgggtctgaatgaagtcagtttaaggtttggttttgatttgtccttggtatcaacttatgagggtntatatttatgtagaatagatgattctttgtgtgatccattttctttctaacctttttgtcgtataatttttcttattctatgttttttttttactttttt

SEQ ID NO: 111931 - DNA, 452 bp, Arabidopsis thaliana columbia
agggacatcagttatcgctcgagtatcttgtcaggaatttactgaaactatatgttgacattgagttcacgggttcacacactcagttctatgacaagttcaatattcgccacaacattgccgagcttttagagtatctctggcaggtgcctagtcaccgaaatgcatggagacggattgcaaaagacgaagagaagggcgtgtacttgaacttcttaaacttcttagtcaatgatagcatctatcttctggatgaaagtctaaacaaaattctcgagattaaacaaatcgaggcagacatgtcaaatactgcagagtgggagcagagaccaactcaagagagacaggagagaacaagactcttccattcgcaggagaatattgttagaatcgacatgaagctggcaaatgaagatgtgactatgcttgcatttacatccgaggagatcact

SEQ ID NO: 111932 - DNA, 335 bp, Arabidopsis thaliana columbia
ctctccaggagaatatacagaaaaaggtttaaaagaaacactgacagttagggctatggcggcggcgaatatacacgacgccgttgtttccgatgacctgaactatgaaatctgggctccaatcgcgaaaactacactaacggagaaaggactttgggatgttgtcgagaacggagtcccaccggatccatcgaaggttccagagttagcagcgacgattcaagccgaagagttttcgaaatggagagatctcgcggagaaagacatgaaagcgctccaaattttgcaatcttctctcacggattctgctttcaggaagactctctccgtttttt

SEQ ID NO: 111933 - DNA, 264 bp, Arabidopsis thaliana columbia
gcataaacatggtttatgcatcgacacaacgattttctcattgggatggggacacaagaaaaaacgggggatatatatagacattggtaggaagcatattccacattcggggcccccgctctaataaccccaaacctaccttccgcctgactgccaaatcatatttcatttcttagggggcccccaaatttaattacttgggcagacattctcatatccccatttttaggtaaaccttggagataccccatttatagggcttgg

SEQ ID NO: 111934 - DNA, 178 bp, Arabidopsis thaliana columbia
  unsure (1)..(178): unsure at all n locations
tcggtagcaatgagcaaagtgggcaggactttcgtttttaccctgcaagagggaaaaagaggtgagatcaacctttatgttggggaaggaatacttntttaccagagttatatctccccatactctgtgacagtcagtgtgaaaatgtccgttgagcatgacatatactagttgcttt

SEQ ID NO: 111935 - DNA, 469 bp, Arabidopsis thaliana columbia
aagctcataaataataaactccaattaagaatggatcaagcggagcttgccaggatcttccaaatgttcgacaggaacggtgatggcaaaatcacgaagcaagagctgaatgattcattggagaatctaggaatctacattccagacaaagacttggtgcagatgatcgagaagattgatctcaacggtgatgggtacgtggacatcgaagagtttggagggttgtaccagacgataatggaggaaagagacgaggaggaagacatgagagaggctttcaacgtgtttgatcagaaccgggacgggttcatcacggtggaagagctaaggtctgtgttagcttccttggggctcaaacaaggaagaaccctagaggattgcaagaggatgataagcaaagttgacgttgatggagatggcatggtgaatttcaaagagtttaaacaaatgatgaaaggtggtggatttg

SEQ ID NO: 111936 - DNA, 348 bp, Arabidopsis thaliana columbia
ttagcattcagcatgactagcgcaagttttttctgtcctcaaaccagaaaatattaggggggttttcttagactacgggaagattcccttgttcatgggttcccgatttcaatggtttgtatgctataaaagagtgcctaaatcaagtgcattaaaggagattgattctggttgcacaacttatgagcgccaggaccatacctacattgtatcaaccagtcattattgggcaccagaagatatattaagttttggtttgagctatccttttgatgtttggatctgtatgatttttatattggcgttagtgcactggtgaagtcattttacctaacacattaaaaccct

SEQ ID NO: 111937 - DNA, 475 bp, Arabidopsis thaliana columbia
ggtagaaagccatggaatcagaagggtactgtgtatagctagacatggtacactacgtggtccgcagttccgaggtggttgtgtaatgcatggacccaaaccaagaagccatgccataaaaatgaataagcaggttcgacggcttggactgaaaatagcattgacagctcgagccgcagaaggaaaactcctcgtgtttgatgatttgggattgcctacgcataaaacaaagaacattgtgaactattacaaccaaatggagaacacaaagaaagtccttgttgtagaaggtggtcctattgatgaaaagctgaagctagccacccaaaatctacactatgtcaacataattccatcaatagggctaaatgtttacagcattctgctacacgatacgcttctgatgtcccgtgatgctgtgaataagatcggtgagcgtatgcacactcctattaaccgttggagagacaacaat

SEQ ID NO: 111938 - DNA, 386 bp, Arabidopsis thaliana columbia
gcgaagagatagagaaatggctttggcgattatgattcttttctcaacttcgaagcgaggaatgacggcgggctccattcatttggggggggggagatctatgactttatggagtaagagctttgagcctgctcctaaattatcctatcctctgagttaccgaatcttttctcttttatcctagttcttaaaaacgtaatgttggtgttgtagcatatcttgatgataattcgaagcctctttacttgtaatgtgtcagacaaacttagaatagtctttctgggagcactttcatggactaccttcctatgggaggaggggcctaaattgttaacctaacatttaactcttcctattgttacaatattgtatttttcaatcatata

SEQ ID NO: 111939 - DNA, 477 bp, Arabidopsis thaliana columbia
  unsure (1)..(477): unsure at all n locations
gcgtccgctctgctccactcattctacctccacacgacgtccttattatctcaccgcctctagnaatcactgcgcgggccgtcttaaaataccgcgtgtgtggtgtcatanaacgctcacgtcggagaatgggaaactagcggtggtagtaaaaactgatcgtgatgatggatcctatcttttaaccgcatttggtgttcgttactagacaacaccgtctatgccggagtgcaattctagttaccagagtctccggcggaagacggcaatgtcggccaaatgctctacgtaaatttcacatatttactcagttcaattttgaactgtgattgaaattgaaaagatgcatggttcatatttgcttctattgatttcaaattccattttttatcatagtgttatatttttgtttgattgttatgttgtggttttagaggactgaaaatataggtatagagtatggcttaactattaaat

SEQ ID NO: 111940 - DNA, 247 bp, Arabidopsis thaliana columbia
  unsure (1)..(247): unsure at all n locations
aaaaaattaaaaatccttcggccccgcaaccacaacaatcnatcctaaatcctcatcactttttcttacctcacaaaacataacataacggggggagttttttccgagggggggggtaaacctaaacaccaaacaaacaacatattccgtctcaactaactactcaatacaatcgattaatccatctcatttcttaaccaattctctcttctcccaacaactattactatactgtcatcaacataca

SEQ ID NO: 111941 - DNA, 403 bp, Arabidopsis thaliana columbia
cgtacgacgacgacaagcctttgatttcatctccaattttttttaccggtttcaacactataccggagtgaaacgaagacgaagaagagggagataacgatgacggagaatttaaagggttttacgttaacacgccgtcaccgttaacgacgaagaaaatgttaacggattccgttactggacacgtggacgttaagctgtcttcagaagctgcaattgtggcggttgggagaggtaacgagacttactctgtgctcatgaaaatcaaatctccgttcgttccgacggcgcgtatatttccggtggatcttgtaacggttattgactttagctgtaggaatattgagatggttaagctagcgatgagggaaggtatattttctctacgagaaacggatcgttt

SEQ ID NO: 111942 - DNA, 273 bp, Arabidopsis thaliana columbia
gcgtacaaactcaaccatgcaatcaacggctctttttttttttcttctgcgaactcaagctctaggttgggtttttaagatatggaggtgacaaaaatagaatcatcccagaacaaatatggctctgatgctcctactattgttgtgagtttgtccgagaagagatcctacgtgaaagctcttaatgtgcaatcaattacaaaggaattcattgatgcttctgaggttacagatacgctagatgtggtggaagttgcagactttgatgaacta

SEQ ID NO: 111943 - DNA, 299 bp, Arabidopsis thaliana columbia
  unsure (1)..(299): unsure at all n locations
ccggancgaaaacccggggcgcgcacgcgtacgctcccatacctactgtaggaactgacacttctgtgatactgaaacgaaactgataccggaacgggcactgaaactggggcgggcgggggnaaccacactcaaacaagaactggaaactagtaccggatgaactagcactgaaactagcaccgatacagatggaactgtcactggaactgaaacagaaagaactgacactggaaccatctctggaactggcactggaacctaaactgctactgcctctggaaccgaatcctcttgaa

SEQ ID NO: 111944 - DNA, 454 bp, Arabidopsis thaliana columbia
  unsure (1)..(454): unsure at all n locations
cggaaggttttattaacttcatggtatcgggaatttttttttccatcaggttaaaaaacattctggggggagacctttttgcgcggggcgggncaagtctaaagtctcataggaaaggagagtcatctacaaagttcttaaaaggacagatggctatagtggcaatcatatttttgagagagttgcggttgctactgtctcagaaatcgacgttcctaggtttttttaccacccttacaagtggtggtgtgctagggttttacttgtacaagatggtggtcaagagagaaaagggaccaaccttagaagatggcggagaagatgaatcaagcgatgggtttgtaagaagtgaatgataaagaaaaatggggtaagaggaagaagtgttgtcgtcaacatcagcatcatatatgccaaactcttttggtatctttttttaagttgtgtacaattt

SEQ ID NO: 111945 - DNA, 477 bp, Arabidopsis thaliana columbia
  unsure (1)..(477): unsure at all n locations
gaataaccgggtcggcgccgcgcgtccgcggacgcgtgggcggacgcgtccgataaaaccctatttatatttgtttctccaatttcaaaaggcgggacgtgaagaagacgagggaggatgaacattttcagattagctggtgatatgactcacctagccagtgttcttgtcttgcttctcaagatccacaccatcaaatcctgcgctggtgtttcattgaagactcaagaactctatgccattgtctttgcgacgcgttatttggatattttcacgagttttgtgtctctgtacaacacctctatgaagttggtgtttttaggaagttctttttcgattgtgtggtacatgaagtatcataaggccgtccacaggacttacgacagagagcaagatacgtttcgtcattggttccttgtgcttccttgctttctcttagctctnttgatacatgaaaagtttacctttcttgaggta

SEQ ID NO: 111946 - DNA, 427 bp, Arabidopsis thaliana columbia
cctcaccacaagaagaggaggcagccatcaagaaaaaatatggtggaatactgcccaagaggacgccacatataactaaggatcatgatcgggcttactttgattctgctgattgggctctaggcaagcaaggtggaagccacaaacctaaagggcctcttgaagcacttcgaccaaaacttcagcctactcaacaacatgcacgtgctcggcggactccctatgcatctgctgacaatgatgagtgtatgaatttgcctcctgaggatttgatccagaatggtgatcccatcgaagacaagaacaaggaagaacagtaacgagtagctgcaccctgtctatttggagcgttggcaatcctgggcttgagccaaactgttgccttggtaaataactagagccaatgcctacacttgtggggttgagc

SEQ ID NO: 111947 - DNA, 404 bp, Arabidopsis thaliana columbia
ggaagaatcgcagaggacaaaccttgatttggattttgtgaaggagaaaataaaggagaaccaggagaagattaagcttaacaaacagcttccttacttagttggcaatatcgttgagattcttgagatgagtccagaggatgatgcaaaggaagatggagcgaatatcgatctggactctcagaggaagggaaagtgtgtcgttctaaaaacatcaactcgtcagaccatcttcctccctgttgttggacttggtgatccagatacattgaagcctggggacttagttggagttaacaaagatagttacttgattctggatactttaccttctgagtatgattcaagagtaaaagcaatggaggtcgacgaaaaacctactgaagactacaatgatatagggg

SEQ ID NO: 111948 - DNA, 436 bp, Arabidopsis thaliana columbia
gctgtttgtataggagcagaggtgggatcaattggtgttggtgggcgatatgataaccttataggaatgtttggaacaaagcaagtccctgcggttgggatgagcctgggaatcgagagagtgtttaacataatggaagaacttaacgagaaacagaaacaagtgattcgaccaacggagacacaggtgttggttagtataatggtggataataaactagcggaagcagcagaactggtaagtcagttatggggtgctaagatcaacgcagagtatctagtgagcaagaggaaagaaaagcatttcaatcgtgcaaaggaatcagggattccttggatggtgatggtaggcgaaaaagaactcagtggaagttttgtgacattgaagaagctcgagaaggaagtgaagagaaagagatcaacatgtatagagatcg

SEQ ID NO: 111949 - DNA, 464 bp, Arabidopsis thaliana columbia
cttacgctttctctcactctcgtcaatggcgattaccgcatcttcatctctcccccgtaattgctccttcacaactccgcgaccttcatcattcatccgaggaccgccattagctagaacgctgcctctctatctccgccgtaaccgtcgagtagctctcacttaccgattggaccagaattcgaagcagagaagtggtggaaacgtaagatgcgaggcgacggaggtatcttcttcttcttctgtatccacacctggaaggaattgggtgccggtggtgccgttatcggcgctttcgaaaggtgaacggcgagtggctattcaagactatgagagttcgatatgcagatgcgacagacaacaacttcttcaacaaaagggttgtgtcggttggatcactggtctcagtggttcagggaaaagcactgttgcttgtgcactaagtaaagcattgtttgaaagag

SEQ ID NO: 111950 - DNA, 311 bp, Arabidopsis thaliana columbia
cgattcccgtcgacccacctccgctaataattctcaaaagctcacacacagaaacataggaatctataaggaagttttggttgtgggtataacatggtggaagcaaaagatcaagatatggtgatggatgcaatgataaccatccatttactaaaacccaggtgggatctggctttttgtctcaagaaaagctgtaaagcttgcaacttcatcttttccacttcctaaacacctcacttctttcaatcattttctttttttccttaaatctgacctgttgtttgcctaccacttttttttttctcatatgg

SEQ ID NO: 111951 - DNA, 292 bp, Arabidopsis thaliana columbia
gcgacgactagtttagtgaccggactaaaagttgtattaccggttatgttctgtctgatgcgagcgactcttgtctacaccatgatcaccgatggccttcctttacctgatcgtcaagatgtcttcacaccgtaaaacccatttctctatttctctctttcttcattttcacacagagacagagacacacagatatgtgtttattcatgttagtttcgttacgctttttttcagatggttcgttacgacaattttggatttctacattaatcttgtacctatagcggtttgt

SEQ ID NO: 111952 - DNA, 151 bp, Arabidopsis thaliana columbia
agaatttggtccgccgttcatcgtccttactgtaacaacgaagatgagctctctatctccgcggtattatgtgagtaccgggcttatacaatattcaatcccacaatttattgaaatctctttcacacattactctttatctaacttctat

SEQ ID NO: 111953 - DNA, 458 bp, Arabidopsis thaliana columbia
agaaaaggcaatacaaacaattgatgcggacattgctcaacaattgttgttacggagaaagcatagagatggtgctggatcctcctttttcgatccaaacattctatcacagaattccgtcagttttatacccgaatccctccgtccaaaacctggacacctctccctgtctcagcagagagtttatgaggactttgttcaacatccttggcaaaagcagtcgacccaaacttcacacggtttatctgctgcatcaagctcatctggtgatgttgcgcttggtagtggttatggtccagtatcaggaaaagttgcttctgaatttttgtctaatgctggaaacgctcggatggacatggtctcccggccatcagatatttctgtggatggttttgaatcttctccagtctcacttttgagctcacaagtcgatccagctggtgactcatccagtcttc

SEQ ID NO: 111954 - DNA, 300 bp, Arabidopsis thaliana columbia
  unsure (1)..(300): unsure at all n locations
gctttaaagaagaaggaaatatacctgatggtcaattatttagaggaatattctatgcttgtggtatgctaggtgatgttgatgagggactattacactttgagtcaatgtccagagactacggcattgccccttccattgaagactatgtaagcctcgttgagatgtatgcgttacccggatttttagatgaggctttggaatttgtggagagaatgccgatggagccaaatgctgatgttngggaaacattgatgaatctttctcgagttcatggtaatttacatactttagactact

SEQ ID NO: 111955 - DNA, 199 bp, Arabidopsis thaliana columbia
acccgggggagaggcttattttccttccccccaaaactttctttttttccagcaccatccttttggggccggtttaaagtggatttttcctacacctttttttccgcttaatcccttccattggcggattcctcctaatcctcttccacgccaccccaatggccgccgcagtttaaggctgggctgttgaattttgcgg

SEQ ID NO: 111956 - DNA, 298 bp, Arabidopsis thaliana columbia
acgctttcaacggacttatgtgctcttcttctatatcagacacccgcaaggctaacaacgacatgggttccatcacaagcaacggcggaagagttaactgcatgcaggtgtggcctacgattggaaagaagaagtttgagactctctcttaccttcctgaccttaccgattccgaattggctaaagaagttgactaccttattcgcaacaagtggataccttgtgttgaattcgagttgcagcacggatttgtgtaccgtgagcacagaaactaaccctgatactatgatgagacgga

SEQ ID NO: 111957 - DNA, 455 bp, Arabidopsis thaliana columbia
ggagaataaaactgaggaagaggtatcaatcatcaaagtttcttcccttacttgcatcgatcgggacaactctgatcttcatcaatcagctgttttactcaagcaggcatgtctcgatagtggatttttctatgtcataaatcatggtataagtgaggaactcaaggatgaggctttcgagcacagcaagaagttcttcgctcttcctttggaagagaagatgaaagtcttgagaaacgaaaagtatcgaggctatgcaccattccatgattctctcttagaccctgaaaaccaagtccgaggggactacagagagggttttaccattgggttcgaaggtagcaaagatggtccccattgggataaaccattccatagccccaatatttggcctaaccctgacgttttgcccggatggcgggagaccatggagaaatattatcaagaagcattga

SEQ ID NO: 111958 - DNA, 243 bp, Arabidopsis thaliana columbia
tgaagttgcttatgtgagagattccttggacatatgagaaagaactcggaagaagataattgggacagagttttgttctgtatgtgtggtggagaaataggtttggatgacttttaggtctctcatgtcagattttatggctgaacaatgtgtatctttatctgtttctggtttcagttgcctcaaatgtaaaaggaaaaaaatcatatgtggatgcaacatgttgatcaatctttgtgtaat

SEQ ID NO: 111959 - DNA, 444 bp, Arabidopsis thaliana columbia
cgattccaccgggttttcagtttgataagttgcctgaagattggagatgtcctacttgtggagctgctcagagtttctttgagagtaaaatggttgagattgctggttttgctcagaatcagcaatatggacttggtggtaatgctcttacctctggtcagaagactggtttaatctttggctctcttttactcttctttgcgctttttttgagtggctatttcattcaatgattaaatattttctcactattactatgttaaatcatgttaccaccaattttataatgtttcaatacaccattcttctcaaaaaaaaaaaaaaataaaaaaaaaaaaaaaaaaaaaaaaaaaaaaaaaaaaaaaaaaaaaaaaaaaaaaaagggggcggccgttttaaaggatccaagcttacttacgcgtgcatgccgacgtataacttttt

SEQ ID NO: 111960 - DNA, 596 bp, Arabidopsis thaliana columbia
  unsure (1)..(596): unsure at all n locations
tcgtctcgangtaagaagctaaaatggggccaccaagccgccatctagtcttttgtnctctcnnaccaacntcacatntnnctccacgtgcgagannnctcccaccccaaaaaccccgtagacgtgcccatctcaaattcnncatggcgccttccgtcccccctcccccgtctaggggtggctcnnctcctnnccgccctnnnacccaaacntnnatcaacntcaccnngggagggaaaatcccctcctccnnngctgtcgtgacgagccctcgagctaagcnnccttccanntcgtcataaggggtctcagcacccaggtctctcccttcttccctcggcccgtnnttcgtcttcttcaaccttccacgagaggagaaccgtanngcaaaaccagggctttactcggagccagaacccggaaaaaccccaatttcnngaagctggaagatgatcgtgcctaagggagtaccgtcaagtctcttggaaatcgaaccgatcccaattggattcaaccaatggtggatgttctttgcttggggtttctattgggacaccatcgntgctttactacatctntggctacttccagcaatg

SEQ ID NO: 111961 - DNA, 386 bp, Arabidopsis thaliana columbia
gcgaggaatcgttgaagaaagcagttgctcatcaacccattagcattgccattgaggctggtggtcgtgcgttccagctctatgattcgggtatatttgatggaagttgtggaacacaactagaccacggagttggggcgggtggataccgaactgagaaacggcaaagattactggattgtgagaaactcatggggtaaaagctggggagagagtggatacctaaggatggcgcgtaacattgcgtttttatcaggaaaatgtggaatcgcgattgaaccttcatacccgataaagaatggcgggggggggcggatcctgtacctttaccgtcattttccatcaatgtttctgaagctcatcttattccttccgcttcaccagct

SEQ ID NO: 111962 - DNA, 411 bp, Arabidopsis thaliana columbia
accgggatttactgggtcgatcgacccgtgcgcaattttttaaaatcttaaaaactttctcttaattttctctaccgcgatcaaaatgcaaatctttggtaagactcttaccgggaagacaattaccctttaggggggaagcgttcgcaccattgacaaccgttagggcaaaaatcacgattaggggggcctttcttccgattaagcaagggttatttttggccggcaggcagttccaggttggccgaccgtggcttgtttccaatttccaaaaggaatcaaccttcaacttggtcttaggcctccggggggtatgcagatttttcgtaaaaccctaacgggaaagacgattactcttgaggtggggagttctgacaccatcgacaacgtcaaggccaagatccaagacaa

SEQ ID NO: 111963 - DNA, 372 bp, Arabidopsis thaliana columbia
caaatacacaaaatcttaaaaactttctttcatttctctctaccgagatcaagatgcaggggggggttattactctggaccggggggacaatcaccctcgaggtggaaagctccgacaccatcgacaacgttaaggccaagatccaggataaggagggcattcctccggatcagcagaggcttacttttgccgacaagcaactacaggatggccgtacgtaggctgattacaatatccagaaggaatccaccctccacttggtcctcaggctcccggggggtatgcaaattttcgataaaacccttacggggaagacgattactcttgaggtggatagcttctacaccatcgacatactcaaggccaagatc

SEQ ID NO: 111964 - DNA, 351 bp, Arabidopsis thaliana columbia
acgcgaccgccaacccgtcgccacgcgtcgaattctaaactctaaaatcaatcttaaatcttaaccggatcaagatgcagatcttgtaagactctaccggaaagacttacctcaggggaagcttgcaccatcacacgtaggccaagaccaggataaggaggtttctcgatcacaagctatttgcgaagcgtggggaggcgactggcgtacaatatcaaagatcaccctcactggttagtcgggggatgcaatttgtaaaccctacgggagagatacttgaggggagcttgcaccatgacacgaggcaatcaagatagaggtttctcgaccacgagtgacttgcggagactg

SEQ ID NO: 111965 - DNA, 315 bp, Arabidopsis thaliana columbia
ccgccgattcccgtcgaccacctcggagactatggttgtgaagttgggcttactgctgatgttggtcagggcataaaagagttagagggtttagaacaaaggctaagctgtgtgctttagtggcgtaggatctacagggagttggagattatttcctgcttaacgtccatttacaaaatctgctggcctcatgtcgccgcattgtagccagtgtgtacacaagttgagctgtccgtgaatgtgtctgaaaggaaagccggtcggtggctaccttttttattaacctacttaagtgggccatggaagaagggaatc

SEQ ID NO: 111966 - DNA, 184 bp, Arabidopsis thaliana columbia
ggaaaaccttttttaagacccaacaatttggcctttttttttgaggggcaataaggaaaattgtgggggtccttttattaaaagggggggcaaaaaaggccccaattgggcccaaggttaccaaggttgaagtcaaaaaggggcccaaggaaactttgaacataaaaactttttccgttgttga

SEQ ID NO: 111967 - DNA, 260 bp, Arabidopsis thaliana columbia
gacccacgcgtgacgatagactgaatggaagcgtcccatcatcacatttcttgctcaggccgtctaaccgcaacctgagtttgacgacccaggaaaccaaacttcaatggcttgcccagctattcctatgggtcctaaggcaattactgtggtagaacgcggtatccctagcattctaaagagagttgggtcgatttttgaaaaggttgagatggactacgatctgtctgttgtgattagagttaccggttgtccaaacg

SEQ ID NO: 111968 - DNA, 141 bp, Arabidopsis thaliana columbia
acgcgcgcggattgatgctgatcatggacgcataccttctccatcttacaacgctttgatctacatacgacaggtagaacggcgacgcaaattaaaatgatttcgccataactctcgtcgacacggtgctctgctctcaca

SEQ ID NO: 111969 - DNA, 343 bp, Arabidopsis thaliana columbia
cgacccacgcagaacgactgccagagttataccatctctcgttcctatgtctgcctctcgcacctgacgccacatataggcaaccgaaaccccaggactcaattcctttgatgcgtgccgaacgacgctcaagggaaatacctacattaccgcgatgacaagcatgcgacctagagttaactaaattctggtgtgccatcctatggtaatgatgaagatgtagactaaatgttatatgactaccgtgaccaatgtgcgatcgggcgtgtaagtcaggtaattgatgccattgacgatgtgagattctgggatcacgaaggattggctccgatcatgacatctt

SEQ ID NO: 111970 - DNA, 291 bp, Arabidopsis thaliana columbia
gcgtacgcgctgagattcactcagctgcttcactgcttgccttcttttgctaagaaggtgattgattcgaaagccaactagaaaagagaagagaaatcatttgctttagagaaacttcatgtggaagtgataatatgatgatacaatgaacctttggaaaaaaataaagaagttttaatttttagaatgcaatgttctttcacctgcaacggtatgtgactgcactgagctatcaatctctttttttctgccttacactttttgtaaaaaagcgtcagattgaatttttta

SEQ ID NO: 111971 - DNA, 480 bp, Arabidopsis thaliana columbia
  unsure (1)..(480): unsure at all n locations
ctcaccggagatattcctgttaatggttccttttcacttttcactccaatcagttttgccaacaccaagttgactccccttcctgcatctccaccgcctcctatctctcctacaccgccatcacctgcagggagtaatagaattactggagcgattgcgggaggagttgctgcaggtgctgcacttctatttgctgttccggccattgcactagcttggtggcgaaggaaaaagccgcaggaccacttctttgatgtaccagctgaagaggacccagaagttcatttaggacaactgaagaggttttcattgcgtgaactacaagttgcttcggataattttagcaacaagaacatattgngtagaggtggttttggtaaagtttataaaggacggttagctgatggtactttagtggccgttaaaaggctaaaagaggagcgcacccaaggtggcgaactgcagtttcagacagaggtt

SEQ ID NO: 111972 - DNA, 439 bp, Arabidopsis thaliana columbia
atcgacttcatcatcatctctctctcttctcttcgttcctctttctttacacgcttgaaaccctagcaatttcaatttcgtttcctctaatagaatcttcatctttttatggcgtaacgttacacgaatttcaacgatttaggttttttttttttttttttgaagaatcaaacacaaagatagaaacaatgtcaacggagactaccacgggaaattcctcgttaattccagcatcatcatcatcgtcatcctccgacgcaatcgatccagctcctccgtttgatgaaccggaccaggcttattgatgcgagccaggacaagctcgattacgtgtagtctttgactgtcgagaactgtcttgagcggcgaggtcagactattgtgctcaagtctggtatggctaagtctatccatcactctcgtgtgctcatcaggcaga

SEQ ID NO: 111973 - DNA, 480 bp, Arabidopsis thaliana columbia
  unsure (1)..(480): unsure at all n locations
ctaggccatcagcacgtctaactcatgaacattcaaattctgataatctcgggggctcgacaaaagctacacaaaaccggagcaatgataatgggagtggtgaggcaggtagtgtcatcaccgagcagaagggggaaagagatacagaaacgaaagatagcatgcatactgaaagtcatccagcccataagtctagatcgggagttgaggcacctggggaggataaaatagagaaagcaggtgcacattttccagaagatgataaatctagaattgttggtacagctgatgtcacggtcagccaatccccaaaagacataaaaatgtttagagataaggtgaaggccaaactagaggcgaagaaggtccaaggtgaaaagacgagaaagaaggatttggtggatgaggatgatttgatagaaagagaactggaggacgtggaattagctgttgaggatgacanagatatacaaaacaaaa

SEQ ID NO: 111974 - DNA, 296 bp, Arabidopsis thaliana columbia
cgcgcccgcacacaacaaaaaatgggtttcattggtaagagtgtatttaggcgagccgtagcgctttggtgcttgacttcctaagacctcactgaccgaatggtcccatatattaatcactttagtgtagcgacggggaatgctacttaccaccacggtcaccaccacccacaccctcctatggtccgactcgcatggcactctgctggaactttcgattggcaatcaaggactggaggagcattagaagaggcaacatggcggctattcaagcgaaaggattgtgtaagtttttt

SEQ ID NO: 111975 - DNA, 363 bp, Arabidopsis thaliana columbia
agcaaagaaagctttgttttgattgataatattacacataaccaagagagagcatatagtacaaacgaaaacaagaatagttatccttagaagtaatcttcagtcctgcccttgaatccgatttgtccgaaagtgaggcagaggaagaggcctaagtgccacgtaaccaaccacaaccagaactgtgaagtgagagctggaggagtcgggaagtgagcgagctcagttccgatgctatcgaagaagagacccgtcaggctcttcccatttatcggtggaatgctcgacggagctagccattcatcaacaccaaacccttctcttaatactttttaaaaccaacatttagcgccaagaaccctt

SEQ ID NO: 111976 - DNA, 329 bp, Arabidopsis thaliana columbia
aaaaaaaaaacacaaaaagtttcaatggccgccttcattatggctctctcctcccctgccttcgccggaaaggctgtgaacctttcccccgcggcatctgaagtcctcggaagcggccgtgtgacaatgaggaagactgttgccaagccaaagggtccatcaggcagcccatggtacggatccgaccgagtcaagtacttgggtccattctttgtcgagttattgctctaccttaccattgacaatgcatttggagcacggatggtacacctctggacttttagttgatcccgagacattctcatggaacctgttggcaaggagttttt

SEQ ID NO: 111977 - DNA, 403 bp, Arabidopsis thaliana columbia
ctcttcttgaatcaaggtcgtcttcttgaaatcagatctcttcgtgacttctcctgtaaccaacaaagaaccatggagctcctctctagagctcttttcttctttcttctactctcagttctttcttctttctcttcttcaagtttcatttcagatggggtcttcgaatctcagagtttggttcttggcagaaacttgcttcagaccaagaaaagcaagtttcttaaatctctcctcttcccataactttactgttttttatatactttctaatgattccagcaattgattctccttttagtatgaagatcttagtaaagagcttctaattatagacggatccatatatagatagcttgtttccatataatagactacaacccttgattcttgattcctagct

SEQ ID NO: 111978 - DNA, 445 bp, Arabidopsis thaliana columbia
ctggcttctttactactgttttcagtcgtaattggtttcgaattttgattccttcatctgtagacagttgtaaggatcgatttttggcttgattttttgactaatgggcttggaggaacttagtaatctggggaaaattagagttttcttgagttgtcgtctacaagtagctgcatctgggtcggaagaccaacatttattctagctgtttcatgggatttgccatcacggtgacattacctaattgtggaagtaagttcttgcctaaaaggagtttcagagacaaaggtgctttgtctcttgccatttgttccctttgtcatttccttcatcctgcacagcctttgttggtcagacatcaaaggaggatgtcatggacaactatcaaaagctcggttggtggtgacagattcgatccagcatctggttcttcagtaataatagc

SEQ ID NO: 111979 - DNA, 386 bp, Arabidopsis thaliana columbia
  unsure (1)..(386): unsure at all n locations
accggantnaagttccgacccagcgcgtccgaaaaactcttgaatttttcaagaacaaaagaaaatgtactatctttaatggcggccatgaactcgagtgttctcacttgcagctacgcaattgctggctctggctcggtagagcttaaccagaaagttggtttggtgaattcatcatttgtttttggtcagaagaaacagttttatttttctgtgatcaaagcttattgcgttgttgttttatgagtctcttttctttttcataatatttttcttatcaaatgtttttttctaatttttttttttttttatttttattttttgttttttttattcgtattaatctatgtttctttttatttatttttttctttaatacatatttt

SEQ ID NO: 111980 - DNA, 470 bp, Arabidopsis thaliana columbia
caaacagagcttgagaagtattatattagttctctcactaacgttttcatccccggaactcaataccttcctacgcctaccaaccttaaactatgggagctccataagaaagtgaagaactcgatcaaaagaatcatagattcaaggctaaaatcaaaatgtaagacctatggctatggggacgatcttctaggggtcatgttgactgctgcgaaatctaacgagtatgagagaaagatgagaatggatgagatcatagaggaatgcaagaatttctactatgcagggcaaggaactacttcgattctattgacatggactacgatgttactaagcttgcaccaaggttggcaagagaaactcagagaagaggtttttaatgaatgtggtaaagataaaatcccagatacagacaccttctctaaactcaaattgatgaacatggtgttgatggagtcgcttcgtctgta

SEQ ID NO: 111981 - DNA, 449 bp, Arabidopsis thaliana columbia
caagaaagaaagagagctagaatctagttctatccaagagtgttttttagtttctttctccttgttgggatatggaagcttgttgctctgatcttgaagtagacatcaatggagaacaaactatctttctcaataagcaaatcatatgtgcttattctggaacgttaagaaagcttttggggaaatcaactagttccagtggaaatctcaaggtgatcttcaatgatttccccggtggagctgagagtttcgagtttgtatcgaggttttgctacaatgacggtcgagtagctgtgatgccttcgaatgtagttttcttgcattgtgctgctaagtttattgaagtcactaaagtcttggaacaaacagagaagtgtatggaagagattaggtattgggcttggccaggggttcttctttgtctaaaacagtgtcaagaagttgaaaca

SEQ ID NO: 111982 - DNA, 417 bp, Arabidopsis thaliana columbia
cgaataattcgcaggtacgactgtgggatgtttatgcttaaatacattgatttttacagtagaggattgagtctacaatttagccagaaagacatgccgtacttcaggttaagaacagctaaggagatactgagactgcgagctgactaatagtgcccccatcttggtgacataaccttgctattttacaaagccgattcatattagtttagcagccttatttgcttgggctgtggagaatgctagatatcttcgttgctttcttgaaatatttgtttgattttttcttatctagaagaagttgttgataagcttttagaattctgttttattgtttagtgaaggaataatcttcaattttgtaccctggcctgaggaataattttaagtttggtggaaaattgcagattgttatgc

SEQ ID NO: 111983 - DNA, 144 bp, Arabidopsis thaliana columbia
agggactttgtttcaaatcctacaacactgaagtaacgactatttgtgggtgggcttgctatgcttctgctgtcaccgtttcttgtcatctttatgttggggtatttattcctaaagcatgctgaacagttctacaatcatcca

SEQ ID NO: 111984 - DNA, 360 bp, Arabidopsis thaliana columbia
gaggaaaaaaccttacccgctcctctaaaacccttgtcttctccgatatctttcctcagctccggtaaagaatgaagattaggttctgtaatggcttcacaaagcctgggtttttgctagttcactttgagccaccatctttttttgccgttagatctcgttcactctctgattccacttatggcaacttatgcaaccacaagaagagacctgggactggaattgttctaactgttcaatgcgctattgcaaatcggagattttcttcacgttctttggattcaccgagaagagaaaggtcttttagatcttttttttttttcgttatgtgtttggggtagagataaggtctaaattttg

SEQ ID NO: 111985 - DNA, 357 bp, Arabidopsis thaliana columbia
caaatgtttggtgtttcgatgagaacattaatctcaccatctcttgctcccttctctctgcgtcggcataaaccctctatcttgtcgaccgctcttcgcttctccttctcaatcaacagcataacccccacagattcacctgcttccaccagttccaccagagagctacaaacgaaagcgacgagggtaacatcatcatcatcatctcagccgctctcctactcatctaccggcgaaatccacgtcgtagtcgggccaatggtctccggtaaaacaacaacacttctcccgcgtatactccccgaaagagaaaccggggaaagaatcgcaatcatcaaattcaacaaagacacaaga

SEQ ID NO: 111986 - DNA, 363 bp, Arabidopsis thaliana columbia
gcgattctttcgtctcaacatttagggtttcagtagatcggctgatttcacatccacggtatggcgactcaaatcagcaagaagagaaagtttgtagcggatggcgtattctacgctgaattgaatgaggttctcacaagagagctagcagaggatggttactctggtgttgaggttatcgctactccaatgtttattgtgctcttcttactagctacgttttcttatattttatattatatttaattattcttttagttctatgtcttatattctgtagttacattatcttatatatttctaatatctcgttcaattgtgtctttctcttatttttgtttttatctctttatctttatttat

SEQ ID NO: 111987 - DNA, 483 bp, Arabidopsis thaliana columbia
gcaatgaagaaaatgaaaatgagcagcaacagtgtccatatacctgaagagtttatatttgacgctgggggcggtctggtggatgagaggctcctcttctttgctcaacaagcccagaaacgttgggggaaagctggcatggctaataatgtcatattctcagtagatagaggactctacattaagctaatgctttcaatgggttcagttaatagtttagctgttgatgcatccttatgagcatttgcaccataccatttatcgttcttattgaatgattttatattaattattttttgttttttcggtgttggttgggtatttttccttttattattttcatatttatttttttttttaattttttatttttattttatatttttattttaaattataattttttatcattattaaatttttaatctttaattatgttatatatttttttatttatgtttaattttatattttatttatatt

SEQ ID NO: 111988 - DNA, 279 bp, Arabidopsis thaliana columbia
gcagggtgatcacaaactctttgcagcagatatattgcttcagttaaatgcactggattgtgcacctgagaacaaaaagtacagaaatgaagctaccagagctctacttgatgcagttacatatagtgaaggttcaaatatgcagcttttatcaacgttcattcttgcgaatatcggtggaacttattcatggacaggagaaccttacactgctgcttggctaatgaaaagaggatgtctaacttctatgttttttatgaagtttgttagatttattat

SEQ ID NO: 111989 - DNA, 472 bp, Arabidopsis thaliana columbia
aaatggtagaactataagggcattatcaacactaaattcttgattcattgatttccagctagcttaatcatatcgagggcacacgtgactaatgaattttgttgactaaagtccatcctgtagttgctgttgtaaaggttttaggtctaaatagattgatgtacagtgcacttgaatattaaggcatgctgtcagcctattctcttaccattcaataagttatgtacggacagagatatttataaatgttgaggagaattctcattctccgaaattcccccaaaaaaaaaaaaataaaaataaaatataaatattttatataataatataaaataatttataaatattaattaattattaatttataatatttttttataaaaattattttatatttatttttcttttctttttatcttctttatctataatataataatctttatattatttattgggggccctttttttt

SEQ ID NO: 111990 - DNA, 296 bp, Arabidopsis thaliana columbia
gggtccaaccaacccgtccaattattccctgacgcacacacaactgaatttttttctttattctgattgtatctacatatttgcagtacgttctttttttttttggggggggttgctaactcaacggtagagtactcggcttttaagtgcgactagcatcttttacacatttgtatgaagaaaaggattcttccagatctgcggtagagttagtaagaccactactgatccagatatgactgaaaggggaagcaccatgagcttaaagtgaaagatgacaaaactcttcttttttg

SEQ ID NO: 111991 - DNA, 467 bp, Arabidopsis thaliana columbia
aaaaaaatctagtgttcggttctaacacgcttgatgaccatggcggtctcgtttaatacaacggtgcactatccttctatgagtgcgagctgtatcatcaagctttattctgggataaagcctcaatctgcaagctttttgacacgagcagctcagaatttagtacagggagctctatgagaaagcttatatgcatcgactgatctcgactgtgtttagtacgattcacaatgtttgttataagtctgataataggtctggtcttattggtttgagttttgctgttattgtagttcttattgctttatggagtcttattactgtaatttacaatttgtctcgtatttctagcggttttaatctagtttatatcttgtttctacatgtggatgacatattttatttatttttgttaaacctggacataactgttatttaataaaattgacattgatttttttaatttt

SEQ ID NO: 111992 - DNA, 366 bp, Arabidopsis thaliana columbia
ttgagatatcgatcttacgaagaagcaattatttcggtcccattgcttaccaagaaggttgtgaagaataggtctgctaagttcatcataccccagagtgaccgtattatcaccgtcaaggaaagctggaggaggcctaagggttttgattctaaggttgataagaaagttttaagttttgtttttgattcctcttgtttgtttcttttttgactagttattttatttctatctatgttttttgtaatctagtaattatctttgttaacattctctcgtttatctttttgtatgttttaatatttaattatatatttttctttctttcgttattaatattattttttctttctttctcttattatt

SEQ ID NO: 111993 - DNA, 303 bp, Arabidopsis thaliana columbia
cagtcactaacaacaacaacaacagtgtggatcatcccagtgactcaaacaccaacaacaataacattgtggatcatccgaatgacataaaaaacaagaacaatgttgacaacaaggacaataacagcagagacaagtaattaaataggaaacactccggtttagatgataccgatctatcggattgtaacttattcttctttcttaaaaaaattgtttaggagcaaacaaagattttatttgttagtgtattcaactgattacatttttagttaaaaaaatggattctttcttaaaaataaa

SEQ ID NO: 111994 - DNA, 346 bp, Arabidopsis thaliana columbia
gaataagaagaaaaagaagaagaagaagaagtatagaagcttatggcaggaggaggaacagaagcgtttcctgatcttggagagcattgccaagaccctgattgcaaattactcgattttctcccttttacttgcgacggctgcaaattggtgttttgtttggagcatagatcatacaagtcacataactgtccgaaatccgatcatgggagcagaacggtttccatctgtgaatcatgttcaatagctattgaaacaactttttttgtttaaaaatgtattcatttctttttttgatatatactaatagatttcttttatttttttttttatattatttttgttt

SEQ ID NO: 111995 - DNA, 222 bp, Arabidopsis thaliana columbia
gtctctctctctctttctgaaataaacactttttcgacgcccgtgaagaaaagcctcgccattagaccggtggcgttctatagaaacgggctttctcgtcctcgtttcttcgataatcataggttcaactcttaccgtgttgatactcccctttttgtgctagatccacttatcttatgggcacagtttttataaatttagccctgttttttttattgtact

SEQ ID NO: 111996 - DNA, 411 bp, Arabidopsis thaliana columbia
ctgaaaacatgcagtacaagaatctggggaaattgggtttaaaagtgagcacgctctcgttcggagcgtgggttacgttcgggaaccagctcgatgtgaaagaagcgaaatcgattcttcagtgttgtcgtgatcatggagtcaatttcttcgataacgctgaggtttacgctaatggtcgcgctgaggtgattatgggttaagcgattcgtgaactgggttggcgtcgatccgatattgtcatctctaccaagatcttttggggtggtccttgtctttactattattgttttaattttgtaattatatttgtttgtatgtatctaaagttttttttcattctttcttgtttttgactttactgttgtttattgttattattattctcttgtttcttttttttttttaatt

SEQ ID NO: 111997 - DNA, 461 bp, Arabidopsis thaliana columbia
aaataacatgtggacttaaaaaattgttatgcaaaaagatttgtttttttcattggtcttcttctactacacgcatttgaatcagcagagagattaattcctcagctcggcgattcaattctcagaaaatgcacttaagcatctgagtaagatgagatcagaacgtggggaagatttgtgcttgagaattggagtcaaacaaggaggatgctcgggtatgtcctacacgatggactttgaaaacagagcaaatgcaagaccagatgattccactatcgaataccagggattcactatagtttgtgatccaaagagcatgctctttctttttggaatgcagcttgattacagcgatgctttgattggtggaggcttctctttctcgaaccctaacgctacacaaacctgtggatgttggaagtcttttgctgccgagatgtgaaccagtttcacacattgca

SEQ ID NO: 111998 - DNA, 463 bp, Arabidopsis thaliana columbia
ggaagctttacgtagctaacgttggggactcctttgcggttttgggaaaggtcatcaaggccacaggtgaggttaatgcgcttcagctctcagctgagcataacgtgagcatagagtctgtgaggcaggaaatgcactccttacaccctgatgactcccatattgtcgtcttaaaacacaatgtctggcgtgttaagggcattattcaggtatcacgatccataggagacgtgtatcttaagaaatcggagttcaacaaggaacctttgtacacaaagtaccgattgcgggagccaatgaaaagacctatcttgagttgggaaccgtcgataaccgtgcatgatctccaaccagacgatcagtttctgatatttgcatcagacggactttgggagcagcttagcaaccaagaggctgttgaaatcgttcagaaccacccaagaaacgggatagcgaggagact

SEQ ID NO: 111999 - DNA, 244 bp, Arabidopsis thaliana columbia
gaagaacccgtgtccgtcttcgatcatatagaccgaaggttttcttcaatttcaaagtcagtggcgatgtcgcgggctggtcctgaagaaatttatctttcaacatcactcgctagttatctcgatagaaaactacttgtgcttcttagagatggtagaaagctaatgggaacactccgttcctttgatcaattcgccaatgcggatctagaaggtgcgtgcgagagggtaattgatggtgaac

SEQ ID NO: 112000 - DNA, 307 bp, Arabidopsis thaliana columbia
gcgatccatcttcaattccatcaccgattttcttttccgactgggaataaaatgtcagaggggtactcaatcgagctatacttcgatccagcactaaaaaaccaagtattgaaagcatggaacgtctacgctcgtcgagaaatcaggaccaaatagatcaacactgagtctggtccacacataacactcttgtccacctcctgctttgattcaacgagactagaatccggcatcaaaaactacgtatcctagcatgaaccaatcattgatctcgatctcgactatcggtagcttttatagctacatc

SEQ ID NO: 112001 - DNA, 368 bp, Arabidopsis thaliana columbia
aaggaagaagacgttagagttggagctaattttttcccggagagacaaccaatcggaacatcagctcagagtgacaaggactacaaggaaccaccaccagctccgtttttcgaacctggtgagctttcttcatggtctttttggagagctgggatcgctgagttcatcgctacttttctctttctctacatcactgtttagactgttatgggagtgaaaaggacactctacttttttgctatcttttgatttcaatgtattacttgatcttttatttgtgattatcgtattatttttttcttctatttttgttgtttttcttttttattttttttattttttcggtgattatatttattatgtttata

SEQ ID NO: 112002 - DNA, 414 bp, Arabidopsis thaliana columbia
  unsure (1)..(414): unsure at all n locations
gctatggctcatcctgcaaacaaggaattggcgcatagacaacagttttactattggaagaactacagaaacaacagactgaagcacattctacctcggcctcttccagagcctgtacctccacaaccaccagttgcaccttcaacttctttgccacctgcaccatctgcaactgctgctctctctccagccctttctccaatgcagtacaataatatgctttctaagaatgacactaggaatatgggtgctactggaattgatcgtaggaagagaaagaagggtatataagcatttcctgccctgaagcatacaccatggcgtcagtcgtcagatatggtttcctccatgtcctaggagggaagcctactngactcangttacaaaaatgttgaaactcggtattactcattc

SEQ ID NO: 112003 - DNA, 351 bp, Arabidopsis thaliana columbia
ctgaaattcaacttctagtcttctcctccaactactggcaaattagggtttctgagttcgagaaaattcgtagcagagtgtgaaaatggaaggaagcaaaagcgaggcagtgttcgattccatgaatctaaatcctcagattttcatcaacgaagcaatcaactccgtcgaagattatgtcgaccaagcttttgacttctatgcccggttcgtctctctcgctattgttgcaaagcttattctaacaaagggttttatttggttcttacttacatttttgcagtgatgcatccaaatctctcaaaatcaaaggatctgataaacaaaagtcacaagctttatcaaatggta

SEQ ID NO: 112004 - DNA, 289 bp, Arabidopsis thaliana columbia
aagagatcatcacgtgggaatccaactaaccaattgtattggcgtcaatgaccatgacatgttcatttgtccctaccgactgaaacctttcggcaaacatcttcagcaacagcagacgaagcctcacggtggtcaaagacttcgggagtgatagcacactgagctaggtgaacatgatgctcgatctgcacatgatgatgcggtgcggttcagtaataagctttctaagaatgacactaggaatattggtgctactggaattgatcgtaggaagagaaagatgggttta

SEQ ID NO: 112005 - DNA, 460 bp, Arabidopsis thaliana columbia
tgctagcggtgttatggccctccaggtgcaatgtgtgtttcaaaaggcatatgagaatggaattcgtgaagtcaaagttctgggagccaacatatgaggattgcctcaacctgattgctcgtgttcctgtgtgagctgcatatgtttatcgaaggatgtataagaatggtgattccattccctcagataaatctttggattatggtgcaaatttttcccacatgttgggatttgatgatgaaaaggtgaaagagctcatgaggctttacatcaccatccacagtgatcatgaaggtggaaatgttagtgctcacactggtcacctggttggtagtgcatagttggttcttgaagaatctccctgctgatctaatgaacgagagcaacacaggaagccagttccaggagcctgaacaaccaatgcaaagccttgacacaatcatgcaaattatttttgaag

SEQ ID NO: 112006 - DNA, 288 bp, Arabidopsis thaliana columbia
atctccctgaagttgattgccttctcataacttaaagccttgatgatcattgtcatttgaatacccttaggccactttccgagaaatctccaggcataaaggttatagcaaccccaaatgctaagcctttgctagatcctctttttagtaacgtcacttatctggaacctggagatagctttgagctaaatgcaagaaacggttctaaggttcgagttaaagccacagctggacctgtccttggtccaccgtggcaacgccctgaaaacgggtatcttcttgtattcc

SEQ ID NO: 112007 - DNA, 397 bp, Arabidopsis thaliana columbia
ataatacagttgttaatcttggaaggaaagatcttagaccgcgtattgaggagacgaaagatgtgaaggacgaagtggaagatgaagaagggagcaagaatgaaggaggaggagacgtaagtactgataaggagaatggtgatgagattgtagagagggaggaggaggaaaaggctgtagaagagaataacgagaaggaagctgaaggtaccgggaatgaagagggaaacgaggattcaaacaatggagaaagtgagaaggttgttgatgagagtgaatgtggaaatgagataagtaatgaggaagctagggagatcaattacaagggagatgatgcgacaagtgaaggtatgcatggtacggaagacaagagcaatgaaatgggtgaagtttacag

SEQ ID NO: 112008 - DNA, 440 bp, Arabidopsis thaliana columbia
gcaggagcatggtttatgcattgtcacattgattcacatttgggatggggataatgatgttcggagatatgaatcgtcttctgtgtttgatttctctgcatctgcctcctccgctaaaaacgccggccttccttcagctgacgacgttttctctcagatttcagggccaccggagtttctaaacaaccgcacagaagcagataatgaagcttcagctagagatgcagaacatgcaaatcgtattagtcgcaaaaagaagaaagttaaaccaaaatgtgttgtcatggaagcaaaacctcaactagtaggaatccatgagagagtaagaaacgatattgatgcacccccatcttcagagagtggtgaaaagcggatatctactgcaaccaatcctaatgcagaagaatctgcagatctcttgaggatgtgtgtgcaatgcg

SEQ ID NO: 112009 - DNA, 294 bp, Arabidopsis thaliana columbia
ccgacgccgcgcgtacgagaggatgagaatagagagaggaaacagtttattttagaaaaaaaaaaaaaactttaaagaagggaaaaaaaaaggaaaaaaaggtttgatctggactttcttcttcgtctacacttcatctctcgaggagggtgaagaatctggtctttcactctgtaaggagcaacaaacattcaattggttgttcacctttttacatcacttcgactgggaaaaccgtggtaaaaaaaacttttgtatgtaaaaaaaataaaaacatatgggcttgattactat

SEQ ID NO: 112010 - DNA, 421 bp, Arabidopsis thaliana columbia
ccctctctctctttgtctctctatcatcaattatgcaaaaagcaattcgaccatacgagtcaccgtggacgaagaccgtgccgggcaatagcattttccttttaaagaatgaagataaaccatcatcatcatcatcatcattatcatggttaacatcaggatcaccaaagccaacatctataagcaataagagatcaagcaacctagttgtgatggagaatgctgtggtggtgtttgcaaggagaggctgttgtttgggacacgtggcaaaacggctgctactgacacatggcgtgaatccagtggtggttgagattggtgaagaagacaacaacaactacgacaatatcgtaagtgataaagagaaattacctatgatgtacataggaggaaaggtgtttggaggattggaaaatctgat

SEQ ID NO: 112011 - DNA, 429 bp, Arabidopsis thaliana columbia
ctaccacaggttcagatagaagccatcctatggggttttggaacagcgttgggagaacttcctccttactttatctccagagcagcaagtctttccggtggcaaaatgaaagaattggagacatgttctggtgacgataacggattcattgctaaacgcgtaaatcagatcaaaagctggttattgtcgcattcacaatatctcaacttcttcacaatcctgattcttgcttcggttcctaacccattattcgaccttgctggaatcatgtgtggacaattcgagaaaccgttttgggagtttttccttgcaaccttgattggaaaggcaatcatcaagacacatatacagacggttttcatcatatgcgtctgtaataatcagcttcttgactgggtagagaatgagctgatatatattctgagcttt

SEQ ID NO: 112012 - DNA, 448 bp, Arabidopsis thaliana columbia
cgaaagcaaagcctttgggtatcacagagatgtgaaaccaaaaatagctgaagatttgagatccatggggcattcggcgcagacatttgttcaagttaaagaggaagctgaatgctgtagagaagttattgaccttgagtgcggtgtccaacctgatcttggttactgtgaggtatcatcggtgaccaactgtgatgaagctccagaaacatcttttgtccaggaaacatctggtatgatcaatggtatttcagtagccagtccatgttcttgctcgatgaatgaaagctctagtccagcaacagtaggtctgagatctccggggtctcctgatcaattattaaagcagcatatatctactccaaatttcagaaaatctcctcttggaaccgagtcgtctgtagtagcaacttctgagagatattcatttggtggcacccgtagtttg

SEQ ID NO: 112013 - DNA, 443 bp, Arabidopsis thaliana columbia
ctttgatccaaaaaaaaattcatctttctatatttgttgcagtgcataagaagattaacacagtgttcacgagagagagagattaaagacagagatttctgggttttaacagtaggaaatgaatattgttggattaagaagcgatcggagaaagtagcaaaaatcgggagaggaaagggatattcgaaaaccctaattttggaagatcattcatttgagagaaaagctgttaaatttgagggctttagatcgaatttgatatctggggttaatgggttttttgaagaagttaacgggtatacttggttttggtcataacgatggtggtggtggtcatggagctgtgagagatgaagatggtgatggtggagataacaacactggaactgtttttggggatggagataaaccttgggaagagaattagacgagatttctttgaa

SEQ ID NO: 112014 - DNA, 381 bp, Arabidopsis thaliana columbia
cgacaatgcattgtttttcaataagtacaatggaaaacaaagagattagagagagtaacacaaaagcagaaaacaagttccctttttaaacatccttagcaatgagatcaccattgagaaactttctgtaggcagcaacgggccaaatgaaaccacggaagatgatccgactagccaaaggaacattgatgatgatctcttttattgcgggtttcttctcaccactaatagctattaagtagcttgttccaacccacccgatccatccagcaatgttgaggaaaagattccctggagttatgaactcttcccaattccgtttgtcttcgttactatcccggcgaattttgttttcaacccctgatttaacaaaatttttac

SEQ ID NO: 112015 - DNA, 430 bp, Arabidopsis thaliana columbia
agcccattgagaatagctaccgtcccagcagttttttcatatgtggcggctatatatcttacaccagcaggatcggttccgctcctttcatcagcacgctctgcctaagccatcaatagttggacaggcacgaccggaccaaacactcgctatctggtcgcgacaggacacaacatccgacaagaactaacgagcaagtcactgacttgtaaggctgcgattggtcatgaggtgcctgagctcgctgcgattgctggcgtgaatgcgttgctttacggacctaagaaacttactgagattgcaagagtatgggcaaaaccgacaagagctttcaacaggctgcaaaagagttcgtgtctgaacttaagacagaacccgaagagtcttgtgcagaatcatttcaggtagcaacgagtaacaaagaagtgag

SEQ ID NO: 112016 - DNA, 340 bp, Arabidopsis thaliana columbia
gcagcaagggaaaagtataattgtggcaggttttgctgaatcgaagaaggatcatggtaatgaaatgattgaaaagttggaagctgggatgcaagatatgcttaagatagtggaagatcgaaaaagagacgcagttgctccaaaacagaaagaaattctcaaatatgttggcggctgagatcttcatgtggggcattcgcagaatagaagaggatatggttgatggctttccatatgaagtgccggaagagtatcggaacatgcctttccttaagggaagagcttgtgtggacattaaggtcaagatcaaggacaatttcaaacatgaggactgtgtggt

SEQ ID NO: 112017 - DNA, 278 bp, Arabidopsis thaliana columbia
gtcaatctctcactattagtttctcttacgatcgctacagatcatgactcataatgattgaatctctctctctattataaaacacgactcgtcgcactgtttcttaatcttccatgcgcatctacacggctctaattggtaatggatcagtttaacaacataccatggttattcagttcacgcaaggtgcaacgatgtaccattcggcagacactacggctcatcttgaactttaggcctacataaacagttcacgggcggttaccgactcacagctt

SEQ ID NO: 112018 - DNA, 378 bp, Arabidopsis thaliana columbia
  unsure (1)..(378): unsure at all n locations
cacgccgantccgctcgtacccaaagccaaacacgcnntcgtaagtgccactcggagtgtgaaacgactccaagnggaagcaaccttgcgtacgtgaaggcgtgcgtcnngtaaatctgcaaaccacactactgnngtggatgtcgaagaaactcacaaatcgttacccgtcgctgtgaacctgtgtgctttctcctgtgcaatatcccgtaaggtacccangnnaagagtacctggagtgttgcttatttctaggaaacttgcgcatgttcaagaaggctatgtaccgtgaagatttgctcaagaatttcaagaacttgatttgcgtttcacagagccatgcatgtcttaagctctccaggaagactgcagaagcat

SEQ ID NO: 112019 - DNA, 454 bp, Arabidopsis thaliana columbia
ccagacactattaactcttgttcttgttatttaaacacctaaccagaaacacactagaaacacacaccaaaaacaatctttcccgctccttcttacaccaaccagagaactagtctatggatccatatagtcatggatcaagcttcatgaacctcttaactagtcaacaagaggctcacaatttagaaaccaatccgtatgatgatgatgtttctccaaaccaagctgcacacacacctaaggtgaaaagagagagaaggaaatggtctgccggtgaagacttggtgcttgtcagtgcttggctcaacacaagtaaagatgcagtaataggcaatgaacaaaagggttatgccttttggtcacgtattgctgcctattacggagcaagtccaaagctcaacggtgtggaaaagagagagacaggtcacataaagcagaggtggactaagatcaa

SEQ ID NO: 112020 - DNA, 331 bp, Arabidopsis thaliana columbia
cgttagaaacacaaataaaagtgtaattacttttatgtttaacaaaaaagggttatgctaaatcagggatgctgatcttcttactagcattggtcatcacatattgagccacggccatggacatgtccgttgattcctccaacgataaccaccacgtgaccggccgtcccggccgcccgtagggaaatttcgacgctgaaaccaccttgatggacttgtaaggactggtcaacccctgcaaactatacgactacgttgccgagaaggaacggcgtgtaactatttttgaagacaacctccgttttatcactaaccggggcgctgagaattt

SEQ ID NO: 112021 - DNA, 336 bp, Arabidopsis thaliana columbia
tagtgccgggccgttcatagggcacttgcgcgagggttgttgcatatgccctgctatgcaacaaacatgcgtttctataatggatctcctgtgctcacgagacgaagcaggatcggcttgcacctggtgctattagtggcgatgtatacttggttcacgtcacacggattggcattctcgtcctatgcgtaatcacgcaagttcggatggcccatctgttttctacttcgtttggcgtccctcggaagtatataggattttgctatggctaaaatttgcatatagctctgccaaagatgacccggacctaagtgaagaagaaaaaaaggttatact

SEQ ID NO: 112022 - DNA, 468 bp, Arabidopsis thaliana columbia
  unsure (1)..(468): unsure at all n locations
ccggaatggaaggacccgggccaggccgcacgcgtaacggagtcgttgaaggtcaacaacgtcacacttttatgtactcttctatatgtgttcgtcactgggggagctacgtgtgtgaagtttggttcanatgcacagtacgttgcagtcggttcgatggaccgtaacctacggatatttggtcttcctggtgatgaaaaagccaacgtcgatgatgactctgcgcaagactcgtgaacaatccgtaaaaaactcagacagaacattccaaatgtccatctgcagtgttatctcgctcaaatttctcaagttctgttgtatcttacagtatttgcagcaatgggggagaatttcataagtgcgggtcatgagtgagtggtgattgtgatcatcctcgctacctcttggaattcaaacaatgacactcacaaaccctcgagttttcttataggctcttttaatcgcttt

SEQ ID NO: 112023 - DNA, 328 bp, Arabidopsis thaliana columbia
tcttttttttttttttttgaagcatatctattgttttgtggtaccactttagatcagaaccttacaagagttgaaatacaaagggtaaatacatatgttggcaaggaaaacaatccttccaagaactaagccggggagcacaagacatcttccggggactaagacagatctaatggggaaaaaacccaaattaaagaacaacaatgatactaaacctaaactttcaagattcattactaaaaaaactcaaaactgaaaagcaaagtctaaatccaaattttttaaattaaagcaggattggaaccttttgatctatccaaagggaaat

SEQ ID NO: 112024 - DNA, 254 bp, Arabidopsis thaliana columbia
aatctctcaccattgtttttctctgcaaaacttaagaaacaaaaaaagaaaaatcggagaaaccaagaaaaaagaaatgggaaggggagaagcaggagaaaagaaggctttaggatgggctggaagagatccttctgggggtctttttccttacttctacactttaaggggcacaagagccgatgatggggatataaagggtatatgctggggaatatgccatactggtattcaacaaattaaaaatgatcttg

SEQ ID NO: 112025 - DNA, 274 bp, Arabidopsis thaliana columbia
ctacttgggtatattcctgggatcatatacgccatttatgtcctcaccaaatgatttaccatctatcatcatctccttgaacagctgttccgtcgtgttctcctatctttgtgactgattcagcgtttctttttctttcatcagagtttttatgtttcaagtaatttaattaatcatcactgttgtgtttgcattgttatataaatgttgtgttgatataaaaaaaaaaaaaaaaaaaaaaatataaataatatatttatattatatttttttt

SEQ ID NO: 112026 - DNA, 410 bp, Arabidopsis thaliana columbia
  unsure (1)..(410): unsure at all n locations
gaaaaaatggataaaagattggagtcttcaaggtttgaaatgctcttgtgaccggtggcactaaaggcatcggggaagctgttgtggaggaactgtcaattttgtgagcaagagtccacacatgtgctagagacgagactcagcttcaagaacgtttacgtgaatggcaagaaaaagggtttcaggtcaccacttctatctgcgacgtttctttgcgtgagcaacgagagaaactcatggaaaccgtttcctctctcttccaaggaaaactcaacattctcgtaagtgtatacatattagcttctcctncccgggcttgggatttacaagaaccaaaccatgttgtgttttaattacctttttttttttgaaagatgttttaggtgtgggctatacatatcttatatata

SEQ ID NO: 112027 - DNA, 203 bp, Arabidopsis thaliana columbia
ttttcacaaaagccatgtgctgttttctccatttggatcaaaatggttgctgggaacaattaaaacaagggcgttacactctttgcatcaatggtcaacaacaacaacaacatctaagggactaacattcatcttgggggtcatcaaaaggaaccagcttttgtcaaacctgtatccgagacacgaaaggggcctttactttt

SEQ ID NO: 112028 - DNA, 313 bp, Arabidopsis thaliana columbia
taataacagaacgtagtgtttccttggataggttgcttcgctaaggtatctgctgattcaccgaagatctcagcttcttctgcaataatggcaatgggtttcgatttcaatgagatgaacaaaacaaagaagactttaattggacttggcttgggacagatcctctcacttctatgtacttctaatgccttcacatcctctgagctcgccagaaaaggaataaatgctccaacgtcacaaacgttcctcagttatacattactggcagtcgtctatggaggtatcatgctctatcggagacccaacaattaag

SEQ ID NO: 112029 - DNA, 398 bp, Arabidopsis thaliana columbia
cccacgcgtccgaaactttggagccgtaaaccagacgtcaaaaccgggaaatcagaatttccggttaccagattcctccgtacacaaaatggttaacatcaagacaacaaccgtcggtcccggaatcggcggcggcattggctgcggcgctggaatcggcattggtctctccggcgggctcggaataggtgcctctgaaggacttgaccattctaacgtggttcttggattcggtattggttgtggtatcgggttcgggtttggatacggatttggagttggcggcgggtacagtttcgatgacatcaaagagagatttgtcctatgaaaaaaagctccggttcataatttcgggtcgggtttgggtaaaagattttttaaagcattatgtttaattt

SEQ ID NO: 112030 - DNA, 404 bp, Arabidopsis thaliana columbia
ccccccaaacaagtacttcaagaagattggtgaacacactgagaaagttaaaagagaaaagatgaagagtgactcaatcgccgttgatgtccctgcagagtctagctcagtcatcaaaggcaaagctcctctcctcggtttagccagagaccacactggctctggaggttacaagagaggcctttccattttcgatttccttctccgtttagctgccattggtagctgccttagctgctgctgccacattgggaactagtgtcgagtcacttcctttcttcacttaatttttgcagttctattcttagttcattgttctttcaactactcagttctttttcgttgtctttgtttatcttttattttattctttcttctttttataacttttttattatactatt

SEQ ID NO: 112031 - DNA, 291 bp, Arabidopsis thaliana columbia
tcgcggacgcgtgggccagcaaggtagcagggtgttcttagccgaagtggaaatgcttagtcgtcttcatcacagaaacctcgtgaatttaattggtatttgtatcgaagatcgtaaccgttccctggtttatgaactcataccaaatggcagcgttgaatctcacctccacgggattgataaagcatcttcgcctttagattgggatgctcggttgaagatagctcttggtgcggcccgtggtttagcgtatttacacgaagactcgagcccgtgagttatacacagaga

SEQ ID NO: 112032 - DNA, 315 bp, Arabidopsis thaliana columbia
gaaagaaatctttaaaaaaaaagggtttttcagccatttcaggggatgccatgggaatatgtcctagcttctcaatctcttaatacctatcaagagaatcatgttcgttggtctcagtctccagattctcacactttctctgttgatcttcctgggttaaggaaagaagaaataaaagttgagatcgaagattcgatatacttaatcatacgaacggaggcaacccctatgtcgcctccggatcagcctttgaagacttttaagaggaaatttcggttgccggaatcgatagatatgatcggaatatcagctggc

SEQ ID NO: 112033 - DNA, 233 bp, Arabidopsis thaliana columbia
gcggacgcgtgggcaaaaataaaaaaaacatgacagaaaataaaagatttgagaataactaagaaaaggtgcactatgatgactacattgctcagtaaggtcttggccaccaaaatcttgcagctctgtcaggcctgcagtgtagccatgagacgcaggaaagggcttgggtcaaaggtgcttatcggtataacaaattgtaatgaacgtacgccctgtgtgttcggggagat

SEQ ID NO: 112034 - DNA, 214 bp, Arabidopsis thaliana columbia
atggcgtcttttagcaaccatcgtcgccgtacaaccttctgccgccgtgaaaggacttggaggtagctctgttgccgtagctaagctcttcatcaaaccttctcgccaaagcttcaaaaccaaatccaccagagctggtgctgtggtggctaactttgtaatcatatgactttactatattttagcacattctttttaacccctaatttcatta

SEQ ID NO: 112035 - DNA, 346 bp, Arabidopsis thaliana columbia
caaaaaaaagaaaacacaaaaacaaagattataatggcttcctcaaccatggctttgtcctcccctgccttcgccggaaaggctgtgaagcctgccgcatcagatgtcctcggaagcggccgtgtgaccatgaggaagactgtcgccaagccaaagggtccatcaggcagcccatggtacggatctgaccgagtcaagtacttgggtccattctccggcgagcccccgagctaccttaccggtgagttccccggtgactacggatgggacaccgctggtctatccgccgacccagagaccttcgccaggaaccgtgagctagaagttattcacagcagatgggcca

SEQ ID NO: 112036 - DNA, 333 bp, Arabidopsis thaliana columbia
cgcgtccgaaaagatcgagaaactgcgttgactttgggtgctaatcttgagaatttagggtttggggttgacaaaaaatgagggaatgcttggcaccatcatcaaaagaagcatgagagtgaatagggaaaaaacctccgattacgcaaacaatcaggaatgtaataaacccagaacagaatcgtgtaattgaatcttgattacaaatccttgtaattacgcaaaataaggttgatagtcatggctgcattgatctctctgacatttttaatgttacagattgctattgtaaatcttgtatactcttttgttatgttggttatgaagttatct

SEQ ID NO: 112037 - DNA, 360 bp, Arabidopsis thaliana columbia
aaaaaaaaaaaaaacgaactgagaagcgaagaagaaaatggcggcagcggccatggccgttcatctcccgaaacattcttcgtttcttccgaaacccaaacttccattggataaaaaaaccaactttctcggtgggtcatttaatttaggtcgacccatgtccgtaaaccgggaatttaacagtccggtgatggtctccgcttcttcgacgagcaagaccgtccttaccgatgacgtagacggcgatcaaagtaaacgcttttatattaacttcactggctttccttttcctcttggtcctttccttaaccggcgcaccatcagaaccgaggcggttaaaggttgcatatggatgtttga

SEQ ID NO: 112038 - DNA, 184 bp, Arabidopsis thaliana columbia
ttctctaaatcctttcctttaatggaggttaaccaaagattccgattttggccccataagttttccaccattcctccttggccggccaaacggttttaaagccctccagggacctaatccaaaaggggggcgttttgggcgggggccgggtgaccatgcgtcggcccgtcaagtttactcccca

SEQ ID NO: 112039 - DNA, 355 bp, Arabidopsis thaliana columbia
tctgagaaagagagaaagagagatctcaatggcggcgataacaagcgcggtgatagcaatagccggaataatcttgggatggataacgatagagttagcttgtaagccttgcctggagtcgggccgtgaagccatcgacagatctctcaatcccgattacgatcctgatgaccaagacgtcgactcatcttccgatgttcgtgctcctctcatccctaatcatcctcccgataattccgatcctgatcccaccaccgcgatcaagtccgtctgatcgatcttgagttttgttttgtgatttgctatccttttgaaaaagttgccaatttaagttgatctggtgttgaattttatt

SEQ ID NO: 112040 - DNA, 156 bp, Arabidopsis thaliana columbia
cgataagccacttggctttcataacacagtctctagctaagattgctattgctggctacggtgaggatgatgtgtatttgcacacgtcttcattagttcatatcggcggtctgtcatcagctatggccatgctaatggttggagcttgccatgatc

SEQ ID NO: 112041 - DNA, 300 bp, Arabidopsis thaliana columbia
gaaaagagtaatagcgcggcggagccatggttctcaagactgagctttgccgattcagtggccagaaaatttaccctggtagagggatcagatttatccgatcggactctcaggtgtttttgtttatcaacttcaaatgtaagacgtattcccacatcatgttgtatccatcttatctttgctgtactgctatgtaccgattgcatgcacatgaaggacccatcctcttttgctgttatttttttttttttttcattttattatattttatctctgtgtcctcttgtgtagttttttttt

SEQ ID NO: 112042 - DNA, 105 bp, Arabidopsis thaliana columbia
  unsure (1)..(105): unsure at all n locations
caaggcagggaaatacactttcttcatgccaaaattcatcttctacgcgacttacttatncgggaaaaatcggtactggagatacatcacaatctacagcacctc

SEQ ID NO: 112043 - DNA, 297 bp, Arabidopsis thaliana columbia
atctttctcctttggtggcaaacacaacgacagatagagagaaacgatggcgtcgaactcgcttatgagctgtggcatagccgccgtgtacccttcgcttctctcttcttccaagtctaaattcgcatgcgccggagttccactcccaaacgccgggaatgttggtcgcatgagactggctggtcactggttgcctggcgagccacaagctgattaccatgacgtgaatgactgtcaagccatgctctgttcttcgtttttatgcctatcggtttatgtgacattgtaccttaatgt

SEQ ID NO: 112044 - DNA, 302 bp, Arabidopsis thaliana columbia
tcttaactaacatcatctctctccctttctctttctgcaatttctatattacaatgggtcctttttgtgtgtactgtacctcgcttttctccatttcttagtattgggttttggaaaccattgattcatgtcttgtttcattagatcttgctctggatttcccagatctatggatctgcatgtgggttttggtcaaaaatgtctaatggtgttgcaattccctaaaggaattcatctttatccatttcaccttatttttgtttctggatctttgaaatggatgacgatgggtttcgtaattg

SEQ ID NO: 112045 - DNA, 423 bp, Arabidopsis thaliana columbia
cggacgcgtggggaaagagaaaaaactgaaactcaacttatgctttgtttcttttttaatttgaaagcaatgtcttctactgaccacgaagaagttacccttccgtttcatcatcatcctttatcatgtggtacttttgagtcttacactttccgctccatattatctatcccgaagctaagaaatggcatatacaactgctatcactgcaaggagtgcagcttgacgtttcacaaagaatgggctgacagcttcttcagccagcaatttatctgcaatcacgttctcaagatcttccgccgggctaagacaccattagttgacagtacagatgaccacttttgtcatttttgtcgaagcaagcttaagttaaagcatttccggtgcacgatatgcaacataagcgtgggtagagaatgtgtg

SEQ ID NO: 112046 - DNA, 243 bp, Arabidopsis thaliana columbia
  unsure (1)..(243): unsure at all n locations
ggaatcgatccagattccagttacaacgtnttgcttaaaaaaactcctccatttaaacaggggcacgacctattggccataaaagggggtggggcccagaccggatcgcctattggccgccaagttaaacataacaatcgccgatacagatctcccgtcgcagttgcatagagcgaacatagggataagacattgcgacatatactttcaattgggtgggcacatagaaaatggcgggggtca

SEQ ID NO: 112047 - DNA, 330 bp, Arabidopsis thaliana columbia
atgcatcctcaggacaatctgtactggaccatgaataccaatgcatacaagtttgggttttcaggatcagataatgcttctttctatggttcatatgacatgaacgatcatttatcgaggatgtccatagggagaacaaattgggactatcatcccatggtgaacgttgctgatgatcctgaaaacacagatgcacgttccgtacaaaccggagacacagacgagcactctgtagctgaagaaagcattgcaaatgagcatgatcccgacagtccttaggtgttccggcaagatgacattgatcctgatccaatgacctatgacgaatta

SEQ ID NO: 112048 - DNA, 284 bp, Arabidopsis thaliana columbia
ggaatccggtgaatcgaaactagatgtccctcaatctgtctcgtctttcgcttctctcgtccccacgtatctcgatttcaactcacgctcctcggaaaggatacgtttgttgctctatgaagtcttatagattatctgaacttagttcttcccaagttgatagtttgaagtcacgccctcgcattgacttctcttctattttcgccactgtgaacccgattatcgatgctgttcgtagcaatggggataatgctgtcaaagaatacacttgaagatttgacaaa

SEQ ID NO: 112049 - DNA, 216 bp, Arabidopsis thaliana columbia
ctgaactagatgacagttatgagaatatgcgtatgtttccctggaatcaaccgagtattgttcccgaatgcttgttgtcgagtctacaaaagttcacctggtcgcagtacttaggaagaacacaagacagagatattgcggtttacatcttgaaaaacgcttgatgcttaaggaatgcatcaatctgtttttatacatgtttgtttcaagaactta

SEQ ID NO: 112050 - DNA, 317 bp, Arabidopsis thaliana columbia
caaattctgagatctgtaaaagatgagcgacggtgacgacgctgctagacgccgtaccgcggcggtgactgattaccggaagaagctccttcatcacaaggagctcgaatcccgtgtccgaacagctagggagaatttaagagcagctaagaaggaattcaacaaaactgaggatgatttgaagtctcttcaaagcgttggccagattattggagaagtactacgatctcttgataactagcgattgacttgttttggtatagttgtttccccattgttttgtgttttgtttctcctttttcctattgcctatttct

SEQ ID NO: 112051 - DNA, 326 bp, Arabidopsis thaliana columbia
tcaacgacgacgagccatggcttcaactttcagcggcgatgaaactgctcctttcttcggattccttggcgctgccgccgctctcgttttctcctgtatgggagcagcgtacgggacagcgaagagcggggttggtgtagcgtcgatgggtgtgatgagaccagagcttgtgacgaattagattgatcctgatgcaaaggcgtgtagatttagtgacttatggtttgtccacctaacattttagaaataatttgatacattctttattacaccctcatactttaaatttctttttaatctaattattaaatgataatattaatatc

SEQ ID NO: 112052 - DNA, 308 bp, Arabidopsis thaliana columbia
cttgttttctctaaatttttcaaaaaacctttagaattttcatttttttacgattccgatgttaactgtttctccggctccagtactcatcggaaacaactcaaaggatacttacatggcggcagatttcgcagattttacgacggaagacttgccggactttacgacggtcggggatttttccgatgatcttcttgatggaatcgattactacgacgatccttttattgtgattcgatggagacgatgttcttgcatatctgttgctagcatgctagattattgttcaatgttctttgaaggcttat

SEQ ID NO: 112053 - DNA, 488 bp, Arabidopsis thaliana columbia
cggacgcgtggtcaagaagaacaacaacactaatcaattaagaaaagctcaagccgagagagacagtggcatcaacattcacgagcgcaagcagtgttcttaccccaacaacatttcttggccagactaaagcctcaagctttaacccacttcgtgatgttgtctctctcggatctcccaagtacactatgggaaatgatctttggtatggacctgacagagtgaagtacttatgacccttttccggtcaaacatctagttaccttaccgtcgaaatacgtgggggagatatttgtagagcaatcaccctgtagaagggagaccttgttttggtcttaatacattattcattaccataaacaccactttttgggtgaaaaagggagattcaaagctttgtctatttatatttaacattcaattactattttattcattatttattaattaatttttttatttatttatttttcttattactaatattt

SEQ ID NO: 112054 - DNA, 431 bp, Arabidopsis thaliana columbia
cagatactgaaccctgcttacctcttcctcaacctctttggactaactcttgtcgctaagcttcaagccgagaagtatatcaaaaaatctggcatcaactatactatagtaaggcctggtggtcttaaaaacgatcctccaactggaaatgttgtcatggagccagaggatactctatatgaagggagtatatcgagagacctggtcgcagaagttgcagtggaagctttacttcaagaggaatcatctttcaaggttgtggagatagttgctcgtgccgaagctccaaaacgttcctacaaagatctatttgcctctgttaaaggacaataaactagaatgtaatgagtctcatgctcaaaccttttatttctcttatgtcttgagtacaacaaacagattacatagacttttgcgcataaattgagttc

SEQ ID NO: 112055 - DNA, 237 bp, Arabidopsis thaliana columbia
cgtccgtcttctgataggttgtaaaaggcattcgctttcgattgttggttgtcgatttctacgccccaaggggggacctgggtactgttcccaagctccacctggattcttattgatgtgaagctcgcataacttgtgaatcgatgctgccacagaaacttctgttgtatgtgggaatgccctgagatctcatttccttgtgcttctccaagggaagaaatttttgaagcatagtac

SEQ ID NO: 112056 - DNA, 419 bp, Arabidopsis thaliana columbia
cgaacactaagcaaaaaagaaaagctcaagccgagagagacaatggcatcaacattcacgagctcaagcagtgttcttaccccaacaacattccttggccagagtgaagtacttaggacccttttccgttcaaactccgtcttacctcaccggagaattccctggcgattatggttgggacaccgccggtttatccgcagaccctgaagcctttgccaaaaacagagctcttgaggtgatccatgggagatgggcaatgttgggagcttttggttgcataacccctgaagttcttcaaaagtgggtccgtgtggacttcaaagaaccagtctggttcaaagccggttcacaaatcttctccgaaggcggtttggactacttaggcaacccaaacctagtccatgctcagagcattttag

SEQ ID NO: 112057 - DNA, 491 bp, Arabidopsis thaliana columbia
  unsure (1)..(491): unsure at all n locations
gtccgttcacgaggatctgttataccttcgcgccaattcacgatatctagaggaaatggaaatgtgtatcagttagctgtctttgaagctgagaaatcgaaaaaagaagcaagcttggaggctttcaagcatcaagaagttgtaaaagagaaaaatgaggcaacaaggaaggtgagcacaagaaggaagaggaacacaagaaacacgttgacgagcacaagagtggtgagcacaaagaaggtattgttgacaagatcaaagacaagatccacggtggtgaaggtaaaagccacgacggagaaggcaaaagccacgacggtgagaagaaaaagaagaaggacaagaaggagaagaaacatcatgatgatggtcaccacagcagcagcagtgacagcgacagcgattaaaggtggagaattnagaggatcgcttgaataaaacagatctgggtctggctattattaattaatggttgctgatgttcttatcat

SEQ ID NO: 112058 - DNA, 311 bp, Arabidopsis thaliana columbia
ggttggtggttgctgaggcggctcagaaactgttgctacctcttatttcagatggtggtgaaattcatgaggaagagattgaaaagtggagtatactttcaagaagctctcttgatagtgcaagcacgagttttacgattagctccacttctaactccgtgaactatgcgaatagctctgcaaatagtgttgctggtgggattagtcttagtgctgttgatactgacgtagtaggtggtgttccgaatcgatttcttggaataacacctgcttacttatcctatgttcagcttcaaaatactatttccatg

SEQ ID NO: 112059 - DNA, 419 bp, Arabidopsis thaliana columbia
  unsure (1)..(419): unsure at all n locations
cgcaaaactgaagaaatctcgtttcatccttcataacgacctctcaagtgaaattgtgatcatagattcatctctgcgatttattaggctttctatgaacatgagaagagtgtttggaggtgtatctacagatttgtttccgtcgcgaagtatgtaccggccgctgcagtctgggggaaacttggttatgttgctcaaaggatgcatatcgcttttgtttgatcaacctgtagtgacttctttctnttttactctcttttttgtaccactttctatctctcttctttttttcttccgttactttctttattaatatcctcagtttgtttcttcctcttcttttttttctttttactattcttttttccctttattattttactttatttatcttcatttcttttctgcttttccctctc

SEQ ID NO: 112060 - DNA, 263 bp, Arabidopsis thaliana columbia
  unsure (1)..(263): unsure at all n locations
tcagtccagattttatagaagagttccctcatagagtttagcctacgtgtaatgtcaanntctcaactnngatcatgttacgcgatggaaaacttgaatgcatctttgacgacaagttnnttgtttctttttctttagtnntttccttttttcatcctcaatanntttgttgnnattcatttnncccatattaggttagctttgattanttttgttttagtaattttctttatannatttggttaccgnnattgattcatatg

SEQ ID NO: 112061 - DNA, 275 bp, Arabidopsis thaliana columbia
gaaaaacaaaaaaacagttacgagacataatctctctttttcctcctttgtctcttcttctcagtcttgtttgttatcgatcaaaacatgcataaatccaaaagaaacccgtcattctcctccactctcctcgatgaaatctacaattccatcaatcctaacacccaaaaaacacaaccttatgtcggctctgttaacactactaccaaaaaacagagcattgtgacaagatcggttcctgaccggaaaatccaccgtgatcgtttcttcggctc

SEQ ID NO: 112062 - DNA, 300 bp, Arabidopsis thaliana columbia
attttgttggagaagctgaatgcgattgacatgtattttgagattaagctttctgagcttgatgatgcctttgggaagaaggggagaacggttggaagaggagattagagagctggctgaagacagaaatgctttgacagagaagaaaagacaacctttatacagaaaaggatatgatgtgcatgtgatagatgtaaaaaaagtttgtaaggtcacaaagggtggcagggttgaaaggtacactgcattgatggtttgcgtgaactatgaaggtatcattgtttttgctatagcataatc

SEQ ID NO: 112063 - DNA, 385 bp, Arabidopsis thaliana columbia
  unsure (1)..(385): unsure at all n locations
atgcatttccgtgtattatccatagcattgcgtatgtctgggggagatgatagccactctggtacagtaggaggtaagttagaatgggaacgcgaaatgactttaggttttgtttatttattactctattatttttttgtaatatatcttacttttttttttatttattattatatacttatatatttatttttttgtgtttattcctttttcttatagtttttaatattaatnnnannttttatattctttattttctattattttatttttttcttacttttatttttatttatatttttattttagtgggtgggtggtgtgtgtttttattttattttatatttttatattttttatttagtaatattttttttattatttt

SEQ ID NO: 112064 - DNA, 208 bp, Arabidopsis thaliana columbia
  unsure (1)..(208): unsure at all n locations
gagctaagtttgacgctgacagtgcacgttcttcnggtctcctttcccaagaactttgacattggaaaatatacttttgtatggaagattgtgctggatgaatcagcacatgagaaaggttacctaactgagacctaaacacaggtgacgactgcagccaaaagccttattcttcaaatcagttgtgccgcgaaagcagagtcggtgc

SEQ ID NO: 112065 - DNA, 419 bp, Arabidopsis thaliana columbia
gaagagatatatgttattgattccaagacaaagtctatcaccagagccagagttctggtgacagttccgggaggaagaaaaagggataggaaggatgacttgcttgtgatacgagataatggaacctcctttaagatcatacacgtgggtgaaagagatgacccaacaacggtaatagaaagagaagagtggaccaagactagagaagacatggagaaacatctcaggaagctacgagacttcagtgtctcaaattggttctagaagaactcgagagacaccaaacgtcaagtctgcataactttcttcctgagatggaaaacgagagcatttgatctaaatcgatgatatggtggagggcatttctattttagtttctttattttctgtctttacatttaattttgatttcgttattt

SEQ ID NO: 112066 - DNA, 152 bp, Arabidopsis thaliana columbia
gagaacaacaaccaaacactcatttctctctttttagagaaaaaaacagagcagtatattagagatctcatggcgatggcggctccggagctgcctcagggcttggtcttcgtcctcaccggtgcttggaggtcctccgattggctagcggc

SEQ ID NO: 112067 - DNA, 399 bp, Arabidopsis thaliana columbia
aaagaacaaaggcagggagtgcatctccaatggttagccagctaaggagcagcttctgcttcggttctctttctcagcgtctcgccgcccccaaaggcatctccggtgctccttacggagtttctccgaccaaaagagcatctctcttcactgaccgagctgttaaatgcgacacgacatcattgcaagtagttcaaccaatcaacggagatccatgcatcggtagtacgtaaactacggtgccatcaagcccatggatcgcgtggtaccttaccaacctccctgcatgccgtaccgtcgtgaaccctctcctccgcggcgcggaagtgtgcccggcccacgcgttctccttagcgggcccattcatgaacgctgcccgcacaaggaacactgtttacg

SEQ ID NO: 112068 - DNA, 268 bp, Arabidopsis thaliana columbia
tcgcaaacttttattatgatcaagcctgacggcgtcctgatagtactcatcggtgaagccatctgcaggggtgacaacaaggctttcagtgggccccttctccagttcgcaacaacactcagccctatctcggcctatccccttgatttctaatccatcctgccattttcctccttttccttataatatatcctatctaaactcatatttaacgctaattcttacaaaccattacactctttcattctaccttatcccttacttcctt

SEQ ID NO: 112069 - DNA, 264 bp, Arabidopsis thaliana columbia
ggttcttggactccttggtccattgaaatgtttcaaaaggattgaatctgatctgtgggaaaaaggagagcaaaaaccagattagggttttaggtattcaagatttttttaaagaaaacatagaaccggacaaccatcaacatcatagttaaggcgagtagaacatcataagccttctttgaaggacggtaccagatcatctctggcagaatgttaccgacttggtttgttttgtttctcatttcttcagagcttttacatgaa

SEQ ID NO: 112070 - DNA, 458 bp, Arabidopsis thaliana columbia
aataaaggttgtacattttactctttgattgttcacatttgcttatgatgagttttttttttttttgttttactttttttcattttgttcaatagattgcacaaattctagggaaacctgacttggctccagctgcttgggtgagaaaactcgtcactttgtgtgatcaagctcctgccacaccatttgatgccgttcgagttgtcctggagaaagagttaggtaaaagcatcgaacaagtgtttgaaacatttgatgagaagcctcttggctctgcttctattgctcaggtacaccgagcaagagtaaagggtgacaagagggatgttgttgtaaaggtccaacatcctggcgttgagaagttgatgatggttgatatcagaaacttgcaaatatttgcattatacatgcagaaaactgatttcaaatttgacttgttctccatgacaaaggaaata

SEQ ID NO: 112071 - DNA, 306 bp, Arabidopsis thaliana columbia
  unsure (1)..(306): unsure at all n locations
cttctttgtccattgaattttttttatttgattgaatctgatctgtgggagagagaggattcaaaaaccagattagggtttttagttattcaaatttttnttaaataaatcattgattccttacaactcattaacatcatctttttcgtctgtacattttatcttctcacacttactgatttattcttttaccctaatttttttcatcattattacttctgtcggaagattgtgaggaacgttgtaactagagctactacttaagtttgtttaacttctttctttttattctcttttctcctatct

SEQ ID NO: 112072 - DNA, 403 bp, Arabidopsis thaliana columbia
aaaactcgtcggttgccataactgtcaggaaattctctcacatagaagagttaggattcgactatgcttataacgcatcgctgcataatgtcatggactttctagcagctgaagataacagtaaaggcacggttttctttcggacttcgactcccgatcatttccaaaacggggaatggcatagtggcgggacgtgtaagcaaacagagccggtgagcgatgaggagattgagattaaggatgtacataagatactaaaagatattgagattgatcagttcaagagggcggttagagagaagactaaccaggacggtgggaatctaaagcttttggatttcacccggatgttgctgacccgaccggacggtcatccgggtgagtaccgacagttcaagccgtt

SEQ ID NO: 112073 - DNA, 295 bp, Arabidopsis thaliana columbia
ctcttcgaaactcaatttgtgaaatttgggggctaaaggatgaagggtttagtgtctactggggggaaaggttccgacaagtgcaggatgcccacttgtgttaacttgctacctattcgattgcacattcatttctaagatcacaagcacaatgatgcgtataatctgaacccttgagacccctacaatgaaaatgaataattttgccactgtatcttacattactgaccttaccgactatccatttgtctaaagaaagttgactacctatttagtaacaaagtgatttcacttt

SEQ ID NO: 112074 - DNA, 425 bp, Arabidopsis thaliana columbia
tgacgctgatggcaaagaacatgtcgcttgttctattggaactgggcctgtggattcagcttacaaggcagtagatcttatcgtaaaggaaccggctactctgcttgagtactcaatgaatgcagtaacagaaggcattgatgccatcgcaaccacaagagttcttatccgtggaagcaacaaatactcatctacaaacgcaataactggtgaagaggttcaaagaacctttagtggaactggagcaggaatggatattgtggtgtcaagcgtcaaagcttatgttggagctttgaacaaaatgatggacttcaaagaaaaaccccgccacaaaaatcccttcccaaaaaaacagagtcgctgcctgaattaaaaatctttccggcaaataccaaaaagtcagacagaagtaggttcttttattt

SEQ ID NO: 112075 - DNA, 457 bp, Arabidopsis thaliana columbia
tcctgcgtatgatctgttatccaaaatgctggaatatgatcctctaaagcggatcacggcttcacaagcactagaacacgagtatttccgaatggatcctctcccaggacggaacgcatttgtagccagccaaccgatggagaagaatgtgaattacccaactcgtccagtagatacaaacaccgatttcgaaggcacgacaagcatcaatccgcctcaagcagtagcagcaggaaacgtagcagggaacatggcaggagctcatggaatgggcagtagatcgatgccaagaccaatggttgcacataacatgcagaggatgcagcaatctcaaggcatgatggcttataatttcccggcacaggcagggcttaacccgagtgttccgctgcagcagcagcgcgggatggctcaaccgcaccagcagcaacagctaagaaggaaagatcccggaatg

SEQ ID NO: 112076 - DNA, 300 bp, Arabidopsis thaliana columbia
  unsure (1)..(300): unsure at all n locations
gtcgtcatgatccttgtgttgttccacgagcngtgccaatggtggaagcaatggtggctctagttcttgtggatcaattgatggcgcaatacgcacaatgccatttgtttccaataaatccagagttgcaggaaccgaaatgattgcgcgtggtcgtcatgatccttgtgttgttccacgagctgtgccaatggtggaagcaatggtggntctagttcttgtggatcaattgatggcgcaatacacacaatgccactttttttcaataaatccagagttgccaggacctttttatgtaca

SEQ ID NO: 112077 - DNA, 573 bp, Arabidopsis thaliana columbia
  unsure (1)..(573): unsure at all n locations
ntcggacctcacgcgnntccgcagcccaacgaccagtnntatcaaaangcttaagnctcgttttacggcgttttaatcctttttgcttgagaaatccacatcattggcggatgggttgaaccacgacggttgcttgctttgctggnacgttcccaacgaacgacggacccgtttaangnnaagtttggccttttcaaannggagtnntgatcntnncgatgcttttcttctcngnnatatgtcntttactcgatgatacnnttgtcaacgacttcttcttctttnnctcgtannttcgtacgaacggggttcttcttagagngggtttgaccaangnggaagcncanatgngctttcttgattaangnnaagcttgaggaaaagcnngaaaagggagtgcnnaccacaagtgtggaggaagccatgaacccagtgggagaacccactttgaggggaacattgatcatcgtcctctggaaatgatttggaaagcattcatttggagtgtaccaacggaaaagactttcaaccaaggttgagatcaaagcctgagatgattggtcactacctggc

SEQ ID NO: 112078 - DNA, 474 bp, Arabidopsis thaliana columbia
  unsure (1)..(474): unsure at all n locations
gaaaaaactcccttcttttctcaaaggagagaggattgaagttttaagagtggagctttacgaggggaacactgcgcctccggactaccttactgagagtgagctgatatctctcatggagaagcatggcataggcacagatgcatcaatagctgtacatataaacaacattggtgaacgtaattatgttcaggtccaatctgggaggaaaatggttccaacggcgttaggaatcacgctaataagaggctatcagtgtattgatccagacctttgcttaccagacatccggagttttatcgagcaacaaatcactcttgttgccaagggccaagctgatcattcacacgttgtgcagcatgtgattcagcaattccggcgtaaattcagttattttgttcaacagatcgaacacatggatgccctctttgaagcacagntctctcctttggctgaatctggtccggctttaaa

SEQ ID NO: 112079 - DNA, 364 bp, Arabidopsis thaliana columbia
gcgtttcagctagccggaatctacaagaacgtgattgttactgacacgagctcaaagcaacttgaatttgctgcaaagctgaccaacgtccgatacgagatcactacaccgacgaaggcttcatagaagatcgggaaggtagtagcacctgaatcatcagttgatttagtcaccgtcgctcaagcccttcattggttcgacctcacgaacttttacagcaacgtgaaacacgtgctcaagaaacccaacggagtaatcgccgcctggtgctacaccaatccggaagttaacgacgccgtggacaaggtctttcaacggttgtacgatgagaaacttgttcctcattgggatctagcgcgacggc

SEQ ID NO: 112080 - DNA, 371 bp, Arabidopsis thaliana columbia
gcgtgaaatttcttgtcgaaaaatccagattttgtgtttatgtcgacgagaattgggaaaaatgtcgtgttcgcatgatcacaactgcgaagatcatgagtgttcttacgattggactctctacacacacattgatctgttcaaggtcatagcatctgaatgaatctgtttcgggatgtgcgaaccccagcttgaaagcgtgggaacagcgattacactcttctggggagcatttggagagcaatgagggagaccctgaattgcttgtttttgtaccatttacatcagacgttaagatcacacacggatatcaggaaatggtcgaaaatttggcagacctcttgtgtacgatcactgtgtttgactttttc

SEQ ID NO: 112081 - DNA, 206 bp, Arabidopsis thaliana columbia
  unsure (1)..(206): unsure at all n locations
gcttgcgggtttccatgcggatgctcttgttgttgatacatttgcaaaggattacactaggcgcgggatgttggcttatgtggaggggatacaaaaagaanatatgacccatggagttgtcacttagtctaaccataaaatgtacattactatatactattattgatatattaaatatcatttttcttaatattatcaatcttttc

SEQ ID NO: 112082 - DNA, 288 bp, Arabidopsis thaliana columbia
  unsure (1)..(288): unsure at all n locations
accgggcaccgggaatgcnnaactgatgatttggcaaggatatttagctttgtttcaattggatggaggacttctgcgagaggcttaaannngaagtgaacgagagaaacccagacgatgattngaagatgatggagaactctggagaagatagagacagaatcntgaagaaacctgattctaaatgacgatggattcnagaggcgattgatgtgtgaagaaacggaggaaggagtttctagaaatggtatgccaaaagttgctagcagaattgagaggatagtgaag

SEQ ID NO: 112083 - DNA, 265 bp, Arabidopsis thaliana columbia
tcgaccacgcgtccggacaaatgaatatgtgtcatcaaagcctgaaattagcgagaataacctcgtgagtgaggcttcgtgtgcggggaaggagagggagagagcataaatatcaataaaactttgcttccacgtactatatcacaagcacttacctaatatgatgaaagaatgaaacattaaagacagtaattagacttcttttcatgtaacaatctataaactttaatgtttcattttttaatacaattaactattattttta

SEQ ID NO: 112084 - DNA, 384 bp, Arabidopsis thaliana columbia
gtcagttcatagccgacctatatttcagggtatagattggcaggcactgtctcataatgattcaaagtacaatgagaatacagtctatcaaagactgatggaaaatggaaatggttcagttcaacctcgagcaatgaaaggcaatttaatttcgggtcaagctgatgaagagcatcttagattgcccgatgggagctctaaggcagcaaatatacttgagaaacaattgagtttccagaaaagtgttgatgttagatcagcatgtccaagaacgggctctcttgaaaatggttcaaagtttactgttgagaagaaaacggccaaagacttttacagtggtagtaattcgtggataactgggctggaagccggtgggcatgattt

SEQ ID NO: 112085 - DNA, 322 bp, Arabidopsis thaliana columbia
  unsure (1)..(322): unsure at all n locations
ctctgggaacgtgaattctcaaattccttcgagtcagagtacatatggtttgacagcacctaattcaactgccaaccatataacaaaaccacatataacacctgcagtaacaagctctacaacaaccagaccccaagagtcagcgcctgtgcacaatccccaagaatcatctgctactttcggttctcgtgtatcaaatgttccatccaatcaattggtgcccaaggatcccaaggaactggctgcatcaggaaacgggtttacctctgactcacttttcggagatgtctnttcagttacttncacgcagccaaaaacaaca

SEQ ID NO: 112086 - DNA, 168 bp, Arabidopsis thaliana columbia
ggaagatggtggggtgggcgattgcgcttcatgtctgtgccggagacattccgatcgagctccgctactagcgacggatggctggtgagagcgccctccgttactgcctcgatcttggcatctcccccctcaaatccggcaagccttccttggacgttgcccaactcg

SEQ ID NO: 112087 - DNA, 196 bp, Arabidopsis thaliana columbia
  unsure (1)..(196): unsure at all n locations
gctatgttcaccgagggttgaatagaggtggtgtataggtctaagtggcatcactaactcaacgagttagtgtagaagtgggcggtggtatttactntaatctgttattttgagccgtcacacggtatttagagctccaagtgggccatttttggtaagcataactggcttttcggtatgaatcggctgccggtta

SEQ ID NO: 112088 - DNA, 220 bp, Arabidopsis thaliana columbia
  unsure (1)..(220): unsure at all n locations
aaaaattgttttggcaaaagcttcctttaattgtgttcgttattgttcttgaccatcagcggcttttccggcaaatgcagatggacctgttggcccgccgtcnaatacactaagccgggcaagtttccctgaaggtttattttttgcgactgcttctgaggcatacctaggtcgatggtgccattaatgaatttttggatgttacatctgtatgagccat

SEQ ID NO: 112089 - DNA, 425 bp, Arabidopsis thaliana columbia
gaagaaaaaaaaaagactaaatcgtatccaaaatgcttactctaatgactctcatcgttcttgtccctcttcttctttttctcttcccccacctccttttacggcggcagatgcttctgaaaccctaccctcctggccccaaaggcttacccgtcattggaaatattctcatgatgaaccagtttaaccaccggggtctggccaagctcagccgtatatacggtgggttgctccatctccgcctcggattttcccacattttcgtcgtttcttctccggacattgcgcgtcaagtcctccaagtccaagaccacgttttctcaaaccgtcccaccacaatcgcaatccgatacttgacctacggaggatccgatcttgcattctgcaattacggcccgttttggcgtcggatgagaaaactctac

SEQ ID NO: 112090 - DNA, 394 bp, Arabidopsis thaliana columbia
cacaagttagtcaccaaaaaaaaaaaaaaacacataaagtttcaatggccgcctccacaatggctctctcctcccctgccttcgccggaaaggctgtgaacctttcccccgcggcatctgaagtcctcggaagcggccgtgtgacaatgaggaagactgttgccaagccaaagggtccatcaggcagcccatggtacggatccgaccgagtcaagtacttgggtccattctctggcgagtcaccgagctaccttaccggagagttccccggagactacggatgggacaccgctggactttcagctgatcccgagacattcgcaaggaaccgtgagctagaagttattcacagcaggggggctatgctcggagccctaggctgggtttttccctg

SEQ ID NO: 112091 - DNA, 175 bp, Arabidopsis thaliana columbia
gtaaaggaaaaaaatggcctgtttaatcttcttttttttttttctgaaacaacacacaacttgggccgctccttttgagaagggcggctgggcaccaaaacccatttttcagttcctacaaattcatcactaccttactggtcccaaaggcttattactcactcatcgtatatct

SEQ ID NO: 112092 - DNA, 232 bp, Arabidopsis thaliana columbia
gtaaccttgggcttaatagcgcttatggtgatgctttgaagaggcttggttttgattgggaaagcgtggctagtcaggagcgcagatcctgcacttgggaatggtggactcgggagacttgccttgtgttttttggatttcatggcaactttgaattattcggcttggggttatggacttagatacaagtatggcttgtttaaactgacaattacaaaagatgggcaggagg

SEQ ID NO: 112093 - DNA, 151 bp, Arabidopsis thaliana columbia
  unsure (1)..(151): unsure at all n locations
ctacatactacaaagcttgaagagttatggcatttgttgaaagataaacactgaaatggagaagggtatcatgaccatcagtaagatgttggtatttctggttgtntaaaatcttcactacagtataccctttagcatgctcgaatcttcc

SEQ ID NO: 112094 - DNA, 154 bp, Arabidopsis thaliana columbia
  unsure (1)..(154): unsure at all n locations
gcggtccacaatttctcctaacatcnggattattatgactcgtcgtctgttaagcgtaacgcttttttcttatggccgcgaacaaacataatgcggcgtgagagcgtgtacttcgtgtttggcgacctcactttcgtggacacgtnnggtaata

SEQ ID NO: 112095 - DNA, 288 bp, Arabidopsis thaliana columbia
ccgtcatagaacgcagaactgggtggatcaccgtggtcgtcaaattcctagctcctcgactccgaaaaaaaatcataaacgtatgaccgtctcttgttttcctcgtattatatcggtcgaagtctccaatcatcggtctgagtaatctctgacaatggctgcaagagttttggcaagtgtgattgtgatgggctctggaatcatagccagggcttgtactcaggcatatcgtcaggcgcttgcaaatgcatcaaaaaccggggttgcgcatgaagccgacacagacta

SEQ ID NO: 112096 - DNA, 374 bp, Arabidopsis thaliana columbia
acaacatctatagagagagagagagagagtttagttagagagaaaaaaatggcgagattcacggtgctgattacggcggttgtgctagcttttctaatggcggcgccgatgccaggagtgacggccaagaagtatacagtcggcgagaacaagttttggaaccccaacattaactacaccatctgggctcagggcaagcatttctacctcggagactggctctatttcgtgttcgacagaaaccattactatattcttgaagtgaacaagactgactatgaatgatgtattgccatccacccaatactgatgtgtgtcacgtgagttgtataagtttttttttatttttatccttatcattgtcttactacctt

SEQ ID NO: 112097 - DNA, 218 bp, Arabidopsis thaliana columbia
gtcgtttcaaaatcctctaatttctcagtcctatcgctaaagctcttcctgggttcgaggtgatttctcagtcatcgattgagatgttctcgggaaaaagggcctcatcgtctaccatcgacaacgagaaaccagaaaatgcaaagtcttagtcaacttggaccttcagagattttccttgccgccagaagagaaaaacccatttcgtgagcacagct

SEQ ID NO: 112098 - DNA, 192 bp, Arabidopsis thaliana columbia
acggttctgctgttcccgaccaatgaagattctcgtttccgttaaacgtgtcgtcgactacgccggcaagattcgagacggacgcgggaagactgatgtagaaacccaaaatgtgaagatgtcaatgaatccattttgtgagatagcgcttgagggagaattctccttcgatgtcgtgagagctgagctaag

SEQ ID NO: 112099 - DNA, 312 bp, Arabidopsis thaliana columbia
cggacgcgtgggacacaaagcaacaacatacattacaaaagcaaaagaagaaacaaacgcaagagttctcaagcaagctcaaacatggcactaatgaagaagagtctctctgctgctcttctctcatcaccacttctgatcatatgtcttatcgcattgctcgctgatccgttttcagtcggtgctcgccggttattggaggatcctcaactttacgaaccaaatttttcttctttatcctaattcttagattctctattctctcactgttcctttttaccttgtttctctttctctctcccttctttgttc

SEQ ID NO: 112100 - DNA, 126 bp, Arabidopsis thaliana columbia
atcaaacggcttattgcacagatggttgcaatgccctgagacaacgacatttatggcatctgagcctagctcatcacgatgggatgtgtaaaataggttactttgcattgaatacaaactaaaact

SEQ ID NO: 112101 - DNA, 319 bp, Arabidopsis thaliana columbia
  unsure (1)..(319): unsure at all n locations
cgcattcttaatctggagccgtccttntttcgggggggtaagagagaaccaaagagaagtatatgacacctctctttctcccttctttctcctttccttagcttttgatccttattagaaatcttaaatccagactttaaccatgacggatacaatgtctgctcatatggatcgacataataagcttgattatgacggctcagaggatgaaaagaaaacaaagctttgttcccttaagaagaaagcaatcaatgcctccaacaaattcaaacactcctttaccaagagaacttgaaggaacagccgagtcatgtctgtc

SEQ ID NO: 112102 - DNA, 202 bp, Arabidopsis thaliana columbia
agaatcggattttctttctaagactcataatattaaaaacaataatggctttttgggctggtggaagctactaaagcctatgttatcattgaaacggacaaaggacaaaaaacaaacgccgcgaattcatatcaccctagccgcgaaatagcctagaagatgccgtggttgcgccgacaaaacgccacatactcgtgactaa

SEQ ID NO: 112103 - DNA, 276 bp, Arabidopsis thaliana columbia
ggagtcactagaatcaacatcgaaacacggatattacttgctgtcggaatggtattcatatgcgcaggcttggacggcaagggcgacgggtcctttcataacggcatgataccaaacggagacttctagctaggaccaaaaccattagacatgaaaggaacagaaatactaaacatactagcattaccaaactgttaagtcacacgattcctctaatacattaacatcaggacataaacaaggagacatgcttcttcgttgtttccaccggtatat

SEQ ID NO: 112104 - DNA, 206 bp, Arabidopsis thaliana columbia
caagcttgagttctcccgcttgaggtgtctgacgaagtgatcatgacatttcaagcttgagttctcccgcttcaatactgcggtggtgatgtgggcaatgcatccatgggagagagatgcaaggttggtgaagaaagctttgaagaaaggagaagaagcttacaacctcaatcgtgaggactaatgcacaccttctgtttaggatt

SEQ ID NO: 112105 - DNA, 143 bp, Arabidopsis thaliana columbia
tcgatgcaaaaggaggttcatcagctgctacttttgttattggtaacccaagctacgacatgtttagggatttttcgcaggggggagggcacatcaagaacattagcaataaactaaacgattgggatctgtggaatatggga

SEQ ID NO: 112106 - DNA, 406 bp, Arabidopsis thaliana columbia
  unsure (1)..(406): unsure at all n locations
aaagatcccgtgctattgtctcgcatgggaagaactctcagtgctcagaagaagattttaaaccctgtcctgaaatcacatcgcgagctaaaacaggaaaagttatcttgccttttaagccactcactgtcacatttcaaaacgtccagtattatattgagactcctcaggggaagacacggcaacttctctttgatattacaggcgcgttgaagcccggtgttctcacatctctgatgggtgtcagtggagcagggaaaacgactcttcttgatgtcctttctggaaggaaaacccgcggtatcatcaaaggagagatcagagtaggcgggtatcctaaggttcaagaaacatttgcacgagtatcaggttactgtgaacagnttgatattcattcccctaatat

SEQ ID NO: 112107 - DNA, 429 bp, Arabidopsis thaliana columbia
caaatcttaaacgttttactttgtgctgcactactcaacctcaatggccgcctcaacaatggctctctcctcccctgccttcgccggtaaggccgtcaagctttcccccgcggcatctgaagtccttggaagcggccgtgtgacaatgaggaagactgttgccaagccaaagggcccatcaggcagcccatggtacggatctgaccgtgtcaagtacttgggtccattctctggcgaatcaccgagctaccttaccggagagttccccggagactacggatgggacaccgccggactttcagctgaccccgagacattcgcaaggaaccgtgaactagaagttatccacagcaggtgggccatgctcggagccctaggctgcgtcttccctgagcttttggctagaaacggagtcaagttcggagaagc

SEQ ID NO: 112108 - DNA, 192 bp, Arabidopsis thaliana columbia
gcgtccggaagtaatgttaagagttttaaccttgttggaatggggcgtagctctcttatgatgagagggagatgagaaacatcggatgcagggtgcttttaaagaattatgtgacaccgagtgttttatatttctttattattttattatttatttttattttatcaatatgtatattatttttaatttttt

SEQ ID NO: 112109 - DNA, 184 bp, Arabidopsis thaliana columbia
gtggaatgaaggaagaggagcggctatgaagtttaaggaaagtcaccggctttcttatgatgagagggagatgagaaacaacggattcagggtgggttcaaagttgaaagagacaccgaggttgtcgttggatagtagatccaattcctttaggagtccgagagcagattctgcgagatcgtgt

SEQ ID NO: 112110 - DNA, 305 bp, Arabidopsis thaliana columbia
aacgaatcctttagcaatcgtgccggatcagtattctggttcgggtttggatcctggaagtgataatgggccgggtcagagtcgggttgggtcgtacttgcaaagagttaatagggaagaggtggattctattatatttgtttataatacgtttaatatgtctaatatttatatacttttatatgagttattatattctttattaaatttttttttctctatttttatatattttttttttaatttttcttactgaatttcatatttatttttttctttattttttatttatatttttctttttt

SEQ ID NO: 112111 - DNA, 248 bp, Arabidopsis thaliana columbia
ccagaccgtagtcaagtttgtgggaggattgggtttgttttggcagctatcttttggaatcctggacgtcttgtatttctacactgactacttctttgctagtggagctgcccacattggtgctatgttcactgcctttttatcggtttcaaccgctctaggcactccaccttactttgcagccttggttcttgcgttcctttccaacctgatgggaggattgacccattatggtattgggtctgcgc

SEQ ID NO: 112112 - DNA, 189 bp, Arabidopsis thaliana columbia
ccggaatcaaccacagctggcttctcatcaacatgaattccctctatgccaagctttacctttggttgtacaagcccagcagggacacagaacaacgacataactgaaatagatggaaaagttcgagactcaagcccaaagaggttactgtctttaccagattctattttacaacttgtgaggcgtgat

SEQ ID NO: 112113 - DNA, 463 bp, Arabidopsis thaliana columbia
aatctactctctttaaaagaaattcgtaagtactatcaagaagcagaagatggcccaaaaggtggaagcacaaggagggaaaggagccaacctatgggacgatggatcgacacatgacgccgtgaccaagattcagctcgcagcaggcatagacggaattcaatatgttcagtttgattatgtcaagaacggacaacccgaacaagcttcttttcgtggtaccaaaggccgtgttctcccagttgttccgtttgttattaactcttacagacgtcttttttatttcttttatgtattgttttctattattctttaaagtagttttttgattattttatttattttatatttttttattatttacttatttttatttatttttgtaactatttggttttttatttgttattctcattgattatatatgcgtcttttatttattttttattttatatttttttct

SEQ ID NO: 112114 - DNA, 450 bp, Arabidopsis thaliana columbia
cttttgaggtcttctgcagctgaatgaaatgaatgttaaaatggttgtaggaaaaccggtgcatgttgctcttgcacataggaaagaacaaaggctcactaagctataccaagtacttgccaccatatcatgaacaacccctacttacacttaagatagttatggttcaagtccttactttattcatctagatgacagatctcttaattctgaattccatgcatccaataagttattaattttatcttttaaattactcatatgaagtacatttatgccttataagaatttttatctattttatagtactaaaagtctttttgcttttcgcattatattctttcatatattatttatgttcatcatgccttatatttttaataaaatcatactgatatctctctcttagataatattattcttaacacatatttctatattatataatta

SEQ ID NO: 112115 - DNA, 455 bp, Arabidopsis thaliana columbia
  unsure (1)..(455): unsure at all n locations
ccggtnnccggaatnntcccgggtcgacgccaaacgcgtccggtganttaaagtagagacgccatggtgaaggaagtacctgctgtaggtgttactcgnntcagatcaagggtgaagccatactccaaagtcatcgctgactggtcgtggtgtgcccagatccaaanaatcagcgatctaccgatgtttggtatgaagaaggaagggtgtgtgatgacttttccatatctgggtccatattggcgtcatgggagaaggagaatgtgtcaagttaaatacttgatgctgtccgtattgtttgcaacaagatcatggttataattgtttgatatgatgctttttaatgtgatgatgtgggtggatacctttcatgttctttatactaacaagatgtttttatgtgtttgatcttgttggcttaaatcctgtttatagtgtacatgttgttatcagct

SEQ ID NO: 112116 - DNA, 443 bp, Arabidopsis thaliana columbia
cattcttcttcaagtgccgggttcatcgggccgtatcatttaaggctagcacgggatactgggtactgtcactactaaagcgaccggtcgtcaccaaaaccacacttgtaagttaccacaaaaacatcagaatgtaacttctttgggtccacactcactcactcatcgtatatttccccagtctcttcctcttctctcaaaggcttaatctttgccaaggttaacaagggtcaggctgcaccagactttacactaaaggatcaaaacggaaagccggtgagccttaaaaagtataaagggaagcctgttgttctctacttctaccctgcagatgaaacccctggctgcaccaagcaggcttgggcttttagagactcttatgagaaatttaagaaagctggtgcagaggtcattggcattagtggtgaagactttgtgtttta

SEQ ID NO: 112117 - DNA, 413 bp, Arabidopsis thaliana columbia
gagagaagaacagagaaaaagagttgaatcaaatatggctgggagagctacgatccctgctcgcaactctgccctcatcgcaatgatcgccgatgaggacactgttgttggattttagatgtgctggatgagaccgcttttttaccttatggtgaaagcttttttcatcctccctctggtcgagcctctgatggcctttttattatcgactttatcgatgtatttttgggactaccgtatgttccaccttactttgtatcccaaaacgttagctttgtacatgggatcaatttctctgttgttggttcaaccgtatttgtccgatcgtattttgagtgatatggatttgaattagtatattccatcgttagtttaggtgtttagtttgtttttttttattgtattttgtctat

SEQ ID NO: 112118 - DNA, 395 bp, Arabidopsis thaliana columbia
tgaagaagcactttgagcagtttggagagattttggaagccgtagtcatcaccgacaaggcctccggtagatccaagggctacggattcgtgacattcagggaagcggaggcggcgaggagtgcttgtgtggatgctactccggtgatcgacgggagaagagcaaattgcaacctcgcctctctcggtcttcaaagatccaaaccctccactcctaaccatggaggaggaggcaggattaacaatatgagagtgatgatgagcacaatgcagactggttttggaccaccttcactaccacaaccacccaccttcactctctatcctcattttcctttcaatctctttgtgtactcttcattttcggcagactactctttatttcctacgatctta

SEQ ID NO: 112119 - DNA, 421 bp, Arabidopsis thaliana columbia
gaaaaagatcaaacctttttctttctttctttctcctgctctctgcaatttagaagaagatcgaagaatttgtttgttgtttatcttcttctataaaaacaaaccgtggggtctgttttcatttctggccttgcgattccgataaaactctcagcttcccattcaatccaatccaattccacttctcaaacatatatataattctatatttttgagagacagtttactttttctccttctctctctctctctctttctctttctctgtctctttggcttttctcctcctgttctcatggaagcttcacccaatgatcgacttcattttggcataatgggttttgtgtgtaagcattacaagaggtgaagtcacattcatatctctctgttattctcataattttctatttttctcattgtt

SEQ ID NO: 112120 - DNA, 441 bp, Arabidopsis thaliana columbia
agcccttcggaattaacggcagcatggacttgagggacggcgtcgacgcctccggcagaaagggcaagggatacggtgtttacaagtacgtcgacaagtatggagctaacgtcgatggatacagtcctatttacaacgagaacgagtggtcagcgagtggtgacgtgtacaagggaggagtcaccggattggcaatttgggcggtaactctcgccggaattcttgccggaggtgctcttcttgtgtacaacacaagtgctttggctcagtaaatcttaaagttgttagcgcatgtgtaatcatgtttctataaatgtttctgtgttgttctctttctctttaatgttgtaaaactcaaacatactttgaatttataagacttttagcgtttgttttaaatatatatacttatattattctatttattcatttttttttaat

SEQ ID NO: 112121 - DNA, 305 bp, Arabidopsis thaliana columbia
gaggtgactgatttcataaaccagcatgtctactctacaacacaactcaagatggatttatcaggatcactctctatcatcttaggcttactgattccgattcttcaagagccgtttaggcaggtgttgaagaggataccgggaacaatggactggagagtcgagaagactaatgcaagactgagtggacaacttaatgagattgtgtcaaagcgagccaaggaggctgagactgactcaaaagacttcttgtcattgattttgaaagctcgagagttcgatccttttgccaaaaacatcttcac

SEQ ID NO: 112122 - DNA, 245 bp, Arabidopsis thaliana columbia
caaagaaacgctcagattcgacagttctatatattaacaaacatcatctcaagctcttacctggtatctctgttttgatggatcagaagtcgggttttgcggtttataggccaagtggaaacctgtagagttgttcttctcatgggtctgaggtgcgacattcgttctggtcttctttagacaggaggaggtattttcttgaacagtgaagaatatttgttctttttgacatcttttcagttaaa

SEQ ID NO: 112123 - DNA, 300 bp, Arabidopsis thaliana columbia
ctctgtttgtttactgcttcagtgttttaagtcttctctttgtgtttgttgctgttgtgtctgtgatggatttttgagatccgatttaataaaagaagtgtgttcaaagtaaaaaaaaaaaaaaaaaaaaaaaaaaaaaaaaaaaaaaaaaaaaaaaaaaaaaaaaaaaaaaaaaaaaaaggggcggtctttttaaaaaaaccaaaattacttacgctttcatgcaacgtaataactctttaatatggttaaaaaaatttaattaactgctctttttttaaaacattattacgggtaaaa

SEQ ID NO: 112124 - DNA, 330 bp, Arabidopsis thaliana columbia
gaagtatcgaggggttacgttacacaaatgtggtagatgggaagctaggatggggcagtttcggggtaaaaaggcttatgacaaggctgcaatcaacactaatggtagagaagcagtcacgaacttcgagatgagttcataccaaaatgagattaactctgagagcaataactctgagattgacctcaacttgggaatctctttatcgaccggtaatgcgccaaagcaaaatgggaggctctttcacttcccttctaatacttatgaaactcatcgtggagttagcttgaggattaataacaaatacatgggaaagtcggagaatacacc

SEQ ID NO: 112125 - DNA, 263 bp, Arabidopsis thaliana columbia
ataacaatggaggttgagaagacagagaagtctttgcagaggatgatgagtctaagatcaggtacagtggatggaaagtcagggccttcatcattggaaatgagacatttgaaaaattggtgattgttggaatgtgtatattttcttgtcttaatttctaattaacatttatcattcatttcgtttttattttacctttgtccaacattgtgtccatatttttttttccagatttttaaagggaaatttttatcgttataatt

SEQ ID NO: 112126 - DNA, 278 bp, Arabidopsis thaliana columbia
gaaaaaagaaaacacaaaaacaaagatcataatggtttcctcaaccatggcttagccctcccctgagcttctcggaaaggcggggaagcctgccgcatcatatgacctaggcagcggccgcgtgaccatgacgatgactcaaatgttgtcagccacgcagcaactctcgctatttccagtcgttgcaattcttctgacgccgctttagctctactaaccgataaaacaatggtttatcctagacactaaatattggctcatgatcgagttcatacgcc

SEQ ID NO: 112127 - DNA, 415 bp, Arabidopsis thaliana columbia
caagaagccaaaataaaaccattgaagctagcatcagccgaagaagcggtcacattttccggcaaaacagacagatcgaccagtgaaagctcctatctcttcctgaggcattgtgatctcttgttaaaatggctagtactctgaggaacattcatgatcaaaatgttattgcttcagaagacactgtataccgctacttgtgtcccgtgaaaaagaccgggagcattatcgggaaaggcggcgagattgctaagcagataaggtctgaaactaattcaaacatgaggataatcgaggcttttcctggttgtgatgagtattttttaaccatgtatttttctttaatgcgtatatattatttttattattattattttattttattttttatttctcctatttttttttaattttt

SEQ ID NO: 112128 - DNA, 317 bp, Arabidopsis thaliana columbia
gagacagagaagatgggcatggcaatgaaaaatatctgagatagaagcgaaagataaggaatgtctaaaaggatacattgatgcgcctttaagctattgtatggctaggatttatccgtcgttgtgttatcgaaattgtcgcttttacaagggcgcgaaaggtggaaaatgcgacggtcttaagtagctttgcgacttctgcagcgacaagcctttttagtcaggttctgatgagaaacagttgaatcctggcataggtcatgggatacgttatgcttaacagaaagccttgacccaatcaaatattgcctttcaat

SEQ ID NO: 112129 - DNA, 158 bp, Arabidopsis thaliana columbia
gcaagctagtttcgactctagtgctgtgttatgtgttatagtcagattgcaagcacttgctcgtgggagagagatcagactttgagacatcgtactaatacatcagagtgtctcacggattcattaatacctaatgattgattgccattattcgacat

SEQ ID NO: 112130 - DNA, 261 bp, Arabidopsis thaliana columbia
tgaagaagttggcaaagtatcaaatgttgtcctatccgctacgataagataacggctctaagacccagccactacccaccacagggttcaggcttgatgtgggacagtctgttagaattcccacggctctaggctggtcaggtcgtatttgggctaggactggctgcaactttgatgctaacggcgcgggaatatgtatgactggagactgcggcggtaagctgtagtgtgctgtctcgtcgttggttatatcctttccat

SEQ ID NO: 112131 - DNA, 257 bp, Arabidopsis thaliana columbia
aaccttacaacgaacatcagagacatacctaactctctctttagctcttcttcctctcttgcttatgtatgcttctttagcgtctgcatggcaagaagcagacctgtccacgcgtccagcttatacaaacccatctgctgtctctccacatgcttacgatttctttcacccaaaatcatcactctctgatcacaatattccaccaaaatcctatgcttctccggtttcactttcatctttaccttcattaacattta

SEQ ID NO: 112132 - DNA, 289 bp, Arabidopsis thaliana columbia
aaagaaatagatccaaaggcctctctcctctctctcgtttttctcatatggttcttgatagtaatttgaaagaaagatgtcggggatgagcagaactcgaagcagcatcgccatgggaacaccatctttccttgagttgaagaaacaagcttcatttttcttcaaagagaagcttataacggcgcttttagctcccaccgatgttactcctttttaactaatgtctgttaatgcttcgattgttttatttattttatttaattaatcaatttaatatcacttcttttct

SEQ ID NO: 112133 - DNA, 334 bp, Arabidopsis thaliana columbia
attctgcaatagcttcatcttctttataaatctcggttccaacatccaccgatgtccaaatcctgcgtcgctggaatcgtaccgggatcctacaacataaacaaatcaaaaaccaaaaccggaatattcaaaagaaacaacagaaaaaccaaccggtttactgatcaatcaatcacctggtagaagaaaagcctactggacaagccaccaacatcaagatcccaagttctcgggtcacccacccaaccatcacccaaccgggtaggttatccatattcaccccaaaccgggtgaggcaaaagctgaagaatcttctgagcttgtgggttactat

SEQ ID NO: 112134 - DNA, 413 bp, Arabidopsis thaliana columbia
atttcctcatgggagaaaggagaaaggagtgagtcatgctggtgtgcaattctaccacgacctgatggactagctcataaaaaatgagtgtaactcctttcgttacttgtttttcactgagtcactccacaagatttagaagttgatttctgcgcttttaaagcgataagtattgttttgtaatttccttatatttcttttttattcctatatttattatttttgttcttttctttttttatttttcttctttttttattttattaacttatttcttttctttttttcatcttttttcctttattgttgttgtttttgttttatctctttttttgttttttttatcttcttttattcttctttttttttttatcttcatcctatttatttttatgctatatatttatttataa

SEQ ID NO: 112135 - DNA, 162 bp, Arabidopsis thaliana columbia
gcgtccgttttaagacagctaaaactaaatacaaagaaacatgattcgggttaggttacagaggaggtgagagctaaggcagatatgtacaccggagatgtgatatgtatagagaagacaaagtgtttccttaagtaaatatatattcccaatagtttatta

SEQ ID NO: 112136 - DNA, 279 bp, Arabidopsis thaliana columbia
tccgaaaaagtataaaaattttttattaatatatttttttcggaggcacgcgtaccttgtcaataaaaagaagtagaatgtatttccaaatttatggcaaatgaggttttcggtaacgcatcattaagctagacccatacttcgagttgtttcatgccataaattaactcgaacgctcataattatccgttggacagtcgtatttacatctcttacttccaacatcttttttcggttttttgattatatatctttctttttctgcttttcttttcatat

SEQ ID NO: 112137 - DNA, 205 bp, Arabidopsis thaliana columbia
  unsure (1)..(205): unsure at all n locations
cggaatttccggtcagacacagccttccattaataacctcgtcgccgttatcttcatctcttctccatcctctggcgaccttgtcnactaaagaccattttcaaagacagaaagtgtgttccaatcggaagcaacatcctttcgtagtcagagcctcaaaactttcttaaagagttataatttccaaaagctctacccaaatttt

SEQ ID NO: 112138 - DNA, 290 bp, Arabidopsis thaliana columbia
gtagaaatggtcaggaggcaggtcacttgacattatatagcatggtagtttccttaaagagtcacccgataagcctctagcttccagttcaccataaacatcctcccgctcttcataacttacatcggaaatccttaactgccatgctatataatgtcaagtgaaatggtcaggaggcaggtcactcactgcacaatttgtctgcaggacatcaaaacaggggaaatcacacgaagcttaccgaaatgtgatcatacgtttcatctggtatgtgttgttaattggctcat

SEQ ID NO: 112139 - DNA, 341 bp, Arabidopsis thaliana columbia
ggaattgacgccacagtctactatagtccagagatcctgaaagaggctgggatacaagacgagaccaaactgctcgctgcaactgtcgctgttggtgtcacgaaaacagtgttcatactatttgccaccttcctgattgatagtgttggccggaaaccgctgctttatgtgagcacaataggaatgactctgtgtctcttttgtctaagctttacgctcacattcctcggccaaggaacgcttgggataaccttggcgcttctttttgtttgaggaaacgttgcctttttctccataggaatgggtcctgggtgctgtttctttacattatgaaatctttt

SEQ ID NO: 112140 - DNA, 304 bp, Arabidopsis thaliana columbia
gtagagatcgccattggtactccacctcagaagttcactgtggtttttgacactgagagctgtagcctctggttgccatcatcaagatgctatttctcacttgcatgtctcttgcatcccaattacaaatcatttctttcaagcacatatgagaagaacggaaaagcttttcttattaaatatatacctttaattatctttcataattttctttagttaaactccctataaaccctgttaattctttcattacacacttatattccttttaatctcaattattattcttttatatctcttttaa

SEQ ID NO: 112141 - DNA, 380 bp, Arabidopsis thaliana columbia
atgctgggcagtttccatgtaatcgttacactcattacatgacttcgtccactagcgtagaccttaatctggctaggagggaaatggttatacttggtactcagtatgctggggaaatgaagaagggtcttttcagtgtgatgcattaccttatgcctaagcgtcgtattctctcccttcattctggatgcaatatgggaaaagatggagatgttgctctcttctttggactttcaggtaccgggaagacaacgctgtctactgatcacaacaggtatcttattggagatgatgagcattgttggactgagactggtgtttcgaacattgaaggtgggtgctatgctaagtgtgttgatcttttcgagggagaaggagcc

SEQ ID NO: 112142 - DNA, 366 bp, Arabidopsis thaliana columbia
  unsure (1)..(366): unsure at all n locations
ccgtccaaatattaagaaagtgtttttttgacttgcagctatcactcggaaacaacaacaccaacaaagaccagatctgcgagtagatcggcgcgtttccntttcggcnccgtctctcgcgtttacgctccggccaccggtgatttctttgcttgcataaccatcgtcatagactcttttttcgacttcctttaccagtcctgtctctgcaacgattcttatcttatgtctttttttttccttttatcccttactatcttcaaattcattgattttatttctctcaattctcttacttctctttcacttcattccttttattgtcagcgggttagttttttatcttcttttttcattcttttctat

SEQ ID NO: 112143 - DNA, 121 bp, Arabidopsis thaliana columbia
atctaatcatgtccgtgggcatagcaggttgtgttttgcgtacacataacacacgctttctgagtaagcactggggacagaaaccatcggatgaaagaggcgttgggtgggatgggagctt

SEQ ID NO: 112144 - DNA, 442 bp, Arabidopsis thaliana columbia
gcagaagaaaacaacatatactgttcctaatggattgaacagctctatatttacaaagagaccagatattatatttaaggggagggggcctaatgggagtgactgtgacattgttaatgtaaatattcccacaaatgatgctgaaattggtggacactttcgtaggagaaaaagctactggtggaacacgagaagcaaatagtgattcgtgcaagcagtacatgaagagggccaatcgtactatcaactattgaagcgagctgactgtagcacaaggaataaatattctctagatctgtggtcaagatcagctgatgaacatgttaagcttcattgacagactacaggaatttctactggcgtcaactgaaaaccgaaactttaacgcatcaccattgctatgtgtgcatataataagagatgagttcaatattaatgcatg

SEQ ID NO: 112145 - DNA, 400 bp, Arabidopsis thaliana columbia
gtaagaacgcattcggccggaaagatgggtctttcattgacatggaagccgaacaagaagagggaagtgaaacatctgagagacgagagcagccaaaagccaacaaaacactgaggttttaatgagaaaggacatgagttctgctctacctacgacaccaacgccgatttacagaccagaactggttcaactacctttctcatcatctaagaacaggatgcctcctccacagtctcttcttggaggtggatcttcctcagggatatttaacagtcaatatctaagaaaaccagacattagtttgtctcaatccagaatcgagaagtcattcgagacagtcgcagttgatggagctgaacaaatgcctgagattctcatccattcccctatacctaacata

SEQ ID NO: 112146 - DNA, 292 bp, Arabidopsis thaliana columbia
gataattctggaagaggaagcaatggtgttgtctcggcgatttgctcaagggtcgagtgacgaagaagacggggtggcgattactaggtctaagggaagaaactcggcgagtcctgaggaatctttggggaaacggaggaagcgtaagacggtgaagctatacgaagattttgaagagaaggaagcggattggaagaagaacagaatggggaatacggaggatgttgttgtgggggaagcttacgtagggatatttaacagtcaatatctaagaaaaccagacatttagttt

SEQ ID NO: 112147 - DNA, 194 bp, Arabidopsis thaliana columbia
accggggcggcccacgcgtccgcgtaaatctcttctccgttcactcaatcaaccaattatgcgtgagattcttcacatccagggtggctcaatgtggtaacgcacatcgcagccaaattatagtaagtgttttgcgccaagcacgtcatccatccaaccgcaaggtacaccggagactgagatctgcaacttgt

SEQ ID NO: 112148 - DNA, 259 bp, Arabidopsis thaliana columbia
agaggatgatgcttacactatcaactaatgattagaggtactcgacacaactttagataagcggataggcaaagagaccatgtgacggtttcattactacattgctgtgaagcgcacacacattatgtattctctgcttattgaccgaactaccttttcggtggtctgaggctacatgaagtcggcagaggtagaactggaaagttgggttttgtagtttccacccaaaaaaatggacggacttttaggggttggaatt

SEQ ID NO: 112149 - DNA, 317 bp, Arabidopsis thaliana columbia
caaagcctataaaatcggaaagatgtatgcatcgatgatgattctgcctcacttagaagaatcaaaaagctaaaaggagctgcgaaggctgggcaacgatgacttagtatgtatagaagaaaaaaaaagcttttacttggtatcaaacagagcatgtgttgttgtatttgctacctttttctgcaaagttattggcaattgtattgttgttccacttgtatatatacagagaccatttatgttaatatacaacttggtatggggtaacacaacataaaatttgtggcgtggtggaagatgttagaatatcaagatct

SEQ ID NO: 112150 - DNA, 387 bp, Arabidopsis thaliana columbia
gagtcaatgttgcaagacctcttccccacaagtgacctaatgccaggagctagccggcttcttagacatctccatgggaaaggaaggccaatatgtatagccacaggtacacatacacgacattttgatcttaaaacacaaagacaccgtgagcttttttcgcttatgcatcacgtagtacggggggatgacccagaggtgaaggaagggaagcccgcgccagacggctttcttgctgcatccaggagatttgaggacggtcctgtagatccacgcaaggttctcgtgtatgaagatgcgccttctggagtccaggcagctaaaaacgccggaatgaatgtaataatggtaccggattcaaaggtagataagtcctactgaaatgtt

SEQ ID NO: 112151 - DNA, 444 bp, Arabidopsis thaliana columbia
gggatccgttacctgctgatcttatcaatcttttatcatcatgcgactgccagttgctgaaattgttttcaactaaaatgcgtggcaaatcgcaaaagccacttatgttatcggactccacgaaccaaactgttggaacaaagttcaagggtcaacttttcaaattgatgaacaagttagagaacacaagtcctcacttcattcgatgcataaagccgaattcaaagcagcttcccagagtttatgaagaggatcttgtcttacaacagcttagatgttgtggcgtgttggaagttgttagaatatcaagatctggatatcctactcgtttgacacatcaagagtttgcaggaagatatggtttcttattgtcagacaaaaaggtcgctcaggatcctctgagcgtatcaattgctgttctgaaacaatatgacgttcatcctg

SEQ ID NO: 112152 - DNA, 398 bp, Arabidopsis thaliana columbia
agtaacggctgcagctggtcccactcgttccatgaacagttggggagatgtggaacacctatttgaaggatatgatgacattcagagagtagctattcaaagagagagagttcgtaggttagaggaacagaataaaatgtttgcatctcaaaagctctctcttgtcttggatatagaccacacccttctcaattcagctaagtttaatgaggttgaatcccgccacgaggagatattaagaaagaaggaagaacaagatcgtgagaaaccatatagacatctctttcgtttcctgcacatgggaatgtggactaaactaagaccagcgatttggaaatttttggagaaggcttgctagctgtacgagttcatctttacactatgggaaacaaattgtt

SEQ ID NO: 112153 - DNA, 418 bp, Arabidopsis thaliana columbia
aaaaacgaagaaagaatgatcaagaacatctttctatagtcggaaactctcaggtctctgcggtgcgtctcaatcttgctcggatgggggacaatcctcctcttgaccaatgataccatcgatctcttcccttacttgtctctcccttatctccctcgatcttctctctccgtcatccctacctccacgccaatctcgagtcccaccaacgactcatcacctcctctggaatcaccggttaatcaaacccgagtcgatgatcatcctgatgatcaaggtttggaattggattgccttaaagatgacaaacaatggaacgtgagtttgaagatagattggaagagatgtgagagtccacattacataccgtgtttggataacacataagctattaagaaacttaactcctagagaaaca

SEQ ID NO: 112154 - DNA, 185 bp, Arabidopsis thaliana columbia
aaatttcgcacaagagtgaaacgcataactgtgggttgtttgctcgaacctcactggccggctcaacaatggttccgtgaaagcgctgcggaagtcagaaaaagcctccggttttagcggctctgtttaacgaggtatttggaagccgccggtgccaattgggaattatgctgactaggcaaaag

SEQ ID NO: 112155 - DNA, 217 bp, Arabidopsis thaliana columbia
  unsure (1)..(217): unsure at all n locations
ccaacattttttttttctcaatacgtgtcaattatcttctacacaacgactatctcctccccggcctttaccaaaaacgcggcgcgccttttcctcncataatattaattcctctcaagcntaccttttacaataatcaaaactattnccaatccaaagggtccatcaatcattcccatcttacggatcccacctaatcaagtactttgcttcattc

SEQ ID NO: 112156 - DNA, 421 bp, Arabidopsis thaliana columbia
  unsure (1)..(421): unsure at all n locations
gcgaagacgctccgaaaccggatccacttcacgatactggatccacatctactggtccaagccggggggcgacaccgggtcacgaagaacgacccaaaggatatttcatgaaccggactccgccgcctccaggacagtcgcgcaagtgggaagattgggagcttccatgttacatcacaagcttcctcacgactgtaatcctcggagtgggtctcaatgccaaacctgatctttcaatcgagacctgggctcaccagaaagctcttgagcgcctcgagatggagaagcttgcatctgccggagattcatctggttaatcccaaaacttgggagatatgattcaatgggtgaactggcatgtgtgacatatgttagtgcgaactctaccgggggagatnttccatttatgatgatgatcacg

SEQ ID NO: 112157 - DNA, 471 bp, Arabidopsis thaliana columbia
cttcttttttatctctcgaaattcctctctctttctctctgcatcaaaacagcaactttacttctgcgtttttgtttatctctctgtattatccgattaatttaaaggagttcttcaaggcagctgcttctatgccatattgccgaggacttttggtgtctttcgaggtcattagaacaattgtgtctgcttggttggtggtctatctacaactgttagcttttacaaaaaatgggcgagtctaaggggtgcgggaatgttggacgaatgatttcgaagaataagtctgcgaattcttataacctctctcttcagttgtctcctgttgtttctttctgggattgtattgtccgcaccatgaggtattcctatataccagagtgggtgtagttcttgagttcctctacaacatcatcgagtttagtgcagttttttagttagaaatttatagtcaagcaataatggatcaca

SEQ ID NO: 112158 - DNA, 411 bp, Arabidopsis thaliana columbia
cgtgtttcctcacttatcacactctttcctcttcttttcaagatatggaaccggaagaaaatggtggggacaaggagagagtgcggagggaaggggaagatataactctgctcccatttgggatggctacttacaagatgcaaggcgatgtttggctttcgcaggaccacgatgatcaagagagattggcttcgctttacagtgttgcggattcttggcttaaacagctcagggtccaacatcatgacttcaactacttctgcaatatgtcaatgactcatcgtggctaaacctcggttggatgacaccatgatgtttgcttgtttcctcatatatagtctaattcttgctttgttctggaaccgctttgcgtttgtaaaacgcaatggagcgattcgctttgcagtgttt

SEQ ID NO: 112159 - DNA, 307 bp, Arabidopsis thaliana columbia
tcagattatttccccatctagaagctctctctcgactctctcgtctgtttctatctttcgtgatgcgtcgctcttcatcaaagaagaaatcaggtcaatcaactgaatcagtcaccacggatctctttcgctcagcttcgagcaaggcctcgaataaagagatggatcgaattgatcacttatttaatcagtatgccaataaatcttccagcctgattgatcctgaaggaatagaggaactatgctccaatttggaagtggcacatactggtatcaaaatcttgatgcttgcttggaagaagaaagc

SEQ ID NO: 112160 - DNA, 160 bp, Arabidopsis thaliana columbia
aaacaaagcaagcaaaaaaaaaaaatggctttctcacgcctctcatttgcagcttctctcatcgtcttctcatctctaatcatatcttcagttgcttattacggcaatgaagctgacccggagaccggaaaattgattcccatcgcccgtgaagggatca

SEQ ID NO: 112161 - DNA, 324 bp, Arabidopsis thaliana columbia
caaaagaactgtctgagattgagtacatggagagcttgtatatgaagagcactgtgtcggcattaaaagtattaaaggaaatccgcagtggtagctcaacagttagcgtcttctcgttgccaccgttaccggcaagtggattagaagatgattcatggaagaagaaagttggtgtccttgaacaagtagcgaaatgaattatgagtattattatttttaaatctctctttttttttgtactttctttaaatagtacaagtaattgtatacgcttacagctgtaaaagatgaatcaaataaaacatagaagtgtgatcatctttc

SEQ ID NO: 112162 - DNA, 306 bp, Arabidopsis thaliana columbia
acgaaaagctggagacagaaggagtagtgtttgaggtatataaggcgccaatggaccaaaccaatggggacacttaaaccctcacttcaccacatgcgcggtcggtaaattgcaatctccaattgatattcaaaggaggcaaatattttacaaccacaaattgaattcaatacaccgtgaatactacttcacaaacgcaacactagtgaaccacgtctgtaatgttgccatgttcttcggggagggagcaggagatgtgataatagaaaacaagaactataccttactgcaaatgcattggcacac

SEQ ID NO: 112163 - DNA, 440 bp, Arabidopsis thaliana columbia
cttctttgattgatccacatggcttccgctgccgcaagttccgccttttcactccttaagtccaccggcgctgttgcttcctccgccggaactcgcgcacgtgcctcccttctgccaattccctctacctctgtttccgcgcgtcctctaggcttctccgccactctagattcccgtcgtttctctctccacgttgcttccaaagttgaatcggtgcgtgggaagggaagcagaggagtggttcctatggcgaagaagagcgctagtgatctgaccttacatgattcagactgggaagagggtttcaatgctaacaaccatattgatatatatacgaaatacacttatgtgcgtatgtaaattctcttctcgctttaaagattcaggctgactctctatcctcttatactgtgcctttatatatcttgatctgtgatttc

SEQ ID NO: 112164 - DNA, 184 bp, Arabidopsis thaliana columbia
gcgaaagaatcataaaaagcctaacgaagtaagtcaagaagaagaggaacaaacaaccatgggtgaagtggttaaggatggaagagagaatgatccagctggtttggatgatagcgataggattggttccctacccatggatcctaagagtcttattttgacaacttttatgctgggagtactt

SEQ ID NO: 112165 - DNA, 111 bp, Arabidopsis thaliana columbia
atccatcacattctcctctttcatatctcaacgtaaaacacctaactaaagagatcaatatggctcggagtgatgaaggtcggcatgcatcggtccttggcttcgcatgat

SEQ ID NO: 112166 - DNA, 354 bp, Arabidopsis thaliana columbia
tacgagtggtgttgtaacgctgaccagtttgatcaaatgggtgagaggtatagaaaggagacttctttgactcgtaagcggtgctccagtataagataggaaggatgatgtagaagatgatgatttactcgtcatattatttttctatatctaataacggttctattttttttcttcctattaaacccttaaacaattacctttcatttccaattttcctaaacacctattcttttctcctcttatattttccctctctctaaagcgctatgataaaaaacctgaaagtgctagggcacagttgctcgatgaagatggtccagcttatgttcatctctttgttagcatcttacg

SEQ ID NO: 112167 - DNA, 260 bp, Arabidopsis thaliana columbia
ataacaacaaaatacttgcgaacagttattttgttttttcctacaaaacccatctcatgctgagggtcatcacataagcagaggaggtgcatgcaaattttatcttcactatcgactttcccgattttcttaacctgattacctattaatattaatgacactaactctcttgtagatctcaactaagcctttaaacatttcctacatagaccagatcattcttatattctctacttaactacactatttttttatcaatc

SEQ ID NO: 112168 - DNA, 402 bp, Arabidopsis thaliana columbia
attccgttgaggaaatatggaatctggctactctgccagcttttctaatctacgtagccataaccatgtcgattgtccttgctttaattctgcattttgaacccctgtgcggccaaacaaacattctggtttatattggaatctgttcgttaatgggtgctctcactgttatgagcataaaagctattggaattgcgataaaattaacaatggagggagtaagccagatcgggtatccacagacatggctttttgtcatgagtgcagtaacttgtgtcgatacacaattgatttacctaaataaggctgtggacacattcaacgcatccattgtttctccagtatactatgtaatgttcacatccctcacattatgtgctagcgtaataatgttcatggact

SEQ ID NO: 112169 - DNA, 174 bp, Arabidopsis thaliana columbia
gaagaagtgagtgattgcaccaaagcatattcctatggaacatctcaaatgtttgttcaccatggttgctgtcggtgatggattgggagtgtttgctttcatgaattattttcgaaaagatctacaaatacattttatgcaaaactttggtgtaatgaaaaaaggagaaatttt

SEQ ID NO: 112170 - DNA, 116 bp, Arabidopsis thaliana columbia
attgaatgtaggatagaggctctttacatcatttttatatcaacaacacatctttcatagagagagagtgtgattctccttgattgacggattcttcttaatgttataagaagaac

SEQ ID NO: 112171 - DNA, 303 bp, Arabidopsis thaliana columbia
ggtacttgcactaatgtttctgtctttgtaactttcaattgtgatcttccccatcatgggatcacagttgaaaacgtgaggggcagtgtatgatcctcatctgagcttgggaatacttgctgagactagccaactgtttgtccgtgccctacacatgatcaatgtgaggtgactatagataaaactgtaacttaccaaaacaaggtactttcatgaaagagcataaaacgtacttgcatcagtctcactaggaaaaatcttattacattcatcctataagggtgattttaaaaattcttcact

SEQ ID NO: 112172 - DNA, 181 bp, Arabidopsis thaliana columbia
cggacgcgtgggttttttttttgagtattgatttaattttatgtctctcatacatatgtggatggtatacacataaacggggaggtgctcgatgtcgatttgagacgtagttcgtgtgttgtgcttgtataatttccactgaaaagaacgttttctaaataaaaaattcattttttaaata

SEQ ID NO: 112173 - DNA, 362 bp, Arabidopsis thaliana columbia
ctaaagccaaaagttctgtcagaaaccggagcttcggctccggaggagctcaaggattcacttgttgaataccataagatggacgcgtggaaatctcttagcaacttgttccttcaagacaaggcagataagataacgaaagaagacgagaagatcacaccggaaaagataccggttactgatgatctgaaaacagctttggaggaggaaaatactccgaccaaagaggcaaaatctccggcaacagagacaaagtattcggtaacagagaaaagagctccggctgacaagaagataacaccggaaatgatgccggttactgaagatctgaaaacagttttggaggaggaggcaaaaccttc

SEQ ID NO: 112174 - DNA, 384 bp, Arabidopsis thaliana columbia
tcgagtttctagggacaacgccagggaagccttattcccttcaaacgaatgtcttcgttaggggaagtggcgaccgaaatgtcattggaagagaaatgaaatttaccttgtggtttgaccctactcaagattttcaccattacgcaatttggtggaaccctaaccaaattgtattctttgtatactatgtaccgatacgtacatataatagaaagattgaagctatatttcccacatgaccgttgtgggtttacggatcgatatgatatgcatcatacttgtccacataaaattgtatgatcttagtcaattttttgtttccaaccatttttggctttatttcaaaatacttttatctatcgggaggctctccgtatttttttt

SEQ ID NO: 112175 - DNA, 445 bp, Arabidopsis thaliana columbia
tttttaataatctaactactaattttttttattcactttcttcacactctccgagtgtgatcttttctaaatgccgagggcttatctaaacacattgatttacctaacgaaactgaatcctccacagatcactttttattgctcgtcgttttccgtcttgctcacactttatttcacgatacagcttgtatcacatcatctcttccactgtaagaaccctaaagaacaaaatgctatactcatcattgttcttatggctcctatctactccgttgtttcctttattgcctagttataagtcaaaggaagttttaccttcttcctttttcttaaatccatcaaataaatcttcaaatcttttgtcatttccaaatatatttgacatttaaatatatctaatcttatacatatttataatctaaatcattttttttaattatatatt

SEQ ID NO: 112176 - DNA, 188 bp, Arabidopsis thaliana columbia
  unsure (1)..(188): unsure at all n locations
atttccgacccaagcgtcccgtcaattatgggatacagccttatcgctacattcatttctagacggaattgatgatcatgatgttnaggattatattaaaacagcgctggctcaatcatatcattacttgaagaaatcacaaattacagagaaccctctcggtgatcactttaaaatgtttcgtcaca

SEQ ID NO: 112177 - DNA, 284 bp, Arabidopsis thaliana columbia
agctcctgggttatgaaacacggaagactttttgttgttcacaactaggagttaggtcaagggagaggaaacacagaaccacagtggtatctgtggatggagccaaccaagaacttacacacttattctattgtgtggagaccacagcacatcatagctatgggtgataatgatccaatcagggcgttcgacaatgcaaagcacctgggggtttcattgcccacgagccaaccaatgaagatatactccagtttatggcatgcagatacaccgggctacaagag

SEQ ID NO: 112178 - DNA, 432 bp, Arabidopsis thaliana columbia
  unsure (1)..(432): unsure at all n locations
agttagtcaccaaaaaaaaaaaaaaacacaaaatgtttcaatggccgcctccacaatggctctctcctcccctgccttcgccggaaaggctgtgaacctttcccccgcggcatctgaagtcctcggaagcggccgtgtgacaatgaggaagactgttgccaagccaaagggtccatcaggcagcccatggtacggatccgaccgagtcaagtacttgggtccattctctggcgagtcaccgagctaccttaccggagagttccccggagactacggatgggacaccgctggactntcagctgatcccgagacattcgcaaggaaccgtgagctagaagttatccacagcaggggggctatgctgggagccctaggctgcgtcttccctgagcttttggctaggaacggagtcaagtttcggagagggcggtt

SEQ ID NO: 112179 - DNA, 433 bp, Arabidopsis thaliana columbia
ctgctgctgagcaaatcttcagcgctggtggcttgaggatgagaccgggtttggtattccttgtatcacgagccactgcggaattagcaggcttaaaggaacttacagtagaacatcggcgtttaggtgagatcattgagatgattcacaccgcaagtttgatacacgatgatgtgttagacgaaagtgatatgcgaagaggaagggaaacggttcacgagctattcggaacaagagtagctgtattagctggggatttcatgtttgctcaagcatcatggtacttagcaaatctcgaaaaccttgaagtcattaagctcataagtcaggtgatcaaagattttgcaagcggtgagataaagcaagcatcgagtttattcgattgtgatgtcaagcttgatgactacatgcctaagagttactacaagacagc

SEQ ID NO: 112180 - DNA, 483 bp, Arabidopsis thaliana columbia
tgcctttatcgcccaaatcagggatcaagacgtcagcatatgtccaaatatccgcattgctgactgtggacacaaaattggtctaaatggtgttgacaatggccggatctggtttgataatcttcgaattccaagagagaatttgttgaatgcagttgctgatgtttcgtctgatgggaagtatgttagctcaattaaagatcctgatcagagatttggagcattcatggcccctttgacttctggccgagtcacaattgcatcaagtgcaatttattctgcaaaggtcggattatctattgctataaggtactcattatcgagaagagccttctctgttacagctaatggtcctgaagtcctcctccttgattacccaagccatcaaaggcgactgctaccactcctagcaaagacatatgctatgagttttgctgcaaatgaattgaagatgatttacgtgaagagaacaccggagaccaa

SEQ ID NO: 112181 - DNA, 373 bp, Arabidopsis thaliana columbia
  unsure (1)..(373): unsure at all n locations
ntcggaagatttcttgggagaaaataaggtggattgatggattagtctttaggaatggtggtggaggaggagaatagaagcatggaggaaggacttcttcagcatcaaaacgacagagatgatcgtcgtatcacacattgtctcatcctcagcactcttgtccctgtttgtagtgccttcagctacagatgtgccgatggaaatacttcaggcactgagactgctctcatgaatgatctttgacctttctatggcacaatattcagcttttgccccatttctgaatcttggacctgctaatctatccttcttaggacctcattctccactcattcctattctgttactgataatgatcatacactcctttttc

SEQ ID NO: 112182 - DNA, 245 bp, Arabidopsis thaliana columbia
ctcactatcatcatcttcctcctcatcccatcgtcacgtgtcgctctccaaaccttttcatatcatctgcaaagctcaacagtctcatgaagacaataactccaccgtctcccgccgtcttgctctcactctcctcttctactccgcttctatcgtttccaaattatctcctcctgattcccactacattcaatctcctaacttcttcattattccaaagacgaacacatacttctttccataca

SEQ ID NO: 112183 - DNA, 265 bp, Arabidopsis thaliana columbia
gagattgcgccggagtcaaggagagggagagatcgatccaacggttgagatgtttctacgggcggtcgtacggccattattgggtgaagtgaagcataccaccgagatcgtcgtgcttgacgatgaacctaacgatagagcgctgctgatctatctttagccttctatagtttttgcagactaagttgttctactcattattccttattgttgctcttgcatgcctgaggactggtccaattttaatatcctgaatccttccaaa

SEQ ID NO: 112184 - DNA, 407 bp, Arabidopsis thaliana columbia
ggacatactgtaccttgttataatggtacagaaatctctcacttcagagcgtaacttttcttcaaccggcgaagattgccgcttctccttctcgtaatgtccatctccgatcaaaccaaaccgtgggcaagtcctttgggttagactcttaacaagctatgctcacgtgctctgtacactctgacctcaaagacttctgtggaaaatgctccgacgccgccaagatcgccggttttgctctagccacctctgctctcgttgtctcgggggccggtgcggagggagcaccaaagaggctaacgtacgacgagatacagagcgaggcatgcaagaaacttaacagaaccgagtcatcagaacgcgagacttactcatcttgtgagccatgtacgatgtgcttcagagcc

SEQ ID NO: 112185 - DNA, 475 bp, Arabidopsis thaliana columbia
cacgaatcttctctctttctcttctctcaaacgaacatcaccatgaatcaagaatacgataacatagctccaataccaaaagcttcattattgttaatggagaatgatctatgcaagagagaatcagagatctcaagaagctcatcggtgggagtttcttctagattgttctattactatcatcatcgtagtctcaatgaaggagttccttttaagtgggagatgcagccgggaacaccgatcaaccctccgccggaagaaaacgttcgtccgattactcctcctccggcgtgtctcagtcttggtttgcctgaaccctcagtctcagtcgtcggaaattctaataaacattctctatttccggcgaatattaagctttggagatggaagaatcttcgaaagagatatttctctagatggtcgagccaaagcatgcttaataaagcatctcttatatacacattcgcacgtatga

SEQ ID NO: 112186 - DNA, 217 bp, Arabidopsis thaliana columbia
ttctattaataagagaagacgagttttgctttcgttactgtctttcaactattccgacacaaccgaagcttctggaaacgtgggggtgtgttatcaataatggctgttgtagaagaaccgatactttcaagattggatcgtattgatttcatggtgaggaagttagaggatatttctttactcgtgtatatgtgaaatcgatattttttattccttt

SEQ ID NO: 112187 - DNA, 450 bp, Arabidopsis thaliana columbia
aaacaaactgctggtggttgatttctcggctcttaggtgcggaccatgtaggatgattgagcgggcgattcatgccatggctgataagttcaatgatgttgatttcgtcaaattagatgttgatgaacttcctgatgtggctaaagagtttaatgtgacggcaatgcctacctttgtgctggtgaaaaggggtaaagaaattgaaagaatcattggtgccaaaaaggacgaacttgagaagaaagttagcaaactcagagcataatgagcattgttaacgccttaaccaatagtcttgtgtaaactcaataataaatggtatgtttatggggaatgtgatgctctatactctctgatcatgcaagaccttctgtgttatgccaatgattaaatgtaaagaggttgttccaatgcttacacttctaaattcagtgcttttttcccttttta

SEQ ID NO: 112188 - DNA, 375 bp, Arabidopsis thaliana columbia
cgcttccgagcggttacaacacggtcgagtgggttcgatacttaacgaaagcgggatcttacgagatcagatgctgaacattaaacacagttcaggttcagtgacatcagacttaaaagtttcatggcttctagttttttgttccttatgcaaaacaaaaacaaaagagttaaatatgttttataccttgttttatgtttgttttgtcgattagagatatctgtgttaatatgatttcttatgtcttaatttggtattgaattctgtttttctttctttctctgtttgtgaaattgtacgagatatagtttagattaattctggtgtaatcgaacgtgatagagtatttgtgaaagcagtcggattctttttagt

SEQ ID NO: 112189 - DNA, 275 bp, Arabidopsis thaliana columbia
gtctacgggactgcggttcccatcgcactttacaactccgtcgctttgggagaggagaaagatggaggatttgtagggttgaggatactctccgatgataccgttagggggaaagagcgtgactttgctcaccggagaatataataggagatgacatgagacataccgtcatgactcctggaaacaaaagtgctggcgttattgcctttgttgacgctgatacggatgctgtgtctaagaaatgcagggtgcacgtcgagaatgattgtggcaac

SEQ ID NO: 112190 - DNA, 455 bp, Arabidopsis thaliana columbia
atcagcttcaaacgcatgtgaaaggtttgtgtgatcgtcctccatcgtctcactctctcaggatggagtctttcaacacgctggttaagtcaacttacacggcgaaatatgtatctgagcccttttcagttggtggatacaactggacacttgacgtgtcaccaaccggtaacactacggatagtaggacagggtgcctgtctctacacgtagccactagacaccttaactctcgcacagcatgagattgacgcagaactaatgatttacacatctagcacgaatgcgagcccgtgcttcactatgccagatacccccgtgtcttacattagggtcgacccgacggactcatggatgatatccctacttttcgttgctgacctctcttcctttcggtgttgacatgggattttgttggtctaaataggccctgatgcctttgtatcatggcttca

SEQ ID NO: 112191 - DNA, 219 bp, Arabidopsis thaliana columbia
tccggtcaccacgcgtcaaaacttgatctgcaatcacttccttcgaaatgcatcgagacgaaactgggacatgtgtcttactgggtgtagttacattgaatatgggaagatataaaatggtcgtggagataatgtcatcgatcacataagggcatgatacatactaatccgctggattaagtgtctatatatggtcatcaacatgtgaagttcaaccat

SEQ ID NO: 112192 - DNA, 473 bp, Arabidopsis thaliana columbia
ggccttcaaagattaatatctggagcattttcccaggcaccacaaccagaagatgattcatttaatgagatgttaattgccaggtttgtgcgtcttcttcagcaatttgtaaatactgctgaaaagggtggagaggtggagaagtcgcaattccgagaaacttgttcccaagcaactgcattacttctgtcaaacctgggtggtgagtcgaaaacaaatgtcgaaggcttttctcaattactgcgtctcctttgttggtgtccagcatatatatctactccagacgctatggaaactggaatttttatatggacctggttggtttctgctgctcctcaactggtatctcttgtccttgccgagcttgttgatgcatggatatggacaattgatacaaaacgtggtctctttgcatctgatgtacgatactctggcccagctgcaaaattaagaccccatctttccccagggga

SEQ ID NO: 112193 - DNA, 456 bp, Arabidopsis thaliana columbia
  unsure (1)..(456): unsure at all n locations
cacgagtggactcaataccggagaagattttttcagaagacgtcgtggcgcttcctttctgaggcggcacgacgggtctccccaaaggagtgatgctaacacacaaaggtctagtcacgagcgtggcgcagcaagtcgacggcgagaatccgaatctttacttcaacagagacgacgtgatcctctgtgtcttgcctatgttccatatatacgctctcaactccatcatgctctgtagtctcagagttggtgccacgatcttgataatgcctaagttcgaaatcactctcttgttagagcagatacaaaggtgtaaagtcacggtggctatggtcgtgccaccgatcgttttagctatcgcgaagtcgccggagacggagaagtatgatctgagctcggttaggatnggtaagtctggagcagctcctcttggtaaggagcttgaagatgctatta

SEQ ID NO: 112194 - DNA, 334 bp, Arabidopsis thaliana columbia
cgcgcccgaaaaaaagaatatatcacacatggttgaaagggtttgctacaaaagggatctctcctcccttgcgtggaacggaaaggcggagaccatttgccccgtgtctgctgaagtccttgtaagcggctcgatgacaatgaggaagactgctgccaacccaaatgtgccatcttgcaaacgacggtacggttccatgcgatggaaggacgcgggtccattttacgcagagtcaccgagctaccgtaccggagaggttcgcgtggactactgttaggacaccggtgaactgtcagctgatgccgatacattaacatggagaccggagctagaa

SEQ ID NO: 112195 - DNA, 257 bp, Arabidopsis thaliana columbia
cgcgtgcggttgcaaagtatctgcagatgatgccgactactgttaacccgcgggggtgatcctgcagtcggcggcggaattccaaaaggggcacctcctacggtgacttcgattcctccacgaccaacggaaccggagagtcatcggattccgtttttgtcaaacgtaccaaaatgtgtcattcgactgacatatgaagactcgagatcgaatcataggtttctcatcacgaaccaagattcgcaggaatgatcaac

SEQ ID NO: 112196 - DNA, 224 bp, Arabidopsis thaliana columbia
tcgaccacgcgtccggcgacgaagactgtttggatcatactgtcgtgtttatttgttgattcccaggcagatcacggtgtggatgttctatataagcggcgtggaccgtcaccatatactctacttcgaaagatgttacccataatttgattgaaaggcctaatgttcctagttagtgtacacatatccatcttaaccttgtagctagacatgtatctcgttct

SEQ ID NO: 112197 - DNA, 357 bp, Arabidopsis thaliana columbia
  unsure (1)..(357): unsure at all n locations
aaagatctgagaggtggtcgaatgatccaagttatgaagaacaatctctcttagatcgtttggtctgatccaatcgaagaanagaatgggaatcttattcacgcggatgttctcttccgtctttggtaacaaagaagctcgaatcctcgtcctcggtctcgacaatgctggaaaaaccacaatcctctatcggcttcagatgggggaagttttctctactattcctacttatgtattttaacgttgctaccttgtcttttcaatatctattattctcttatgtctcttttttttatattcttacataatcttttcatctttgccttttccttatccttttcctttttttccctaatt

SEQ ID NO: 112198 - DNA, 462 bp, Arabidopsis thaliana columbia
aagaaaaacagaagcttgaagctattctgcaacaatgcaaagagcagagtttgaaaatgtccaaagagctagaatcaaggagaggattagtacaacgttgcagctctcagaaaaatattgagatggaagaaaatgatagattaaatagtgaggtgtcagagttggctgacaaaaatacaattgcagtctcttcaggcgactcggtgaacaacgggcaaagggaagttgcttgtattgatcctacagtgcggatcatcagtcccaggtcgataattcagggtactattcaatcgagcagtgtaaatggaaacagagaccaattaccttccggagaagcaatggcgctggacaaacgtgaagaaagcctagctttgatcaatgataaattcagggcagagactttaaagtctagcatggatcaccctaacgatgagctagaacggatgaagaatgagaatctac

SEQ ID NO: 112199 - DNA, 120 bp, Arabidopsis thaliana columbia
  unsure (1)..(120): unsure at all n locations
tccaagacccaaccatcgtatgtagggggctagtcgattgtattgagtcccttcaactttaccgagtttcacatcctcggcctgactctccttatantttttcttcccccactctaaatt

SEQ ID NO: 112200 - DNA, 425 bp, Arabidopsis thaliana columbia
accaagcagaaagctagagagctagcaatggcgcccaccgtgatggcctcgtcggccacctccggtgctcccttccaggggctcaaatccaccgccgggctccccgtcagccccgctccaacagcgccggcctcggcagcgtcagcaacggtggaaggatcagctgtatgcaggtgtggccgattgaaggcatcaagaagtttgagaccctgtcgtacctgccaccgctcacggtcgaagacctcttgaagcagatcgagtacctgctccggtccaaatgggtgccttgcctcgagtttagtaaggtcgggttcgtctaccgtgagaaccacaggtctcctgggtactatgatggcaggtactggaccatgtggaagctgcctatgttcggatgcactgatgccacccaggtgctcaaggagctc

SEQ ID NO: 112201 - DNA, 320 bp, Arabidopsis thaliana columbia
  unsure (1)..(320): unsure at all n locations
gccatcgtcgtccgggtcgataggagtngtgctgtattggtccgtccgtattcaatccggtgtgtccatcgtgttatatattcctgaattcgtgtaggatagctcatcgcttcgctgacgcgtgtcaacatgttatctatcagtaagatacgcacgttggaggttggcaccgtgtaatttttggtgtgtgcatgcgtacgttggttctcgcaancctcctaagtatgggaatatgcgagtttccaacagggcattgaaatggatatagagaagaagaggatcgtgcggatttatttacgttatttattgtgttacattgt

SEQ ID NO: 112202 - DNA, 469 bp, Arabidopsis thaliana columbia
tacaaaaccaaatcgagacctccacagcagacgagattacgcagaagaacatgttgcaggaattatgtatcaaggctcgtgggggctgtttattttaaatataatatccaagagatatttgcagccatggggatataagggaaacatggaactcaacaaggaagatatcgtgccattgacaccagcagctcaaatcacagcacctccaatcctacaagatggctcatctcaacaagctgaggatgcgtttggattagcagtttggttaggaagaggtttatcaagtgtttaagctcagagaagagatagtgatgttaattctaagtttcatgtaagatctgctcaagtactcatttttacactattcgagtttgaagtttgattggagagaagaagaagactgtacaagattatgagaagaattggagaagcgagtcaaggttagaaagaagatgtgatatcattttac

SEQ ID NO: 112203 - DNA, 471 bp, Arabidopsis thaliana columbia
  unsure (1)..(471): unsure at all n locations
ttaattacaaattatgactcgcaatattctcttgacggttacattgatctgcattgttttcatcaccgtcggtggccaatctccgggcaccgcaccgatccatcctccttctcctacacctgcttctacacctcagatctctccgcccgctccttcaccggaggctgatactccttcagctccggagattgcaccttcagctgatgttccggctccagctctgacaaaacataagaagaagacaaagaagcataagaccgctccggctcctggaccagcttcggagcttttaagcccgcctgctccgcccggagaagctcctggtcctggaccaagcgatgctttctctcctgccgctgacgatcagagcggagcacaaagaataagtgttgtgatacanatggtgggagctgcggcaatcgcatggtctctacttgttctagccttctaataaattttgttcttcttttt

SEQ ID NO: 112204 - DNA, 449 bp, Arabidopsis thaliana columbia
cactaagccaactctctcacctacggtttacaagccaacactctctcctccggttaacaataagccaagtctctcgcctgcggggacaagccaacactctctcctccggtttacactaagccaactctccctcctccggtctacaaaaagtctccaagctattctcctccacctccatttgcaccaaaaccaacctacactccacccaccaaaccatacgtcccagagatcattaaagccgttggaggcatcatcttatgcaaaaacggctacgaaacctaccctattcaaggagcgaaagcaaagattgtgtgctcggagagggggtcatacgagaagagtaagaacgaggttgtcatctacagtgatccaactgactttaagggatacttccacgtggtgttaacccacatcaagaacctatctaactgccgtgtcaagctctacac

SEQ ID NO: 112205 - DNA, 308 bp, Arabidopsis thaliana columbia
gcctcacgcatctctctgtttctgtgattctgtttctgtctttgtggttatggcagagacttggacgcttctcttctctgcggggctcctctcacctcacgatctctccttttcgccaatctcatccctccgccgctcgattctcatctcttctttcccgcgttcggccatcacgattcgcggttaaagcatcacattacggtaacttctccgatgacgatgctttcaacttcttcccttggtccgatgcaaacaacgagattgaatgggttcctgaagaaaggattacacttttcacatctgatggc

SEQ ID NO: 112206 - DNA, 382 bp, Arabidopsis thaliana columbia
cgatttggtatttaccggttcagccgacggaacgttgaaagtatggaaacgtgaggtacaaggcagagagatgaagcatgttgggtgcaagtgttaatgaaacaagagaacgcagtaacggcgttagctgttaatttaacggacgctgttgtttactgtggttcgtctgacggaaccgttaacttctgggaacggcaaaagtatttgactcacaaagggacgattcacggccaccgtatggcggttttgtgtctcgccaccgccgggagtttgcttttgagcggtggagctgataagaatatttgcgtttggaaaagaaacggggacggatcgcatacgtgtctctctgttttgatggatcatgaaagacctgttaagtttt

SEQ ID NO: 112207 - DNA, 289 bp, Arabidopsis thaliana columbia
tgctaaggttcctggagttactgatcgtgggttgtttctcaaggaagattaagaaggtacccataatgggattctgtttgatgggagctggaatatctactgctttgatcctaattaactatccattgatttctcaaggtattaaatgataaatttctggatgctttaattttcatatttaaagctaattttcatatccttatatgttaatgtaatcattattcatgataatcatttaaaaatacaatatcttatcttatatatttctttttttattatttatacattt

SEQ ID NO: 112208 - DNA, 372 bp, Arabidopsis thaliana columbia
ccttcccaagaagaagaacaccaaagaagaagttaggttaataatgatgggcagtgtcgaggtgaatctgagggagactgagcggggtcttggtcttcccggtggagatacagtggctccggtaaccggaaacaagagagggttctcagagacgggtgatctgaagctaaatctgaataatgagcctgcaaacaaggaaggatctacgactcatgacggaatgactttttatcccaaggacatgagtgctttggtccaactatccatcctactactactacctcactcagagcatgagattcttctcagaaaagacttttgattttcaaccagtcaggataccatactcttctatcacaatgtccatttcct

SEQ ID NO: 112209 - DNA, 184 bp, Arabidopsis thaliana columbia
atcactgacaatggagcaaccactccttcctttctcgtcgccgctgccttagctcatgcttggggtctctttgtcgctaacgctagtggctctaacatttccggtgtccacgttaaccctgccgttaccttcggtgccttactcgttggttacatcactctcctacgtactattctatactgta

SEQ ID NO: 112210 - DNA, 312 bp, Arabidopsis thaliana columbia
cacgaagcaaccacagcaaggcaatagcgccacccaccgctcgcatccacagctgctgattcgtaggaggagcaggccagggagggattcgttgattttatttggcagggaaggagatccgagaggaagaaggggaatatagatcgatggggaagtacgtggagctgctcgacatgggggtgcgcatcgccgcgcggttccactcccactgcccgcagacggcgaggatgtactaccacccgtcgccgtcctcctcctcgtcgccgtcttcctccgccgtcggcggttcggacgacggcggcggtggttttt

SEQ ID NO: 112211 - DNA, 353 bp, Arabidopsis thaliana columbia
cattggtctctcctccttcctactccacattctccagcttcaagcgtctaaaatcgagctcaatcttcggagattcacgtgacgatgagcaccaaaatcgcaacttaaagccacaaaagctaagagcaatggtgcttcaactgtgaccaaatgtgaaattggccaaagcttggaagagtcttcggcacaagcaactcctgacaagggatcgagaactttgctgaggtgtatgggaggagcaatgcaatcactaactgagtacggtatggccacgtgatggagcatctcaaagtatttgatattcctttggtgatgaacacctcgctagggatttgcttgctgatcaacttctc

SEQ ID NO: 112212 - DNA, 317 bp, Arabidopsis thaliana columbia
tctatctaaaattccttattcttcgcactctaattttttctcacgaactaacaactaatacgaatcgggattatcttgggggtagaggcggttttgagttccgtaatacctaatacccacgccctaaaatcaatcgtgaactgatgattgcagagccgtctcaggtttctttaacgctaacttcattatctctgccgactggaaaccactagttagcccaccgcaatgcccacgctattcccgggcaactgggtctgcttattgaaaagctaccggtattgataaacggattgtgacctctagaggaaatcaaatcg

SEQ ID NO: 112213 - DNA, 422 bp, Arabidopsis thaliana columbia
ctcaactttcgtctaagtcttgccgatttctcgagtttttctttatctacacgtggcactgtgttggctgtaagagctctgaggacagtcgcggtagaagagtcgtccgagaagaagatggtgaaagggattagggtttatgagcatggcggtcctgaggcttctgagagactcagaagatctccccaaagacttcccctgtaccaacgccaaacgtgacgtttattgttattgttttttactctatagatgtgttcctcaacaaagtcactgaaggttgtgaagcgtatgttgcaaccaaacaagaacattttcagccaacttgtagcattaaagacagaccagctattgtcatgattgtagatgtcattgaacaaattcccattcttctttgaattataacacttttttgtgtctacttt

SEQ ID NO: 112214 - DNA, 193 bp, Arabidopsis thaliana columbia
atcagaaagcttttaccctgagccgtcacttttttctccgatcaggccacccaataatacatagttcattgccggagaacaagaggtggtctatcaccccagcacacttagggcggcgctcgctgaggttatttctactcttaacgtcgaatctatcggctgaggcttcttagtctctttcatcatgatcact

SEQ ID NO: 112215 - DNA, 458 bp, Arabidopsis thaliana columbia
tgaattctcctgcacctgaaagaactagatcaggactctccaggaagatgcttcttgctcccaaggatttaagttttgttggctacacatacaagaactttgacgctgtaaaaggattgcgtcattcacttgagatggcaagaactatgtctctagatcgatcaccagctgaggcgatgcctgtggagctgataagcggggaagcagcagaggcacagatggtatcatcgatggatgatccaatgataatttgaaagaaccgatcaaagatataagatcttcctcaggtttgggatcttaaagccttctaaaaaaaaataactgtacagcaagcccagaggttaaagaggaagaagatcaaaatggtttgtgtgggagattgattaacaatgttagcctttcctgattattctgtgtattagaagaagaagacaagagaagggagaaaaagatttaga

SEQ ID NO: 112216 - DNA, 381 bp, Arabidopsis thaliana columbia
ctcctgtggacatccagcttccatgtcccatcatccatttgaagcatccctttgtttgccagacacctccaggtacttggcactaagtactcgtcctttagagcatccaatcctttattgaccaacgaaatatcccggccaatctccagcttgaataccccgtctgtatcttgcatccctgccatgccgtgcaggtatatctccaggttatggtagttcctgaagttcagagaccgtttcaggtatgttgagttcaaagtattgatctctaacacctcgccaatttctgagtacagtaagagtggataatgtggtgcgacatctggaacatttactattcttagaatgtttagtggttggagtgagtcgactacgtttttg

SEQ ID NO: 112217 - DNA, 395 bp, Arabidopsis thaliana columbia
atccttgcatcgttctctttggccccttgcttttgtgttcgattctttccttcaaaccataacaatctcaatctcttattcccagggcagcgaaagattcaagttagttgcggtggtaagagtgaggtgttgaagagtgatacaatggaacctcatgaagcagaaacgttcgtgaacaagagaaccctttatgctcccattgagccatatagcagtggaaatttaaaggtatgagatgttcacactctctactgggagcatttaggcaacccccatcggacacccgtttgtttttttaaatttaataccgcgctggtagccacattacagtctgtattctatttttatatctagagattatttatatttttttcccatcaatctttacactagta

SEQ ID NO: 112218 - DNA, 314 bp, Arabidopsis thaliana columbia
aacgtgctttcgttcactggtatgtgggtgagggtatggaagaaggagaattttcagaggctcgtgaggatcttgcagcattggagaaggattacgaagaggttggtgctgaaggtggtgacgatgaggatgatgaaggagaggagtactaagaaggttgtcggttttatgtgggatttctattatctcgtgtttgggtgaataggctcgaaacttctagcatcagggagaagtattcacacagaattacagttatcgtattagagagtgggggaggccaatttgtctagttcgcttggattctgataatattt

SEQ ID NO: 112219 - DNA, 217 bp, Arabidopsis thaliana columbia
  unsure (1)..(217): unsure at all n locations
ntcgagcccagcgnnngtccgcccaagtaaggacccaaaaacaccaagtagaggagaaaggagtagtagaatatggtncgacgaccaaccaaccagtaagtaagcggaagaccattctatcgacccagatgggaggaangtatcaganatgcagtcttttcagaatcttttcgacattcaangnnaagttggtcacccaaggagtcntttcttacag

SEQ ID NO: 112220 - DNA, 163 bp, Arabidopsis thaliana columbia
atataaaaactcggtgggatgggtttggaaacccctacccaagacctgcctccgggatcaatattatagggagtccgggtcaaactacttaacgctcactaaatagcactaggaagtgaactgtcgggagaggatgccaaatatacgttaaagacttacattt

SEQ ID NO: 112221 - DNA, 295 bp, Arabidopsis thaliana columbia
ctgcagctaaagtcaggagagctcaagatgctgttgtcaatggacgaccattctcagaaacccgagttgaagttctttacgcatgaacgaacagcttcaaaccgatgatgtcgatgttcccttaaccaaagtcagaccggttaagaaagtagcttctcgttgtcgtcaccggtgatcgtggattatttggcgttactatctatctttatctattttatacttatgtctttattattatttctttttccattttttccttttctttttttattttctttctcctattttaatttat

SEQ ID NO: 112222 - DNA, 239 bp, Arabidopsis thaliana columbia
tgagagagcttcaatcgtatttgaagccatcagtctcttgttcgagagatcttttcacttactatgtctgctaaatcgcaggtcaggagaggtgatgagaggtctgtcgtctgagccttcaaagttgagggggttatccgaatgttggagatcataaagatcacactctaacatgaatgagcgcatgtcaatcccagtttcaagcttttagtctagttggtccaccatttcttttcagt

SEQ ID NO: 112223 - DNA, 365 bp, Arabidopsis thaliana columbia
cggaatggaattccgggccacgcgtccgaccagaaaccctagattcgcaatcaaatgtcaaatattcttaaatcgaatccgatacaacaaagggtccatctcatccttctcaggggagcgcttcctacataaaaaaaggttcaccggcgtcttcttcttcaccggctaagaaactgagtgctgctacatcgtctaacatcaaagcgatagctgaaacttattcttgcctagagtctggtaattctctctcagattgaacccttttccttgtttgtcagagaatctttggtctgcacaaacccaaatgagctagtaggtgctacttgtgggtgaactttcctgatgaatgcatacggtgaaatttt

SEQ ID NO: 112224 - DNA, 460 bp, Arabidopsis thaliana columbia
cccacgcgtccggcagacttcttgaatatgatgaaagggtttgttgctaatcaggtacatataaggactttgactattattaaacctctgtctcttcatagaattaacgagagagtgtaaagcaagatcttttagctctgaaatggaagagaaaagtcagtgagtgttataggggatgctatgatttggggactttctttcatgaaatggattcaccaaaaggaatatgatttgagatatttgaatggatgcttgaaaattggtgaaatctgctctcttgcaatgctagtgaatgctgagaaatctgagtgagatgtttgaaataaagagatgaaaatatgtaaaaaggtgtgaaaacagagttgttggtatttgaatgtgcaggttggatatgcagagaagatcgccaatgtgtggacaaaggttgctgaggaaacaaggcaatacgatagagagagct

SEQ ID NO: 112225 - DNA, 289 bp, Arabidopsis thaliana columbia
gtgatgtcctaagcgtggctggtttcaagaacaatgcgcttcagttcagcttcatatgccgcaggaacgtgttcttaagcattgagtgggacaaaaccaatgaggttgagcttaaaaacgcagtttaaaacgcggcaacacaccttgatacgcttgatgctttactctccgagtacactagctatgcggacacattatctatcccggaccactatgttttattctgggagctctgctggaacggttacaagataatttctccctatgaattacaggcttgctgtttaac

SEQ ID NO: 112226 - DNA, 409 bp, Arabidopsis thaliana columbia
ccctataatccaccgcgatcttgaaccttcaaacattctgcgggatgattcagggcatctgaaagttgcagactttggagtaagcaagcttgttactgttaaagaagacaagccttttacatgtcaagacatttcttgtcgatatatagctcccgaggttttcactagtgaagaatacgatacaaaagctgatgttttctcatttgcattgatcgttcaggagatgatcgaaggccgaatgccgtttgctgaaaaggaagacagtgaagcttctgaagcttatgctggcaaacatcggccattattcaaagctccatcaaagaattacccacatggtcttaaaacgttgatagaagaatgctggcatgagaaacctgcaatgtgaccaactttcagagtgatcatttaa

SEQ ID NO: 112227 - DNA, 458 bp, Arabidopsis thaliana columbia
gaaaagagtaaaaaagcacatggcctcattaccattggggcctcagcctcatgctcttgctccgccgctgcagcttcacgacggcgacgctttgaaacgccgtcctgaattggattctgataaggaaatgtctgcagctgttattgagggaaatgacgctgttactggtcatatcatttccactactattggaggcaaaaacggcgaaccaaagcagaccattagttacatggctgagcgggttgttggaacaggttcattcgggattgtttttcaggcgaaatgcttggaaactggagaatcagtagccattaaaaaggtcttgcaagatcgacgctataaaaaccgtgagttgcaactaatgcgaccaatggatcacccaaatggcatcttcttgaagcactgtttcttctctacaacgagtagagatgagctcttccttaaccttgttatggagt

SEQ ID NO: 112228 - DNA, 311 bp, Arabidopsis thaliana columbia
aacttgttgtagaagggaagcggcctatgtaggggcaccaagctgacggacacacccatgctgactcgtccgtcttagatagaggcgcctaacatgaactcactggccgtggtgttacagcgaaaggaatggaaaaactaggtgggcacgcaactttacagacttgtatcacaaccctcgatgaacagctgacgacaactaaccgagggccgaaccgatcggactaacgaacagaaaccaaagctgaatagtcaatgagactacaccatggaacagctcatataagctcgagagagaggatgttacacgca

SEQ ID NO: 112229 - DNA, 457 bp, Arabidopsis thaliana columbia
caaacagttggtttcttgccatcgcaaagagagaaaggagatgatgttaacatgcgcatcccaagaacccttttgccccaaccctgcatttcaattatcgctatttcgagacagatgctccaaaggatgttcctggagctccaaggcaatggtggtttggtggtggcactgatttcactcctgcttacatctttgaagaagatgtcaagcatttccattcgattcaaaagcaagcctgtgacaaatttgacccttccttctatccccgattcaagaagtggtgtgatgactacttttacatcaagcaccgtgatgagagacgaggacttggagggatattttttgatgatcttaatgactatgatcaggaaatgcttctgtcatttgccactgaatgcgcaaactcagtggtgccggcttatatacctatagtagagaaaaggaaagacatggaatt

SEQ ID NO: 112230 - DNA, 377 bp, Arabidopsis thaliana columbia
  unsure (1)..(377): unsure at all n locations
acggggcgacccacacanacgaaaagagagaaangnntaacttttacatttcgtttattacaccccgccactccctcacggttggtttattttcaagaaagggcgagacccacacaaaaacactaatattaatcaatcttcaattttcatatccctcaacttctacaaatttttaacgacttctattactttcctcattatcacacaatttaccaaaataccctcaccatctttctttttacaacctcatcaaatatatataatccacttacaatcattcatatcaatctatctttacaacaaacatcaaactccatcctttctaccctttattattcatcacacctctctatctattaaaatatttattcacattc

SEQ ID NO: 112231 - DNA, 321 bp, Arabidopsis thaliana columbia
agcatggatagactcgcggtgctaactttctctgtctataggaactacacctttacgcggtgtcgtactgaattctatatttcagacgcataataatcgactcccggagagggaagcgtgaacaaggagaggatgttgccatgactatagagttcatgttccgggcggaatcataagccgtgcatggcgataacccttatcgagtctttaccgagctaaatacccatggcgacactctttgctttggtggttgacaacaaggaagatggctaaacgtgcagattggtgatcgtaacatcgacgcacgcacaacatgtattg

SEQ ID NO: 112232 - DNA, 271 bp, Arabidopsis thaliana columbia
  unsure (1)..(271): unsure at all n locations
ggggcgancacgcgttcgcaccacccctgagaactgccagaattgcaaaatctttttcatcgcatggtcacctagtacatcaagagtgaggagtaagaggttggatgcacgctcaaatgacaggttcaagagggaattggatggtattcatgctttattgcatgcaacatatacttgttagattttttttcttcatcatcaatgtacgattcaatttctgaatggtacttacctaattttatattttgttacacatacattcttattttct

SEQ ID NO: 112233 - DNA, 477 bp, Arabidopsis thaliana columbia
agctccactacattctatgataaccatttttcgtagtcttagtactttggtcttaggtgcataccgaagacaccatgatgagcaatgatagtcgcgcggatgagagtgataaagatcgcttgataggctgatttattgatagaacgatagacacgagttcatgtcttagtttccttcgtgcgtagagcactctttctactttatctagatttagcgtctctcagatcgagtcgcagggaagagtcaaatgctccacttgttgcaagagcaatacatggtggattagttatacaacaaattcttcaattccatctatgattcttttatgtacggacgcttgcagctcaacattggccttgctcgaactccacatatttgatggaatatctggaatttttttgcttgcaatatcaatgaaactgtcataaacgaaactgctgatgccttggtttcatcatatctgtctgttttatgtta

SEQ ID NO: 112234 - DNA, 400 bp, Arabidopsis thaliana columbia
gtgcttcgacaaaagctcttagatccacagagtcagaggctcgtctcttgtttgatcttggtttatgagcgggaaggagaaacccactctcggaggtacgcggattaagacccgcaaacggaatattgctgctcctctggaccctgcagccttttctgatgcagtggtccagatttaccatgataatgctggtgatctggaacttgttgccaaaagtattgagtcatcagaccttaatttcacaagatatggtgacatcttctttgaggttattttcataggaggacgcacacaacctggaacagtgaaatcttgtgaaagagaacgtcatacttactctgttattgattgtgaacccaagcggtgaagccattctgccatctgttggctacatacagaa

SEQ ID NO: 112235 - DNA, 317 bp, Arabidopsis thaliana columbia
gacaaagctcgacaagtcgtcggcggcggtgtaaaaatagtcggagctatggcgatgcatgccggagttggcttatccaggatctgtgtctgagccggagcaggttacactggtacgatcatgatgaagaatggaaaattgtcggatttgttgggtgaattgtagagtttgtagaaggttttgggaatatttggagaagtgttatttggtattattttatttcaattgattctttaatttgggttaatttgttgtatttatgtattttcgtttttatgactttatttgtttaaattatagtaatttatattatttat

SEQ ID NO: 112236 - DNA, 441 bp, Arabidopsis thaliana columbia
aattgaagaggaagaaggaggaagctgaaagggatctgttagggtgacgcagccggtgctgttgggtgcgacatcttggatagcggtccgggatcaaaatctgtcgaattggagacgcttgccattgcacacgatgggcgatttcaacctcgctctagtgattgtcgcgatcgttgtttgcgtcatcgtattcatgtctagcatcgatcttctcgtcaactatcagcattcagatgatgcaaaccatgcttatttccccatatgcgtcgttgtttttggcctttctattgctatgatcttgattctcatgtaaccggctgatgtggccaatcggcatgcttgtcgacatgctatatacaatggagcttgcaatctcaccttgcccatgaaggatctttggcttgtttttatttcggggacgctattctcggtgtcttggca

SEQ ID NO: 112237 - DNA, 391 bp, Arabidopsis thaliana columbia
acatttagttgagagagagcgagactcttttccttctaaaaactctctttctttcacacaaataaagcatgagggacctgaaggaatatgattacagtgcacttttgctcaaccttaccacctccagcctcaacaaggcccagaggcgttggcgttttgcctacgctgccatctactctatgagggctatgctctctcttgttaaggagatagttcccgcaaggattgatcccaaaacctcagatgcctctctctctctctcctacacagccctcgagtccggtgagggagcaaagatcaactctatgcctctctcttacgttcctgccattgatcaagaacaacttgtggagatcatgaatggtaaggacttactcggtcattcaaactc

SEQ ID NO: 112238 - DNA, 335 bp, Arabidopsis thaliana columbia
ggcaaaggcgaacggagtcttggactacatgaaagaaaggggtttcacaccaagcatggcgaccgacaatagcctcatgtatatgcgtaggcggtctgcagatttcggaaaatcagaggaaatcttgagggaaatactggctaaggggatcaagccagacatcatatcgtacaacacagtcatttacgcctattgtagaaatactcggatgagagatgcatctagaatattttcagagatgaggaattcagggattgtccctgatgttatcacctacaatacgtttattggttcttatgcagctgactcaatgttagaggaggccattcgcgtcg

SEQ ID NO: 112239 - DNA, 373 bp, Arabidopsis thaliana columbia
acttccatataattaaaacacagagagacgaagtaaatcgagatctcgaataatgcgaatctagaggatctttacgaattccatagtcttgagatcgaaaggtttctatcgattcgttggtcaagaggagattgtgcgtgtgattcgtgagcatgggctgttcgttttcaggattgaacgcactttacgacgccgtcaacggtggaggtgacgtatggatcaatgagaatcgattcaggatcgtgaggcagctcggcgaatgaggtttcgcattcgtctttttggtcaaggtaattgtttgcttcgcttgctgggacgtatttcttattattctttctttttaattaatttgttcctttttcattctttttct

SEQ ID NO: 112240 - DNA, 392 bp, Arabidopsis thaliana columbia
  unsure (1)..(392): unsure at all n locations
tttttcttgaataaaatcagaattacaaacaattttggtttttcaaaagcttcctctcattgagcttctggttctcctgaccatagtagagggtccagcaaatgcanattgacctgtttgcccgccgtctaacaaactaagccgtgcaagtttccctaaaggttttttattttacacttattactgcaacataccaattcttatgtgcgattaatgatacacttcgtgttccatccttatgtttcatcaactagtttaatatattcaatcattttctttaatctatttctgctttatcatatttagtttttatttttagtgagtaggtaaattattatttttacttccttttattaacttatttttcttattttaattctttttcttttcat

SEQ ID NO: 112241 - DNA, 233 bp, Arabidopsis thaliana columbia
gattagctacatagaggctcaagggagaatgaagagaaacgatagggtctggcacatcgctttgggaagcggattcaagtgttacgccgcgggttgcaaatgtaaccacacgatcaagacaccaaccgatggagcgaaatccgattgaatcgaacgataccctgtctttatccctgaaggtaccaaactatcaaattacggcttgttgatcctgggacgaggacaactattac

SEQ ID NO: 112242 - DNA, 258 bp, Arabidopsis thaliana columbia
ccaaatttgatcgtaaaaaagattcctatcttcttcaccattcttttcttgaaaaagaatcatgggcttatcttatagcgaggccggagttattatcgccggagttatcttgaatgattttatcaaatcagttcgttcttttcttgatattcgtcgtttgtttggttcggcatcttcagggagcactatcatcgacaagattccgatggacgatatgcttccggcatcaaagttcgaggatatatcatcaagggttaa

SEQ ID NO: 112243 - DNA, 421 bp, Arabidopsis thaliana columbia
cggacgcgtgggcaaaaaaatcatcgtgaaacgttcgaaggccattttctttggacgaccatcggcgttaaggagagagcttagatctcgtgccgtcgtgcgacgttgttttccggcttgatcaaaatggggttgtcattcggaaagttgttcagcaggctctttgcgaagaaagagatgcgtattctgatggttgggctcgatgctgctggttagacgactatcctctacatgctcaaacttggagagttcgttaccactattccaaccattgggttcaacgtgcgagactgtgggatacattaacttctgcttgcccgcgtggaattttggacctctgcctgaggttctcaattctgttagctttgtcatacgattaagcagtgattttttctattttttgcctgccttaatttttgcc

SEQ ID NO: 112244 - DNA, 456 bp, Arabidopsis thaliana columbia
gaaggaaccttttagcactagcgaagtcaagtgcttgatgatgcagctgttggatggtttgaaatacctccacacaaattggattatccacagggatctgaagccatctaatcttctgatgaacaattgtggggagttaaaaatatgtgattttgggatggcgcgccagtatgggagccctatcaagccttacacccagatggttattacccagtggtacaggccacctgaacttcttctaggagcaaaagagtactctacagcagttgatatgtggtcagtgggttgcattatggctgaactgttgtctcaaaagcctttgttcccgggtaagagtgagcttgaccaacttcagaagatctttgcggtccttggaacaccaaacgaagcaatatggcctgggttctcatcatttccgaatgctaaagccaagtttcctacacagccttacaatat

SEQ ID NO: 112245 - DNA, 329 bp, Arabidopsis thaliana columbia
ccaagttcatggggctcaatgttcagatggttatccttgggactggaaagaagaagatggagggtcagattcttgaactagaagagaaggggccagggaaggcggttggagtggcgaaattcaacgtgccattggctcatatgatcactgctggagctgacttcatcattgtcccaagcaggtttgagccgtgtggtctcattcagctgcacgcaatgagatatggaaccgtccctattgtggcatctactggtggacttgtggacactgtgaaagatggctacacaggtttccacattggaagattcatcgtcaagtgtgaagttgtt

SEQ ID NO: 112246 - DNA, 334 bp, Arabidopsis thaliana columbia
gaaggactagcctacggtacgaggctcgtgtcgtgtgatgtgctaccggagtctattgactggaggaagaaaggagccgtggctagtgtcaaagatcaaggtggttgcgggagttgttgggcgttttcaaccattggagcagtggagggaattaaccagatcgttaccggagacctattaaccttgtcttaacaagatttggtcgattgtgactcttcattcaactatagttgttcgtttgtcttatttactatgcttttgagttcattatttcgatttgttgttttctttctttctttttttttttttttctagtttgtctttgttccttttt

SEQ ID NO: 112247 - DNA, 339 bp, Arabidopsis thaliana columbia
cttgtctgacttgaacccaattcaggtcatcattgacgccattgtcaacagtggtccacgtgaagatgctaccagaattggatgtggtggggttgttaggagacaagctgttgatatctctcctctaagacgtgttaaccaggctatcttcttgattaccactggtgctcgtgaagctgctttcacaaacatcaatactatcgctgagtgccttgccaatgaatcaagccacccaaactttttctatgagcacaagtatactctacagcagatgatatgtagtcagagagttgcattatggctgaactgttgtctcaacctttcccctgtccgttacaa

SEQ ID NO: 112248 - DNA, 318 bp, Arabidopsis thaliana columbia
ggtcatttactcgaagctaaatgatctcaaaattgatggtatacaagaactagaatctgtgacgagtgacatggttcgtggaattaggactgctacctagccaatattggcgattaattcttatgtactagctaatggttggatcactaaatttgctgatttatacttatcttacatttgttaatcattcataatttatgttgagactctttcttacctttctgaccttaccgatttcgaattggttaaagaagttgacttccttattcgcaacaagtggttttcttgtatttaatttcaattggatcacagattttt

SEQ ID NO: 112249 - DNA, 233 bp, Arabidopsis thaliana columbia
cgtaattgtgcttgtttcgcctagaatctctcgttcccccaaatatctcactctccggggcaagcttcgccgccgggaagatcttaccctatttcatcttccctctcctctgatatacccataaaaacacaaaaaaaacgaaaagataaaaactttggctttagttttgttgattttgtcattcaattcgatttctttttcttctttcaaattctaaggttttcaatttggtt

SEQ ID NO: 112250 - DNA, 401 bp, Arabidopsis thaliana columbia
tatctacttcgcaactaaaactcaaaacaatcaaagaaaaaccctaaaagaaaatctctatatcgaagatgggagttttgaagagaggagtatcgagcagcagaggacttggtggtgttcttagagagcaaagagctaagctttacatcatcaaacgatgtgttgttatgctcctatgttggcaagattgatcttggttgattcaagtgttgatactttgatgcttaaccggatcaaagcgacgattgcaacttgcaagaagatacgaaggacgataccggcttgggtttcgcttgcaagaggatttgattgaggatactggtctgagttttggaagtagattactctacttgcttctctgttgtgttagttcttttcttttattgtggttttttcttttt

SEQ ID NO: 112251 - DNA, 172 bp, Arabidopsis thaliana columbia
tcttcttcttcttcttcctctctgtatttttctcattctcttcgatttgtttgcttgctagtgactactgagtgagagagaaaagagacaattactcctttcattaaatcacacacatcgaccgctgatctacttacttgttcttaatttccactccccttattctccttcc

SEQ ID NO: 112252 - DNA, 407 bp, Arabidopsis thaliana columbia
gttgagaagaagaagaagaagatgagcaccaaaagtgttaagatcagtgagactcagcaatctggtgagaagaaaatcatgggaaggaccggcaagaaaagtcttagcttattaccatctttgcctccaccctcagaggtggttacagggtcagatcctaggccaataagacagactacttccaggtccaagactagtttgcctgagaagaaacagagtggttctgctaatcttgttactaatccgaaacccgaaagcaagattagaccgaaaaggattggtttaaaggttactccaccttctcctccaacaaagcagctaatgaatttcaagaaagggaaagttcttgaaccaaaaccagaagattccactacaacatttgtcaatttcaagaagataggtgttca

SEQ ID NO: 112253 - DNA, 341 bp, Arabidopsis thaliana columbia
ggtagtgttggagtaagaaaacacttttttacacgtcggatatttcagaaaaacaccttattcagctaaagtgttgaacggtgatctaaaagctcgggggatgaagggaaattggtcgatcggcccaaaggttctttattgccagtttttcacttttcgttccttgacaccatggtagggattatttacttccattcgaccggttgttttggccccaaacttgatttcggtgctaatcgcttgaaatttgttgttcactggcttcaacattggtccaaccattggttttaactttttcaacactttgttttctcaatggaaaaacctctgtttggaagctg

SEQ ID NO: 112254 - DNA, 322 bp, Arabidopsis thaliana columbia
accgcgcgaattccggtcgacccaccgtcggaactatctttcaatctatcttgattccaatccattcttcttcaagtgccggattctcggatcggatcttctaagtctagctggggataagggttactgtcactactcatgcctcaggctcgattttccgaccttgtacttcaaagccaaaattcctcaccggttcttccggtaggctgaaccgcgacttgtcactcacatagatcggttcacatgccaaatcctcaaggtttactgatgaaacttataaaaggctaaagttgccccggttggcatcccctgattatctcac

SEQ ID NO: 112255 - DNA, 418 bp, Arabidopsis thaliana columbia
tccgggattcgccgcatccgcagccacgcgtgcggcagctgtcgacccatcgggcctcgctactgacctcaaggcttacgattagtaaggatgtgaagaagttgttgggagttactgcttaagcaaggcaagattgcataattagacaaataaaagctcattagtattgtattaccaatactgtgtagtaagctgagttcgtgagtgtgtgcctttgggaccgcgtacaattataatccgttttttagcggccaaactatgtaataatcgtagatctaaatatcagatttcccgttaccttactaagaaaaaacaaacataatgataactaaccatcggttcttaaatggaatattagagatgttccaaagaaccaacctaaataagggtaaaaaacttacttcttacattgtttttt

SEQ ID NO: 112256 - DNA, 458 bp, Arabidopsis thaliana columbia
aatgcagcaggtgctaccgcaaggatgattgttgttcatcctcaactagtcccgctaaatcaagtacttccagtgttcttaagaggtctacctctaaaggaagatcaagaggagtccatggctgtttacacctgtatatattcccttgtttcgtcatccaatccacagatcttctctcatgttccggagctggttaaaatctttgggcaagtattggagtcgccagtcgaaaaagttgaagtgaaagcaattgtaggcagaactttctcccatctaatctcggtttatgggaatcagttgcagccaataataagtagtctaccgccttctcaagctaacgttctcgctgcgtttgcatccacgagttgattgtcgcttgtgatatatttaatatctcagaagcgaaaactgtcttcagcttttgtttttcttttgaagtctattctttgctcaattga

SEQ ID NO: 112257 - DNA, 131 bp, Arabidopsis thaliana columbia
  unsure (1)..(131): unsure at all n locations
cggaaaanccaagaaaganngacnancanacnggagncnnngcaagcaaaannaccccggcaagggaggggaaaccagnncngagggagcggaaagangccaaaaccaaggaaccnaaggaaaccanggag

SEQ ID NO: 112258 - DNA, 198 bp, Arabidopsis thaliana columbia
  unsure (1)..(198): unsure at all n locations
aaaacaccnccnncnnnggaacaanncngncaancnccagcggcggcaaaaccaacactggcaaangcaccaactgcggaaccgcganggngnangacncgggnncnaggnngancacanngccagaaggaagccaagcnnaaacccngngagcnagaggaagangggaaaagaagaangggnnnngncagaagcaaa

SEQ ID NO: 112259 - DNA, 280 bp, Arabidopsis thaliana columbia
  unsure (1)..(280): unsure at all n locations
aaaaaaaangggcgncgaggganagagacgaagaagaagaagaaaaggccgngccncaaccncgccaccaacgnnaaccgggacggcgncganacancnnccanncncncggaagcnaccnccaccgncgcgaaaancaacggcaagccngagaaccangagaggangggcnngaaaggcncagngccnangncannnggcgggaccgagganccngcagcnnagggggaaagagaagcaaaacggggccccaaggcggangngaacaagaagcnaagcg

SEQ ID NO: 112260 - DNA, 164 bp, Arabidopsis thaliana columbia
  unsure (1)..(164): unsure at all n locations
ggngaanganccnaanccgnnnagcnnnnaaaaaanaaagaagacanannnancaacnngancaacnggagcaagaagcagcagagaggggccncggccaagaacnagagnnnngagaanggcganggnancaggaagacgancnacncnaaaccccgacgcac

SEQ ID NO: 112261 - DNA, 231 bp, Arabidopsis thaliana columbia
  unsure (1)..(231): unsure at all n locations
gaaggcccgggccgacccacgcgnccgcngagnnnggnggcncngngaanacggcaganggngngnccggnccagnnccngccacnggaaagnnaaagggacaggagggngagaaanangcagacccggctaaaaacaangangnggnnnnngaaccagaagnngggncaaaannnncaagggacgcccaacagacnancaaagcaacaaagaangaggacancaaggagg

SEQ ID NO: 112262 - DNA, 354 bp, Arabidopsis thaliana columbia
  unsure (1)..(354): unsure at all n locations
gcaagaagcaanncnggagctcaancagcaacaacatctantctccntctnggcttagntaagtccttcgccctcccaagaagaagaagatgtcttgctgcggcggcaactgcggctgcggcagcggctgccagtgcggcggcggctgcggcggatgcaagatgttccctgatgtggaggccacagccaccaccaagaccttcgtcctcgctgctccatccaacaaggcgagctctggaggaatggagatggcggnggagagcggcgagaacggcggctgcggctgcaacacctgcaagtgtggcaccagctgcagcggctgctcctgctgctcctgcaactgaannctatcgc

SEQ ID NO: 112263 - DNA, 239 bp, Arabidopsis thaliana columbia
  unsure (1)..(239): unsure at all n locations
gagagagagaagcgcgangaacacaagngnncgagctgnncnnncctccangaaagcnccnncagagcangacactacncagcagcaagaagagaagaagaagaaggagncncaaggcaanggagcngnngcnaanncaggaaaancncnggnnaaacgccgacgagcnaacaaagaaaagaaaagggannngcnacaagangnnganaagcnnaagaggaagcngagacaggaggaga

SEQ ID NO: 112264 - DNA, 207 bp, Arabidopsis thaliana columbia
  unsure (1)..(207): unsure at all n locations
cgncngaaaaaagggggaccagnnnccgncgccgcnnncnncgannnnggacgccgccgcgggcggcgncnnccgcgcagcaggggaaggcacacaggnnaacngaaaganggggcgggggagaaccaagacggggaagaaancnnccgnnnngncancgagaagnaccacncncgcangncgcgggacgnccacacgaacaagaaa

SEQ ID NO: 112265 - DNA, 309 bp, Arabidopsis thaliana columbia
  unsure (1)..(309): unsure at all n locations
cggaaacacacacaaaaaaaaanggcancaaccccacnccncaaggcnncnccggngnnggacagagccgaanggggcaagggacagggcgnncncnnccgncagcncacnnccgcnncgggcgncccccgcaaccgngccaccnnccncaccgnccgagccgcnnccnccnacgccgangagcgngnnaagacagcgaaaacnanggcgnnncccggacgaggaagcnnggcgagggacgagacaaacgcgacnngcgggaaacgnnnnnnnncgagagggcnagagaacacngaggcaaancggcaa

SEQ ID NO: 112266 - DNA, 231 bp, Arabidopsis thaliana columbia
  unsure (1)..(231): unsure at all n locations
gaagagagagnacgaaagcagncaacnnnggaancggaggcaccagcgccaacaacaaggggggcggggcncgncaggagnngnngcncncgggcgncgagagccancaccaccgnccggnnnangagcaacgnaccggaggacacggnnnacngnggaccgaaaccgcagaacncgaancanagagngacnnngacccaagngagacagaagcancggaaaggggagccg

SEQ ID NO: 112267 - DNA, 187 bp, Arabidopsis thaliana columbia
  unsure (1)..(187): unsure at all n locations
ggagaaagcagcaaagaagaaaaanggcagcaacaaaggcaacaccancgacggggagaggccncggaggagcgggcgggaccaccaaacccnncncnncaaccnnagaaaaaccaacannaagcgccaagaacccnnngagacncgccagngcancgggaggaagagacacangcnnngagaggaa

SEQ ID NO: 112268 - DNA, 200 bp, Arabidopsis thaliana columbia
  unsure (1)..(200): unsure at all n locations
aacaaancnnaaacgnnnnacnnngngcngcactacncaaccncaanggccgccncaacaagggcgcgcnccnccccggccggcggcgggaaggccgncaagcnnncccccgcggcagcngaagnccnnggaagcggccgnnagacaangaagaagacgggggccaanccnnngggcccancaggcagcccaagagacgg

SEQ ID NO: 112269 - DNA, 189 bp, Arabidopsis thaliana columbia
  unsure (1)..(189): unsure at all n locations
cnnccnnnngccgcggcncaaannggncaagccnnnagaaangaganancnccncgacaagggcgncnnagagancgngagaggaggcnggcagaganngagcacnncggngagccagagaanaagncacancccaagnnncncngncnnagcaaaannggaannccnangnncccaagggaagaacaa

SEQ ID NO: 112270 - DNA, 371 bp, Arabidopsis thaliana columbia
  unsure (1)..(371): unsure at all n locations
gaaaaaaccccnatannncctanccaaagaaagactagagagnggnagagaaanggagaanaaaacggaggaagaggnancaancancaaagnnncnncccnnacccgcancgaacncgacaacccngancnncancaancagcngngnnacncaagcaggcanggcncganaggggannnnncaaaggcanaaancanggnanaagngaggaacccaaggangaggcaggcgagcacagcaagaagnacggcgcacnncccccggaagagaagangaaagncnggagaaacgaaaagnancgaggcnaagcaccannccangaancccncnnagacccngaaaaccaagnccgaggggcccacaaagagg

SEQ ID NO: 112271 - DNA, 231 bp, Arabidopsis thaliana columbia
  unsure (1)..(231): unsure at all n locations
cgaaaaccgaaaagaagaaaaanggaggagaaancgaagangncnatagcgnnagnggagaaganggaggccaaangnggaagagggcggggaganncngnanngnaagcnacaaaaancagcgagggggaggcannncaancgnngccggaaaaagcaacggaganannaaaanngaancaagccgcgaangggncaaccgancnannaannngaccagagaggaacgag

SEQ ID NO: 112272 - DNA, 166 bp, Arabidopsis thaliana columbia
  unsure (1)..(166): unsure at all n locations
gaagaagcaaaanggccacaagcgcancagcnnagcgcncaccaaccacanncnccacggcaagcgcccacaaaaacccgggcgggancncannccanggccnncagccccnccgncaaggnggcnccnccnccgccccacccaaaccagcaaccagcgggagaaa

SEQ ID NO: 112273 - DNA, 210 bp, Arabidopsis thaliana columbia
  unsure (1)..(210): unsure at all n locations
ggcttcagngactctaggnncangganngnngttcaccaccacaancancancanccancngcaagccnaaccaaagccagagccagancnngnccnanaacncngactaaacccancnccnnncgancaaaacgcaccgnnncaacagcnncnncaancgnnncnncnnccgnggggacaaaagaagacaancnacgccaancngaacc

SEQ ID NO: 112274 - DNA, 166 bp, Arabidopsis thaliana columbia
  unsure (1)..(166): unsure at all n locations
acagaaccggccagcngagcnnanngccaaggnggnggacgagaaacgccgggcggggaanaagggnaccccngaagaagaangggagagggggcnngaaaaagnnccggnnnngnncaganagaaccaggggaaagangngnncgaagcaaggnacaaaaaggag

SEQ ID NO: 112275 - DNA, 245 bp, Arabidopsis thaliana columbia
  unsure (1)..(245): unsure at all n locations
gccgatccgcgcccagcgtcggcattccagagtgttgcatgcggtgaagaggaggggtatcagagggatgactctgctttgacggagctgaatgattaggaaagtcaatcagacgcaaagagcgaggtgcacggcgtgtgactgaggattgtctataaggtagcnaccaccataattgcagacactgtgaataaggaggtgctgtttctacctaaactcaaggcttaccataggagtgcagtaac

SEQ ID NO: 112276 - DNA, 147 bp, Arabidopsis thaliana columbia
  unsure (1)..(147): unsure at all n locations
acannnagnngagagagagcgagacncnnnnccnncnaaaaacacncnnncnnncacacaaaggaagcangagggaccgcagggaggangannacagngcacnnnngcacaaccggaccaccnccagccncaacaaggcccagnggc

SEQ ID NO: 112277 - DNA, 200 bp, Arabidopsis thaliana columbia
  unsure (1)..(200): unsure at all n locations
aaacaaccaanatnnnnggagnnnaaccctaagacatagacgaaanaagaaagaanccnacagagcgannnnnaaaggaaagagggngagncgaccgggncnacgaancnaggcnaacgcncaacgaannccacgaannnnaggcggnanaggaangggaatccnnncnacnncncaaggganaaggacagaccgagaag

SEQ ID NO: 112278 - DNA, 272 bp, Arabidopsis thaliana columbia
  unsure (1)..(272): unsure at all n locations
gatgcgacccgaaangggagaaaaaccgacaacggnnagccganggcgcgancgggnnnggcaaacacgcaancggnggncgggacggnaaaancnacgnggngacggacncgagggacaaagacgnggnnaacccnaaacccnnaacccaaagacacgcggngnnccangacgagccacnanggancancgacgcgcgngncagggncanaaaacgaaaagaagagcngannacgaacncgaagaagagnanagacggccgnggagcgagc

SEQ ID NO: 112279 - DNA, 192 bp, Arabidopsis thaliana columbia
  unsure (1)..(192): unsure at all n locations
agcagncagggcgcatccgaaggagaaaagggngagaancngccaccaggggncgnangcacagncgaggaaagggnannncagccncngcgnngccagacaagagancgncnccgagccggcncaagaccaccgcncaggagggggnngaancaancngcaaannngccaaaaaggganngaccccnnccc

SEQ ID NO: 112280 - DNA, 174 bp, Arabidopsis thaliana columbia
  unsure (1)..(174): unsure at all n locations
ctnagncagctccagagcagaggnnncanacgancnngncnnggaagcannagnaanagcgccaaccagganggaacacaggggcnggagncacaacagcgagcggggacggnagaagcagaacnngcanngcnacnnagaannaggcacaagagcggaaaggcnggaggccag

SEQ ID NO: 112281 - DNA, 152 bp, Arabidopsis thaliana columbia
taaaaatcattcgtgttcctgtagtgagattaaggtttggagaagtagcgggagcgagttcgggtgttgttttaccgggggggggggcggaagaacgagaatagaacctacttgaagcaccaatggagtttgaaagtggaggagcctttgtt

SEQ ID NO: 112282 - DNA, 236 bp, Arabidopsis thaliana columbia
  unsure (1)..(236): unsure at all n locations
ctaaanaaacccannngngnnnnaaanctaaaanggctagaaannncgagcccccnnnganncgcnnngnncnggagcgggccacggcagcaanagncanggcnagaaaccnngaagaggaancaagnggnganacagagnncannaaagccccnggggagacgacnncngacccagaccgangcnnccagacncngncnncanangcaagcgagagcaagaagcagccacgnaag

SEQ ID NO: 112283 - DNA, 190 bp, Arabidopsis thaliana columbia
  unsure (1)..(190): unsure at all n locations
caacnagcgaggagaancaacnancaagcaanggcancgangaccangaccgcnaccnggggggcggccgacgccaagggggggggagccaccgncggacnaaggcncnccagagncagagccnccacgagcgacaacncacccagagaagaagagcaaggaacagancagcaccacaangaggagggac

SEQ ID NO: 112284 - DNA, 252 bp, Arabidopsis thaliana columbia
  unsure (1)..(252): unsure at all n locations
cccacgcgnccgnccatgncgnnnnngncgnnnatggnngagactaggacggnatcngancgnctgcgagcccccaactgncgggcgggagnaaggaaaacanccnnggcaaaggctttcgcagnngnnncgcnnncataaanccaaggagagagaggagngngaacccaagaaaanaaaaaaaggganagnnaagggganncggcnnanagaggaacaaaacaagcnccggcgganggggcgcggcggcgc

SEQ ID NO: 112285 - DNA, 247 bp, Arabidopsis thaliana columbia
  unsure (1)..(247): unsure at all n locations
aacactngnncnnnaaggcaaaaaggcncgagccacagagancngagnnncnncnncnncgagagcggancgccgaancgcagaggcgggcaacgaagcagaanggagaccggncgaggcacaacngagncngnaaacgagggacacccaaacaagcagngngaccagancncngangcagnccncgangccagccnngaacannacccngacagcaaaggagcgggggagacangcaccaagacca

SEQ ID NO: 112286 - DNA, 193 bp, Arabidopsis thaliana columbia
  unsure (1)..(193): unsure at all n locations
aaaacaccgngctncnncnctccggnaacannatctaanccnnaaacactgcaaaaaancagaccaaancaaganngcgagggcggagagaagcnnaagcnaancaaacagagacaaaanccaagaggcagannnggaagaancncncacacaaacccagaaaacaccanaagagagaaaggaaanaacaaaa

SEQ ID NO: 112287 - DNA, 235 bp, Arabidopsis thaliana columbia
  unsure (1)..(235): unsure at all n locations
caaacctncagancataaanccaaaaccactcattnnncnannacngaaannnnncnnagagaagaagaagaagaagcaaaagggccacaagcgcancagcnnngcncncaccaaccacanncnccacngcaancncccacaaaaacccnaacnccancncaaaccaaggccnncgnccccnccgncnagggggcnccnccnccgcccaacccaaacnagcaaccaccgggagaa

SEQ ID NO: 112288 - DNA, 309 bp, Arabidopsis thaliana columbia
  unsure (1)..(309): unsure at all n locations
agaagaagagaaacaacaagaaacaggaccggccaacnaaggaaccncaaggccacggagcgcgggcncggcccccccggcggcgcngaagcagnngagaggccagccaaaacggcggngggaagcaagagaggcnncnccgaaaccggggancacangcncaancnncaancnaacaaagaaggcnccgnngancncaaaaaccccncngcggggcccaaggagaagacnacccnnaaagagccgncnaagccnccggcnaaagcacangnggggggaaggccaccngngaggaaccacaggaagaac

SEQ ID NO: 112289 - DNA, 390 bp, Arabidopsis thaliana columbia
  unsure (1)..(390): unsure at all n locations
aacaaatcagataaagaaccaaagagcaaaaatatttcagaaatttgtttgttaatttggatttagaataaagtatagtataagaatttcttacaagaaaaagctactatatatatatatatatatatatatatatgttccttttttggtaaatatataatcatttgatttccttgctacaatgctactacatatttttaatatctgaatctcaaaactgtgatcagtatattatgatcaatccttcatgctctctagaaagtatctcanangagaaataagcgatagtcgtgtttaaataaaatatgttttgaactcttttnagtattaaaacagttccgttntntnnnncaattangcggaatgtatggcaaagctaatggcgaaaat

SEQ ID NO: 112290 - DNA, 223 bp, Arabidopsis thaliana columbia
  unsure (1)..(223): unsure at all n locations
cccggtcgaccacgcgtccggcaaagaaagttttagttttttttagtttgtgatagatgtctggttctgtatctggttgtggttctggtggttgtagtattgtatggtttaaaaaaaatcttanggataaaacataatccacctatattatcaaaactaaaacctcttacactgataactactatttgtctttcatccacaataacaaagacccaataatcac

SEQ ID NO: 112291 - DNA, 427 bp, Arabidopsis thaliana columbia
gttaccggattggattgattctttgccgagtttatctgtgttgagcttgagaaagaacgtgcttaatgggtcattgccttcttctttgagtagcttgtcaggtcttagagttcttgctttagctaataaccggtttaatggagctttgcctgatttaagccatttgacaaaccttcaagtgcttgatcttgaaggaaactcttttggaccgttgtttcctcggttaagtaacaagctggttactcttatactcagcaagaacaagtttagatctgcagtttcagctgaagaagtaagttctctgtatcagcttcaacatttggatctttcctacaatacattcgttggtccatttcctacttccttgatgtctcttcccgcgataacttacttgaacatttcacacaacaaactcaccgggcggctt

SEQ ID NO: 112292 - DNA, 415 bp, Arabidopsis thaliana columbia
ctcttttccgacaatgtattagctgcatcagtagttgttaactcaaccatcatgaatgccaaggatccttctaagcatgtttttcaccttgtcacggataaactcaatttcggagcaatgaacatgtggttcctcctaaacccacccggaaaggcaaccatacatgtggaaaacgtggatgagtttaagtggctcaattcatcttactgtcctgtccttcgtcagcttgaatctgcagcaatgagagagtactattttaaagcagaccatccaacttcaggctcttcgaatctaaaatacagaaacccaaagtatctatccatgttgaatcacttgagattctacctgcctgaggtttatcccaagctgaacaaaattcctctttctggacgatgacatcattgttcagaaagac

SEQ ID NO: 112293 - DNA, 390 bp, Arabidopsis thaliana columbia
ggaagagactccgagtagcagaggatggaccgcgtccacgactgctaccattgatggtaagaaaggacttgtgatgcatggtggtaaagctccaaccaatgaccggtttgatgatctcttcttttacgggattgactctgcctaattaaggcagatttggtgatcatgaacgtttgtgaatgtgtgtgtgtgtgtgagggacttgactggcctgtcctttgtcagcttgaatctgcagcaatgagagagtactattttaaagcagaccatccaacttcaggctcttcgaatctaaaatacagaaacccaaagtatctatccatgttgaatcacttgtagattctacctccctgaggtttatcccatgctgaacaaaatcctctatctgga

SEQ ID NO: 112294 - DNA, 271 bp, Arabidopsis thaliana columbia
gtggagactgtgaaacgaagaggtagacctccgagtggaagagctgctgggagggagagaaagcctatagtagtctcagctccagcttcagtgttcccgtatgttgctaatggtggtgttagacgccgagggagaccaaagagagttgacgctggtggtgcttcctctgttgctccaccaccaccaccaccaactaacgtagagagtggaggagaggaggttgcacccatgaaacttggaagaggactgcctactaagatcgaatgtgtta

SEQ ID NO: 112295 - DNA, 369 bp, Arabidopsis thaliana columbia
caattaaccaagtcgtgccagaaactgagcatgaaaaatttctgtggaaagaggcagaagagaggaacaaactacgaaaacaaaagagagcacagggtaaagaagagcatgagaagttgaaggacttagagaggctaaatgagttattagcagaaggacgagtattcctggacatgccagctcttgcagatcggaacagcatcctaattaaggatacttcccatgaaaactcattgatctgccagccacagcaacgaaatattcatggcagaatttttggaggcttcttgatgcgcaaagcttttgagttggctttctccaatgcttacaccttcgctggggtttcaccacgttttctcgaaattgatc

SEQ ID NO: 112296 - DNA, 381 bp, Arabidopsis thaliana columbia
cttgttctaggcatgtctagattgtggatttttctatgtcacaaatcatggtataagtgaggaggtaaaggacgaggctttcgagcaaagcaagaagttctttgctcttcctttggacgagaagatgaaagtcttgaaaaacgaaaaacatcaaggctattcacccgtccttagtcaaatctctgataaccaaatccatggggattacaaagaaagttttttcattggaatcgaaggctccaacgatacaccattctgtcgcgctaacatttggcctaaccctgatgttttgtcggtatggcaggcgaccatggagaaatatcatcaagaagcattgagggtttgataggctcttgctagagttttggcattgtctctcaa

SEQ ID NO: 112297 - DNA, 323 bp, Arabidopsis thaliana columbia
caactgatgaagatgtgtcatcagagcctgaaaccagcgagaataacctctcgagtgaagcttcgcgtgcggcgaaggagagggagagtgcagaaacatcaagaatctctggctcgccagaaacttccaattctagcctcttagctaagaggaaagactgatacttctgaggctttcattagagctgaagatagtaagacgaatagctttaggattcttggacaagaagacgttcaaatgcccgctattccgagggttacggcctcgaatatgctgatgcacattctaatgagagaatcctaatgagtcaaggacgacagatt

SEQ ID NO: 112298 - DNA, 138 bp, Arabidopsis thaliana columbia
  unsure (1)..(138): unsure at all n locations
nnccgcgtctcctggaanaaccattagggagccctctcaggatccttatagaaaacccctaaatcnataaagtcgagagtcgagtgtgcgtctcttcgctcgcgcgtggccatcgangacttagctcatgatccccat

SEQ ID NO: 112299 - DNA, 439 bp, Arabidopsis thaliana columbia
caacaacaaatcttaaacgttttactttgtgctgcactactcaacctcaatggccgcctcaacaatggctctctcctcccctgccttcgccggtaaggccgtcaagctttcccccgcggcatctgaagtccttggaagcggccgtgtgacaatgaggaagactgttgccaagccaaagggcccatcaggcagcccatggtacggatctgacccggtcaagtacttgggtccattctctggcgaatcaccgagctaccttaccggagagttccccggagactacggatgggacaccgccggactttcagctgaccccgagacattcgcaaggaaccgtgaactagaagttatccacagcaggtgggccatgctcggagccctaggctgcgtcttccctgagcttttggctagaaacggagtcaagttcggagaggcggtt

SEQ ID NO: 112300 - DNA, 181 bp, Arabidopsis thaliana columbia
ccgtccgattcccgtcacccacctccgccgtaccgtgagctagaaggcttgtgtgcttatagaccacgtgtcccatccggagtattttaaactcaccggggggaaatcacctctctccttactattactcaaatcttttctcctttatacctcttatttcctctctcttttcttctcattt

SEQ ID NO: 112301 - DNA, 206 bp, Arabidopsis thaliana columbia
tgcttaccttgagttttcagaaggcaaagagaatgcgttggaactaaatggaagtgatatgggaggaggattctatcttgtagtcgatgagcctagaccgagaggagatagcagtggtggtggtggatttgtaaggcccactggtagtgtcacttagtacgagtggctgatattcctattagtgttaaaaaaacttatttccctaa

SEQ ID NO: 112302 - DNA, 436 bp, Arabidopsis thaliana columbia
attatcttcataatttggttggagacacagagattagaaaaggagaaggaatgcaattagatcagcttattcctaatgcatcacttagtagccgagatacgaatgctcgcatccaaccttttgttcttgatgaacttaaggaggcttttgagcttaatgatacagctcctgttgaattgcctccagcagagaagggagctcctaccactgtatcaaaatcaaaaagtgagtcaaaagataaggataggaaacatagaaaacataaagacaagaaggagaaagatagggaacataagaagcacaagcacaagcataaagataggatcaaagataaggataaagacaaggatcgagacaaatagaaggaaaaaagtggacaccatgattagaaaaggaagaacaatgggactgaagatgctgatgacgttcagaggca

SEQ ID NO: 112303 - DNA, 391 bp, Arabidopsis thaliana columbia
cttctcctccaccgcacagatccaagacattttgattacactccatcgccggcgaaaatggtgacggagaaagaaaacgaagaagtctcatgagggtatcaacagtaggttggctcttgttatgaagagtggtaaatacactcttggttacaagtctgttctcaaatccctccgtggctccaaagggaaactgattctaatctccaccaattgcccaccgttgagaagatcatagattgagtactactcaatgcttgctaaagttggtgtccaccattacaatggacataacgttgatttgggtacagctaggggaaagttcttacgtgtttctagttctaacattgtcgttttctgttattattaaattttctctgttaattttctggtg

SEQ ID NO: 112304 - DNA, 391 bp, Arabidopsis thaliana columbia
agagaatccagcaacgtttctttatttcctttgtgtttttttttcttcataatctctctctttttatttattcataatttttactgtctccatttcttcattactcttctttttattttccggagatttttctctttgcctttgttatttgctgcttttgctgcagctacagtgtaagtttgattttctgggttccttcaaactccaaaatctcgcgtcgctttttgcttcagaatcgatttgttcttgttacttcgatctgttgttctttttaactctgtgcatgattcaatttcgtgttcgtaacctgtgttttgctgcttgtttaattcgctcatatgtataaaaatactatccctataacttatgacctttaatctttgttagttct

SEQ ID NO: 112305 - DNA, 417 bp, Arabidopsis thaliana columbia
tgctgctgtttctgcttctgcttctgcttcctcatcctccactactgactcttctgctcaggcgcagattcctccatcatctacttcttaagttgttttaagagaaacgttgcatagcgaagcgagaaagttgctaggagttgttactatgagcatattgcatcgaagcttttggatcatgtctgtgatatttgatttcctgagatgataatgagttatatgatggtactagattatctggtgaaagtagatgaataacacatgttaagatactctgtcttcttatgttattttggcaaatcatcagtgcattgccttttaagcagaagtgtgagatagtgatgagttgttattacattcgttattttgggtatggaacaatgagtgaaaatgtatctttggctctaaaaacaaaaa

SEQ ID NO: 112306 - DNA, 267 bp, Arabidopsis thaliana columbia
cttctacagattcgatttgggtgtttttggtttttgattcggtaaagcttctcggtcacttgggcggtgattgaaactgaatcgagtgtgattgtgattgtgattgtgattgtgattgtgagggaattatggctcaagccgtagaatattggcacaagcaatagtcgattttaacccagtcgtttcttacgggggttttatgaattattattggtttgaatgcttgtgattatatctccttattatctctactctaaatcttaccct

SEQ ID NO: 112307 - DNA, 381 bp, Arabidopsis thaliana columbia
atcatcttcttcacctggagagaatctagggttttagatttactcttccactgcctatcttggctgtattccccactgggatggtggttttcttctccttaattctctacccatacatctacacattcagatacttttagaagccccaatccttatacataccggtaacaaaaaacctagctctttttacattccggacacaccaggtttcgaaaaaccctaacttccatggcgaaaactcgacctggtgtctcctacacaattaaaacgggaaggaaggagctggacccttatacccacaagcgcacccacaaagataggagcacagataatgataaagacaaggaccccatcaaaaactagtaaaccaccatacaccac

SEQ ID NO: 112308 - DNA, 433 bp, Arabidopsis thaliana columbia
  unsure (1)..(433): unsure at all n locations
tgggaaaggaaataggggaatagatgcaccagatagccaaatgccgtttgggaaagaggcacaagaagggctcttaaagattggtgggcggaaaagcttgaaggtgttagtttatggagaagatcaatatgggcgatgcgtaggtgatttatactgcaatgggatctttgtccaggaggcaatgttaaagaaagggcttgcttggcattacttagcttatgacaagcgcccggttctcgcaaagtgggaaaaggaggcaaggcagaagcgtattggcttgtgggcttcttcaaatccagagaagccatgggactggagaaagaataataggcgggaatagtcaaccgactttgtttgggcanaatcacaaaccaagtaatcagcgtttaagacaattgagatttgtgattgttgagggttttttgttaaatcc

SEQ ID NO: 112309 - DNA, 406 bp, Arabidopsis thaliana columbia
gaggaatgtgatttaagaggttcgttgatcttgaagaagtacatggactttagaaagttagctatattggcgtctgatattaacaattgtcccaatctgaatattcttcccggtggtgcgtctgaaggaccagacccgagagaagttgagctgtatgtggaagagatactgtcactgatgcagttgggtgaggactataccgagttcatggtgtcaaaaatcaagtctttgacgtcggtagatcctgaattgttgccaacggctacaaaggcatttagaaataagagttttagcaaagcgattcaggatgtgacgagatattatgttatactagaagggttctttatggttgagaatgtgaggaaagctattatgatcgatgagcatgtccctgacagtcttacca

SEQ ID NO: 112310 - DNA, 397 bp, Arabidopsis thaliana columbia
gttgatgatgttgtggagggtcatgttgctgcattggaaaaaggtaggcttggtgaaagatagggactcactggggaaaaggctggtttcaagcttgtctttgacatggctgcactgattactggaaccaaaaagccaaactttagcattccattatgggccatcaacgcatacggatggttatctgatttaatctctcgggttacaggaaagctttcacttatcagtcctccgacagtgacagtgctgagacatcactggtcatactcttgtgataaggctaaagctggaacttggttattaaccctcgaaggcctaaaggaaggatttgtaggaaaattcttcctttggttgaaagagtcttgttccgtttatttaactaactgaaatttcaaat

SEQ ID NO: 112311 - DNA, 436 bp, Arabidopsis thaliana columbia
accatatttcagaggaggaagaggaggaaggagtgaccaattcatgagtggctattccaagatggattcaacagaccagaaacttgagccggaccacccggtggtcgatcctcagattcagaagcccgatcttgaacctgctgaaatgaaaccgaagctgagcaggaacaggtcagtgtctgcatcagcacaagcggttccttcaccaataaagatgtctatgagaagatcttcgtctgtctctgaacgctactgtagaatctatgaccagagctctgccacgacttggccgcttcctttccatgaaggagatgaagacgaagatgatgatgataaagagaaggtgcacaagaagaagaagagcaacaacttcaagaaaaaagcattcgtaaaggcttgtaagcgtttttttgggatctcgtgaaaccagtttttg

SEQ ID NO: 112312 - DNA, 351 bp, Arabidopsis thaliana columbia
ccacctctctcttcttcttcttgtgaccactcttcctgtctgttcactggaggtgaattttgatttttttggccgatcggatttgagtttttgaatctctgattgctgagaaaatgccggcgttttacggaggaaagcttacgaccttcgaggacgatgagaaggagagcgagtatggttacgttcgtaaggtttcaggtcctgttgttgttgccgatggtatggccggtgctgctatgtatgagttagtgcgtgatgaccatgataatttgattggggaaactattcgtcttggttgattattttttactatcctagttttctaggaaacaactggattgacagtttatt

SEQ ID NO: 112313 - DNA, 430 bp, Arabidopsis thaliana columbia
ggctaccctgatccgaggtttggttatgaccgcaacagcaatcacagttccttttcacatctcatgaatccacacagctcacaagaagtaccaagttttgaccaattgggatataatgatcatttgtattccaaccatggattgtatggactttacgggaatgtaattgactctggtcatgcatatggaacttttggttatgattcctggaaacttgggcgaggatggtatcccgttgatggttatagaaagaccagaagcttcaatcatgggcgtggttacagtgatgagaaagcagataggcttaatgagctatgtcgaggaccaaggagtagtgatttcaagaatccacaagttcttaactcttcaatgctagatgcaatgaagcaagacgtttcagcagtagatctccagcgctacaatggggaga

SEQ ID NO: 112314 - DNA, 425 bp, Arabidopsis thaliana columbia
cttcaagatacgcttaacctggctaaatcaatggagaaagaactggaagcattgaagatgatcaaagacgccaaaggttctgtggaaaatgcagtacaagattcgggagtagagtatttagaggctagaaagatggatttgggacagcaggaaatgctttcagtggatgctgctaactccttgatgtctaccttgagagcacagcttgagccttttaggttcgttgttgatgagaatagtccatgggaagagaaatctgcagcagtaagattgacttgcaaaatgaagaaatcaataaggaacaaactgtggaagaaacgaaagagacggtgtgctgcagagatgcgtgctaaggagcctgaaagatttgaacaagctgatcgagaggcagatgaatggagggaaaaggaaatggccaaggacat

SEQ ID NO: 112315 - DNA, 454 bp, Arabidopsis thaliana columbia
aaaaaaaaaaaaaaaaaaaaaaaaaaaaaaaaaattttttaaaaaaaaaaaaaaaaaaaaaaaaaaaaaagaaaaaaaaaaaaaaaaaaaaaaaaaaaagggggcggccgttttaaaggaccaaagtttacttccgcgtgcttgcaaggtaatattttttttttggggcccccaaatttaaatccacggcccgtgttttaaaaacgcgggaacgggaaaaaccctgggtttcccaaatttaatcgctttgaagaaaatccccttttcgccagttgggttaatagcaaaaaggcccgaacagatcccctttccaaaaatttgcccaccctgaatggcaatgggaaccccccctttaccggccctttaagcccggggggtgtgggggttccccccaggttgcccttttcattgccaggcccttaacccccgctcttttggtttttttcccttcttt

SEQ ID NO: 112316 - DNA, 436 bp, Arabidopsis thaliana columbia
gtttcatcgtacatttcatcatcatcgacatctacagcaacagcgccatcctcggactcgcgacctttaactcctggatcccagctatcatcaactggaacagaggaaacggttcagttcatgatggtaaactcgcttctatcagaatcatatgaatcatggctccaacaccgtagggtctttctccagcgggggatttaccatactttcatgcaacacgctcacggtcgggtagcttctcgcgctgcagaaccaaccagttcaggaggcaaaacccaagacgcagaaaccttaaccggcgatgaacttctctctatcgtcaaaccaatgctggtctacaccggtatgatcgaacagcttcaacagttgttcaaaccccaagaaaccggtccacatcgaaccaatcaagaaagaaggtacatcaagtggagtagag

SEQ ID NO: 112317 - DNA, 287 bp, Arabidopsis thaliana columbia
gtagacgcgatcctagttacggtgccacaggatcgaccttactcagctaccataggactgatggggggtgctgtgggtcctgactatgtggatgagtaccgaaaacctgagacctggcgtagctaacctgggacaactcgatgctcaagcgcgttctcatgggacaccagacagggcaatggtgatcattaaccctggtgaacccagctgggcagtgtcgtaagcgaagctaacagatgagagatattgaagttctgatatacacgagaaactggatcctctgggag

SEQ ID NO: 112318 - DNA, 469 bp, Arabidopsis thaliana columbia
caagaagccaaaataaaaccattgaagctagcagcagccgaagaagcggtcacattttccggcaaaacagacagatcgaccagtgaaagctcctatctcttcctgaggcattgtgatctcttgttaaaatggctagtactctgaggaacattcatgatcaaaatgttattgcttcagaagacactgtataccgctacttgtgtcccgtgaaaaagaccgggagcattatcgggaaaggcggcgagattgctaagcagataaggtctgagactaaatcaaacatgaggataaacgaggctttacctggttgtgaggagcgtgttgttaccatgtattccactaatgaggagttgaatcattttggagatgatggtgagcttgtttgtcctgctttggatgctcttttcaaggttcatgacatggttgtagcggacgctgatcaagatgatggtactgatgatgataatga

SEQ ID NO: 112319 - DNA, 405 bp, Arabidopsis thaliana columbia
ggctaactctgaagccacactcggaacctacaagggtgacgctaagcttggtgatggagcagctgagagccttcacgtgaaggattacaagtactgagcatcgtccacgggttgaattgtgacgtttgtcatcttcctggatatatttctagggatttttcgtttttctacttgacattatcggattataagtgttttttcttcattttccttttggatatgtgcattgatttagactgggacatgttttcaacttttgagggaattgggaggctcaaattaccgatgatggcactggggttgacaaacttccttcagatggctacacctcttgaagctttggctggtgagatattgtatccctgataacttcatgttcaacatgcccttttttgtgcttggtgc

SEQ ID NO: 112320 - DNA, 314 bp, Arabidopsis thaliana columbia
ctctctctctctgttcttctatactctctctgcgaatttctaatttagtgtaagatggaggcatttgagcatatgatagtggatgagtttaacgaagaagacttctacgagacaatagaagctcccaagtttgtagacctcaccgcaccagatcatcgccctgaaggagatgatcgttactggttctgttctagagttggatgtgatcagaagcatgaggaatttttggattcggaagcaatctacaaaaaattcgttcttcgggtcatggcagctaggagtccaagtggtcggtcttcgaaaagctctttata

SEQ ID NO: 112321 - DNA, 451 bp, Arabidopsis thaliana columbia
cgttgtgaaatctaaccggattttggatcccgccatttaaccttggtcattagcgattccacaaatccaacatgtttttcacatcttcatatatatttagcatttatttattttttaaaaaattcaactctttttttaaaaggttatataaatattaaattaatatgatgttgtgaaatctaaccggattttggatcccgccattgaaccgtggttattagcgattccacaaatccaacatgttttcacattttcatgtatatttagcattttttttttttttttcttaaaagattttcaactcttttttttctataaatattaattaatatgacgttgttaaatctaaccggatttaaaaaaatatccaaaatccttaagagatgtgttatgttcaatatagtttacacataatttaaacttttaacatttatttttattttattaaatc

SEQ ID NO: 112322 - DNA, 381 bp, Arabidopsis thaliana columbia
gccggctccgtcgtcctccgcaacggccgcctctccgagatcctcggcgagctccaggagatactggacaagggggagaaggggaaagacggagaagggggcgggggcgccgacatgacggacgcgctcactagacaggtgcgcaacttggctatggaggttaaacaacttgcttcttcccgtggatctataactgttcttaatggaggttctggtcaaacaggggtgtcaggtttgatagtacctgcagcaactgttggagcactcggttatggttacatgtggtggaagggcatcttctttgcggacctaatgtatgtgactaagcgtaacatggcaaatgctggttccagtatgactaaacatctggagcaagtgcaa

SEQ ID NO: 112323 - DNA, 358 bp, Arabidopsis thaliana columbia
ggaaataaatcaagaaagtttcaacaatgtgaaggaaactgatgatgcgatagacaaaacacaacccgaaattcgggatattgaaagcttgtcttccgtcagcaaaacacaagacaaaccagagccagaatatgaagttccaaaccaacagaaaagggaaataaccaatgaagttccaagcctggagaattcaaagattgaagaagaactacagaaaaaagatgaagaatctgagaacaccaaagatttgttttcagtagtaaaagaaactgaaccaacattgaaagaaccggcaaggaaatcactatctgaccacatccaaaaagagcctaaaacagaggaagatgaaaatgatgat

SEQ ID NO: 112324 - DNA, 177 bp, Arabidopsis thaliana columbia
gagagaaacatttcgagacaaatggccgccgccgttgttggtcctttggtaacaatccaaacttggaatggggccaggtccacgagcaattcttcacacggggactttccgaggtgatgaccgcgccaggtcgaccagacattggtaacttcgttcacgcccaaatattcaacaaca

SEQ ID NO: 112325 - DNA, 331 bp, Arabidopsis thaliana columbia
aagaaaacactgaagaagaaatggggttccttaagccaaccatggcgattctttttctagcgatggtcgccgtttcatcagccgtggacatgtcaatcatctcctacgacgagaaacatggcgtctccaccaccggtggccgtagcgaagccgaggttatgagtatctacgaggcatggttggtgaaacacggcagggctcagagccagaactgtcttgttgagaaagatcgacggatcgagatctttaaagacaatctttgtcacttcgatgaacatagcgagtagaatctctgctgtagattgcaccggccttgcaccaggaccggaag

SEQ ID NO: 112326 - DNA, 452 bp, Arabidopsis thaliana columbia
aaacgagcacacaactcactaaacactcaaacaaaaatacaaacattaagatgatgatgaagattagctttaacacatgctttcaaatcttactaggatttatcgtcttcatcgcatcaatcactttactaggtcgaatattctcaaggccttccaaaaccaaagaccggtgtcgccagcttcctcctggccgaccaggatggcccatcctcggcaatctacccgaactaatcatgactcgtcctaggtccaaatatttccaccttgccatgaaagagctaaaaacggatatcgcatgtttcaactttgccggaacccacaccatcaccataaactccgacgagatcgctagagaagcttttagagagcgagacgcagatttggcagaccggcctcaactttccatcgtagagtccattggagacaattacaaaacaatgggaacctcatcg

SEQ ID NO: 112327 - DNA, 294 bp, Arabidopsis thaliana columbia
cggacgcgtgggctatggtctaaagagcggcctgtttccaaggaatctcctctgaaaatagagcatgaatatgaagtcacaagtttcccataaatgtgttcaaacatttctatttaactacttgggttgtccattacaaatgcataaataagtgaatgaatagttgtggttaataattaaactatatatctatgtatgcgagattgtgttatattgacattctctgctacttggaatccttccttatgaagggtataatatactttctagctcataaacgaatgagtaaaagtt

SEQ ID NO: 112328 - DNA, 357 bp, Arabidopsis thaliana columbia
aagcttcaacctgaagtagagaaggttttgctggagatggagtttcgtggtgtacctagaaacacagagactttcaatgtgttgattaacaatctttgtaaaatcaggagaactgaagaagcaatgacattgtttggtaggatgggtgaatggggttgtcaaccagatgctgagacttatcttgttctgattaggagtttgtatcaagcagcgaggatcggtgaaggggacgaaatgatcgataagatgaaatcagcgggatatggtgagcttttgaataagaaagagtattacgggtttctcaagatattgtgtgggattgagaggcttgagcatgcgatgagtgtgtttaagagc

SEQ ID NO: 112329 - DNA, 427 bp, Arabidopsis thaliana columbia
  unsure (1)..(427): unsure at all n locations
gaatatgaatattccgttgaagaagacttgctcctgaaatcctttggaccgaaactcgtaaaattatttcccttcaatttctctgaaatctattcaccgtctcctttgtctcctcctccaaatcgatcgttcctcgtcgtcgtctgattttctctacgattgctttttctgtctagctcgataagataaaacaaaactaatttttgaagagtttttttttttgggtttgggagcgatgggtcaagcttttcgtaagctattcgatactttcttcggcaatcaagaaatgagggtcgttatgctggggctggatgctgctggaaaaacaactattctctacaagcttcatattgngaaagttttgtctactgttcccaccattggattcaatgttgagaaagttcagtacaagaatgtgatgttcaca

SEQ ID NO: 112330 - DNA, 440 bp, Arabidopsis thaliana columbia
  unsure (1)..(440): unsure at all n locations
atggtgacgaaggagcaagtcgaagcttcattgacttcgaaacttaagccaattcatctcgaagtcattgacatatctggaggttgtggttcgagttttgaagtggaggttgtctctgaacaattcgaagggaagagattgctggagaggcatcgtatggtgaatgctgcgctagaagaagaaatgaaagagattcatgctctctctattaagaaagctcagactccacaacaatggaagccaccatcacaagactctgcaaccttaaccaaagatgcctgaatttctgttttttaaaagccttgtgacaaagaacagagcatttactatgttgatactttgtggttactgtactccgattactgcttttgatgaagtgtaaacacttttttaaaaaaaaaaaaaantaaaatttaaaaataatttttttaaaataaaaa

SEQ ID NO: 112331 - DNA, 441 bp, Arabidopsis thaliana columbia
taagaatctcaagcgtaataaccacagagagagttagactcaaatgttgtttcatgtttttttgataatggtgatcactggaatttgagataattaataaaagttgtgatgttaattcgaaacaaaaaaaaaaaaaaaaaaaaaaaaaaaaaaaaaaaaaaaaaaaaaaaaaaaaaaaaaaaaaaaaaaaaaaaaaaaaaaaaaaaaaaaaaaaaaaaaaaaaaaaaaaaaaaaaaaaaaaaaaaaaaaaaaaaaaaaaaaaaaaaaagggggggccccttttaaagaatcaaattttactaccccgtgtttgaaaataaaaattttttttttaggggccccaaaataaaaatcccgggccggggtttaaaaacggggggacgggaaaaacccggggttacccaaattaaaaggctttgaaaaaaatcccctttttcccag

SEQ ID NO: 112332 - DNA, 439 bp, Arabidopsis thaliana columbia
  unsure (1)..(439): unsure at all n locations
ctcgatttcgcctagcttcttctgagcatccgccgcttccgtctacagaatggattctcaaataaaacacgccgtggtcgtgaaggtcatgggtaggactggttctcgtggtcaggtcactcaggttagagtcaaattcactgattcagaccgtttcatcatgaggaacgtgaaaggacccgtcagagaaggagatgtcctcactctcctcgagtccgagagagaagctagaagactccgttgattccaccacanaaaaaaatggctcaattcttagagaaggcaacttcggctctcagcgaagccaaagaatccgttacaagcaccgctgaatccgtcacggcttctctcactgatgctgagaaaaccgntaaccaaaccgccaggagcactctaactgacgccgagacaaccgttgcagcatctgttgaaacggtca

SEQ ID NO: 112333 - DNA, 352 bp, Arabidopsis thaliana columbia
cccacgcgtccgcaatcctcaatgatcaatttggttatagcattagcatagtttccattgaagaaagtgtaacgttgtttgaaatgtggggttttgtgattgaaaacacagggagagtgtagcggcggaaaaggtgaaggaagcacacaggaaggtaatggttgcaaaccatccagatgcaggtggtagccatttactagcctgtaagatcaatgaagctaaagacgtgatgctaggcagaactaaaaacagcggatccggtttttgatgcatatttcaattcaaagacttacttatgaatcatcttatgttataggactgtgatgtcaaactgcagatattatgctaattt

SEQ ID NO: 112334 - DNA, 207 bp, Arabidopsis thaliana columbia
cattcggcgctcttttggaatgaagaacaagataagcaatggcccatacataaaaatctgggaatcctaaaaatgtttgcattgggggtgttgcacgtcctccaagggggggctttttcggatctttttaatcttaacctgccacaaagcttgaatctttagctattgcagctgctttgaaaagagcaaatgttgatccagcttttg

SEQ ID NO: 112335 - DNA, 194 bp, Arabidopsis thaliana columbia
gtacgcctgcgtaccgtccgtatttcctgttcgacttcacgcgtccgcggacgcgtgggcaagtgtggtgagcccggtcacatggcgagagactgttctgaaggcggtggaggttacggaggaggcggcggtggctacggaggtggaggcggatacggcggaggaggtggtggctactgaggttctttccttac

SEQ ID NO: 112336 - DNA, 370 bp, Arabidopsis thaliana columbia
caacaaccaaacactcatttgtccacatcttgagagaaaaaaacggatcacgtgtattagaggatctcatggcgatggcggtctccggagctgtcctcagtgggcttggctcttcgttcctcaccggaggcaagagaggtgccaccgcattggcaagcggcgtatgcactggagctgattgaaagggagcaaatgttgttccagctcttgttcaagaagttgactctggcaaagtttttagcgctactttgggggaggctcctgctcgccaagctgcttaaggggcaggaatccctaactctgttatctgtactacagctaacaaggtttgtgcatcaggcatgaaagcggtaatgattgctgctcaaag

SEQ ID NO: 112337 - DNA, 411 bp, Arabidopsis thaliana columbia
ctcctttatttcagtcttcttttacaaatcataatcttctctttgattccatcttgtgaaccaccggcataagaaaatatgacaattgctttaacgatcggaggaaacgggttttcgggtctaccaggatcgtcgttttcttcatcatcttcgtcgtttcgattaaaaaacagcagaagaaagaacacgaagatgctcaacagatcaaaagtcgtttgttcttcttcatcttctgtaatggatccgtataagactcttaagatccgacccgattcatctgaatacgaggtcaagaaagctttcagacaactcgctaaaaaggtttgaccttttgtttagctcaatcatcttagatctgggtttttaaaatttgacatctttttgaacgattttgatttgatttgttgcttt

SEQ ID NO: 112338 - DNA, 350 bp, Arabidopsis thaliana columbia
taaaaacacaacaacaacattcaagaaatggccatcttctgtttccttgtagaccagagaaagaaagtccgggggaggaagccagcggccgggttgtgctcaagatgcggaggaggagcagttgttgccgacatgagaacctccacaagattctgtggggtccctttttaccgcaaagcttggaaagctatcgtctgtcatatctgcggtgctgtcctcaaatcataccactgagtctgatgaaccaacaacgttttttgttttaattcattcgctttatttttccaacaagctacttgccattgtttgtcgcttgattgcctactttagactcttatgtcttaacttat

SEQ ID NO: 112339 - DNA, 453 bp, Arabidopsis thaliana columbia
agacaggatgtttttgcaatcctggcgcatgtgcaaagtatctcgagttatcccattctgagctacggtctaatgtagaggctgggcatatttgctgggatgacaatgatgtgataaatggaaaaccaacaggggctgttagggtttcgtttggttatatgtcaacctttgaagatgccaagaaatttattgatttcatcataagttcatttgcttcacctccaaagaagactgggaatggaaccgtcgtcagtggaaggtttcctcaacttcctagtgaagaccttgaaagtaaagaatcttttccaagccactaccttaagtcaattactgtatacccgatcaagtcatgtgctggattttctgtgatacgttggccactttgcagaacaggcctgctgcatgatcgagaatggatggttcagggtctgaccggtgaaattcttacccaaa

SEQ ID NO: 112340 - DNA, 203 bp, Arabidopsis thaliana columbia
  unsure (1)..(203): unsure at all n locations
ctagtctaaagcccagatatttcaaagtccaaacgtttagtcgtcaaaaagcctaatgttatgatagattctaaataagtattgggggatttggttggatataaaggtggntccttaaaggcctggatttggaaatataatgggttcggtggattcacgaaccgtattttttttcacaataatatacaaaaaggtatttccgg

SEQ ID NO: 112341 - DNA, 459 bp, Arabidopsis thaliana columbia
ggacctaccatgaacctgattctctcttcaatcattttttttctttcttttagattgtttttgatcctgaaatgctcaaaaagtcgtcgtactaatccactatcgtgttggaagatgaaacagagtgaaagagacagaagaaacaagaaccatttgtgaaatcaagaaccatcattattccatcaccagacacagaattgttcaatcatttgacaaaaaccttctaatccatacccttttgtcaaaatcaacacttgggttttcaatagtttatagctttaaacccataagaacgaatctggttctgtttctctggttaatgattgagattcttcaaagttttgattttttttgtagattgcttcatcttcaattttcacttttcatttgtattaaacattttcttgttccgaggggttttcttggttctgacaaataaacaaaaaccttccttttctc

SEQ ID NO: 112342 - DNA, 282 bp, Arabidopsis thaliana columbia
gtaggacggctctcctaggcgatgctgaaaggctcataggctgctgaggcagtgcgcatgcaacatgtgctagctcactgagtgggattactctaccgacattcgttgcccagactcgtgcctatcgctggaaccggctacgtgatgttgtctgtctcggatctgccaaggacagtatgggagaatgactctatggtgtggacctgacagagggaagtacttaggaccctttgccgctcaaacttcgtcttacctcaccgtagatttccttgccaatgctgg

SEQ ID NO: 112343 - DNA, 419 bp, Arabidopsis thaliana columbia
tgaaggtcgtaagatgtgaccattgtttcttactctttgaagagcttggtaaaagcgataaatggctacaatgtctcgaggtgttcaggtggatgcagaaacagcggtggtatatcccagataatggagtctactcgaaattgatatctgtaatggggaaaaagggtcagacccgtatggcaatgtggttgttttccgagatgaaaaacagtgggtgtcgtcctgatgcttctgtttacaacgctctcataacggctcatcttcatacacgagacaaggcaaaagctttagagaaagttcgtggatacttggacaaaatgaaagggattgagcggtgtcaacccaatgttgagacttataatatccctgtgagggcttttgctcaatctgggatagtggacccaagtcatgctttgttt

SEQ ID NO: 112344 - DNA, 427 bp, Arabidopsis thaliana columbia
gatcagagagacctcccattggagttgctatatgtatctctgctgccattggagctcctgcggttgcgggtttgtacactatactaagtccacttgggaaagattataatgattctaatgaagacgaggagaatcaactgaagcaacgtgaagaagggtctgttaatcgtcggtttactttagagaggaggtattcgtttgcctctgcttccacgggggttggggatgggatggttccggtgagtgatcctcagtggagtggtggaattttggatatttgggatgatatttcattggcttatctttctcttttctgcactttctgtgtctttggatggaacatggagagagttgggtttgggaacatgtatgttcacatagctacgtttattttcttctggttggcacctttctttatattcaactt

SEQ ID NO: 112345 - DNA, 146 bp, Arabidopsis thaliana columbia
attagccagtcatatgttagctttatggctactgtttgtgtgaatggtcagtaagcacacctatagcaatgtcgttggtgattcgtttcaacactagaacaggatttaacccagtttttggttatggatcatcaactatatcttag

SEQ ID NO: 112346 - DNA, 229 bp, Arabidopsis thaliana columbia
catctctctcatcatctttggccatggcaaaagacttggatgtgaacgagagtggaccaccggcggcgcgagactacaaggatccgcctcccgcaccatttttcgacatggaggagcttatgaaatggccgctttataatgcgtcggtgcgcgccgtcgcagctgatccagatagaccaatctggttgccgggaagtactcctccatagtggctaaacggtgtcctttc

SEQ ID NO: 112347 - DNA, 406 bp, Arabidopsis thaliana columbia
cttgacagaccgcttctggtccgaagcttttgatacctgagactgaatctatccattgcaggtcaacatgattattgctaagaacacagcatactcatgtctgtattaatatattgcccataagatagtattaatttatgtagtagttttcatgtttctgtctttgtatcctcctccttcacttgtgtcccatatttgagaacaaacaaagctgtataatcaggtttttcgtatagatgtttttttccgcttaaaaaaaaaaaaaaaaaaagaacaaaaattaaaaaaaaaaaaactgaaaaaaaccaaaaagaaaaaaaaattaatcacattgaaaaaaaattcaaaatttaaaacaaatggctgaccagctaaaaaggacccaacctaatggccctttccaaca

SEQ ID NO: 112348 - DNA, 450 bp, Arabidopsis thaliana columbia
atctcgatggctaataagctcatattgtaacaatgttgttgattttgttgatttgtggtaggcttgcacgctttcatgggagcttagggttttgggtgctgatgtgagctacggagctcagtttgagccaaccaccgaaggaagctatgctgggatcggctataagacacggaagattgcatcaaccgttgaaccgttgataacagatgcttttaaggaggttgaacggcgaaagattgctatgacattctataacaatgctatgtcgaacaagaaggtgctgaacaggacgataactgaatactctgttagatcattgtcatatatatcgatgcatattgcacaatgaatttatttttatatttgtagttaataaatataagtgttattaaaaatattttgatatttatatttctatacttggaatcttttacattaattatttttttt

SEQ ID NO: 112349 - DNA, 458 bp, Arabidopsis thaliana columbia
ttcttcatcttccataggttccttccttcttctcttcttacatctctgtaatttgtctccttctcaacgtgtccatgtggtcttcttacttcatcccttctctctctctctctctgtcctttatataaatgttataacctcatcttcacttctctctcacaaagtccacttgctctatacacgttgctttgtttgtaacttcataactagctccattgttacatagtacgatcatggtatcagcagaaacggcgacaatggctgaggctgaaccgtcgacgacagggcctcgcatttccttctcagcggatttgtcatcatcagatagcgacggagatttcatctgtatcaaccctgtgatgaatctcattgtgggtagagaagaaaaagacaagagctcagtgaaagccggagactttgagtttctgtcggaaaatgcaacgatgcttaacgctgac

SEQ ID NO: 112350 - DNA, 387 bp, Arabidopsis thaliana columbia
cggacgcgtgggctccgaactgttgtaacttttttgattttgagagaaacatgaccttttgtttattgattgttttgttgtatttagattaaattcatcttgcaattgtacccctttttttctgtcccacgatgaaactagtacacaagaaattagagagacaaactaaaaaatatatacacaaaactaagaaaataaactaaaaaaataaataaaatgaaacaataaaaagaacatgaaattaaaataaaactgtgacaaatggctgaagaatgaaccgtccacatcaaggacctagcaatttacaaaaaataggggggggcctttttaaggtaccaaatttaaaattcctgtctttccaaccttttaattttttttaggggcccc

SEQ ID NO: 112351 - DNA, 160 bp, Arabidopsis thaliana columbia
cggcggtgaacacgacggggttagctgggagccctccgccacagaccaatgggacaccgcaagggattgatggtgctggtggtggacatggtggtagaggcgcttattgattgaatgacaataaaaaactacctgaaaatgtgttgggaggggatatata

SEQ ID NO: 112352 - DNA, 332 bp, Arabidopsis thaliana columbia
caagacaaaagttagtgaaatcaaaaagcaggttcttgggtctgatagtgagtgagtagttttgcttcttttttttttgctagcagaaattattccccacaagttttgttttttccactgatttttaagttttgtttttttatgccttgtggtagttttctatggcagtgtggagaaaatgattggattttagaaaaaaaaaaaaaaaaaaaaaaaaaaaaaaaaaaaaaaaaaaaaaaaaaaaaaaaaaaatataaaaaaatattatgggctgccctattaaagggatccatttttttcttaacttgttgaattctacatctgtttcttat

SEQ ID NO: 112353 - DNA, 403 bp, Arabidopsis thaliana columbia
aattgggtcttttctctctctgaggcatgtcacctgttgctaaagtctctgagtttcacagagaagggaacgattggttttgcaagacaggactgtcaagtgatatcactgttgttgttgatgatgtgaagttccatcttcataagtttccattggtttcaaaatgtggaaagctagcaaggatgtatgaagattctaaaagcactgataagcaatctctctggacaacagtccttgaagagttccctggtggtgcagacaatttcttgatagttgcgagattctgttacggggctcgagtagatatcacctcggaaaacttagtttccatacactgtgcagctgagtaccttgaaatgacaaatgaatatggggaagataacttgatttcccaagttgaaac

SEQ ID NO: 112354 - DNA, 454 bp, Arabidopsis thaliana columbia
ggataacacaataattgacctggttgaaaaatatgggccaaagaaatggtctactatatctcagcatttacctgggcgcataggaaagcaatgtagggaaaggtggcataaccatcttaaccctgggattaataaaaatgcatggactcaggaagaggaactgactcttattcgtgcgcatcaaatttatgggaataaatgggcagagcttatgaaatttttgccaggaaggtcagataattcgataaaaaatcattggaacagctcagttaaggagaagttggattcctactatgcatcaggtcttttagatcagtgtcaaagctcgccattaattgcccttcagaacaaatctatcgcttcatcttcctcgtggatgcacagcaatggagatgaaggtagttcaaggccaggggttgatgctgaggaatcagaatgcagccaagcttcaact

SEQ ID NO: 112355 - DNA, 412 bp, Arabidopsis thaliana columbia
catttgtgcattattaaaccttacagattcctaggaagatttcaaggagccgcagtcctaagaggtaaacactttctgtcttaacactaatcctcgtcttaaactggaaacactttatagtctgtagaatgcattaattgaagaagttccaatgttaagttatgtatagtaaagttaagggttaccccaattcctgataaaagacatagcataaacatctgggacctatactttcttggtgagtttggtgatgaaacagagaaaaatagaattgttgtgtagaaattttttgcgttgaagtctaataaaagaaaatgggttgttgttgggtatgtttaggccactgagaggaaaaagaagcagcagtaacagcagcagcagcagttcaccgccaccaccacctgcacctcgt

SEQ ID NO: 112356 - DNA, 448 bp, Arabidopsis thaliana columbia
gatcatatcaggagctcaacgtgtccatatcccagaagtcttggagcaacgtgcaggagaatgtggcattgatgtcaagacaatatccacatacattgattcattcaggtacggggcgcctctacacggtggatttggagtggggctggagcgagtggtcatgcttttctgtgcactgaacaacattcggaaaacatccctcttccctcgtgaccctcaaaggctttcaccctaatatcttttcaactgaaagctatttagtgaataattgtccaactccacaaatttttctcatgaagcttttagagatttttacttcttgttgtctaactctcctccttttttataagtgaatcttggtttttgttttgtgaaaaacaaaaaaaaaataaatacaaacaaaattatcttacttattaaaaaaaaactctatattattaaaaattta

SEQ ID NO: 112357 - DNA, 350 bp, Arabidopsis thaliana columbia
tagtggcctaccatggaggagctaagtgacggaggaacaacaaatggcggtgagattactccctacggtagcttcaagagaccgaggacttcgtcttcctcagctggtgagtataggaaggatagagaagagtggagtgatgcggcgattgcgtgtttgttagatgcgtattcggataagttcacacagcttaatcgagggaatctccggggaagagattgggaagaggttgctttatctgtgtgtaggggtgtagaaagggtcagatcgttggttcaaacttttgaaaccaagagcatcgattttacctcaaagcttgatgtaggtgttaccaatcttgggagtggagc

SEQ ID NO: 112358 - DNA, 454 bp, Arabidopsis thaliana columbia
gagtttacaggagcgagaagattccttcgtggctcaagacaagaaaattcattgcggctttgtcaaaggtcccaaaggatcttcaagcactgggtttgacctgacagaagatgatactaattatatcagtagatgccacatcgctgttagctcatgcatctttggcaattctgatcgtttgaggcctcctgccaacaaaatgataagtcgggtgtcgagaaaaaatgtatgctttattgtggtcgggggccagattaccatgccaacactttcttgagaaagacatgccccaaacagagcaagatttatttgtgtcttggaaatggtttttgtgaaaaatatttctttctcacatattccgaggggaggaaaaataccaaaaatgttgccacacacgacttttctcatcaacaaggtactcaatctgtgtggacagcaagttaccacttcagtt

SEQ ID NO: 112359 - DNA, 420 bp, Arabidopsis thaliana columbia
caaaagacaaaaagatattgatgtctctccaacgacccaatgggaactcgagttcgtcttcttcccacaagaagcacaaaactgaggaaagtgatgaggagttgttgatggttcctgacatggaagcagctggatcaacatgtgttctaagcagcagcgccgacgatggagtcaacaatccggagcttgaccagactcaaaatggagtctctacagctaaacgccgccgtggaagaaaccctgttgataaagaatatagaagcctcaagagattattgaggaacagagtatcagcgcaacaagcaagagagaggaagaaagtgtatgtgagtgatttggaatcaagagctaatgagttacagaacaacaatgaccagctcgaagagaagatttctactttgacgaacgagaacacaatgc

SEQ ID NO: 112360 - DNA, 258 bp, Arabidopsis thaliana columbia
ggccggacccacgcgtccgtttcacagaaagttatgtttgttccaaaacattctcgtttcgtgtctgaatttcactctcctcctcctctccctctgttctttcgtaccaatcattcttcttagaaaccctccaacttcactcggtttagccttcctcgcagtctcactcgtctctctgatctcctctttcggtagtgcctcttcgcaccaatctcgatcatgtttcatcgcgcggataacgcttcatgtttcctcact

SEQ ID NO: 112361 - DNA, 347 bp, Arabidopsis thaliana columbia
  unsure (1)..(347): unsure at all n locations
ctgaaatcctgatattagaaaacgtggtcatgtttggttcaaactaggaattttagtccgaaagctttcacgataggtcgggagactcgggacggttgattgacacatttacatgtcaaagtgtctttttggggtgctacaatggatgaaaaaccaatggccggtcaagaacataggaccgatgattccatcaatgtacttagacaaacgattagcaggtgacaaagactacggaatcaacctcttcaatgcccaagtcaacgaatgccttgattggcttgactcaaaaccgcccggntcagtgatctacgtgtcttttggaagcttggccgtcttanaagacgatc

SEQ ID NO: 112362 - DNA, 331 bp, Arabidopsis thaliana columbia
gacccgtctgacgacttgtgatcctcacacgaaacgcctggtcgttagctcggctacccctcaagaagttgaacaaaagaaggagattatcttcacatatgacgtcgatttccaggaaagtgaagtgaagtgggcatctagatgggatacttatcttctgatgagtgataaccaaatccactggttctctatcgtcaattctctgatgatcgtcctattcctatctggtatggtggcaatgataatgctgaggaccctttaccgtgacatttcacgatacaacgagctcgagactcaagaagaagctcaagaagagacgggatggaagctt

SEQ ID NO: 112363 - DNA, 369 bp, Arabidopsis thaliana columbia
attggtcctggttgataatgaagaagatgtacaatcttccaagagatttgccggaggaggtgctctgtagaattccgttgacatctctgaggcctgtccgatctacttgcaaaaagtggagcactttatccaaatgtgggagctttgcaaagaagcaccttgctcaagcaaaagtactagcagacgcaaaggagtttatggtggtcttgatgatgaattttagggtttatttgatgagagtcaatcttcaaaacaacgttgttgaatcatcatcatcatcatcatcatcatcatcatcatgtataaaacgtggagctaaacttattagcttaggcgatgaagaagctgatatatcttaagtctttcact

SEQ ID NO: 112364 - DNA, 229 bp, Arabidopsis thaliana columbia
ggctcgacaactggagttttgatcccaccgtttatagaagacgaccactctcctttacctggatggatggtggagtctctcaaagctgtcaagtacttacacgaagaatattcatccagttcaactgattacttgctttttatgagggttcgctatgatattgccttaaagaaacgagacctcttatcttatatacttacctaatctatcaccgttctacgtttcttat

SEQ ID NO: 112365 - DNA, 363 bp, Arabidopsis thaliana columbia
gtgtttcaaggttcgtcttcgtcagcatcccctaggggagctggtttgagtagaagcttctcatcacacaggaatgtcccttctgagaaaatttctcaatcaagtttgacatctgaaaagactcttgaggttcctctgactgagggttccggtaataaattgattgtgaagctgccgcggggtcgaagtcctgctcaaagtgtgagtggaggctctttggaggaccctgcaccagtgaatagcagagtttcttcacctgtgcatacggtgaagcaggaactgtgtgacaataactggagagaaaaaaatcattcttatcgagctgatgtgagctctgtcttgaatgccgagtcttggcaaagc

SEQ ID NO: 112366 - DNA, 412 bp, Arabidopsis thaliana columbia
aacaaagcttctcactttcttcacccaaccatgaattccccaagacccatctccgtcgtctccaccttcgcttcaccatcctccacctctgacccaacccgaaaacccttaagcttatggccaggtatgtaccattcacctgtcaccaccgctctttgggaagccagatccaaaatcttcgaatctcttctcgatcctcctaaagacgctccaccacagagccagcttctcaccagaactccttctcatagccgtaccaccattttctaccctttctccactgatttcattctcagagagcaatacagagatccttggaacgaggtccgtatcgggatcttgctcgaagatctcgatgctttagccggcactatctccgtcaagcattgttctgatgatgatagtacaacga

SEQ ID NO: 112367 - DNA, 470 bp, Arabidopsis thaliana columbia
ctcctaaagctgatcgtagacttgagcgtttcaagaacagacgctttaaggttactacaagtgatgatcttgtgatcagacgtcttgctaaagaagataaagctactgtatttgctactgatgctattctagctgctcttatgtgtgctcctagatcggattattcatgggatcttgtgattcaacgagttgggaataagcttttcatttgataagagagatgggtcaccgctcgattagagatctgatcatgagacttgttaggagcctctgcctgagggctaagatgatattaactctgctcattctctaggtctggaggctgcttatattaatcagaattttgctcaacaggttgtgggtaagaatgggaaaagggaaacttttgatgagccaattcctaatgttaatgaaggtgaagagaatgcttctattgcttataggtataggaaatggaagcctgatgatag

SEQ ID NO: 112368 - DNA, 414 bp, Arabidopsis thaliana columbia
  unsure (1)..(414): unsure at all n locations
cttgaatctgcaaatcgacttcccccggagaatgcgatcggagatcggaaactggtcgttatctccgcttcactctctcagattacatcttagttttatcaagtttctttgattcaaatttacctgctccaattgctttttctttctcttcatcggaaatttctacgaatgcttctgtttgttcgctttgaaagttgcttaatcataacattttcgtcttcgattctatatgcgttagtaattatactctgtctaagctttcctagaggtgataaatcggtggatcgtagcggcagtgatcgatttgaaaggaattgctgctctctactcgcggtgtttagtttacgattggaatatggngaagatatttagctggttaggggtgttattgtcattgatctcattagtccctgt

SEQ ID NO: 112369 - DNA, 448 bp, Arabidopsis thaliana columbia
  unsure (1)..(448): unsure at all n locations
cgatatttgttctcccagatcttcgtttcgtctcttcgttctcaaactcatggcgactattccggttaacccgaaaccattcttgaacaacttgaccggcaagactgttatcgtcaagcttaaatggggaatggaatacaaaggttttctcgcctctgttgactcctacatgaacttgcagctgggaaacaccgaagaatatattgatggacaattgacagggaaccttggagagatcttgatcaggtgcaacaatgttttgtatgtccgtggtgtgccagaagatgaagagcttgaagacgctgatcaagactaacctgtattgagtacttagaaattgcaagtctgtgtgttttaatttttggattctgtgagcactttaatcttagtgtgattgtggtgaattttaaaaaanaaaatatataatttaatattaattanntattat

SEQ ID NO: 112370 - DNA, 440 bp, Arabidopsis thaliana columbia
  unsure (1)..(440): unsure at all n locations
ccagctggcaaataaccggaattttgttcccgagatcgcactcgaccggacattcgttaattcaaccggctgggaatctagaccggtttacgttgaggttaccggatgatgtacaacggtaatttatgaagagatggtggtctaattcatataagaaaagcttatggtttgaatgattctcagattcctgagattttaaatgagatctctcgtcgtattgtcacngctttcctgtccggatcgttatagtatttatttctttttacggcatttatacgttatcatattttttagtgttttttattatttgttttggatatctttttttatatttttttttgagacttttcagtatttttgttttaataaagttttattttgtttaattcgttaagttatattatttgtgtagttttaatattgtattacttcgttttttt

SEQ ID NO: 112371 - DNA, 257 bp, Arabidopsis thaliana columbia
  unsure (1)..(257): unsure at all n locations
gagaaaattcagcatttttgatagctcaagcacttgattctttccaaaggggtttnctgagatcacaaaggccaagtaacaatggcgaaaggagttgtagttttactttattattttttttatcttttttttttttttttatttttaatttttttgttttaagttttttattttttttttttttttttattttcttttttttttttttttttatttattttttttttttttttttttttattttttttttttttttt

SEQ ID NO: 112372 - DNA, 432 bp, Arabidopsis thaliana columbia
ccgatcgtgttttcttagtgagatggcggaagagaaggtaaaagatgaagctatgcaaataatgggaatgtttcaaattcttccgagacttgtcgtctttgatctcgattatactctctggcctttctactgtgagtgccgttcgaaacgagaaatgccatctatgtatccacaagcaaagggtatattgagtgctttgaaagagaagggtatcgaaatggctattgcttcgagatctcctacttcagatattgctaacacatttcttgataaattgaacattaagcccatgtttgtggccaaggaaatatactcaagttggagtcataagacggaacattttcagaagatacacacaagaacgggagtgccgtttaccgcgatgctcttcttcgatgatgaagaccgaaacattaaatcaagttcgaaaat

SEQ ID NO: 112373 - DNA, 424 bp, Arabidopsis thaliana columbia
ctttcataccggaacaaacccgttcgcaaacgcgtttatcttcagacacaaagaagaagaacagaaacaagaaaacgtcccaaccaccgcctcaaacgcaaaagataaagcagaagacggtaccatcaacatcatcatcgtcgtcatggagccagataaagaaccttttgagttgcaaacaaatcgaagggccacgagtgcacgaaccatcaaagattacgtcatcatcttgtggctcctctctttgtaagtttagtgatgttatttacggtaatgcccgtgtgattcaccgctccgatcactcccctgagagtagcaatcttggacaagatacccggttgttgacccgaaaacccattagtacccgtggatcttcttcatcggttagatccaacggttggggcgcttacacgtcatattcaac

SEQ ID NO: 112374 - DNA, 457 bp, Arabidopsis thaliana columbia
cagcaaccatttccaaagtggaaaaatgcaccaacctatcgcaagtccgtgcaaacctcaagaaaatatacaatagagttcgtgttgttgataatgtgtctagtgcaaaggaaaccgtggctctgctcatgaatcaatataggaatcttgtccatgcttgcgatacagaggtatccaggattgatgtgaagactgaaacacctgtagaccatggggagatgatttgtttcagtatctattgtggatcagaagcagattttggagatggtaaatcatgtatctgggtagatgtgcttggcgaaaatggaagggatatcctggctgagtttaagccatttttcgaagactcatccataaaaaaagtatggcataactacagctttgataaccacatcatcagaaattatggaatcaagctttctggttttcatggtgatacaatgcacatggcacgatt

SEQ ID NO: 112375 - DNA, 368 bp, Arabidopsis thaliana columbia
gagtgatccaaaatcttcgttagcagcatattctggcgtcgaagggccttgattggggctcttatacgaggtctatcactcagaattattgccttgtactaatcgcgagaagaaactttagggtttcactgtttcagagttttgattggtgaattataaaagatgcagcactctgcacagatgattccgatggttcttccttcatttccgcccaccaataatatcaccaccgaacagatccaaaagtatcttgatgagaacaagacgctgataatggcgatcttggaaaatcagaacctcggttaacttgcagaatgtgctcagtatcaagctcttctccagaagaatttgatgtatcttgttgcaat

SEQ ID NO: 112376 - DNA, 195 bp, Arabidopsis thaliana columbia
ctcacgcgctttcatcatcttcttcctagattcgctcctccactggcttaaatttcactatcttcttgttcattttccttccttctcacttcaaatccataatcgctctacttctctctctctctgtagatgcgaaaccatggcgaaactggtgatgtccgacggggtctgtatgccaccggcgacagccatggg

SEQ ID NO: 112377 - DNA, 227 bp, Arabidopsis thaliana columbia
atccgattcaagcttgtgaaagactctctgcatttcttgctgctctgatgctacaacaagggtgcagaaacaacagaccctggaccaacaacgaccattctcttcttctactcgatcttattcttcaatctcaaaccgcgccatctttctacttagccgcatcggtctcctccttgtccttctcgatctcttccttctcctcggtgtacttctacctcgtgccggat

SEQ ID NO: 112378 - DNA, 143 bp, Arabidopsis thaliana columbia
gagataatggcgtacagtgcgtgtttcctacaccttgattgcattggcttcatcagccgcacgatcatcattttcctcctcattccagccgtacgtgtcgttctccaaacctgttcagatcatctgttaagctctacagcctc

SEQ ID NO: 112379 - DNA, 192 bp, Arabidopsis thaliana columbia
cttctttcttttctaaagacaacgacggattcttaccgcaacacacacaaaaaaaaaataactcgagaattcttcatttcttttaaatcttagaatctcgagtttttgtataaatcgattctaatttttcctttgtacattggtttatatatacataaaacacacaaatcgggtatgggggaatttgggttt

SEQ ID NO: 112380 - DNA, 415 bp, Arabidopsis thaliana columbia
cacaagttagtcaccaaaaaaaaaaaaaaacacaaaaagtttcaatggccgcctccacaatggctctctcctcccctgccttcgccggaaaggctgtgaacctttcccccgcggcatctgaagtcctcggaagcggccgtgtgacaatgaggaagactgttgccaagccaaagggtccatcaggcagcccatggtacggatccgaccgagtcaagtacttgggtccattctctggcgagtcaccgagctaccttaccggagagttccccggagactacggatgggacaccgctggactttcagctgatcccgagacattcgcaaggaaccgtgagctagaagttatccacagcaggtgggctatgctcggagccctaagctgggtcttccctgagcttttggctaggaacggagt

SEQ ID NO: 112381 - DNA, 244 bp, Arabidopsis thaliana columbia
agaagaactaggggcctcagattctgttgctttggtaccgctgatcataacaggaaatattatcttcagaggcatcttttgagtatgcaagaagctgtttgcatcgacaaagtgaatgttacaggatactttgtatggtcattgttggataacttcgagtggcaagaagggttcaaatacagaattgcactctacttattcgaccctaataattacttaactccattcttgttagaatcctcca

SEQ ID NO: 112382 - DNA, 145 bp, Arabidopsis thaliana columbia
ctcgatagtgcattggatgatcttaacgacgttttttatttttcaaaaacgccaccaaaggttcggatgcacaggtcgtagaaagggtattggaacctcttcgttgccttacaagagaacgtctccgagctggcttaacttggtt

SEQ ID NO: 112383 - DNA, 172 bp, Arabidopsis thaliana columbia
tcggatagaacaatggcttcctctatgctctcttccgctactatggttgcctctccggctcaggccactatggtcgctcctttcaacggacttaagtccttcgctgtcttcccagtcacccgtaaggctaacaacgacacttacttccatcacatgcaacggcggaagagtt

SEQ ID NO: 112384 - DNA, 120 bp, Arabidopsis thaliana columbia
ctcttcaatcctttcctttcattggagctaaactttgattacgattatggtcacatcaggtatccatcaatcctggtggtgcggccaaacggttcttaagcccttcagcgaccttatcca

SEQ ID NO: 112385 - DNA, 402 bp, Arabidopsis thaliana columbia
ctgatgcagggagagtcatgttatgaacccgactatgtggttgcacattctacttatgcgtttaatgcttattaccagaagatgggaaaagcttcaggaagctgtgatttcaaaggagttgctacagtcaccaccactgatccaagtcgaggaacatgcgtgttccctggaagagcaaaaagcaatcagacacttggaaacaacacctcggcgttggcccccttagcgaactctacaacctctggatgtatcccaaagtactatcatcacccttacgcatctttcggtgacttaacattactctcccttctactgttcattcgcttagcattcttgtagaaactttgtaaagaacaacaactctccaatatttggttctcttaaacttaacttcttcttttg

SEQ ID NO: 112386 - DNA, 287 bp, Arabidopsis thaliana columbia
tgagaagataagagctctcaaaattccccgaatttcgaatatgattgtaacactaaaccctaagattctccatttctccaaaatccatcctttttctcgaccttcttcgtatctctgtagaactcgaaatgtgtctctgataaccaattgcaagcttcagaagcctcaagatggtaatcagagaagtagtagtaacagaaatctcacgaagaccatttcactttccgattcagcaccgccggttacggaggagaccggcgatggaattgttaagggaggtggtaatg

SEQ ID NO: 112387 - DNA, 410 bp, Arabidopsis thaliana columbia
  unsure (1)..(410): unsure at all n locations
aagagacggaaaaatgcagcgaagaatggtcaggatatgtcaaaccctactggtaatcctccaagactcgctgaaggaaaaaagtttgtggaaaagtctgcgtgcagtatatcacagaagggccgtaagtcgtcccaatcctcaattctaaaaagaaagcaccagttggatgaaaaaatctccaatgtaccttcacgtcggaggttatctctctcttccacggattctgaggatgctgttattaaggaagactatgatgttcgaaatgaagagaagctttcctgtcatacatcagattagctgcaaaaaggcaatttcctgcaatntttcataggtccaaatatattgatacgtagaaagaagcccttagcaaaacatacaacagaacgttctccaatttaggatttgtc

SEQ ID NO: 112388 - DNA, 234 bp, Arabidopsis thaliana columbia
caattcctgataaaacatacacaaaacaataatcttaatttcaagaaactactactattgctaaaaatcagagactgtcgctaatggctatattcggtaaactgacaaagctcaagtctgccataaagaaatggccttccttgaccaagaaccaccattcaaccatgtgtaccgtctctaccgtcgtatctgaggtctcaaagtgcgaggatctccatgtggtctacgaagtta

SEQ ID NO: 112389 - DNA, 259 bp, Arabidopsis thaliana columbia
cggacgcgtgggtgaaaataacagtcaactctttgtgcatgtggccttctttgccatttctcacatccctccaatgactgagttaacttacgactatggagtatctagaccaagtgggactcaaaatggcaatcctttatatggcaaaaggaaatgcttctgtggatcagcgtattgccgtggctcatttggatgatgatggagagaaaggcgatctctggtgaacaactggagtcggatgattttggttgcaaaaagc

SEQ ID NO: 112390 - DNA, 461 bp, Arabidopsis thaliana columbia
cgtaactgtacaatttccctagcattagtttgtttttcttctttcttttatagaaaatgtgataagtgatagtgataggttgaagctaaaacgagtgaaggaaaaagacaagagaggcaaaacaagtaaactcagctttgtgttgtcatcttctgtagagtgggattccactcttcttgttcatgtcacctctctctcaatctaagtaaaattaattacaactttagcctctctatatattccacacctctctgtatttctcactactccaaaagtactcacaacaacacagaggtagggaaagaagatgaagatgtcggagagacgagttgtgtcctatcgtaaatcgacactcaagtgttgggattggtgtaaggagcagagaacgcgtgcttatatcatctggaggtgtttgattttcttgttacagtgggatgacttttgatcatacaagaatagtg

SEQ ID NO: 112391 - DNA, 346 bp, Arabidopsis thaliana columbia
aggaagaggagatgcttggatcactacgtgctgttacccattggactcctagtgcttttgcaactgctcaaaaggaatgcgtagactcttctttttcacagaattcctacatctcctatgagagcatgcagaagcttgggatttctcaagctgtgcagttcttacagtctagatacccagatggcacacctttagctgctgtatttattcattcctcaatgattgagatgctggattctgcaactgaggatgctattgaacaaaacaagtggatcgattccctctctgtattaccctcatcggtcacgtcacaggatgcaaacaagatgttgcttctttgtccctt

SEQ ID NO: 112392 - DNA, 276 bp, Arabidopsis thaliana columbia
gctgtcattgacagaatgtgagacacagtcacgttcctgcatcatgtgccatcgccaattggtcgtgaaaaacgttttcaactgcagcatttttcttatatgagcagatccatacagatgatgcatttgggcatcaaatgattagaaatttggagagtcggagatgtgcactctcaagcattgacgcatcaccaactttacttgcacaggagagagtgagacttgataatggatggcagagagctagtgcctgtgacatgctcaaagtgtatgggt

SEQ ID NO: 112393 - DNA, 354 bp, Arabidopsis thaliana columbia
agcaaccatgagagcttgcaagctatggaaaatcccatcattagacattcttggaccaatcacagagtcaatctcctctcacttaggcactaatccttccggtctttcacgtggcataacaaactcatctctcaacgaagactacttcaaaagaatcgaagctatcgaattcactatcaaacacgacgacggtgccttgcccgagaatcttgaaaaagctgacattgttcttgtaggtgtctctaggacagggaagacaccactctcgacttacttagctcaaaagggctacaaagtctctaacgtaccgaatgtgaacggtgttgatcttcccaagactttgtttgagatcga

SEQ ID NO: 112394 - DNA, 192 bp, Arabidopsis thaliana columbia
ctcacttatccgctcggccgattccacatcgcttggacgtagtcgtcgacgatcgccgtggctatccatgaccagatcttaaaggctgggcggacggtcacattcaatacccaatatctggtatcagttggccgtgacgaagactgttgccatgccaatggtcccatcatgctgcccatggtactgatctga

SEQ ID NO: 112395 - DNA, 434 bp, Arabidopsis thaliana columbia
aagagttctaggtatgtaccagtgagagcttcggcctcacctgtgagacctagacagcctaggagtgaccttggtcaacttcctgtttcatcacaacttaaaaaccgaaaaccagctgctttgatacgtagagcctccatgcctagctcaagaaaacctgcaaaagaaatcaaagactctctgtacatttcgaaaaccagttttctccaccagataaattctcctgatgtgtcaatgaacgcaccaagaattgacaagattgagtttccgttagcgtcatacgaggaagagccttttgtcccggttgtgcgtgggaagaaaaagaaagcatcgtctagaggttcctacagtccaccttcagagccaccactagactgctcaatcacaaaagacaaatttactcttgaaccaagccaaaacagagaaggagcgat

SEQ ID NO: 112396 - DNA, 241 bp, Arabidopsis thaliana columbia
acggctacaaaacctgcgtgatcacaccgtttgtcgaacaattcaagaagatgaggagagtgatcatgacagagatgtgtttgtccagcgagacaccgttggctacacgacaatagagctgaggaaaccgatcacttgaccgcttggctctacagcatggttaagaactatgctccagttgatctccgctctgatgcacctcacttctgtctatatgtattcacgaggtcttctctacgct

SEQ ID NO: 112397 - DNA, 234 bp, Arabidopsis thaliana columbia
cacacatctcctattgcaaacgaacataaaacactacctaagagatcaatatggctggagtgatgaagctggcatgctcgctcttggcctgcatgattgtggccggtccaatcacatcgaacgctgcgctaagctgaggctcagttaacagcaactcggcagggtgcattggctacgtgctacatggtgctgccattatcccagcggtgtggtacggtgttaaaaaccttcaat

SEQ ID NO: 112398 - DNA, 136 bp, Arabidopsis thaliana columbia
  unsure (1)..(136): unsure at all n locations
tcgctcagncgccgcacgacctcttgtcaccgtacattgtacttgtcggngacaagagcaccgatcagatgtaccaccgttactttacgaggcgctataacttatccagtacgacctgaccttgtcaacttctctc

SEQ ID NO: 112399 - DNA, 143 bp, Arabidopsis thaliana columbia
cttctcttctcatcgtctcaaatcttctccgatttactttacttaccactttcctcgttccgggaagagaccacatttcgacttgcgatgctcagtctcaatcgagaaagaagttccggtaacagaacgacccttcactttcc

SEQ ID NO: 112400 - DNA, 105 bp, Arabidopsis thaliana columbia
ctttcgttagtttttccaatttcggatttggtcttgttgagaatatatttacgattttaattgagagattttgtgatagctcaatgtcaatggagtgtgtggtca

SEQ ID NO: 112401 - DNA, 187 bp, Arabidopsis thaliana columbia
atttatcgccggagaccgtcacgatatacggaagctacgaggagcttttaaacgatgcaaacgtggacgccgtttacttgacgatgccggtgacgcaacgagcgagatgggctgtgacggcggcagagaagaaaaagcatgttcttgttgagaaaccaccagcttaagacgcgacggagctggagaa

SEQ ID NO: 112402 - DNA, 189 bp, Arabidopsis thaliana columbia
ctcagtacacttcttttcatacctcaagagacttaaactagtttgaggagatttagaggagtggttggttcttcggattgcgctttcccctcctgttcttgtttattttttatcgagctttcttcctcttgacccttatctgtctcttcatgcttctaaccattcttacttcctcacgcctatctaatg

SEQ ID NO: 112403 - DNA, 242 bp, Arabidopsis thaliana columbia
  unsure (1)..(242): unsure at all n locations
acagtttggatttggatttagatctgatcataaaggttaaagtatcattcatggatcgttattcgaagangaatttaaaaaatcggatgtgccctcactattatnatacattanattcntacccttctcctgatatgtgtaatactgcatttatcatgaactcttcacaaacttcttttaaattttttcattattatactctactacaatacttctaatatttttattcttctcatattata

SEQ ID NO: 112404 - DNA, 127 bp, Arabidopsis thaliana columbia
ctctccttagcaggagagtttcgtttcttagatctagtccgctgttttttctttggtcttcaatcgttggtcaaatctactcaatgaaagtccaagagtgggctgaatctattctctgtcaacggtg

SEQ ID NO: 112405 - DNA, 290 bp, Arabidopsis thaliana columbia
aaaaaagatggcccaaaagctagaagcatagggtggtgagatgggagaagggtggcgagactgtgcctttgtgcactctgtggaacatctgaagcagtaacagaggctgagccaggtttgatgatgaacttctacaaggacacgtgtcctcaggccgaagacatcgtccgtgaacaagtcaaactcctctacaaacgccacaagaacaccgctttctcttggctccgtaacatcttccatgactgcgccgttgagtcatgtaatgctgcgttttatgctggattcgacat

SEQ ID NO: 112406 - DNA, 126 bp, Arabidopsis thaliana columbia
caaaaagacttcttgtttcattggatacgatcgtggtactagatcatttctccaagatcaagacaagaagatcattggctcttatggttcagacgcagacactattaactctctcggagcatactt

SEQ ID NO: 112407 - DNA, 115 bp, Arabidopsis thaliana columbia
ccgaccggattccgggcgaccacgcgtcgttagaggtccaaaaggtggaagatatggagttaaaggagccaacctatgggacgacggatcgtcacatgacgtcgcgaccaagtat

SEQ ID NO: 112408 - DNA, 348 bp, Arabidopsis thaliana columbia
ataaaatagcataataggtgtaatgagatcctctatgaaccatgggaatagagaactgcatagtttatgttgtggctctaagtgctatcgcctctaccttgtcattatcactcttactcatctccttaaactccaattttcatttctcccaactattaacacacctttccttattaccctccccatctcataccatatctcattacgtatctcttactccaactctactcttcatctccaattttctccttcaaatcttcacctcctccatatcttttcactcccccccctctacctttctactctttcctcccactcccacttctcattttccctccctctccattc

SEQ ID NO: 112409 - DNA, 457 bp, Arabidopsis thaliana columbia
cagatctctcccactccgaaaaaccttcccaatccgaatcaacaacggtggaaacgccgccggagcaagaatgtcagccaccgcagcatcaagctacgcgatggcattagcagacgtcgcgaaaagaaacgacacaatggaattaacagtcacagacatcgagaagctcgaacaagtcttctcagatccacaagtactaaacttcttcgcgaatccaacaatcaccgtcgagaagaaacgttaagtcatcgacgacatagtgaaatcgtcgtctcttcaatctcacacatctaactttctcaacgtcctcgtcgacgcgaatcggatcaatatcgtgacggagatcgttaaggagtttgagtcggctcacaattaagttactccttacacattctttctcagttcatttcttttttataattcatctcttctctttcattattttatcttcattttc

SEQ ID NO: 112410 - DNA, 170 bp, Arabidopsis thaliana columbia
ctcaactatatcttccaaaacacaaaacaaaatattttgtttcccactgatctttcaagcgccatcgtcggaacttcatttattcgccggtccccatcttcaatcagattccgttccccttcatcagccaacacacacatcccttttcggcttcaaaacaggaaccgctc

SEQ ID NO: 112411 - DNA, 219 bp, Arabidopsis thaliana columbia
gatgacaagctgactgttgcccgtgtccgtaagatccagagattcttgagtcagccattccatgttgctgaaatcttcactggtgcccctggaaaatatgtcgaccttaaagaaaacatcaacagtttccagggtttgttggatggcaacgtcgactatttttttcaaacaatcttttttcacaggttgttggcttctctctatctcactcctcttctt

SEQ ID NO: 112412 - DNA, 254 bp, Arabidopsis thaliana columbia
gaattacaaacaaaaatggttttgcaaaagctttctctcattgggctgcttttgctcctgaccatcgtcgcctctccagcaaatgcagatggacctgtttgcccgccgtcgtacatactaagccgttcatgtttttcttgtacgttttcttattacttttttaattcattcttttttatctatttttctctatttttctattttattctattctatctttcttatacttttttctctttatttctccaactctt

SEQ ID NO: 112413 - DNA, 180 bp, Arabidopsis thaliana columbia
tcggatctggaaccgggtttgagttgctagcagaatgtaccaacgaagcaaatgaaaaccaacaccaacatgaattcaacatcttttcttcgccggcttctttttcttttgggtcttgcacgcgacaagagagctcattttgggttccagagacgaaaacccaacccggcgagacacatt

SEQ ID NO: 112414 - DNA, 190 bp, Arabidopsis thaliana columbia
cacgtttgagaattcgaaatcgaatgtctcttcgtcgaacggctgcgcgtggaagtcacctttcaccacgagaggtggtcgcggaaccagatctatttcgacggagtttttcacgccgatcaatctcaacgccgcaacctatttgtcaacccaagcaccgatcgagagagcttttgatcgatttgagaga

SEQ ID NO: 112415 - DNA, 164 bp, Arabidopsis thaliana columbia
tcttcttcttcgaattcttctctgaatagttacaatgcgagtcttcttcttccccaactcggacatggcgattttctctgttctcctctccctacttatcctatatcttcctcttccattaacttaagaactcaacgtccacagaaccgcctctctctatctcc

SEQ ID NO: 112416 - DNA, 298 bp, Arabidopsis thaliana columbia
atgaaacatccgatggcacagtagctgtgaatggtaagccatccattcaaaaggacgagactacgaatgggacattcggcattggccatgatacagaacaacagcattctcatgaaacagagaagaggtaaagactcatgttttcatgtcttaaggcgaagccaaacaaacaaagaggaattgagatttgaataagacgaggagaaatcttggtactcaggccttgtagtccctctgcaacagatttcgaagtttatagatcttaagagtgggaaacattagtcttcagggtttagat

SEQ ID NO: 112417 - DNA, 439 bp, Arabidopsis thaliana columbia
  unsure (1)..(439): unsure at all n locations
gaatgtgcttcctgaattgatcccaattttcgtcttcgtaaacattctggtctacttcggatgttttgcattcggtataggagggctaccttgggtcattatgtctgagatctttccgataaatataaaagtttcagcaggaacaattgtagcattaacatcatggactagtgggtggttcgtgagttacgctttcaactttatgtttgaatggagcgcacaaggnctttattttctctattacttttttattaatttggataaaacaatttaccaaaaaaagttaagagttatctttataaaaatacacaaatcaaacataaagttatttaaaaatcgtgttcgaattttgacaatttgatcaaacagatttagatgtgcaaaatgtgccggtcggaaaatatcttttagattcccgtttttcttcaaaatacctttt

SEQ ID NO: 112418 - DNA, 236 bp, Arabidopsis thaliana columbia
aaaataaaaaaaaagaagaagcaagattcgttcgtggatatagcttctggagacttcttttgattttctgtttgaagcgagtgacaacaaaacaccaagtcatatctcaagaatctactaatggacaaagatgatgctgatggagacctagcaacatgaagatgaatatgatatgatttgagtattggatatttttcatgtgggtgcctctcccctttataaacacctttttaatt

SEQ ID NO: 112419 - DNA, 211 bp, Arabidopsis thaliana columbia
gagtgaggtaatcattaccaacaaataatggcggttttatcatcctcctctctgtggttctcttccaagacaacttgtgcgatccgcaatcttctgatcccgccatctcttcaccgcttctctctaccctcttcatcttcctccttttactctctctcttcttcttcttcttcttcttcttctctcttgacatttctcctctgaggacttc

SEQ ID NO: 112420 - DNA, 117 bp, Arabidopsis thaliana columbia
cttcttttgcttgagctttaggttttgagagcaatatgaaaaacgaagacgcgtcaaagagcttttgtggagaggttctgcttgctttctactaatattctacctccagttagctat

SEQ ID NO: 112421 - DNA, 238 bp, Arabidopsis thaliana columbia
tcctcttctttgcttccaccactaactattgcaattaggtactagaaaggacaaccttttgcggtgtgccttgcaagagtcttcaacttctgctgttgctactgaaaagaaaaacaaagaagaaggagaagagtcaacagtggcgtttccggcaaagaaacctaaacccgtagataaagcggctgcagtggcgaaaccgctgagacaaacgatggtagaagacctttatattccttta

SEQ ID NO: 112422 - DNA, 194 bp, Arabidopsis thaliana columbia
attctagggcaaaccaacgtatatctctatcttagagatcaacactagcgctggagcagatgaaggtgtttcgcattctcagagaagacttttaataacatcctccaactttcatcagataagccacaatggtgaaaggtcctggtctctacaccgaaatcggcaaattggccagagtacttctgtacaaagac

SEQ ID NO: 112423 - DNA, 144 bp, Arabidopsis thaliana columbia
acttaatcagacatcagacgcagcatgatgaagttcacgttccagtacgaggaggaatacatcaaaaactcgagagacgttgcgttgttcgcttgcagatggcttccttcttcttctccccgagctctagccttcctctgccat

SEQ ID NO: 112424 - DNA, 167 bp, Arabidopsis thaliana columbia
aatggctgatagagctactcactaatctataattttagcatacgccgacagatacactggtggcgaggaccttacccgtacttgatatattttctattttgacagatctagaccaaaccactcgaggttaccactttttctatcttgtgggataaagagaccgaaaa

SEQ ID NO: 112425 - DNA, 175 bp, Arabidopsis thaliana columbia
caacaacaaatcttaaacgttttactttgcgttgtactattcaacctcaatggtcgcctcaacaatggctctctactacactgccttcgccggtaaggccgacaagctttcccccgcgggatctgaagtccttggaagcggacgcgtgacaatgaggaacacagtgcgcatgcca

SEQ ID NO: 112426 - DNA, 254 bp, Arabidopsis thaliana columbia
ggagaaccatcaaattcatcttcttctctttcacaaatttcagcctaaaactttccgattccatggaaatcgaagtctcttgctcgactcatgatgccgaaaccaaaggaaaccgcatcgatttggatagtattcgtgtaaagcgaaagacgttacagaatctgctcgcggattgccagagagctcttgagcttctagaacttcccggcgatgaaaaccggggcgaacagagtgaatcaccggaggaggaggag

SEQ ID NO: 112427 - DNA, 172 bp, Arabidopsis thaliana columbia
tctctatctatctctcttcttaaagcggccatttttgctctccaagttccatctcaagcttttcttcttgttttgctgatctcttaactgaaaaacaagatcttgaactaaaatggaaactgaacacgatttgtgcaataccaattggggaagctcttctctctaaccctta

SEQ ID NO: 112428 - DNA, 343 bp, Arabidopsis thaliana columbia
ggagccgcttacggatttgaggttgtggacaattgttgttgtggggtggggaggaacaacggacagaggacatgtttgccgctggagaccccgtgccctgaccgaaccaagtatatcttttgggacgcgtttcatccgactgagactgctaacatactgttggcgaaatctaatttttactcccgagcttacacttacccaatcaacatccaataactagcctatctttgaagaaataatatcttgatctcccatatgaatgcatatatgtcatgtaatatggcctatttataaaatgtttctatttcctatgcgttaacttatgttatcttttaaaaaacta

SEQ ID NO: 112429 - DNA, 128 bp, Arabidopsis thaliana columbia
aaagagaggaaagctaatgggcttacatagtttgataacacggactgaagaaagccgcgtgactggtgatccagcacggatgctgaacactggctgtgatgccgggagactttactctactgttgtag

SEQ ID NO: 112430 - DNA, 355 bp, Arabidopsis thaliana columbia
gcgaattatgttggatacatagacaatgtagattgtagagatcgctagatataacaaaggattgtatttggattactatagactagaattaagtcgcttgtttattgatgaggtatatgttgattcttctatcgtcaatagagaaagataggaaggtgagtgtagtttagccatttctctttgcatacatggaaggtaagtactatatatatggcgaaataggaagcgttatcacctcccggatgaggccacacgtacatttatattaatatgaccggaaaacagcctttcaccgtggcagtacatagatcaatccattgtataccggtatagatcacataaaatgataacccac

SEQ ID NO: 112431 - DNA, 229 bp, Arabidopsis thaliana columbia
cggtgaagatgttgacatgacagagaattctgttatggctatgcgtaaactcgtgcaattacgagccgtttgccataaacgggccattatgactaatctcttggcttaaatatcacattttattgaccaccattttgaagattaccggtttaagcattttttcgcgtctagactctttccatgttacgcctccataccgtgtcaagtactcggttccattactttggcg

SEQ ID NO: 112432 - DNA, 365 bp, Arabidopsis thaliana columbia
tccggtgaaaatgactacaggagctacaatacacaccacagaaggattgaaattgacagtaacaaagaggacaaaacctctggacataccatccgtaccgatacttccaatggatacttcacgggatgaagtttcatctgctctttcttaagtcttcatctttacaaaactgaaaacaaacaagctcagatgaagaagcaaaaatcttgtgttagaacagcaaatgttgaattgttggaacatgaccaatgctttctgattatttatctgcactgtaaaatgcagacatgtaaaatgagaagatttattattccttggaaaataaaatggttttggtctgacagtgaagataatttaacctttgg

SEQ ID NO: 112433 - DNA, 359 bp, Arabidopsis thaliana columbia
agcaagtaaggccatatcctctgaagatttggtggtagtttcacctgatgttggtggcgtcgcaagagctcgcgcttttgcgaagaagttatctgatgcacctttagcaatagttgataaaagacgtcatgggcacaatgttgcagaggtgatgaacttaattggggatgttaaagggaaagtagccataatggtggatgacatgattgacacagcaggaaccatatgcaaaggtgcggctctgttacaccaagaaggagcaagagaagtatacgcttgtaccactcatgccgtttttagccctcctgcaatcagtcgactatcgagcggactgtttcaagaggtgatcatatccaaca

SEQ ID NO: 112434 - DNA, 112 bp, Arabidopsis thaliana columbia
gaactatgcaaaaggttgttggagtatatagcaattagcttgggtctaaaaaaagagagatttgagggaatgttttgggaggcggggcctagcccttagatttattttttcc

SEQ ID NO: 112435 - DNA, 456 bp, Arabidopsis thaliana columbia
agctcagtgcctctttgcagcgaaagctcaaccaacaagacgatgattatctcagagaacaatcgcagagagatctgcaaataccttttcaaagagggagtatgctttgctaagaaggatttcaatctcccaaagcatccgttgattgatgtaccaaacctgcaagtgattaagctcatgcagagtttcaagtccaaggagtacgttagggagacatttgcgtggatgcattattattggtttctgactaatgaaggaattgagttcttgagaacttatcttaaccttccttccgatgttgtccctgcttctttgtaagaagtctgataagcccttttgtccgttccttttgagttgtcattctgtattattctgttttagtttccttatatttttgtaattttttctattctacttcatttttttctattgttcttacttctgtttcattttatt

SEQ ID NO: 112436 - DNA, 389 bp, Arabidopsis thaliana columbia
gacgattttaggagctacatctcaagcctaccccgattctttcggcggttattttctaggcacagggacatcctatgccactcccgttgttgcggggctcgtcgtactactcaaagctttacaccctgactggtctcctgctgcgctaaaatctgctattatgactacagcatggaagactgatccatccggggaaccaatctttgcggagggagaaccacggaaactggctgatccatttgactacggtgcaggactcgtgaacgcggaaagagccaaagatccaagactagtttatgacatgaacatcgacgattacattcactatttctgcgccactggttacaacgatacatcaatcactataatcacggggaaaccccacaaat

SEQ ID NO: 112437 - DNA, 416 bp, Arabidopsis thaliana columbia
cgcgtccggaagactggaggtggtggtggaaagccttctatgcatctggttcagtcgcattgtacgttttcgcgttacgtccatcaactattgggtgggtgatctacaaagtctgagcggacccgtctcagctatgctttacattggctactctctgcttatggcaattgcaatcatgctcgccactggaaccattggcttcctcacctccttttacttcagccactatctcttttcctctgtcaaaatcgattgataccttgacgacaaaatctcagccgttgatctctgctttctctaaagcaatttcaagtgttgatatttttttgttagaacttatacttttttagaccactttattttacttgatttttttctttttcttggtcctttttttatcctttttatatttctat

SEQ ID NO: 112438 - DNA, 223 bp, Arabidopsis thaliana columbia
aattcttccttaaaaagtaaaaattaatctgattctctctactactactactacgatgggtgagaaaaaggaagaagcggggacgaatcctcacggtgagaccaaacctaccgttggtggaatcaccaccgtatttttgaagcttgatatgcattgtgttggatgcggtttatttttcccacgcatcttctaacatttctttcaattgccttgtttccttatt

SEQ ID NO: 112439 - DNA, 450 bp, Arabidopsis thaliana columbia
cacacggattccatggagactaaacagagtatccctctcctcatgccctataagatgggacccttcaatctttctcacaggggtggtttggccccattgactaaatcgagatcggatggttacattcctcaacctaatgcccaattatattacactcaaagaacaacacctggtgggcttcttaattcccaatcccgggtagtctcccagaccatatttggccttcccgaattaaccgggtttttgaaccagaaccaagtgggagccttggatccctacttggatgcctgtaatttttaaggaggtagtttttttcctgcatttttttacattttgttgctatttattttaattttttaacttatcttgatggtttttatttctcttctattatgttctagtttattttctattaatattttctgtatttttttgaattttagtttttta

SEQ ID NO: 112440 - DNA, 262 bp, Arabidopsis thaliana columbia
  unsure (1)..(262): unsure at all n locations
tttcatatcatntncgggcccggcacaaacacaacagaggttcatctcctatttactctccatctatccaatctttttctttttattttctccccaatcacaaacataccaataccgacctttaccacattataaaccccgttctaaaactcaattcaataaaattgcaccctccaatggttacaatgctgcttcaccaacttactaatcatcttaaccttagttcactacaaatattcttcaacatcatatacctacagtt

SEQ ID NO: 112441 - DNA, 422 bp, Arabidopsis thaliana columbia
cactctcagaggagcagatgaaggaactaatctaccgcgaggcgcttgctttcaatccagaatatcagcaatagtttgaagaacagcatttgggagatgaagatgagataagggtttggcgttatttggtttggacaacattcttaaaaggaggaaagatcattgtttgtcttttgtgttttcttgtgtagtttatgtgttattttggattttttttgtttttttatatttattatttttttgtgttatttttgattttgtattttaatatatattatttatgattttttgtatatgtttttttttttttgatttattgttatattggtgtatttttatatttatagatatgtttatttagtgtgtatatttttttttttttttaattagtttttttgtttttagtttgtttttattttatt

SEQ ID NO: 112442 - DNA, 457 bp, Arabidopsis thaliana columbia
ggtttcctcccctactcctacaaagctccttccccgccgccgcccgagcaacactaaaccccccatctccgccggtcgcagggtgcccctcgccgccgccgccttccagatctcgccatggcgtcggagaagaagcaggcgaacccgatgcgggagatcaaggtgcagaagcttgtcctcaacatctccgtcggcgagagcggagatcgcctcacccgcgcctcgaaggtgctggagcagctgagtgggcagtcaccggtgttctccaaggcgaggtacactgtgaggtcgttcggcatccggcgtaatgagaagatcgcgtgctacgtgacagtgcgtggtgagaaggcaatgcagctcctggagagtggcctgaaggtgaaggagtacgagctgctgaggaggaacttcagtgagactggatgcttaggttttggtattcaggagcacattgttc

SEQ ID NO: 112443 - DNA, 458 bp, Arabidopsis thaliana columbia
ctcctcctcctccggttaagcactactctccccctccggtttaccattccccacccccacctaaagagcattacgtggacaaatgtcctccaccaccggtgaagcactactctccttctgcggtttaccattccccaccacccccaaagaaacactacgtgtgcaaatctcctcctcctccggttaagcactactctcctccttcgaggtaccattccccaccaccaccaaagaaacactacgtgtacaaatctcctcctcctccagggaagcactactctcctcctgcggtttaccattccccaccaccaccatagaaacactacgtgtacaaatctactcctccaccggtgatgcactactactctcctccagtttaccatttcccaccaccaccaaagaaacattacgtatactagtcgcctgcttctgcaggttagcactactgttccccttca

SEQ ID NO: 112444 - DNA, 458 bp, Arabidopsis thaliana columbia
gactcgagcttcgttcgtctctctgcaaatatggcgacagcgtatcaaccaatgaaaccaggaaaggctggtttggaagagccactcgagcagattcacaagatcaggattactctctcctccaagaatgtcaagaaccttgagaaagtgtgcactgatttggttcgtggagctaaggacaagagacttagagtcaagggaccagtgagaatgcccactaaggttctcaagatcactacccgaaaagctccctgtggtgaaggaaccaatacatgggacagatttgaacttagggtgcacaagcgagtgattgatctcttcagctctcctgatgtggtcaagcaaatcacatccatcaccattgaacctggtgttgaggttgaggtcaccatcggcgactcgtagatcgactctcttacttctgtttttgctctttctcttttaagaaacaaatgttt

SEQ ID NO: 112445 - DNA, 456 bp, Arabidopsis thaliana columbia
ctctcgcgtcgtttcgtttccaaatgttagttttcttctattcattttttctttaaagttgttacacagatctcaaaactagatcgaattgtaagaaatcgaaatttattgtaatgtttaggtaggagaaaacccagttattgaatcgttgaattgagtccatttacgttttctgattacagcttgaagatgggagatgaaactgttgacggtatcgaagccaagtatatatctggtctcagtactataatggttgctacaattcaagaagccaaggatagaatttctcagatcgagtatattttttgtagccagttatttccaaattttcaatccaaatccaaagcttttgaaaaagtttattcagaagctcgtcttgctgcttgtgatacttggaaagatagagagaaaagtttgttagatcagattgaagagcttatggtagagaatcaacag

SEQ ID NO: 112446 - DNA, 461 bp, Arabidopsis thaliana columbia
ggagattttactctgaccttgagcttacggaaaaggaaatagagcggtcggtaatggaagcttctcgtgctgagtatcttatggaatggtctaagccacgaattggtccaaaggaatcatccacctcgaatgctgagacatcatcttctggagctagaccttcaggcagcgattcgaaaccagcagaggcagtaaaagaaaagacggtgctgagcagcagtatcgagatggtattgtcgatgggatttagctacgcacaggccatggaagcttatagcatttttggggatgacgttgactctatggtctgttatgtactggagacgagctgtggcggcaacaaccgacgcaaaggcaaagccacggaatagagaatgtaacatgaattgctctgtattaatagtatatgatataccaattcgtattcctatcaatggtgggcgattacccttatcagaata

SEQ ID NO: 112447 - DNA, 432 bp, Arabidopsis thaliana columbia
aaacaaaacacataaactttcaatctctcttgattccaatccattctaaaaaaaagagaaaaatacaaaataaaagaagggaatcattcaacttaataactttttttatataatcacctaaattaaattaatattaccttcatttttcttcatttattacctttttataaccctttctttccccaacttaatctccttccttataatacccctttttactaaattctcataatattcttatataccctctctttatcaatcttcccaactattttcctcactttttttccttttaaaactccccctttttccattcttttattacttctattttttttttctcttcccctctttcctttttttttttcattttttttttattattttcctctcttttttttcttttttttttcaatctttttcttttttctc

SEQ ID NO: 112448 - DNA, 261 bp, Arabidopsis thaliana columbia
  unsure (1)..(261): unsure at all n locations
aaatcaaagcagcagttatggccgacgtagcatcaaagcaccccatggaagatgaggtgaagaagacggaggcgtctagtgttggtgtnaaacttaagacagtcgtggagattatggcttttgggttataattttcaccatatatttgtttgtataactcactatgtttttaatatatagtcatgctttatttaaggttgttttctttataattcgtttttttaatctcttttcttttttttttattttttttaattaatt

SEQ ID NO: 112449 - DNA, 334 bp, Arabidopsis thaliana columbia
tttacttgtataagatatttatacaaaagaaagacaaactccaaattcctgatgatggtccatctaaccacaagaaggaaagaaaaacagtaactgtaacacaaaaagaaatccgaaagcattctttctaacctagtttttgtttttgtctaattcagtatgtgacaggggaagtcaaattcccgaacctcgtaaaaccatctacatattcactttcaagtaaaaagtttttcactgcttagtttcatcaaataagcagaccaaaacttaacactaacaaacactcaatggtattctcttgtgaggttgctcttgactgttgctgtttagatta

SEQ ID NO: 112450 - DNA, 429 bp, Arabidopsis thaliana columbia
gttatacaggaagatgggatggttcacaaggtggtgcatccttctgtcaagctaccacggaccaacggatgttctatgtcggtactagttggtacaggggataacatatggtctggactctatctaattatatccaccattggatttatttcaatgatcacattgttggacatcttttacataaaaagatacaacataacaacgtggtggtacaagggacttctatttgttggttgtatggttgcaagtgtcttgatttttggaggtcttgtggttgttttctggcatcgctgggaacacaaaaccggtgaagtggatgctaatgagagcgacacggttgattcgaatggagaagaaacccataatccatgtgcagcatagcttaagggcttggcattagaagaagatgttcaggattacaccagtatt

SEQ ID NO: 112451 - DNA, 453 bp, Arabidopsis thaliana columbia
gtgacattgtaaaagaacaattggctttagctgctgatgttccgctcactgctgaatccaagttctctgctcttggtgccgattctctcgacaccgtggagatagtgatggcgttggaggaaaagtttaacataagtgtggaggaatctgatgctcaaaacattacgaccatccaagaggcggctgatttgatagaggaccttgttcaaaagaaacccgcggcggaaacttcctgaaccggctgtcttttctttcctgacctattcttgccttcagagcgttttattacggtatattagaccgtttgttatttttatttatttcggaagctaagattgggtgttgacaatgagacaactttggtacgttgagattaaaaaaaaaaaaatattttaaacatttatcactgtaatttgcattaaacacaatattgctttataataattactaaag

SEQ ID NO: 112452 - DNA, 475 bp, Arabidopsis thaliana columbia
cattcaagtccagaagctaaagctgattgagttctatttaaaatctggcttttgttcttagtttgctttcttttgtgaatctactacctgtgtgtaacgtgtgtatctgttgtcctcttctttgcctaatggagacttatgtaaaacaaagacatgccccagaaacatctgttatctttcttctccattttatcagaggatttctattaaaaaaaaaaaaaaaaaaaaaaaaaaaaaaaaaaaaaaaaaaaaaaaaaaaaaaaaaaaaaaaaaaaaaaaaaaaaaaaaaaaaaaaaaaaaaaaaaaaaaaaaaaaaaaaaaaaaaaaggggggggccgttgggaattaaaaacaaaaaattttggtaaaggaagattttaacccttttgaaaaaaccccaaggggtttttaaatttttaaattttttttttggggtaaacaaaggcccccggttaaacccggggctttttttttt

SEQ ID NO: 112453 - DNA, 293 bp, Arabidopsis thaliana columbia
gctgattggattctcttacaaagagagacaagaagtttgaagcaggacatggtataggtaggcgtcgatgctagtacagacgtgcaacattgtggttttgcccgcagtggataagaaccgagaagaccaactcaaagatcgctgccgtattctatcaacaatctgattgaagagatctctcttctttctaccaaacatcttagatgcctttttatatttcgtgagaatgcacaagaaagtgttactacttttttgatcttagccgctttataatttttttttttttcgtataa

SEQ ID NO: 112454 - DNA, 469 bp, Arabidopsis thaliana columbia
ctccaattcagtgaacagtgtgggaagtatgagtgcaactgctttgcaagctgtgggcggtccttacgtgtgggacaatcagtgggctctagctgttcagcgaattgctcaaggcactcctccccttgtcgtcagttctgtaaaatggcttgaagacgaattagaactcaacgcacttcacaatcctggtagccgccgaggaaatggaaatgagaaagtagcttcaacccagagacttgctctttcaactgccttaggtggcagagttgacgttgcagcaatgaacactatctcaggggtgaaggctacctatttgcttgctgtggcttttttggagatcatacgttttattagcaacgggggtatccttaatggtgaatcaagcgtttctgcctctagaagtgccttcagttgtgtgttcgaatatctgaaaactccaaatcttactcctgctgtttcccagtgtttg

SEQ ID NO: 112455 - DNA, 451 bp, Arabidopsis thaliana columbia
caaactgtcttgtaaactacgacgagaaatcttactattcacaagctgacacgaaaaatcggcggggtttaactgaacgtcggggggtatctaccaaacacatttaagtcgaacatccctaagagaatatggacttttatctaaagatcaaacagatgatgctacggaattattccaagaacaatcactagacaatggagcaaccaaatacattctgactattaaccaatatcttaaatgattctataatgatgtgtgagtgtgacattcgctgcgctaacatatcactatggccacgttaacactgccgatacctgctgtgtcttactgcatggtaacactaatcttctacgtggaatttattactgaaatgctgaacttatatgctccatactcgcttgtttcctccttaactttgccaccggtggcgagccaatttcagcgttcggtc

SEQ ID NO: 112456 - DNA, 462 bp, Arabidopsis thaliana columbia
ctccttataaatacttctctctccgccgtatataatcttaagtcatctctgatctccgagtgcaactcaaatttgaatctgtggcttcttaattctttctgatatttcgttttattggttaatctgttttcgatttcatatcattagtctagtatttgttcttctttttgtgtttgattatcttagaaaaaagggtttctcagtgatgaatacacagatgacgagtccgatgaaatccattcattaaatcatggggacaaacgaggcatttgtctgagaggaatccttttatacttttttcaatcttattagttttttctgctaaatgtttttcaaagttgtttgattcgtgattctcgaaaattgaagaaaaaaaggcatgatgaggattgttttattgtcatctgattctcatgatgaatatatacctcctactcattctgagtgccttttcttaatttc

SEQ ID NO: 112457 - DNA, 456 bp, Arabidopsis thaliana columbia
  unsure (1)..(456): unsure at all n locations
gtgctaagagaatcagagtccatattcttactgatggtcgtgatgttttggatggttctagtgttggagttgtggaaacccttggagccgacctcgttgcattacgtgagaatggtgtggatgctcagattgcatctggtggaggacgtatgtatgtgactttggaccgatatgagaatgattgggaagttgttaaaagaggttgggatgctcaagttcttggagaagctcctcacaaattcaaaaacgctgttgaagctgtgaagactttgaggaaagagcctggtgctaatgaccagtatttgcccccgtttgtgattgttgatgaatcanggaaagcagttggtccgattgtggacggtgatgctgttgttaccttcaacttcagggctgatcgtatggttatgcatgctaaggcacttgagtacgaaagatttgacaaatttgaccgtgtga

SEQ ID NO: 112458 - DNA, 377 bp, Arabidopsis thaliana columbia
ccgttgggttcttccatggatcctcatcgtcatcgcctccatctccgtctttcttcttcttcttctgctcgattctaattccgtaagagagaaataataaaggattcatgttcacatcttctacctgatgagcataccatgattctctcgctatgcgttggcttccgcaaatctcgttctcgtctccttcttcttctccatcttcttctctaaaacccgtggcttcttactctgaatctccggatccagatcgtaatcaggatcgggatcggtttcatcgccgcttgtttcgttttaaccgtggcaggctcacccgtcagcggaagcttcgtcacttgacggatgacgatgttttgttgggagaacgtcgtgcttct

SEQ ID NO: 112459 - DNA, 432 bp, Arabidopsis thaliana columbia
caaggtcaagttgtgggaggtggagttgctgtctctgcttattgcctctggacccgttattgtgatagctgctacggtgggggtgccacttatgagaggttaccgattgaggaagaacaacagcaagagcagccgcttcaactagaagatgggaagaagcagaaagaagagaatgatgataacgagagtgggaataacggaaacgaatgatcgatgcagccgccgatgtataatatgcctcctaattttatcccaaatggtcatcaaatggctcaacacgacgtgtattggggtggtactccgcctcgagctcctccttcgtattgattagttagataggcggtggctggtgcgttctttttcacttgtactgattatatttttccattatgctgttataggcatttcttctttaaagcttataaatctgcg

SEQ ID NO: 112460 - DNA, 449 bp, Arabidopsis thaliana columbia
cacatcctttactgagccagtaggtagtgttgggtcttgtaagatcaatgtacgcattgatcagcttggaagaagatccatcgttgctgcgatatggttacctatctcaggataatgttggagatgtgaggagagaagtttcaaagctctgtggagagcttagaccacacgcgcttgcactcgtgacttcattcggcattccagactccttcttgagtccaattgcattcaactgggtcgaagccaatgcttggtcttcagtttagttacctgctagtaacaatctctttcataattcccatatatctcttataaaaggtatgttttcacaatatctacagaaactgttgtaagctcgtcataataaaagggtatatatgatatgtattcagggtttattctttacttaaactggtccaaacaaaaatgtttggttattatttggcatt

SEQ ID NO: 112461 - DNA, 406 bp, Arabidopsis thaliana columbia
aaaaaatctcattcaggtgaagaaagaatcaggctttatcgccgtcatcacaatcaaccgtcccggatctcttaatacactcaggagagcgattatagttgatctcgccaaggcattcaaggatatggactccgacgaatcggtccaggtcgtgattttcaccggatcaggtctatctttcttctctggcgttgattttactgtcgctgattttctttttttaatatacatctacttttcctatattcctatcttttcgttctattttcctttatattttcatttatcatttttatttttttatctctttttttttttggggtgggcgtgtctcttttttactttttacatttctcttgatttttcatcttttcaatatcaattttattattctatctctctatat

SEQ ID NO: 112462 - DNA, 492 bp, Arabidopsis thaliana columbia
  unsure (1)..(492): unsure at all n locations
aggcgatccctttccagatcgatttcaaaatctagatcgccatcgcccgacaagaagaagagtccccccagggcaatgtcgagatcaaagtccaggtccaggtccagatcgaggtctccgtccaaatctcctcccaaggttcgcgaaggcagtgtgtgattttgttaagcggtgaaaatggccaaaagaaagagtgcgaaaaattctcaagtcaagatccattctctgtgttttttttttttttgctgttttcggataattgacattttctgctgttctctgcttctttactcacaaatgatcatctttatactattatgacctgttatgttatggatgtttccgtgaccattacaatacccttgagttttgtattacttctcttcntcttcactctatattttttaaaagggcggccgttctagaggattcaagctttcttacgcgtgcttgcgacgttttaactttttttagtggctccttaattcaatc

SEQ ID NO: 112463 - DNA, 445 bp, Arabidopsis thaliana columbia
cttcaattctcctccctttataaaccataattcattaattctcttctctctcaacaactacttgtttagagagagtcccaccaccaccactaccacaatcccaatggcttcaccaactcttactctcctcctcctcctcaccaccgtctgcttcttcatctcctcctccgcagatcctgacatgcttcaagatctctgcgtcgctgatcttccctctggaatcaaaatcaatggcttcccttgcaaagacgcagctacagtcacatcagccgatttcttctcacaaggattagctaaaccaggtcttaccaacaacacattcggtgccttagtcacaggagctaacgttatgacaatcccaggactcaacacacttggtgtctccctctctcgtatcgactacgcaccaggaggcttaaacccaccttacacccacccacgtgcc

SEQ ID NO: 112464 - DNA, 367 bp, Arabidopsis thaliana columbia
gaatgggtgagggtaaaaatggaaaggatggtaaaaagggtaaaggaggagagaagggtaagaaagaagggaaagagaataaaggtgggggcaaaaccggaaaaacagatgccaaaagtggtggtggcagcacaggcgcgatagtgcggaagaagaaactaaagtctcatcactttgatgctaaaggaaaaggaaagagatgatgaacatagctgcctattgtatgtatcgtcttctgtaaccaaccatttcatgtttcagaaaaaccatctccttttgtaatgctttatgagtcaatttgaaaataatatcagggatcttgttgtttaaaaaaaaaaaaaaataaaaaaaattatttttaatttat

SEQ ID NO: 112465 - DNA, 407 bp, Arabidopsis thaliana columbia
atacattgaacctttcctcttcttcttcttccttctaccttcttctctctgttcaattttgggggaaaatgggtcgtggaaaaatcgagataaagaggatcgagaatgcgaatagcagacaagtcactttttccaagaggcgttctgggttacttaagaaagctcgtgagctctctgttctttgtgatgctgaagttgctgtcatcgacttctctaagtctggcaagctcttcgagtactccagtactggaatgaagcaaacactttccagatacggtaatcaccagagttcttcagcttttaaagcagagaacctccaggaggattgtgcaaaggtggatattttaagggatcaactttcaaagcttcaagagaaacatttacaactgcagggcaagggcttgaat

SEQ ID NO: 112466 - DNA, 395 bp, Arabidopsis thaliana columbia
cttaaacgttttactttgtgctgcactactcaacctcaatggccgcctcaacaatggctctctcctgccctgccttcgccggtaaggccgtcaagctttcccccgcggcatctgaagtccttggaagcggccgtgtgacaatgaggaagactgttgccaagccaaagggcccatcaggcagcccatggtacggatctgaccgtgtcaagtacttgggtccattctctggcgaatcaccgagctaccttaccggagagttccccggagactacggatgggacaccgccggactttcagctgaccccgagacattcgcaaggaaccgtgaactagaagttatccacagcaggtgggccatgctcggagccctaggctgcgtcttccctgagcttttg

SEQ ID NO: 112467 - DNA, 390 bp, Arabidopsis thaliana columbia
  unsure (1)..(390): unsure at all n locations
tgataacgtcgtccctaacctcatctctgcaagctctcaagctttcgtctccgttcgcccatggctccactcctctctcatctctctctaagcccaattccttcccgaaccacagaatgcccgctttagttccggtcatcagagccatgaaaacgatgcaggggcgcgtggtgtgcgcaaccagtgacaagactgtggcggtggagtggtgaggctgnctctctaccccaggtccatgaggcgcgtgtggttgttgctgctgttccgtgctcgcggccccgcttttcagttcatggttggccactggggcagactggtgaagtgcagacccatcaggacgactaaactgtttgtggcggttattgcctttgtgcgggccggcaggaaagc

SEQ ID NO: 112468 - DNA, 343 bp, Arabidopsis thaliana columbia
cggacgcgtgggcgacgattaccaggatatggaagcagtcgatcgaccgctgcgcattgaagaaaccaccgtatctcatgatgtatctagttgcggttttatatcgaaagaagaatggttaaataaacatccaccatctggatctggatggactgacgaagatgatgataatgacgatgtatttagtagcaggtttatatcgaaagaagaattgtctgacgctgtacataacgatccaccatctggatggactgacgaagatgatgaatgatcaggttgaccccggttttggagaaaagtatttttattggcaaaattttctaattcccaaggaatttttttt

SEQ ID NO: 112469 - DNA, 291 bp, Arabidopsis thaliana columbia
tcggacccaaggcgttgacactttggctcaccagacatcgaccctcgctatattactatgatacgtgtcataagaccgtggagtgtggaacatactacactgtatacattggtataggtgtcactgcagaacagatcaagctgagtacaactaggacggaagctggtttattggctgaaagagctaaccatgacagctccaagccaggagattatgacgtatgttcattaacagtgtgcaacctgagcggacctttcttcatcaaagagatctttgccgtcatcaattcat

SEQ ID NO: 112470 - DNA, 259 bp, Arabidopsis thaliana columbia
agagtgaatattagagcagtgaagcaatggtgcaagcagattttaaaagggcttctttatttacatagtcgttctccaccaagtatacatagagatctcaaatgtgataacattttcatcaatggaaaccaaggtgaagtcaagatcggtgaccttggactcgctgcgattcttcgtaaatcacatgccggtcgttgcgttggaacccctgagtttatggctccagaagtgtatgatgaggaatataatgagttggttg

SEQ ID NO: 112471 - DNA, 419 bp, Arabidopsis thaliana columbia
gcttcatcactattgaaggcactcgcttcaaccgtcgctcttcttagctcactcagagatgtcgttctcgctgagaaagctactgggtccgattctggttttggtactgcttctggatctgtgcgttgaatccggattctctcaggcaacgccggcgcgtgacgatcacgtgcatcattacgggggggggagtagtgcaacttcatgtggctcaaatccggctcttctatgataccgatggcagagtttaggcaaccggagattatagagaattaccgggtcaaaaccgtcatcagatgttttgatatgctcggcgctggttctaggcaataagaggtgtatgtagtgacccaattatactgttgagatgcaagatataagctcgttgatccttttaaagatcttaaaccctattctat

SEQ ID NO: 112472 - DNA, 316 bp, Arabidopsis thaliana columbia
gggatttgctacacaactcttacgtgaaaggtggtttggccgttggagctttgttgggaccaggaagagaattgctgtgtgatggcataaaagctttatggaaaagatcacctaatatgaactcgatcgttggattgacatccatggctcaattttccataacacagatctcgcttggttgtccagaactgagactggatccattgctttgaagatgaacgccactacctgcaaggcaaaagccacgactgtgagatgatagggacaaaggacaagactgttaagaatcatcatgatgatatggaccatagcagca

SEQ ID NO: 112473 - DNA, 330 bp, Arabidopsis thaliana columbia
aacagagaaaactccgtctcttttgtgtggtactacctatcatttactgcgagataaacgcggggtctctctcccgctgtcttgctcatgcatcgattcttacagttcacactggcaggtcaagttcctcaccgcactcttgcgccaacagctgacgctgaggccatgcctacaagtgtttccaaggacgcatacgacggctaccaccgggcttgtatctgtcaaagacatgctggctactgacactactacattgctgcatagtaatttgctacctcgtgatggatcatcgcgacgactgcatctcacctgtatgcactaccccgacac

SEQ ID NO: 112474 - DNA, 427 bp, Arabidopsis thaliana columbia
cggaccattaggcatttctcgccacatttagctgcaaagatgaggcctccccacatgcctgtcattcgtgggcgatctgcgactagaaagacagtctacatttgtggccaaccacgtttggtattcgtcttacttggcttaaccgctttgtcctgtggtttacttcatgtggcttggtatgggaactgtatgcacttaccactggccttctcatgatactttttcatgcatgcctgagaacttcaaacctcaagggccgcttgaacacattccgtgaagaattcatggctgtctggcgtaactacagggaactttaaagacaacataaagcattggttcgatcttattgcaaaccaacccgggacatcacaggtgtttcgaggaatgacatgaactccaatttcttcataatgtgcacaaacaatcg

SEQ ID NO: 112475 - DNA, 466 bp, Arabidopsis thaliana columbia
  unsure (1)..(466): unsure at all n locations
ggagaatgcggctcanagcgtgtctgtgaccgtttttacttcgtacctacattttgaattcaaggtggaattttaataaaggctgtggcgaccaactaaccctatctctatcacatatactatttattattcttttctaacatatgtttatgacaccagagcttaagtcaattctatctttttgttttatgatgttttcttcactaccctctaattatacttatttttcctttcttgatttttatattaaactttattttttttaatatttattctaatcaatatttatgttatttttttttatttcttttaaattttttatttttttaatactatttatataattttatatctttttttatctatttttaattttttctaatttttttatttaattaatttttttttattaatatcttttatattttttatatttatcttctttaatatttaataaatttttatt

SEQ ID NO: 112476 - DNA, 431 bp, Arabidopsis thaliana columbia
ggagagtttacatggtagatttcaataatctttcatcgcttgaggccttgtcgattcgaggtgtacaatggtgttgggatgcaatatgcatgatactgcagcaagcaagagacgtgaagcatctctttatgaaggttgaattcacaggcaatgaggctcttcaacctttccctgagattgattttgtcgagttcttcaataaccatccaaagcttcaaacattcgacatccatgggacaatgttcgctgcactctgccagaaaaacagccttaagaaggtaaaaataatctcttcttcatcagaaaccttccttaccgatgaagtcaaagcctacttatcaataatgtaacctccattctctttgcagcttgagaccggatttacaataccgtgtttggaggaggttgttatcacagtgtgatttcactta

SEQ ID NO: 112477 - DNA, 338 bp, Arabidopsis thaliana columbia
  unsure (1)..(338): unsure at all n locations
gtacaggttcgtgatcgacgtggctaactccttgagccctccatgaatgatccggatctaagaattgagcattgaggaggctttaaatctatgtcataatcttggtgtttgtttgtgtctctcgagttatcttcgttttctgctttcggtttgagaatcggnttcttctcagacaagttaccttatttcgctgttttcttcctatgttctgtttcctgagagtaactttttctgattttctttaagatttttcattcatttattattttgcttatttatgaattttttgggtttttttctcaatcttaaactatttatagatttttttaatttttttc

SEQ ID NO: 112478 - DNA, 237 bp, Arabidopsis thaliana columbia
ttctgatttcactaacgaaaaggaatcagtttttggtggaagtaattgatccgatctaggaaaaatgggacgaggtgctcatgggcatagagcatatccaggcacttttttcgccaaagactgtagtatgactggtgggccctactattcgtccatgcattggcagcagaacaccttctttgctatgaacggtactttgcttgggtgctttcccatcgtccttttttcttgtaagct

SEQ ID NO: 112479 - DNA, 420 bp, Arabidopsis thaliana columbia
cgaagatctctatatattttcccttctcttgtttccttattagttttctccgacactcccattcaaaagtagaaagatactgaagagctcgctcattcacaaaataaccaaaatggttctcactcacaacgtattggcagttacatttggagtcctgggtaacatcatatcgttcatcgttttcttggcaccagtgccaacttttgtaagaatctgcaagaaaaaatcgatagaaggttttgaatcacttccctacgtgtcagccctctttagcgcgatgctatggatttactatgctctgcaaaaagatggagcaggcttccttctcattaccataaacgctgtgggatgcttcatcgaaaccatctacatcatcctcttcatcacctatgctaacaagaaagctagaatatcaacttt

SEQ ID NO: 112480 - DNA, 157 bp, Arabidopsis thaliana columbia
cgtaccgaagaaaaatgccaaatggatgaaccaccgccgggaaggcccaagcccagagtacccattccacattgtcgctcagatgaggggcttaaaacctaaacctctattttttggtggagaaagaacttcgggaaaccttttaacctgagaggtt

SEQ ID NO: 112481 - DNA, 372 bp, Arabidopsis thaliana columbia
ccaacagcagcagcagcaacagcaacagtatcagtttcaacagcaacagatgcaacagcttatgcagcagcggcttcaacagcaagaacaacaaaatggagtaagactcaagccttcacaagcccagaaagagaactgaggaatatgaatatgtcccacggtattggcgttttggtacgtagaagaaaccttttggtaaggtcattgaagataaacatttgggtaagcccaaagaaacagagttccgtgcattgcaaatattgcatgcactgtaattattaattgtttggatttgatatagagtctgttttctttatccatattatgtatattattttttctttttcaatatcttttttatttgtttatttt

SEQ ID NO: 112482 - DNA, 221 bp, Arabidopsis thaliana columbia
cgtttatttcggtttaatatattggaatggggatgggccttttagtattgcatggtcgtatcaagcacaagcaccaacaattggaaatttgtactgcatgccgcaaatatttaagtaagggggacatttttttactggtttgaactaagtagaaaatagaaggggtggattacttttgagttgggcctattttgctagtttttcttagacttgggtacgaa

SEQ ID NO: 112483 - DNA, 318 bp, Arabidopsis thaliana columbia
aacaaccaatatggatgcacgatactcttattacatgggagcgtaagaatgcgcaaaaatacaccatcggtagcaagccttagaccggtgcattgaacgattactagagaggttttagaagaatgttggagtacaataagggcaaatacgcagattcggaaattatgatcatgggaaacggatatggagaagaactaggggcctcacattctagggctgatggtaccgccgatcataacaggaaatattatctttagaggcatcttttgagtatgcaagaaggtgttcgcattgacaaagttgatgtactggatactt

SEQ ID NO: 112484 - DNA, 358 bp, Arabidopsis thaliana columbia
gatagagcagcttggttacaagcattagcatctacaaaatgtatctttcctctgcggtcacttaatggggatttctccttgagaccaccaaaggatttgtccatatcaactgagagactaaagaaacggttgcacgaagagggtatgaatgagaatctcgtcaaagagtgcgaacagatcatgctctcagaattttctgaaatgcacggacaagttaaacttttacacgaagaacggactaatttgcttgatgcattgaggcagcttgaggcagctaatctcgaagttggtgcatcagggaagcatgagttttcaagcctaggacgtggaaagtttagtgtattgcttacatctgttt

SEQ ID NO: 112485 - DNA, 399 bp, Arabidopsis thaliana columbia
tttttgacggaccaaaaataacttatggatttagtttgcatcataattctcctaccaatctcaacttccgacgtctattcatcatgggtttgaaggaggaatttgaggagcacgctgagaaagtgaatacgctcacggagttgccatccaacgaggatttgctcattctctacggactctacaagcaagccaagtttgggcctgtggacaccagtcgtcctggaatgttcagcatgaaggagagagccaagtgggatgcttggaaggctgttgaagggaaatcatcggaagaagccatgaatgactatatcactaaggtcaagcaactctttgaagttgctgcttccaaggcttcaacctgatgaatcaaatcctcatctgcagtaactttatcttaag

SEQ ID NO: 112486 - DNA, 288 bp, Arabidopsis thaliana columbia
accgtttgttcgtggactcgagatattgtggtttcttagcaaagaagatgagtggagtgggagagaaagcttctggaacagcgtaagacacctgctgatttcttgaaatctatccgtggtaaaccagttgttgtcaagctcaactctggtgttgattatcgaggcattcttacttgtcttgatggatatatgaacatcgcaatggagcaaaccgaagagtatgttaatggccagctgaagaacacatatggcgacgcttttgtccgaggcttacaaagccctttacat

SEQ ID NO: 112487 - DNA, 182 bp, Arabidopsis thaliana columbia
cgttggtttctctaaatttttcaaaaaacccttagaattttcatttttttacgaatccgatggtaactggttctcccgctccaggactcatcggaaacaactcaaagggtacttacatggggggagatttcgcagaatttacgacgggagacttggccggctttaccacgggcggggatttt

SEQ ID NO: 112488 - DNA, 423 bp, Arabidopsis thaliana columbia
  unsure (1)..(423): unsure at all n locations
aaacgtatgaggggaacgcctcctcccacctctctctccaattcgaaaccctaggccgccgcatcgatccggggtgcgcggcggggtttagtgtgccgttggtggtgggggtggtgtancgctcctntcgccgtgagaggtgctcctagcttcgtggtggtggttgtattcatcgttcctttttatttcaaaccggcgaaaaaagaaacagtctacttttacggcggagctcattacggagatctattagccaatctcattctaggtctaaccatcctttggctcccactaaccttagctgcagtgtctcgagcttttaaccttcgttacaaggtcactaaccttcgcgtgacggttatttttggacttttccgatatgatcattgatgtttttttacaaagtgattaaagacggtcaagttg

SEQ ID NO: 112489 - DNA, 356 bp, Arabidopsis thaliana columbia
atcctatccctaccttggataatcatattcttactccggataacgacagccaccgatttaaccgccttggattcctcctcactaactcggagacaaaccggagcagtcgtgacgtcagcgacgcagcagaggaagcggcggagcgagaaggaaggctccggctaggcaccgtgttggcggcggagagagaggaaatgcagccaccgaggatgtctctaatggagttgttggaggataatgatggacatatgtatgaactcagcgcgcgagacgaggtggaagtggagggaagagatggctgcgacgggggaggagaggcggtggctgtgactgtggcagtggagttgtgttgttgc

SEQ ID NO: 112490 - DNA, 375 bp, Arabidopsis thaliana columbia
agaaagcatcactcttttcgtcttctctcgaaaatggcggacaatgattctctagatcagtttttggctgccgccattgatgccgctaaaaaagctggacagatcattcgtaaagggttttacgagactaaacatgttgaacacaaaggccaggtttttgtttctttcctccgctcagataatgtttcaatcactcaataagtgggaatggctacttaagagtgtcaattttttttttgaaattatcttctatggctccttaaattgttgcttttaagtggatttggtgacagagactgataaaggatgtgaagaacttgtgtttaatcatctcaagcagctctttcccaatcacaagttcataggagaagaaac

SEQ ID NO: 112491 - DNA, 397 bp, Arabidopsis thaliana columbia
caagttagtcataaaaaaaaaaaaaacacaaaaaagtttcaatggccgcctcaacaatggctctctcctcccctgctttcgccggaaaggctgtgaacctttcccctgcggcatcagaagtccttggaagcggccgtgtgacaatgaggaagactgttgccaagccaaagggtccatcaggcagcccatggtacggatccgaccgagtcaagtacttgggtccattctctggcgagtcacccagctaccttaccggagagttccctggagactacggatgggacacagctggtctatccgctgaccccgagacattcgcaaggaaccgtgagctagaagttatccacagcaggtgggccatgctcggagccctaggctgcgtcttccctgagctttt

SEQ ID NO: 112492 - DNA, 235 bp, Arabidopsis thaliana columbia
  unsure (1)..(235): unsure at all n locations
agatttcatattttccgattcaccttcgcaatccaattttttttgttgcttggattttgtttgtgtgtaatcgtgtggtaagatgtctcggtgttttccgttcccgccacctggttatgtactaaacggaatccgcgatgaggctgtgatcgtatcatcgatcaagggggtggaggagaaagctaagaaagaacaaaggaggaaggatagaagaagtgataagaaggattnanna

SEQ ID NO: 112493 - DNA, 263 bp, Arabidopsis thaliana columbia
acaaggcatgttaaactagattactgttgatctactaagactacaatgtgtaaccaactacaagcgcttcaacagttggttgagggggtgacctcgaatatgatcagagagactactgcatgaacaataacaacacaacagacgcagaggctttctgactgaacgaacacaatatcgatctcatgcatgacgatatggcatatgggcactagcactctaccgaacgaatagaacagggagaacattgtgctgcacatgaagac

SEQ ID NO: 112494 - DNA, 458 bp, Arabidopsis thaliana columbia
atttgttattctattgttatcacataataatttaaaataaatatgctattatgattgtatacaatacacatttattaaatagaagataacaaaaaaaaactaaacgacgatgtgggtacgagttgatattatgtgattttagaaagataacttttgtctttacattacgtattatataattgaaccaggtgtggatgcgttagaaacaagtatcgtcattagaagaccataattgtaatagcttattgtaatggccacgtaattaacttttaacacttcttcaaaaccactatggttcgtccatcgtgagtatatttaaagaaactttggtttcattttatttcaaacactatatattttaaaacattgtgagaaaatcacaataaaatttaatgaaagattttggagttcctggtaaatgttttaatgttttaaacttctattttaatttttaattt

SEQ ID NO: 112495 - DNA, 360 bp, Arabidopsis thaliana columbia
cgttaaccagttagcagattgacacgaaatgtggttactgtgaattggagctgaggcaagacaagaccctcacttgttcaccacgaacaactttgccggaagacagatctgggagtttgatgccaacgggggctctcctgaggaactcgccgaggtcgaggaggctcgcctcaatttcgcaaacaacaagtcacgtttcaaggctagtcccgatctcttctggcgtaggcagtttctgagggagaaaaagttcgagcagaagatcccgagagtgagaatagaggatgcagagaagataacatatgaagacgcaaagacggcactaagaagaggagtactctattacgcggtatgtcaggc

SEQ ID NO: 112496 - DNA, 375 bp, Arabidopsis thaliana columbia
gtggattttgtatggagccgccgagttcgagaccttagtgtaacctccgtcatgggaggacctttacaaaatcaatcttatgccatcggagctattccttaagttccgcaaagagcttcaaggccttcgcgtcggcgtcaatctcgagttatataacgaacccacgaatgattaccacgcaaagcttgttttgaagcctctatgtccagaaaggaagtggaagtttatatatgagccgctacaccaagaagttcgtgttttatcgaagaagattcctgtcaccagatttctaaacctccaagtttttttgttgtatgccttcttgtgtctctttgtggaaggtggaaatacatgttgtggaatcttatcatatgc

SEQ ID NO: 112497 - DNA, 433 bp, Arabidopsis thaliana columbia
aatgggagacgctgcgatccgtaccgtcgtcgaagtccatcactcatctccgacgcaggccgtcgtctatctttgcggcggtgcctctctggctttaggttggttgatgtcggttcctggagcgtcgaacacgcttctcgagtccgtggttccttattcgagagtatctatggttcaattactcggcagggttccgagccaacactgtagccaagcattggccaaggagatggccttgttagcctacaattcgggcgcttaagctctctaaaccaggatatccggttctcggtgtcgggtttacgggatcaattgcaacttctcgatctaagcgtggagaacacaggttatgcaattttgtttccttgcttttatagcaatataccttgctgtttgaaatgaaagccaatcacaattatgctatgttctttat

SEQ ID NO: 112498 - DNA, 273 bp, Arabidopsis thaliana columbia
ctcaacatttgtaagatttctacacaacccatttcaggttttatgttttctattcacagattatttcgattgcagacaacatttgttttcttcttctttctgataatacgattttcgattcgatctcattgcgattattaagatttctgattgtttcagatgctatattatgaatcttaatctgatggttgaagattcatagatttaaaactgctatctttttgcctatagagcctctatatgaatctgctttcttcattccatagcttaaga

SEQ ID NO: 112499 - DNA, 271 bp, Arabidopsis thaliana columbia
gcaataataaaaactcactcactctcactttttttatttcttcaacaaaaaaaacctaaagctctcttttctctccagatttcgattcccgaggctcgagagaaaaccgtaaatctcttctccgttctcgatgttgttcgtaaggaagctgagaactgtgactgcctccaagggttccaggtttgtcactcattgggaggaggaactggatctggtatgggaacattgttgatctctaagatccgtgaagagtacccagatcgcatgatgc

SEQ ID NO: 112500 - DNA, 370 bp, Arabidopsis thaliana columbia
aaaatgaagatccaaatactctgtttcaccactctgttcttagctatcttcacctctcaagtcaccactgcttacaaattcaaattcgattactttggtaacggcaccgatccaatatcattccatggagacgctgagtatggtcctgacactgatggcaagagccggtccggagccatcgcattgactcgagacaacattcctttctctcatggtcgagccattttcaccactccaatcactttcaagcctaatgcttcagctctttacccttttaaaacctctttcactttctccattactcctaaaacaaaccctaatcaaggtcatggccttgctttcatcgtcgtcccaagtaaccaaaacgacg

SEQ ID NO: 112501 - DNA, 454 bp, Arabidopsis thaliana columbia
ttggatccagctggcacaggctcattatacaatgattgttaagcagatattgtggttaatcacgtcatttctttgatatacgcaggtgttagtccaatggctattgctgttcaatccccatatgttgctcaggttcaacttctcagagaaaggctggatgattttccagtggctgatggagttgaggtcgcaaccattgacagctttcaagggcgggaggctgatgcagtgatcatctcaatggtacggtcaaacaacctaggtgcagtgggattcctaggggatagcagacggatgaatgtagccattacaagagcccggaagcacgtggcagtggtatgtgacagctccacaatctgccacaacacgttcctagcaagactgttgcgccacatacgctatttcgggagagttaagcatgcagaccctggtagcttgtgagggtcaggactag

SEQ ID NO: 112502 - DNA, 455 bp, Arabidopsis thaliana columbia
accgaggtcaagcaaagggaaatcaaacaacatatgtaaaggaggagataagaagaagagagacgataaactgttggctccgagtctggttgaaatcacagtcaccactccgtacgaaactcaagtgatactcaagggagtttctactgacaaaatcattgacgtgagaaggcttttagcatctcacgttgagacttgccatttcaccaactattctctctcccataaggtgaaggggcataaattgaatgacaacatccaagtactttccctcaagccttgttttctccgcatgattccagaggagtatctagaggaaagtcaggcgttgactcaggtacggagagtcatcgacattgtagcatgcaccaccaggttcttctccaaatctcccaacaaatccatccgtgccggcaatgccaatccgacaccggcgccggacggcctcgacatgg

SEQ ID NO: 112503 - DNA, 446 bp, Arabidopsis thaliana columbia
ccccaccaaaaaaaaaaaaaacagaagccatgaacttcttgtctcttctaactccttcatcatctccttctccacatcttcaatctcctgcaacattcgaccacgatgatttcctccaccacatcttctcctccactccttggccctcatccgttctcgacgacactcctccaccaacttccgattgtgcccccgtcactggattccaccaccacgacgccgattcaagaaaccagatcactatgattcctttgtcacataaccatcctaatgacgctctcttcaatggcttctccaccggatctctccctttccacctccctcaaggatcgggaggtcaaacgcaaacgcagtcgcaggcgacggcgtcagccaccaccgggggtgcaacggcgcaaccttagacaaagcctatagtccgagctaggagaggtcaagccactgat

SEQ ID NO: 112504 - DNA, 321 bp, Arabidopsis thaliana columbia
tgagctctttgcaatttttagggttttcttcgataatagaaaaaaaaaatccctgatcttcctcttagtgatttctcctttcgagatccctgagattccgagaaaatctgcatttttttctcgtgattctctagctctgttttgtgttttacacagctcttttgaatcaggtttgtgtgtgatagcgttgttgtggtaaaagctttgtacatttgaagatttagagatgataagttttcaggtaacctacttttaatggacagttcaacaacaagcagtgataagaaaacactcaagaggtggttcttcatctgacaactg

SEQ ID NO: 112505 - DNA, 384 bp, Arabidopsis thaliana columbia
  unsure (1)..(384): unsure at all n locations
aaaacacaaatcacagtgcctctcagataaagagttcacagaggctacttgctcgagttgcatggttcctgaggatttggacttacccaggcttgctcctgaccgtactcaagatcttgtacaattcgctaaagaatttttcatcaatcttccaagctcaacaatcatctgcattagtttgcttggaggtgctttaaaccaattgttacaggagctaatgcatattcgttcacctgtttgtgcctgggtgctcatatcacgcctaaacccagaaagtcaaccggttgccacacttttacctgtagattcgattgtagaagatgacagtgcanatcttagctctaccgaagcgactcaagtcaagagtttaaaggggcccctgct

SEQ ID NO: 112506 - DNA, 241 bp, Arabidopsis thaliana columbia
aaaataaaaaaaaaaaaaaaaaaaaaaattaaataatttataaaaacaaaaaaaaaaaaaaagaggcaaaaacgaaaaggggggcgggtctcaagaaaccagcttacgtacacgggcgtgcaccgtcatcgttcttttatagggtcacctagctccgcccactggccgccattttacaccctcgtgactggcaaaaccgtgccgtttcccagctcaatctcttgggagcacatccgccttt

SEQ ID NO: 112507 - DNA, 269 bp, Arabidopsis thaliana columbia
tgaatgtggtaccaaataataacagacgaattcatttgaaacataagcagctatggaagctattaatccagaacagagcaagtgttggaatacgacgatgaatctctctgtgatgggagcaatgagtttgatgcacccagagtaaagatctttgagggtgatactaagtttgtttctttactttttcttttccatttgagtttgatctcaattgttcttttgaattttgaaaacaactttcttacatgaaaaaggaacataagacttgg

SEQ ID NO: 112508 - DNA, 382 bp, Arabidopsis thaliana columbia
gtggtagagattacaaaggagaagaagattgatctttttgttcagttgcaagtaatcacaacaaatattgaaagttcaaggcttcatcatcgttcaagttatctcattgttcctccaccaccattaccaaaagctccttcagattcttggttaaagcgtacattaccaacaataccaccaaaaaacaactcattcgcatggttacagtctcttggcactgatgatgataatcactttaccaagactcaagctaatccaaagtgggaaactatggtcaaaacgtccaatacacagcaagggtttgtgtgcttctccaaggaaacactaaaccctataccagagtcatagcaagaccaaaacaaaattctcactggtggtaatg

SEQ ID NO: 112509 - DNA, 156 bp, Arabidopsis thaliana columbia
taccgtccgattcccggtcacccaccgtccggagacatggaacgtatgtgcacttgaccataataaaccaaacagtatgggaagttctgggtgggtttaaggcattacattaatctccagacctataattcaccaatatactaaatctgcaaagga

SEQ ID NO: 112510 - DNA, 210 bp, Arabidopsis thaliana columbia
  unsure (1)..(210): unsure at all n locations
gttgtgtattgagctgattctgattcggtncactcaatagggttagctgctctattagtcaagggtttatctggaagacctgtccctgagattttgaggataacacctgatttcgctggtctttttggggtggaacataatttgttttcttttagaaacaatggattacttaatatgcttaaactgaagcataaaaatggctttttattt

SEQ ID NO: 112511 - DNA, 294 bp, Arabidopsis thaliana columbia
ggatttcgatcctattgtgttggccttcgggtttggagtaatgattaacaggaacttacccgccttcacgttgttccaagccttttggaaactgctcgtgtggcgattcttacatagagccacttgtagccgctcacaacattatcctttcacatttagccgccgtcaacttataccgtacaaaatttcaggaacaacaaagaggacagatcggtattgttatgaacacaatctggtttgaaccgattagtgattctttagcagatagattagctgctgacagagctcaagctt

SEQ ID NO: 112512 - DNA, 292 bp, Arabidopsis thaliana columbia
atgcgacgaaaaggagatagatcgatgatgcaagtacgctcatatgagtaattctacgaagacgatgatgatgatgatgataccgatggcgagagtagcgacgaagacgatgaagaagaagatcggaatctgagtggagatgatagcgaatcaagcgaagatgattacactgattcgaattcggattctgatgacgacgatgaagaagatgatgatgatgaggaggaggaagaagaagaagactcccttgttgataaagtcactcgtttactcaaagggaaacaagattgac

SEQ ID NO: 112513 - DNA, 255 bp, Arabidopsis thaliana columbia
cgagagcgagaccgcgagcagccaaaacatttgttgttcatctccccgacccaaaacccggcgagccaaaaagggacaccgactcgaacccactcaaatggccgccggcgcgcagctacgggcgatgcgacgccgggaagtccaaatggctaccggagctgcgataaaaaccggggccgcaaagggaaagaatgcgatgttggggaaaataggtgacgaggcgagaccaaaccgcacgaggccaggggggaaaga

SEQ ID NO: 112514 - DNA, 275 bp, Arabidopsis thaliana columbia
  unsure (1)..(275): unsure at all n locations
ccacgcgnntccgcaaaccctctaaannatcaatnnctctcnnaaatctcttctaattctgtgatnncaagatgcangnnatcttcnngttaagaccctctcnaaccggaaaggaaactatcacnnncctcgagngnntggaaagggctctngnnacaccatnnncgacaacngnnttaagggcccaagaaatccagnnngataagggaaggggtattccnnntccggatccagcangnnaggcttaaatcttcnngccggaaaagggcagttgg

SEQ ID NO: 112515 - DNA, 336 bp, Arabidopsis thaliana columbia
aaattgtctggctcttattagatcatttacttgatgttattcaatagggtaaaaggataaaatgttcgactacccaagcaaagcatcgtctctttcttggtaatgtccctagaaataggatggagtcagacattaagaaagcagcatatagaattggtccaggcgttcaaattgtcgaactcccaaaggaaccacaaaatatgggccggaatcgcggatttgctttcatcgagtattacaaccatgcatgtgctgaatactcgaaacaaaaaatgtcaaatccgagttttaagcttgatgataatgccccaactgtaagctgggctgaatcaagga

SEQ ID NO: 112516 - DNA, 414 bp, Arabidopsis thaliana columbia
  unsure (1)..(414): unsure at all n locations
aaaaagccaggctcttaacaagacatttacttgttgtanttttagggacaaggataaaacgtggactacttaagcaaagcatcgtctctctcttgcaaaagcccctagaaattggacggagtcagacattaagaaagcagcaaatagaattggtccaggcgttcaaattgtcgaactcccaaaggaaccacaaaatatgggccggaatcgcggatttgctttcatcgagtattacaaccatgcatgggctgaatactcgaaacaaaaaatgacaaatccgagttttaagcttgatgataatgccccaactgtaagctgggctgaatcaaggagtgtaggaggaggagatactgcggcttcccaggtcaaggcatgtgcacatcaagaacttacctagagatataactcaatgaa

SEQ ID NO: 112517 - DNA, 408 bp, Arabidopsis thaliana columbia
agtgtgttgaaagagtatgaagattataggagatctctttatggtgagatcactcataaggctttgcttgttgatgctgttggtactctccttgttcccgctcaacctactgctcagatatataagaatattggagagaagtacggagtggagtactcggaggctgagatacttactagatacagaagagcttatcagaaaccatggggtggatctcatcttagatatgtaaacgatgcaagacctttctggcagtatatagtgactgcatcaacaggctgctcggattcacagtactttgaagagctttacagctattttactacagaacaggcggtgaagttatgtgatccagatgcaaggaaaggtgttaaggctattaaagaagcgggtgtaaaagttgcaata

SEQ ID NO: 112518 - DNA, 390 bp, Arabidopsis thaliana columbia
tttcatggtatcagagcaccatcgctccttaaccttttctctcatttctctttcttctttccttttttccttctttccttctttcatctcttttttcttcttcaaaagtctccaatggctgctcaacttccagcgatagagcgagcgtttggggttacaaatatcaaagcccacatactcttaattctcgatctcaatgatcacaattatgatgcttggagagagcttttccagacaccctggctgacgttcgaagttctaagacaccttgatggtactatgtttcccagtggagataacgatggttcttggctgaaacgcgacggactcgttaaactctggatctatggaactcttgctccagatctgttccgctcatcattcaagact

SEQ ID NO: 112519 - DNA, 355 bp, Arabidopsis thaliana columbia
cgagaggaaaaaatcggagagtgaagatgtgtagtagctttcatggcgatgctctcacatcttctccatctccaaaactcattagatcctacaagcactctcttctcttccgcatccacatcttcacagtcttcaaccacaccttcctccctcctctccacttcctccgccgcgcctttactcttcttcactctcgcatctctcctctccttcctcgccgtcaacagatcttcaaccgaatcctcatcttcctcagaatcaccttccccttcccctcctccgccttttgccgacggcgattactccgtcgctgccttccgtgccctaaccacagaccacatgtggtcactcgatg

SEQ ID NO: 112520 - DNA, 358 bp, Arabidopsis thaliana columbia
gaatatgtacatgtgggtgttcaaggaaatgcctgatatatgcccttggcaagatgcagctgcggagctacatgaacggacactcacgcgagggtgagcgtcctttcccttttagtgtggacaaaggttttgtccgctctcataggatgcagaggaaacattaccgtggtctctctaacccacagtgcctccatggaatcgaagttgtttattcacccaacctttctgtactcagcgaggatgaaaagaagaagtggacagaactcacaggtcgagatgtgaactttgctattccagctgtagctagggattaccgttcatggaggaaactcccaaacaccttatttgaggctgagag

SEQ ID NO: 112521 - DNA, 365 bp, Arabidopsis thaliana columbia
agacacgtcaggatggctaacccgactaggacgacggataaactagataagtaagaaggatacacggactcgcctgcgccaatggagggtggatcataattatcatcatctgatacactaactgacaggagaagacgcacccgaccagtgagtagggaggaactacaagagcatcggtttgaacaagacgtgtgtgcactctacgacatttctgaaatcacatatacctgaatggtctagaaggatggtgcttactcagtccatatatgggcatgagattgtattgtgttagaaaaacagttgttcatctacaaacatgactcaacagaccacatgcgctgtgcgttttattacaccaggaattt

SEQ ID NO: 112522 - DNA, 162 bp, Arabidopsis thaliana columbia
tttttcgaaattaatgggtggaatgggttaatggttggaatgggcggcctcgaacgcctcggtgtattgggaggcatggctggactggcaggcatgggtggtatgggaggcatggaagagtttgaaaacagtgttgattaaaaacgtacaccaatctactac

SEQ ID NO: 112523 - DNA, 370 bp, Arabidopsis thaliana columbia
aaagagttttgcaagactcgtgccccaaaaatgattcttgatttgcagtctagcggtagtcactgcattgacggtaactggcgagcccttgggaagcttctcatctactgctcaggatgtacacaaggtggtcttttcaatagctctgttcaaatcccaggccactttgtttatagaacccggttctcaagaacattaggaagaagcctccttccgcctcagtgtagaactgatgtactctatgtttgtgatccatgcgagcatcttgaccaaggagaagaaggcgacgtgggtttgttccgtgggattttcaagtcattcccaacatcgaaagttcggaaagtgatcattaacaaagcggttccttttc

SEQ ID NO: 112524 - DNA, 405 bp, Arabidopsis thaliana columbia
gacaaaacccaatgtgcatatcaagcctcttctttatcttcgcgaattcaacgtgcgctgaccttccgtcgagcttctcagacgcacaacagcacgaggagtgtcgctcacgtaatctgacatgtggatctggacacacggcattcgagagtaccacgtatccgctctggggtggattcaagaaacccaacatctgcggtcattcggcattcaaactctcctgcgagggtgatcaaaacctaaccctagcgagcgggaacatcactattggcgatgatgctgccaatctggaggatcataaaagaaacgttgccgatgatagtctactagacggagagctgctaaacatatggaactctaacgggaagaatcagttcacattagactccaacaccgagacgatcg

SEQ ID NO: 112525 - DNA, 247 bp, Arabidopsis thaliana columbia
  unsure (1)..(247): unsure at all n locations
ttttcttagggttcgagatgcgcaatcttaaaatcacattacagctccgaccgaacaatcgggggggaagtacctgaaatttgtgaggccgcacatcgccatgaattactgatttccctctctataaacccatcaaagtaaaccaatttctcctgagacttgcaccaaactcgatcttaccagactggngatggcgactatgaaccctttcgatcttctaggagatgatgctgaggatccaagcaca

SEQ ID NO: 112526 - DNA, 261 bp, Arabidopsis thaliana columbia
ccacgcgtccgacaagaagagactagtcagcgcttcggtcaaggtaaattcctcactatccgctctctagaagcgcgcagtctacgagagttttctgtcatacaaaacgctcttgtattgatggtatcggggtgtattacgctccacttccaccttgagacggaccttcagagaaactccaacgccaaggtggagacggaggagattcttgggacgatggtgctttcaaaaatgtgaatccactctactgttctggttctg

SEQ ID NO: 112527 - DNA, 262 bp, Arabidopsis thaliana columbia
acagaaccgcagtttcgacccacgcgtacgcggacgcgtagggcttgagaatcattcctgcctcttatcctgctcaagggtatggattgactgagagttgtgggggaagcttcacgaccttagccggagtattttctatggtggggacagtgggtgtgccaatgcccacggtggaggcacggctagtgtccgtaccatagatggcgtacgacaccttttgcgctgacgtgccgagaggagagattcgtcttagaggaaattc

SEQ ID NO: 112528 - DNA, 474 bp, Arabidopsis thaliana columbia
aaacactggaactttctttggtagttcatgttacttcatcttctattgatctcagcttctctcaaatcaaaatcggttccggatccgttaagaaattttatcagggaaggaagagtgagagaacagtgttggtgcatgtgatcggagagaagattccattatatggaagtggttcgactttacttccaccggctcctccagcaccacttcctaaacccaagaagaagaaaggagctccagtccctattcccgacccgcccgcaccaccagcaccggtaccaatgacgctcagctttgtcgtccgatcacgagcatacgtgttggagaagttagtgcagccaaagttctataagaaaatcgagtgtgacatcaacttcgaacacaagaatcttaataagcatatagtcatcaccaagaattgcaccgtcactacagtttgaaggaagggacataagaaaaagtaacatacttttt

SEQ ID NO: 112529 - DNA, 435 bp, Arabidopsis thaliana columbia
aaattgttgatttggaggatgtggagcaagctttttttgatgtaaagatatcgtcgtcgaatgtcgggtttcgtcttcttcagaaaatgggttggaaaggaaaaggtcttggaaagcaagagcaaggtataacggagcctataaagtccggtataagagatcgaagactcggtttagggaaacaagaagaagatgattatttcactgcagaggaaaacatccagcggaagaaacttgatatcgagattgaggagactgaggaaatcgcaaagaaacgggaggtcctagcagaacgtgagcagaagatccagagcgatgttaaagaaatccggaaagtcttctattgtgaactatgcagcatacagtttagaacggggttggagtttgaaggtcacttgagctcatacgatcacatccattagaagcgattcaaag

SEQ ID NO: 112530 - DNA, 484 bp, Arabidopsis thaliana columbia
ccaatctcttcttcaaatttagatcctttctttcttcaatctctgtattcgattagattcatctttcttcactcgaataacgggtttgagattctctctacgttacgcgtttttaaatggtgaccgtttctggagattcattgcagatctgaataagaggatgacatgatcacaaacccagaatctcaaattctgatttttattcctatttgttgttgatcatcatgtcgacgactcatgttggtttaccaacgaaaatggaagctacgaagtcgtcgaaacaaaattgttgcaacccggttaagaaacccggacccgtttcaattgatcatgttctcttagctctccgtgagacaagagaagagcgagatttacgaatcaggagctttatcagtttctttgattctgagaattgttggtacttagattgtgctcaaattgagaagggggtatgtgcgcttcaaatcccaagtgggtataaata

SEQ ID NO: 112531 - DNA, 348 bp, Arabidopsis thaliana columbia
ccagtaccttgttgacattgctgcgcttacaggtgctactgtgattagggaagaagttggacttcagttggagaaagttggaccagaagttttgggtaatgctggtaaagtggttctcacaaaagatactacaacgatagttggtgatggaagtactgaagaagttgtgaagaagagagttgaacagatcaagaatcttatcgaggctgctgaacaagactatgaaaaggaaaagcttaatgagagaattgctaaattatcaagcggtgttgctgtaattcaggttggagcacaaactgtgacatagcttaaggagatgaaattaagagcggaagatgctctttatgc

SEQ ID NO: 112532 - DNA, 467 bp, Arabidopsis thaliana columbia
accggctactaatcgctttcattatatcatccaatccctctacttctcagattctctccgtccaatcagaaaataaatcctattctcagccttgcgatgttgcagtctcaatacgagaacagaagttctccgatgactgacacgtaccctggtacatttccttaaggatctctgatgacaggactacatgattctcattcctacttacgtcaagagctcgattcgagactatatatagggctgatcatgacagcgtcggctgatgaagggataccatcgaaagcggtcgctacgatatagacgaagcttaatcgttgccacccggttaagaaacccggacccgtttcaattgatcatgttctcttagctctccgtgagacaagagaagagcgagatttacgaatcaggagcttattcagtttctttgattctgagaatgttggttacttagattgtgctcaaattga

SEQ ID NO: 112533 - DNA, 380 bp, Arabidopsis thaliana columbia
aaaaaaaaaaaaaaaaaaaaatttgaaagaaaaattctcgtacggagtacgaaagaataaaataataaatgtctttgacatccaattataccactgaaattttttttcatttttgaatggcagttccaaaaaaacgtacttctatctcgaaaaagcgtattcgtaaaaaaatttggaaaaggaagggatattggacatcgttgaaagctttttcattagggaaatcactttctacaggtaattcaaaaagtttttttgtacagcaaaataaataaaaaacactataataattagaattagcctaacttaaaaaccaatttgtttaaatacatctaaaaaaaataggaagcaaaagaagaaaaaagacaatatatagataa

SEQ ID NO: 112534 - DNA, 263 bp, Arabidopsis thaliana columbia
gaagaagaaagggagagggaagcggagggagcggaagcgcacactcgccggagcccagagaggaacaagcaaacaaggcgcccagacaccgcccgagacgaggaggctcaacgaggccagcgcaagcaaggcgacgccccgaacgagacggctagcaagctgaggagaacactcaaaagccatcaagtcaacagaacggcctctagcaccttcggagcgttggaccctgttcaggagaccatgacggctaaacattagaactc

SEQ ID NO: 112535 - DNA, 248 bp, Arabidopsis thaliana columbia
ggttacgtctagaatctttcgggccccttttagtctactcgccggcgcaggcttcgccggcggctattttttaccctatttcatctcccctctcctctgatatacccataaaaacacataaggatcgaaacgatcataacttcgactctagctatggtgatttagtcatacgattccatgtctttgtcttctttcaaattctaggagtttgagatttggttttagcttaataacgagaggggagggaa

SEQ ID NO: 112536 - DNA, 477 bp, Arabidopsis thaliana columbia
  unsure (1)..(477): unsure at all n locations
gaaagattcaagcatttgacggtaaaggccacgttgcaaagctatgcatagtcatactccctttgctatttgcagctcttgtcggcatttcccgtgttgatgactattggcatcattggcaagacgtctttgcaggaggcttgctaggtcttgcgatctctacaatctgttatcttcaatttttcccgccaccatatcacaccgaaggttggggaccatatgcttacttccaagtgttggaggctgcgagagtgcaaggagcagcgaatggagcagtgcagcagccgccgccccaagttaacaacggtgaagaagaagacggtgggtttatgggtttacatttggtggataatccgactatgaggagagaagaggatgtagaaactggtagaggctgagatgaagaaactctgaagcttggttaggtacttgttaggacactntctcttagtcttttgattctttgtggacaacttt

SEQ ID NO: 112537 - DNA, 456 bp, Arabidopsis thaliana columbia
ctcctttgcttctctcataatcatcctttgatgtcaatgtgatttctcattttcaattattgtatattcagattattgatacgagaagtgggaatttgcgatgcacatttcagtctcaggtttcttgtgggattcagagagatgataatggacgccgtgtttggcggaggagaacattgacgaagaaggacgatatgttgcgttacaaaatgcaaagagttccatttgtggaagaacaagtaaggaagataagagaagttgggaaggtaatgacaatggacatagagcagcttcttttgagggaagacaatcggtttgaatttgtcaatagcgtagcagctgaagcaacagagtacgtggacatgaacagagacgaatttgggaggttcaaaaaagccatctttcatggtctaagcaaccgggtgaaccatctcagctttgatcggccctgggctt

SEQ ID NO: 112538 - DNA, 406 bp, Arabidopsis thaliana columbia
cgataatggcaacatcagctatccagcattccttcttcgccggccaaacggctctcaagccctccaacgaactcctccgcaaggttggtgtatccggcggtggccgcgtgaccatgcgttgctccgcgaaggctactgctgagagcatgtgttgcggaccagaccgggcacaggacctaagaccattctcaggaaatccaccattgtacctaacggggatgctcaccctaagctaccgcggatccatggcgggaaatggtggaggcaccttactcgtccctgaatggctggaaggctcgctaccaggagatttcagggtcgacccattgggtttggggatagacccggcttttctgaaatgggacagagaggctgatctgatccatggccgatgggcgatggcagt

SEQ ID NO: 112539 - DNA, 412 bp, Arabidopsis thaliana columbia
ctcaccgtggacggtactaaagtacaaagtggtaaatacccctcgggaagaaaaagacacgagtggtccatgcactctgctgaattgcatgatatacaaaaagcgtattcttggtcactagcgacatagtatcaatattgctgaacccggctgtgatccttatggtgaaagcttcttccatcctgcctctggtcgtgcctgtgatggccgtctcatcatcgacttcatcgctgaattcttgggactaccgtatgttccaccttactttggatcccaaaacgttagctttgaacaagggatcaatttcgcggtgtatggagcaaccgcattggaccgagcgtattttgtggcaaaaggaattgaatctgatttcaccaacgttagtttaggagttcagcttgacatcttcaag

SEQ ID NO: 112540 - DNA, 413 bp, Arabidopsis thaliana columbia
gtagcaatcacaaggtgagtaataagaagagttttctcgctactcttggctgcagatgcgtgtgttcgaactggagttcagtggatgtcgtcgacgacaagagaagaagctctggtctgaagaagatcaagactcaattgagtttctctggagatctaagctcggagatgaagattcatcaacaacaacaagaagcaatgctagagcagaggaagtctctggaaatatttggatctcctcttattgagaagagaatcattcagaagaaatttccatgggaatactcgagctctgcgaaaaaagaagaacatggattctctgggaagtatgaagaagaagaagatgggagtgtgagcgatgtaagtacggatctttttgagattgggagcttaacagggaaggcaaaccctttt

SEQ ID NO: 112541 - DNA, 226 bp, Arabidopsis thaliana columbia
cttcttctggcggttggacctcccaagaatattttttttggttgtgggttttttttttggcacaagtctactacgcatttttccggcaaccctacctgccgtcaactagactattcctggacctcaagcctggtgtcgcagctgaagcattgtccctgatacggttggatagacgcggctgtttacaccttacacagctattctttgcttccaaacgggtgcattt

SEQ ID NO: 112542 - DNA, 269 bp, Arabidopsis thaliana columbia
ggcaaagagcttttgtggagaggatctgtttgctagctacaatgggttacccccaacttaggtattggtccaacaagcaagggaaaggcaacttattggtcggctttgtatgaacattgggaaaccatcggtcgaaccatgcatggtggtaaccttgatcccgctgcggagatcttcaactatcccggggctatggatatcaaagaacctatttctttggaagatgtgatggaggatcttaagcttggtcctaatgggggccttatgga

SEQ ID NO: 112543 - DNA, 360 bp, Arabidopsis thaliana columbia
ctctcccgccataacccatcatcttttacactttttacgcgccgccttcacgaccaaacaatttcctcgtcacgactccgagacctttacaattttcaatcaccgccgcctttgtcgtcgtcagcctccgaaaatcctgactttaaccagaaaaacaacaattagaagaagccaaagccgcagtaccgtccaccttcttcgctggaaggtgtgaagacggttcactctgatcttccgttcgatttccgagtcagttacacagagagttgctcaaatgtgaggccaattggcttgagagaaccaaagtattcaccttttggtcctgatcgattggaccgggaatgggccggtgtctgtgcg

SEQ ID NO: 112544 - DNA, 320 bp, Arabidopsis thaliana columbia
  unsure (1)..(320): unsure at all n locations
catctccgaaacgtttctctcnttaaaactttttttgaccgctctttataatttgaattgaaagagaagatgggaagagctgcgagatggttcaagggtatttttggtatgaagaagagcacagagactgagaactgtgtctccggcgacctaggatgacaagccctcttcctaacatccacacagactgttctgcaacttgctccgactccctcaagatctacctttctgctccagccacctctcctctcattctctcgattgccggtgctgatggtgcacctaagagtcttaccgacgacgagatacatttcatgact

SEQ ID NO: 112545 - DNA, 337 bp, Arabidopsis thaliana columbia
ctgtgatgaaccttgtggtattcctttcattgtttcttctcctatgtggcactgtctttggtgccagcgcctcatacatgttaagtgtcacatgattatgtccaaggaatctggtgatgcttgtgatcttggctctctcagaagagtaatcctctctccagtacatgtaaaactcaatgaagcaaatggtgtcgatggagtactgactactattaaaaacgagttagcatctatacgagggcatgtgagaagaaagcgccacaggggaaaaaatgggaatggccaatctttaaatggtaagctactggaggattcagtctgcgatccagtaaaaacc

SEQ ID NO: 112546 - DNA, 442 bp, Arabidopsis thaliana columbia
  unsure (1)..(442): unsure at all n locations
gagagattcatcaataaggtgacacatctcgttgttgngtcaggatttggaggtttttgtttcctacttggtgcatgacctcaagacattcctttagtttactgtttcttctatgtgatctttgttcctcttcgatggatatattaccggtttaagaaatggcattattatcttttggacttttgctactatgccaatacaatcttcttgtttaatcttgttctgttgtctatgattgaaatgctctttatcgtttgctttttttttgcttggatatcattgtcttgggcttttctattctgcttgtactttttggtttatactatctctttaagtctttatttttttttctatttcctttatattatctttttattatacttctattcatatatatctctttcttttttatatttatgctttttttcttttctcctttttt

SEQ ID NO: 112547 - DNA, 342 bp, Arabidopsis thaliana columbia
cactagtcacagaaaaaaaaaagtgaataaaagatcaaatccaatatctaaaaatctgctctgctgctatagaattgcggattctagtgcaaatagaagggaagttgtcggcgaaaggtcacattttattattgacaagatgattcaaatggacggtggagataggctgagagtgacgttatcagatcgaatgtcaacagtggagaatggccggagctcagtgactttagaagatattctgatggctgaaacgagcagtttccgatctcttactacgccgacaacttcggtgaggaatcactctagtagtagtttacttgacgtgattagaagagagcgtct

SEQ ID NO: 112548 - DNA, 275 bp, Arabidopsis thaliana columbia
agtaatttctcctcaaagaaactcgcagatctcttggtggtggctcgtgttcctcccgctgttaaccaggtggagtgtcacccttcatggcaacaaaacgtgctcagggatttctgcaaatctaaaggcgttcatctctcagggtactctcctttgggttctccaggaacaacgtggctaacgagcgatgttttgaagaaccctattcttggtggtgttgctgagaagctcggcaagactcctgcacaggttgcaatacgctggggtcttcaaat

SEQ ID NO: 112549 - DNA, 403 bp, Arabidopsis thaliana columbia
gaggaatcctattattcggtccacctggtactgtcaaaacaatgcttgcaaaagcaattgcaaatgaagctggagctagtttcatcaatgtctccatgtctacaatcacttcaaaatggtttggagaagacgaaaagaatgtgagagctctgtttactttagcagctaaagtatctccaacgattatatttgtggatgaagttgatagtatgttgggacaaaggacaagagttggagagcatgaagctatgaggaagattaagaatgagtttatgacacattgggatgggctaatgacgaaacccggtgaaaggattctcgttcttgcagcgacaaacagaccgtttgatcttgatgaagctatcattaggagggttgagagaagaataatggtgggactttc

SEQ ID NO: 112550 - DNA, 432 bp, Arabidopsis thaliana columbia
aataaaaaggttcgaaaatggcagaggaaacttcatagatatgctgtagttactggagcaaacagagggattggatttgagatatgcagacaattagctagtgaagggattagagttgttttgacctctagagacgaaaacagaggacttgaagctgttgagacactgaagaaagagcttgagatttctgatcaaagccttctttttcatcagcttgatgtcgctgatcctgctagtatcacatctcttgctgagtttgtgaaaacccaatttgggaaactcgatatcttggtcaataatgcagggattggtggtataatcactgatgctgaagctttaagagctggggcaaggaaaagaaggtttcaagtgggatgaaatcatcacggagacttatgagttaactgaagaatgcataaagataactactat

SEQ ID NO: 112551 - DNA, 261 bp, Arabidopsis thaliana columbia
cggacgcatgggcgaacaaacaaatgaaaaacctattttattttataccgcactaaacaaaaaggcctgaggctttgatacagatgatcgcacccccaaagggacgaatggagaaccgtaccgtgttaacgactcatctagacctaacaaaggccggagcactatactccggtcgaaacaacgagaagtgcgactcaacagtgtggtgaacacagaggcaaaatcttcagaggaggaaaaaaggtgaaactatcactagac

SEQ ID NO: 112552 - DNA, 370 bp, Arabidopsis thaliana columbia
cgcgttttaaacgatttgattagttttaaattatatatagatgatccgagcgatgtctggttcgacccggaaagaaatggatcggatcaaaggaccatggagtcctgaagaagacgatctgttacaatcgttggttcagaagcacggaccaaggaactggtctctgataagcaaatcaatccctggacgttccggtaaatcttgccgtctccgttggtgtaatcagctttcttcggaggtagagcaccgtggattcacggctgaggaagatgatacgattattctagcgcacgctcggtttggtatcaagtgggcgacgattgtacggttttctaatggttttacttgatatctctatttaaaatttttt

SEQ ID NO: 112553 - DNA, 337 bp, Arabidopsis thaliana columbia
ctcatgctgtgagaatgcattagctgtatcagtagtcgttgtactcaaccatcatgaatgccaaggatccttctaagacatgatgttcaccttgccacggataaactcaattaccgagcaacgaacatgtggttcctcctagacccacacgtgaaggcaaccatacatgtggaaaacgtggatgagattaaggggctcaacgcatctgactgtcatgggcttcgttaacttgaatgtgcagtactgagagagtactattttatagctgaccattcgcctttttatgctgcggatcttaaatacagaggccccatgtatctattcatgttgaatctct

SEQ ID NO: 112554 - DNA, 460 bp, Arabidopsis thaliana columbia
aacagttccaatgttacgccttcaaccactcgttcatctctccgacatcaagattatgactgagtatctgggtgaatagcgagttattcatcgttttttagattatggttaatagataccctttttgaccggaaaatttggaagtagatagaaggttttttttaatgagtccgcttttatgttagttcgtactatacaattcctttgtttgtgagaaaattttctcacaaaagaaaaggtaaaggaaataaaaagagttagagaatggattactacctatgccaagatcgcgtataaatggaaattttattgataaaacctttacaattgtagccgatatcttattacgagtcattccgacaacttccggagaaaaagaggcatttacttattacagagattggatgtcggctcaatctgaaggaaattatgcggaagcattacagaaatattatgaagc

SEQ ID NO: 112555 - DNA, 425 bp, Arabidopsis thaliana columbia
tcccgatctctcagcttcttccatttacaattctaccctttgcctcttggaacctttgaacgaaaatggcggaaacgatcggctcagaggtttcgtccatgtctgacaaatctgccaaaatcttcgtcgcgggtcatcgtggtttggttggatctgccattgtccgcaagcttcaggaacaaggtttcaccaatctcgttcttaaaacacacgccgagcttgatctcactcgtcaagccgatgttgaatccttcttttctcaagagaagccagtttatgtaatcctagcagcagctaaagttggtggtattcacgctaacaacacctatcctgctgatttcattggtgtcaatctccagattcagaccaatgtgatccactctgcatatgagcacggtgtgaagaagcttctcttccctggatca

SEQ ID NO: 112556 - DNA, 406 bp, Arabidopsis thaliana columbia
aaactgtgaacaccggatatgtgggattccctactgtttaaatcttttttgttatggttaaaaacatcgcagtcctaaaatactacaggataaattctgaggaagatggcagggaagcttgtgctattcttcatgcagctggtccttcaaaggttgtgatcactagcattactataggaggcattctattacttatcggaagccatcagaaagaaaagggtctcaagcctgagcaattcaagattttgatacacaaaatccctgcttattttacgggaacaggagatctcatgactgctcttctacttgggtggagttataaataccttgacaaccttgacaaagtagccgagcttgcagtttaaacgttgcaggcgcttttgctaagggcgctttatggttacaa

SEQ ID NO: 112557 - DNA, 270 bp, Arabidopsis thaliana columbia
gatggtttgaggtttgtgcggagaatgaaggaaatgagagtggaagcgaatcttgtggtcttcaattctttgatcaatggctttgttgaagtcatggaccgtgatggtatcgatgaggttcttaccttgatgaaagagtgtaacgtgaaagcagatgtaatcacgtacagtactgtgatgaacgcttggagctcaactggatacatggagaaagctgcacaagtgtttaaagaaatggttaaagcaggagtcaaaccaaacgctcacgcg

SEQ ID NO: 112558 - DNA, 224 bp, Arabidopsis thaliana columbia
ggaggagacgcctagctcagcaggttagacatctagcagctgcagcaattgagccggaattagagcaaagggaattgtaacagacacgtgaatctattaagtcttgtgcagtttgatccttgtggataagtttggtagtagatcatagaaacctcgagagtcgtgtgcagttttacagacaatgatattgcagactttaaaagtatatacatatctccttttct

SEQ ID NO: 112559 - DNA, 370 bp, Arabidopsis thaliana columbia
gattctctctctctctctcacatggctcatctcttaaaccgcgttagatcttcctggtcgtcgatcttaccattaactataacattcctcgtcatcttcaccggaaactcactcgccggagaattacgtccttccgatcatggcttacagtaccaattcagctcaccaccgacagaatctcactcacctccgggaaaaatgaagtccttctttggagattctcattcttcttctcctcctccttctcaccctcagctcctccctaaagccacggcggcagacggcggagacgacgattcttggtggcgagatggagctgggatcagacgtgatcacgtgatgaggcacgtgtttcttgcggcgagtatca

SEQ ID NO: 112560 - DNA, 365 bp, Arabidopsis thaliana columbia
ctctttatggcttcttcttcctcctcctcttctctcaattggtcatatcacgttttcccgagtttcagcggagaagatgtccgcaacacattccttagccactttctaaaagaactggataggaaactgatcatttctttcaaagacaatgagatcgagagaagccagtcacttgatcccgaacttaaacatgggattagaaattccagaattgcggtggtgtgttctccaaaacctatgcctcttcaagctggtgccttaacgagctactggagattgcgaaatgcaagaaaggggttggccaaacttgtgatacccattttctacaatttggatccatcccatgtgaggaaacagaccggaga

SEQ ID NO: 112561 - DNA, 425 bp, Arabidopsis thaliana columbia
cgtccggccgtcgtggttgcaaagctcggggatgttgactttagagcaaatggtttatctctttgatcgattcgattacttgacttcacaatctgatgtgaagaaacgaatctccgacgctgtggatgacaaacaggaagctgtagcggtaacaactgctattcaagaggagatattcttggagatggggattgacccgggatttggtattggctgcttgggaaagctgaactctgcatacgaaaacgataaagagttgatgattggttttctacaagtttctcgcaaaggaggagatggcatgtgaagaagctgagcttggacaagatggatttgaacagaaaatgaaagcactacaacaattacaagaacagcaactagagatgcttaagtatatgcgtaaattctctttggatgatcaatct

SEQ ID NO: 112562 - DNA, 447 bp, Arabidopsis thaliana columbia
atgacctccatggtaataaactactaattatctttgtaaaatgttctcacgtgaaactctctcactatttcctattgctcactttatgtccccatagcaacaacgacttgtactcgtctgaaaatttctcaaatttcatgtaaataataataataaaaaaattattacaattcttcgctaaaagcatcacagatccagttggcaaaaagaattatatatatactattagtgcattgcaaataaaattattaaagaccaactgtttgtcatataaaatattataaaggatttcatagataatatgtatttgatataacaattataatcgataacaatattctgatattgtaagcttgaaagattatgtcaacagagttaattgctctaattaaatatgtctgggttaatctgatattgacccacaacgtggttacttccattaattcc

SEQ ID NO: 112563 - DNA, 422 bp, Arabidopsis thaliana columbia
  unsure (1)..(422): unsure at all n locations
cgcttttgcttcctatcgcatagatggccaagagagtaatagatccatgtcaaaccgggtnaggttggcngaatgtntaggcgattcttatgggtnnttagtggttcaaccacccacatgtgancctggataataggacccaaattttgagatatcnttgttgcanngcacttttgnntctganncccatgtgcaccaaccacttatnttgtccataannccttcatactataagtaagtgatagaccaagatctcttganntctcatacctanntctatcttccatcannctttcatgtctgtctgtgagtgtgtttcatctttagagttcttgggttttgagcttgaattattgttgaaccggtgtagctccatgaacaaaattggatatcttcaatgtacagaggaactaaagttaatc

SEQ ID NO: 112564 - DNA, 428 bp, Arabidopsis thaliana columbia
acaacaacaaatcttaaacgttttactttgttctgcactactcaacctcaatggccgcctcaacaatggctctctcctcccctgccttcgccggtaaggccgtcaagctttcccccgcggcatctgaagtccttggaagcggccgtgtgacaatgaggaagactgttgccaagccaaagggcccatcaggcagcccatggtacggatctgaccgtgtcaagtacttgggtccattctctggcgaatcaccgagctaccttaccggagagttccccggagactacggatgggacaccgccggactttcagctgaccccgagacattcgcaaggaaccgtgaactagaagttatccacagcaggtgggccatgctcggagccctaggctgcgtcttccctgagcttttggctagaaacggagtcaagttc

SEQ ID NO: 112565 - DNA, 346 bp, Arabidopsis thaliana columbia
  unsure (1)..(346): unsure at all n locations
gttatgaactatgcacagccgttgaacggctcatacacaaatctttacaggtttgctgatactaaactgttgttaatccgccatttgattggttatctcaaaatctagtgtttgcttactcgtcatttgcactgcaggtatccttctgcaagtaatccctgacagcaagagtagtgtttgagtacttcaatgtctgtaatgaaaagcagattctatagatattagcctttaggagctccctgttctgttccgaacaatggctacttctttcttatataacaaacaagacatctacttttttatatctctgaattatattattatcgaactttgaatgagcttcana

SEQ ID NO: 112566 - DNA, 264 bp, Arabidopsis thaliana columbia
  unsure (1)..(264): unsure at all n locations
cgtgnannaggtcaaccaacccgtcgagaaaataatgggctatctatcttcnntttgtgctntnncttctgcccanntcgctgcccanntttcttnnctccaagnntttcttggggtggggtaaggaaaactgagngnnctgaagaaagaanngttgaccggttccacgcnntgtgtcccccaggccaagtatgccgtnncggtgcngccgcccgtcnnngcagctgtatccccagatagacncatatctngtngttcccggga

SEQ ID NO: 112567 - DNA, 297 bp, Arabidopsis thaliana columbia
  unsure (1)..(297): unsure at all n locations
cgatcactttactctaaaagaatcttcatcatgggccttatgtttcctcagcccaccgttgcatatcccattctttcaaccggccttaatagcctcaaccccatcaaatcatccccgccaccgtcagnnaatccaaactgctggctgttgcatcaaccgaagcttacanngtgaagtcatctctataagaaacttcggagtcgcggcccgtagncggctgcagcttcaattggctttggcccggaaaccgccatggccaatagaaagttcttcttggggagggagggggatggggtc

SEQ ID NO: 112568 - DNA, 449 bp, Arabidopsis thaliana columbia
  unsure (1)..(449): unsure at all n locations
ggaagaagctccagtggcaaagactcaacattnaatangagaggtgggagtctatggcagctagggcaatcaataacccgtcgtcttgctcaatctgacaagaaggttgtgtcacgtcgctactttgcctctgaagctgacctgaaaaagactgctctttacgacttccatgttgcccatggaggaaagatggttccttttgctggttggagtatgccaattcagtacaaagattcgattatggactcaacggttaactgcagggaaaatgggagtttgtttgatgttgcacatatgtgcggtttgagccttaagcgtgaagattgtgttcctttttttgagacacatgtgattgctgatgttgctttttttggttccttgtactgttatcttatctgagtccatttactggttatgtaattttctttgtagtgtccagttagtgactg

SEQ ID NO: 112569 - DNA, 424 bp, Arabidopsis thaliana columbia
ataaaaatcaatcagaaagaagattgaacatagatctcaagagtcaagatcgatgggtttggttgtggtcatatctctgcctctaattttcttctgtctacttctcggatttggctgctacttcctcggaaaatctcgcggccgtcgtgagatccgtacaaatcctcaggtgtatggagctccagctccgcctcccggtgctatcgccgcctcctctccgccgttgtctccacacgccaagcccgacaattctcacaacgtctgattttccttcattttctcttctttgtctgtcttgcttgtctctattggaagatgcttttcgttgacttattgtgaattgttgcaaccttgtatcttttgattgtctttagctttctcgggatgaatatccttctttatttgcggattttcctatctcttt

SEQ ID NO: 112570 - DNA, 153 bp, Arabidopsis thaliana columbia
ctttttgtgtctcttggcaccatttaactacaaatgggaagcattacggttcggtttcgtgctctacgcattgacttcactcagcatcacattctcataccataggaacttggctcaccggagctttaagcttccgaaatggcttgaatatcc

SEQ ID NO: 112571 - DNA, 403 bp, Arabidopsis thaliana columbia
atcacttgccacactgttacaccgcactcgaggtgtatatttacacatttggtgggccttggttgtttggtcttcttctgatgggtctcctcatcctcttagcacttgtacttagtgttgcacgaatgaaatttgttggagttgatgatttacctggcccagctcccacacagcatggctctcaaatagatcattcgttccctttcctggaatcacttaatgaggtgttggaaacaaatagagctgagcaatctcagagtcatgtgcatagaatgtattttatgggtcctaatacattcagtgaaccgtggcatctctcacacattccccccggaggagattaaagagatagtatatgaggctgcatttaacacatttgtcgacgaaatcaactctatagctg

SEQ ID NO: 112572 - DNA, 381 bp, Arabidopsis thaliana columbia
ccggacccacccgtccggaaactgaagcttagtgtgaaatacccgtcgaggtcacatcggatcagaaattcgagctaaagagagttcttggtggggtctcatgaggaagtcattgatgaatgtagatagcaaaagtagaggagatgatagattgtgaatggtaggagggactctcttaaagaggcttggacttactagcgcgaaaaactgcacaagctttgcttgtgacttttacatctgttgatcgaattagacctttattcccttcgggtaagtatttcattgatgtgctttgattccacaggcttctaatgctcatagagtgttcctgcacggttcctgtaattccgacctatcttataaaaagaaaaaaataatggg

SEQ ID NO: 112573 - DNA, 460 bp, Arabidopsis thaliana columbia
  unsure (1)..(460): unsure at all n locations
cggacgcgtgggttcggttccctgagagncctcggtagctcagtggtcggagtgtcggcgttcaatttctcgatgactaataaccctcaaattgtgttatatcccagtgaccagcttgtccttctcggtggaaagtgacatacgcttcatgcttcttttacatgttcttcataaacagacagaaaagaaaagagaagcttacttgatttgctcattaatgactgcctcgctagcgtcggcaaacctctggcgagcgagagaggcatgagatgtgattggaatggccagatcggctttcttcacctcttcgaaaggctggaacacgactccggtcatcggcatgttgtttgtgtccaccgtagccgctgcaacgaccactgctctgccgccgccaacttttctgtggaagccgagagaaaccgtctgtgaagcagagccgttagggagtagtggcttatga

SEQ ID NO: 112574 - DNA, 454 bp, Arabidopsis thaliana columbia
attcgttattcgcatcagtaatggaagattttgtaggagctgaagcagtgataaatctcaaatctggatattcgctaccaatttcttatcacccatgttttgggcctcacgaggatctacttcttcttgaagctgatgacaaactcgtctctgatatctttcatcaaagggtaacattgagaggacttcctgatgaagatgctgttctttgcaccaagtctaagacttatgctatcaaatttgttggtaattctaattccatgttccttattcctccttcaatttttcctggagatgcacaagtttctgataccaacaacaatgtatcggttctcaaaatcgctcctggtaatatggaacttgttgaggcttctcctaggcttgataaacttaagcagattctcttggcaaatccttttggtgctggggaagttgaagctatgaatggatgtga

SEQ ID NO: 112575 - DNA, 423 bp, Arabidopsis thaliana columbia
cttcttaccttagaatctctctttcttttctcttctgggctttactactctcaccggctgtgtcacagtcatcttcttgttcgtcacagacattttccggcgtcaaatcttaccctcactgtctcgacctccctgatcttaaagccattctccattactcttatgacgcatctaacacaactctcggcgttgttttctctgctccaccgtcaaaaccctggggttggatcgcttgggctattaaccctaaatccaccggcatggctggatctcaagccctcgttgcctctaaggaccctagcaccggcgttgcttccgtgacgacccttaacatcgtctcttacagctttctggttccctcgaaactgtcctttgacgtgtgggatgttaaggcggaggaagcggcttatgacggtggagctt

SEQ ID NO: 112576 - DNA, 357 bp, Arabidopsis thaliana columbia
gtgctaagagaatcagagtccatattcgtacctaaggtcgtgatgttttggatggatctagagtttgattagaccttaaagggaccacctccctcttacgagtaggagcgtattgattctgaattgaaactggttggtgagtatggtctgcgtaacaagcgtgagctctggagagtgcagtactctcttagccgtatccgtaatgctgctagagatcttttgactcttgatgagaagagtccaagaaggatctttgaaggtgaggcttagctacgaaggatgaaccgctacagtcttcttgttttgagccataacaagctcgattacctcttggcttatgactgttgagaactttct

SEQ ID NO: 112577 - DNA, 426 bp, Arabidopsis thaliana columbia
atggaatctgaaatcgcctccgagtttcttcctttctgccggatttacaaagacggtcgtgtagaacgactcatcggcaccgataccatcccggcctctctagatccaacatacgacgtcgtttcaaaagacgttatatactcaccggagaataacctctccgttcgtctcttcctccctcacaaatcaacaaaactcaccgccggtaacaagctccctctacttatctacatccacggcggagcttggatcatcgagtcacctttctccccactctaccacaattacctcactgaagtagtcaaatccgctaactgccctgctgtctctgttcagtatcgccgtgcaccggaagatcctgttccggcggcttatgaagatgtatggtccgcggattagtggatttttgctcattctaatggatct

SEQ ID NO: 112578 - DNA, 415 bp, Arabidopsis thaliana columbia
cgcgtgctcgcctctggtgtctctgagactcataatacgacggtcgagattcggtcatcagcccgtcacgcgtgagccttaatcctagtctcagccagagaggatctaaaccttttccgttgatccaggcgaggaagacaaggaaaagcaggaacgatgaccctcatatctcatcagctcgacctgacgacgccactggttctcttactgaatgcattcttctgaaagagacgaggagtgatgaagaaggagatgttcttgccgcagttgctgctgcttgagaagacgagacacacaagcttgcagagcctgatgtatcaactgactcgtgtgccgaaacgaggagaatctgtcccgtgtattacatgaggataaatatgaataccctggatgtctttacatctatacctctatc

SEQ ID NO: 112579 - DNA, 459 bp, Arabidopsis thaliana columbia
cacaacctcgttgaatgggcgagaccgcatcttctgtacaaaagaagattctaccggttacttgatccgaggctggagggtcatttctcagttaaaggagcacaaaaagtgactcagcttgcagcacaatgccttagccgtgactccaaaataagacccaaaatgagtgaagtggtggaagtacttaagcctctcccacacctcaaggacatggctagcgcttcttactacttccagacaatgcaagctgaacgtttgaaagctggttctggttctggttctggtcgtggattcgggtcaagaaacgggcaaccagtgtttcggacattgtctagtcctcatggtcaagctggttcgtcgccttatcgtcatcagattccgtctcctaagcctaaaagtgcaactacttagattggctcgcatgtgtggacgcaagcaaacgtcttttttaaccgatgt

SEQ ID NO: 112580 - DNA, 142 bp, Arabidopsis thaliana columbia
ggaagagactaggtcagcagcccgtcacgcgagtgccttaatcctagcctcagccagagaggatctaaacctcttccgttggtcgaggcggcgaaggagaagaaaggcaagaacgaggacagtcataactgttcaggtcgac

SEQ ID NO: 112581 - DNA, 456 bp, Arabidopsis thaliana columbia
aaaactttcatatattcctcttctttaaattattacacaaacactctcttctcttcataatcctcatctcatcatcactttgtcactaaatcagaatgaatccatccgagcagaatcacttgtccgtggaaaaaccttcacagacttcttcggggccgtacacaagtccaccaccgattggttatccgaccagagatgcgatggttggtgatcctccagccgccgcagtggagacaaagtccaagggcgatggtttttggaaaggatgttgtgctgccatatgctgctgttgtgtcctggatgcatgcttctgagacttcggaattaacgatttcatgcaaattattgatgtaataaaagagtatttgatgctagttatgttacctactctctgtttggaatatactctgtggatggttgttactatgttttatgtaagtgattatatatatatat

SEQ ID NO: 112582 - DNA, 453 bp, Arabidopsis thaliana columbia
catgcgcaagccctagctatctcaaagaatctgtagacttgatcagtaggttgcctgatgatattctccaactaattctctcctatcttccaaccagattggcgatcaaaacttccgttttatccaggcgatggaggcatgtatggtctgatacatggtccctctccttccatagggacagaccggatgctccttgtattaacagaatcctagatcgctacagggctcccaagatgatgagttttcgtatctgttcttgttgcagggcagcctgtatcagcagacccgacacgcatgctgacatcgacagttggatcaacttcgccatgtcccgaaacgtggagaatctgtccctgtatctcgatgaggataaatatgatatccctgaattcctttacatcaattcctctctcaagcaactctaccctgatttcggctgcaaaaaggatttta

SEQ ID NO: 112583 - DNA, 440 bp, Arabidopsis thaliana columbia
gccaaggatggagggtttcctaacggatcagcatagagagatgatgaaagttgcaactcagactgcagatgatcttccaccctcacaaaaacctcactcggttttacttgagcatctgcctaaaccatctggtggtgggaaagcttctggtgcgtcaaatgctgtgaagcacagaaggtctcatgcgggaaggtctattcgctctaagaaggatggaggtggtggaaaaggaaattggggaaaacttattgacactgatggagactatcacattgacccgaatgatcctaattatgacagtggagaggaaccattcgagcttgttggtgcaactctgtcagacccattagatgattacaagaaagctgcagcttccatcattaacgaatacttcagcaccggtgatgttggtgtggcagcagctggacctattggacttg

SEQ ID NO: 112584 - DNA, 325 bp, Arabidopsis thaliana columbia
  unsure (1)..(325): unsure at all n locations
tgcgtctctctcccgcaaccttcgatttgcgtgcantcgcatccatcggagagagaaaacaatcaataagcgaccatgttggtgtaccaagatcttctcaccggtgatgagcttctgtctgactctttcccttacaaggagattgagaatggaatcctctgggaagtagaaggaaagtgggttactgcgggagctgcagatgttaacaatggtgccaatccatctgctgaagaatgtggtgaggattaacgacactgtttctctcttcattctttctcttacattcacaaccactctttgtttcgaacatcatcttactaatttt

SEQ ID NO: 112585 - DNA, 462 bp, Arabidopsis thaliana columbia
aattgcctgagaatcacaatgaagagatggctgttgtagaacaacccaatcaattggctgtggaaatacacgaagaagagaaggagcaggagcaggacatgcatattgagtatggaagagaccaagctgatgagttatcaatcaatagcgaagcagtcaatgacccatcaccagcagctattcatttgggagaagcatcatcagattatgcacaaagttctgttcgaggtgtggagaatcttcattgtggatggctaattgatgaggaggagacggatcctgaggaggaaacggatccagaggagaaggagaccgagccagaggatccaaaggagaaggagacggagccagaggaggatagtgatggggatgatgatgagatcattcagcttactccagaacctctttgtgaagaacttcaagagcttctcagggaagtacgtggacagaagaggaggaaga

SEQ ID NO: 112586 - DNA, 288 bp, Arabidopsis thaliana columbia
cgacaatcatgggtcactccaacgtctggaattctcatcctaagaaatacggtcctggttctcgcttatggtactatctttttctcatctctcggctttcttttcttttaaaataaaaattctgtttagtttagagaaattgggattgcctaagaacttttatcatgtttatcattcgaaagattttcaacataggaagattttttatctgaacctgatccttattgattatgtgaaacttttgatgtgaaattttgcttagggatagttaagtggtgtggtttaggt

SEQ ID NO: 112587 - DNA, 351 bp, Arabidopsis thaliana columbia
ccttattgaaatctacttcttcaagcattgactcacgaatatcttgaaaccatggggttgacagggcaagctactgctccaagagtatataagtactgcagcagccggcgggtacttacaatggagaggctatatggagttcctctgactgatctggactctataagatcacttgtttccagtcccgaaaacagccttattaccgcgcttaatgtgtggtttggaagcttacttgcttgtgaaagcttccatgctgatgtacatgcaggaaacttatggctgttgcgtgatggccggattgggtttcttgattttggcattgttggtcggatattccccaaaacatgggct

SEQ ID NO: 112588 - DNA, 259 bp, Arabidopsis thaliana columbia
tgttgagaaccttgcaaagcatctcagtgatcctttttgaaacaacttgcttaccgtcatcgctggaactgccgagagagctcccactctctaagccatttctactttttttaagagcttccaaaatgtacactttgttcgattggaactccttttgacaatgttaaaaaaacttccatctgaatcttcttgatatatttcaaattttcaatggtgctttatcatgcttctaaggatatacatagtcacccattggttt

SEQ ID NO: 112589 - DNA, 437 bp, Arabidopsis thaliana columbia
  unsure (1)..(437): unsure at all n locations
cttggattgaccacaaagggatggctctggaagctgttttctccatgagtttttgctccttctctgtccctaaagcaatcttctgtgagagagaaacttcatcttttcaacgaatcacctcgagagcaaagggaattgcgggtgagagtcaagttcaaagctctgatggagttgagactcaagtcaaggaaacttctcccaaagtatttgataaactgcctgaaagaaatttagatacttggagcggtggcagagaaacagcaagaggactttcaggttcagtagtaagaaacactgtacgaaaagatactactttacgacatatctcaccttctagtcattcaacanaggttagaggagataagccagagatttcagggggtgagaagaaagctattgtagatagaagcaaggcctacgtaaagctgaaatcttta

SEQ ID NO: 112590 - DNA, 400 bp, Arabidopsis thaliana columbia
  unsure (1)..(400): unsure at all n locations
gaagaaaggctcttacattttagaactgaaaattaatctcacaaacaaaacgaagaaaagttggaggaaagacttgtgcagtataaaaacaagaacgacatgcttcttcgtgaaatgtctagcacagaagcccagatgagacaattgctagatgaaagatctaccttcactcagaaagaggcgagtctagaaaagaaagttcaacaacttcaacacgatgaagaatccttggtggctgaggagaagtcatccagagaaatgatatctagccttaacaatgaaattgcaaggctgcgagcacagtttggcaggttacggangtggaaaaatctaagagtaatcttctagagcagaatcagagtcttaaggaaactatatncaatcttaaagtcagcatgaa

SEQ ID NO: 112591 - DNA, 455 bp, Arabidopsis thaliana columbia
gatacattcccgccgccgtcgcaacgttccactcgttttcgcagcaaacagttcatctatggctacatcaggacgctcccacggctctaccacggcggctttagcctttacactcgccgtagtatctgtatccgctgccttctcgcgtaatctctttctctctacctctctgtcacttcctcttcccaatacctgttattgagctggtttcgagaaactaacactttattgagcatgttcttgcgaagtgtatagatggcgaagacgagaagaagatttggagaataggatcaaggaatttgagaagtctttgggatctaccttggaaaaaagtgcttctgagagaaaaggtcgagtcaaagctcagcagctgtaggctttacgggaggcgttagcacagactgagtcacatgatttacacagcacaatatacccgatgcgacctattggcacta

SEQ ID NO: 112592 - DNA, 357 bp, Arabidopsis thaliana columbia
gtcgtttccttctttctcgcttcagatcttcgtttattcctaattttttgtataatttcgcttccatggctgcttcagctgcattctccatttcatcaccaccttttgtaccctttaccaccaaaattcgcagaccatttctcttgcttactccaaaatatcccaaacctgtttcggtgcgagcttctgtgtcctcgatctccatcgatgaaaaattgccagtccaaacaaagacaagcaactggcagtggaagttcaagggcaattcgattggtatatactatgaagagcatgagagggagaagtgtgaatcggctaagaatattctaatgataccaacaatttccgatgttagca

SEQ ID NO: 112593 - DNA, 303 bp, Arabidopsis thaliana columbia
aaaaaaaaaaaaaaaaaaaaaaaaaaaaaaaataaataaataaaaaaaaaaaaaaaagaaaaggagaggaaaaaagaaaacaaaaaaaagaacccaaacaaagaaaggaaaaagatatagaatagagagaacctaaagtgaacacactggcacgagggaggacaacggccgggacagggaaacaccctggcgaaacccaacgggaatccgcctgggaaagcaccctggttgtagacacgcctggcgggagagcgaataggccagcagggatggccctgcctaccaggggcgcagacagaaggg

SEQ ID NO: 112594 - DNA, 405 bp, Arabidopsis thaliana columbia
taaattcttgttctagtgcttttgttgacctgatcctataggccaactgaagacgatctgaaaatctggcctaacaattttgagttcaggctgaggatagccttggggaccgaaggagaattaactctgacatctcgtatcaggaacaccaactctgatggaaagccgtttacattcacatttgcttatcacacctatttctctgtctcagacatcagtgaagtacgggttgaaggattggaaacgttggattatcttgacaacttgaaggacagagaacgttttaccgaacaaggcgatgcgataacttttgaatccgaagttgacaagatttatctaagcacgccaacaaagattgctattttggatcacgagaaaaagaggactttcgttattcgcaaggac

SEQ ID NO: 112595 - DNA, 434 bp, Arabidopsis thaliana columbia
gagaagacccgtgtcatcttcctcagctgcccatcacttaacgaggagacgctccgaaaatcaaccagcactgtcctgagtgagatagtgcggacaaacgaaacttgccgcctatactccgaagcctgtgtatctctatgcaaagagatggacctgaaggtggttgatctttggaatgctatgcagaaacgggacgactgggcgacggcctgcttcacggatgggcttcatctgtctgaagaagggagcaagattgttgtggaagagatcctgaggatcctcaaggaggcagagtgggatccatgcctgcactggaaggcgatgccgacagagtttggggaggactcaccctatgatctcgtctcctccagcggccaatccaccgtcaacccctccgactggaccttccacaggactatccaatgggactgacc

SEQ ID NO: 112596 - DNA, 343 bp, Arabidopsis thaliana columbia
  unsure (1)..(343): unsure at all n locations
gggaatgaggtttgtgaatccttttctgtagtacntgtgcgtatacttgctaggattacttttgttttcaacaaagaggctcgggccattaacttttgccgtgagcacgatgttgcgtcactcttccttcatctgctccaatccaacgggcaagataacatacagatggtgtccgccatggctttagagaatctttcactagagtctataaagctgacacggatgcctgatccgcctcctgtgaactactgtggctcgatcttttcgtgtgtgagaaaaccacacgttgtaaaccggctgtgcaagatccaccagcgaatatgttcattaagagaaacatttt

SEQ ID NO: 112597 - DNA, 289 bp, Arabidopsis thaliana columbia
  unsure (1)..(289): unsure at all n locations
ctcttagtttaggttcttagcactgaaatttgactagaagtaagcttgagggttatgatcttattactttgtgggtattagattttgncgatcggattcagagtttttctcttttcgatcgttttacttatccagtacaccaagggtgttgacggtgtatagcttcactaaacataatctctcatttcttctagcttctcgattagctcttaatggtgcatggtgttccgtttgagaccgttttacatgcacctgtgcgtttatccattctttattcattactctcatc

SEQ ID NO: 112598 - DNA, 117 bp, Arabidopsis thaliana columbia
  unsure (1)..(117): unsure at all n locations
cggaatcgttttagcagaaagacnctctcctgtcctcagaaaacctccgagatcggagagcgggcccgctcgagcaatggcgcggcccacgcacacacacgggggaaacaaaggggc

SEQ ID NO: 112599 - DNA, 375 bp, Arabidopsis thaliana columbia
gtttttataggctgctaaaaaacaacgtttctatattataacaaaacagaaaaaaaaaacaaagaaaccatgtacagaaaaaaaacataagccgcacagccatagggaaatccacaaggaagaggagcgcgcagacgaatcacaatcattagttagtatgggccatagaggactactcatgccctgaatgtatcgatcctgatatgagcaactcgaaaatggaaccagctattgtcaaaaaggttaatttaaggccgtcggcggcagggacaacctggatttgcgccccccctatgacccctcccatcagttgccccaccggaaagccgtatggaacccactcgggagccccacattacactgggggggttcgtc

SEQ ID NO: 112600 - DNA, 250 bp, Arabidopsis thaliana columbia
agatttgttagattcgcgtgtgtaggagctaaactccgattgcggagatttacgaggaaggagatgaatcagtggatgtgaataaagaatcagaagtgaaaactgagctgggaaaagggggaggagatgaccttgttctccttttgatctgtttattcctttctttatttatctcttatcactttcgtaatatgctagatgcttttactctttgtttctatcattctctctttattttttctcttttcct

SEQ ID NO: 112601 - DNA, 433 bp, Arabidopsis thaliana columbia
cataacgtgaacgtagtgaaccgaggaatcgtttggatagttaatcaaatgtttactggagaaacgatgtgaacaggcttgagacctgtaaaatcatactgcacggaaatgcagaatttgaagccagcaatgtaactatagagggacaccatgtttgtgcagtgccggccactcactcactgaaagtatcattcctgatttgatcaacttgaaaattcgaaacagctattggcaaaaaatgtaatttaaggtcgtcggcggtagtgacaacctggattttcggttctgctgagaatgcatgggtggctaaattcaaagttaaactttgggaatcccagtttagaagttctttccccaaagggggggataaacgcgccaaatttatcatggaggttagcagacagtttttatttatgtatggaactggtaagtt

SEQ ID NO: 112602 - DNA, 333 bp, Arabidopsis thaliana columbia
ctctctctctttctagttcttagttcccttgcgttccaagtgatcatggctcaagaagagatacagaaacctactgcctctgttccagtggttaaggaggaaactcctgccccggttaaggaggttgaggtgccggttactacggagaaagctgtggctgcgcctgctccggaagctacggaggagaaagttgtgtctgaggtggcggtgcctgtaacagaggagacggcggtgtaagaggaagaggttgtcttgggataggatatctttcaattttatgtctcttaaagtggatggtcttattggtttcttaaatttcattaaactttttaa

SEQ ID NO: 112603 - DNA, 450 bp, Arabidopsis thaliana columbia
aaaacaactaaccaacgtagtaacgcgttggtatttgaataaacaaaatctcaatgagatcttcttctatgatggggccttcaacccatctcatttgcgctctaggagttgtcatcatggcaacaatggttgctgcatatgatccatacacagatagctctccaccaccactgtattcctcaccgcttcctaagattgaatacaaaactcccccactaccatacatcgacagttccccaccaccaacttactcaccggctcctgaagtagaatacaaatctccaccactaccatacgtttacagctccccacccccactatattactctccttctccaaaggttcattacaaatctccaccaccaccatacgtgtataactctccacctccaccatactattctccttctccaaaggtcacttacaagtctccaccaacccccatatgtc

SEQ ID NO: 112604 - DNA, 113 bp, Arabidopsis thaliana columbia
cactctcagaggagcagagaaggaactaactaccttgaggcgcttgctttcaatccagaagatcagcattagcttgaagaacagcattcgcgacatgaatgacagatacgggt

SEQ ID NO: 112605 - DNA, 262 bp, Arabidopsis thaliana columbia
ataagaagaagaagaaactacaatagctaatcatccaaatagaagtaagagaaaaggcagactctaactgtggatgtggctgctcctgcaaatgaggagactcttgcagtcgcgagaagaactacaacatggagtgcgacaactgtagctgtcgctcaaactgcaaatgcagggcaaactgtaactgccgatgaaactattacggccgaaaataatacatatggcactacaattggggaatatctggtttctcataactaat

SEQ ID NO: 112606 - DNA, 444 bp, Arabidopsis thaliana columbia
agaaattttccgattttggttctcattagttgtctgatctcttatctcactcgaagcttctttttttacgcggtttgatttattaatttcgttacttctctgtaaattctcgatctttagggttcttctcatcccctggtttaataatgggtccaatctcagttcttgttcactctaattttactttcacaatatctccaattacgcagatgctttttgacaaattttctccattaaaagtgtcttcttttttagctgtattaaatttataggtctctctatctgtactggtatagggttcatgattgagtctacaaaaacataatgaatgacctaaaagctattaactttcgtttctagatctgcttgcttctctttaatatcttcacctcattgctctaatagacattaatctccatttgaagttagtattcttttaccagt

SEQ ID NO: 112607 - DNA, 336 bp, Arabidopsis thaliana columbia
ctcggattgaccacacagggatggctctggatgtcgctccctccatgagctttagctccttctatgtgcctaatgcaatcttctgggcgagagaaactgcaccgttccaacgaatcacctctagagcaacgggaattgcgggtgggagccacgttcaaagctctgctggagttgagactcaagtcatggaaacttctcccaaagcattagataaactgcctgaaagtattttacatacttggagcggcagcaaataatcagcatgaggactttatgttcatttgtcagaatcacttgtactcaatcgattctttgtttctacatattctccctttt

SEQ ID NO: 112608 - DNA, 290 bp, Arabidopsis thaliana columbia
acagaaccacaggtggaggaggacggcaccaccgtgtcgtcgtttggaacggaggaggaaacggtctgtgcgcacttgccttaaacttctccatattcttagtaatcggaagaacaggcgctgtaacaatccgggttgctggggttctcaaagactggattctcatagccctctccactgtcatatttcctgagtccacaatcactgggctgaatataactggatatgctatagcgctctgtggagttgtaatgtacaattacatataaattaaggttgtataagcgatt

SEQ ID NO: 112609 - DNA, 251 bp, Arabidopsis thaliana columbia
  unsure (1)..(251): unsure at all n locations
gtcggaaatctctcaccgaccactaccgaagtctatnctagttaagccttnnccggctacggaaacgtagtagatgcaattgtaatgagagacagatacacagataggtccaggggttttggatttgtcacttacaataccctgtcttaataatgagcacactctcatgtcttggttactctaattctactttgacaaaatgtgcgattacacctttgctttttgcaaattttttccattaaaagtgttta

SEQ ID NO: 112610 - DNA, 437 bp, Arabidopsis thaliana columbia
cataatgcctcaggagaagctgtaccttcgagtggaacactcttagaaggaacagttgtcaaaatcttaccatatggagctcaagtcaaacttggggatagtagcagaaggttagttcattgcctattgtttccataaatttgtccttctcagtgactactagttttgaattcagtgcgtttgccataataatgtttcgacagtggactgctacacatttcaaacataactcgaagaagaattggatcggtgagcgatgtgcttcaggtggacgaaagtgtaaaggttctggttgtgaaatctctatttccagacaagatctctcttaggtaaaaacaactaatattccaaaatcaactaccacctcagtagtcagtaacaactattttgttttctacagcattgctgatcttgaaagcgaaccaagattgttcatc

SEQ ID NO: 112611 - DNA, 151 bp, Arabidopsis thaliana columbia
tcgacctagagagctcatgcagcagtggactgctcattgctgatactaaacatggctgattgctcgtcgagtgtgactagtgcccgctcagttgtcaccgccttacgaacatgctgttcagggcttatgactgccgttaggactgcaccag

SEQ ID NO: 112612 - DNA, 416 bp, Arabidopsis thaliana columbia
acctactcaatctcagatctcgttaaacctagatacctcgagaaaaaccgtatcaatggcgccgaaagcagagaagaagcccgctgagaagaaaccagcttccgagaagccggtggaggagaaatcaaaagccgagaaagctccggcggagaagaaaccaaaggccggaaagaagctcccgaaggaagctggtgccggaggcgacaagaagaaaaagatgaagaagaagagtgtcgagacttacaagatctacatcttcaaggtgcttaagcaagttcatcccgatatcggaatctccagcaaagcgatggggatcatgaacagtttcattaacgatatcttcgagaagcttgctcaagaggcgtcgaagcttgcgaggtacaataagaaacctacgatcacttctcgggagattc

SEQ ID NO: 112613 - DNA, 387 bp, Arabidopsis thaliana columbia
aaccaaaaagatggcctcggcgatggttacatctctcaggctgaggccaaacttctccgcagccacgtcaccctcctcctcttcttccgccggaaatgtcaagtaccgacccgccgtaattctcccggtaaataatctccgtcctttgattgagacaactatggcggaaaatgtgtggttccaaattttttttttattattttcactgaattttctgtttcttatagttttaagtgttttcctgcattttcctttagaaacatatttaaagtccaaaacttggtttttgtgttatatgattcaatggtgggtttagtgtcactatggctgctttgtggaattggtttattagggtttagggaataatacaggagactacaagaagct

SEQ ID NO: 112614 - DNA, 441 bp, Arabidopsis thaliana columbia
aaaaaaaagccgcaagaatagagcttgcgattatcggaggattcaatcatcggcggaggacgaaaatgagtgttatcaggctgcaccagtaccaagtcgtaggacgagctctcccgacggagaaagatgagcaaccaaagatttacaggatgaagctatgggcaacgaacgaggttcttgccaaatccaagttctggtactacttaaggaggcaaaagaaggtgaagaagagtaatggacagatgctagccatcaacgagatctttgagaagaacccaacaacgatcaagaattttggaatctggttgagataccagagccgtacaggttaccataacatgtacaaagagtaccgtgacactactttgaatggagcagtggagcaaatgtacactgagatggcgtcaagacacagagtaaggttcccttgcattcagatta

SEQ ID NO: 112615 - DNA, 316 bp, Arabidopsis thaliana columbia
gctgttgtcttgaaggacccggacttatcaaatatgtatatagtcagaagactagcagctttagagggatctgatatggcctcaagcgatgagaacgatgagccttttgttctcgaaaaggatcagcgctgcgtcgttgctgagaatcaagacatgaaatgtaaagaagcatatgatagtcgaacatttggttcaatttcaaaggcggacatagaggtaagagctatatattgtctgaggacagcagaggatcatggtccagtaagcaacagagcatttgccatgtacgaggattccgcaatcctggcggtagaac

SEQ ID NO: 112616 - DNA, 288 bp, Arabidopsis thaliana columbia
accgcagtatcgaaagacacggacgaatcaagtatgcatatagtcagaatactgacacttctataggcatctaatatgacctccggcgcacatgacacatgtgctaccgccgttccagaggatcacggctgcctcgtagctatgcataataacaccaaatgctaacatgcataacacactcacgcatttggctcaatgatagacacggacattgacatgggcgccatatactgccatcggacaacctacctttaaagcctagtcggcggcaaaccataacccatctac

SEQ ID NO: 112617 - DNA, 198 bp, Arabidopsis thaliana columbia
  unsure (1)..(198): unsure at all n locations
gtaacagcggcagtggcagtagttcgtccgaggtctacatagttccgaagttgaagattgcgtcgctggttgcagacatttttgcgaatacggccgtggcagaaaataaggtggtggaagtttntacagattcatcagcaccatcgcggccagtggacgagcttttcagagtaatcccggaagattgtaggtgtatag

SEQ ID NO: 112618 - DNA, 424 bp, Arabidopsis thaliana columbia
gtagagagagttattatgtttgattctgaagcgtgtacgtcactcagaaaccgtgaatcaaggatctttcttccactcctttctctgattttgactttctctcctctctctatatataagctcaacatcaatatgtctacggcttcttcttggattcaacaacctccttttagatacttaccggatcgtggcggtttctctaagccaagctctcgcagcgcgcggcagttttcctccggcgttgtttcagcttccgcttcttctccttcgccttcatcctcgtgctcctgtggttattcggagattttgaatttcgatttcggggcaaacagaagctggaaccaacagggacgcaaggttcaggcaatgagttccacagcccaacggaaattttcgctatcgaaaggcgactccgatgacaaaa

SEQ ID NO: 112619 - DNA, 449 bp, Arabidopsis thaliana columbia
atttcctttcgatattgaagcttacaatagacattatcaaattgaagagaagtatataataaaccagtctagagagcgtcgcaacaatgttgaagaagattatccacgtcgtaacaaaagaaaatacatcaagagagagttacgtgattcaaatgcacatcatgaattgcaagcagatctagtcaaacatatcttggcgaaattcagaatgtcctgaaattaaagagatttttatgtctttatgtgttgtgtgatttaagagtttaattgtttgtgagttaatccgtatgtatttgaagtgaagtgtgtttattattaattgtgttgtgtgcttgtatcatattgtaaatcaaaatttgtaatattttttttgttttaataataattatttgttttggtcaaaaaaattagtttagaacataaaatatttaatattaaaattaatatta

SEQ ID NO: 112620 - DNA, 304 bp, Arabidopsis thaliana columbia
gcaaaaccaaaagctggacactaagttcttcgttttgcttttgggaatgagcgtgcgagggacacgtgaacgcgtggtaacggctggtctttttaaacttgaacagatcggtaacggtagagttattatcgattcgagtacctctgtgaagaaggcagatccggcacagattatattgatatgagagacccgttgcgggtcggagctaacacattgaaaagagctgcggatatatcactcttatacacgtgatgcgatctatctaatatgaacgaggttaaagtaccgaccgctgttttacatt

SEQ ID NO: 112621 - DNA, 435 bp, Arabidopsis thaliana columbia
atcataagggaatgaattcagtatcagctgcagttaggctaaagagttttggagatgctggtccagtatgtaacaaaagcattatatttccaagtagagttgttacattagctaacagcttcgagaagaaagaccgttcctggtatgtcaaatctcaaatccctactgatctgtctattcaagtcaacgatattaccttcaaagcacacaagtttcctttgatctccaaatgtggttacataagctctattgagctaaaaccttcaacttctgagaatggatatcatctcaagctggaaaacttcccaggtggagcagatacattcgagaccattctgaaattttgctacaatctcccactggacttgaatcctctcaatgtagctccactgaggtgtgcatcagaatacttgtacatgactgaagagtttgaag

SEQ ID NO: 112622 - DNA, 288 bp, Arabidopsis thaliana columbia
aagggtaacgccagacgacggtgtccagcggaactgtctcctgttatggcttccgcaccgatgaagtccaccgccgagcttcatgcactctagatcagccagaaaaactgagtgccttgacactgacattgtctcggtatgcccgagggtcaagagcgacgcccgagccatgactaacaaagcaaggagcgagtgctaaagccacaggcttacactagacgacccgagtcactgttgagaccataacttagctacattgctggacttgaccagaagtatacccaagag

SEQ ID NO: 112623 - DNA, 261 bp, Arabidopsis thaliana columbia
atggccgttaccttttgagatctactcacagaggagggtgtcaaatccgtggtggagcacctcgccgtatgaacctacatctccggagagcaatgcggatgaggacgacgtaaagaggctcagcgaggcctcaaaggatactcacagatcctaaaacagcgctagaatgtggaactgtacaacacaactcttgggctctctgtaacctcgatggggcgtcttggtggaacaatcaggagaatatggttatcaatcttgagc

SEQ ID NO: 112624 - DNA, 355 bp, Arabidopsis thaliana columbia
cccacgcgttatcactagctctaaaagaatcgtgattatttcctgagtaacctcagcccaccgttgcaatcccatctttcaccggccttaaagcctcaaccatcaaatcatccgccaccggcagaatccaaactgctgctgctgcatcaccgaagcttacagtgaagtcatctctaaagaacttcggagtcgcggccgtagcggctgcagcttcaattgctttggccggaaacgccatggcaatagaagttctcttgggaggaggggatgggtcgttcgcttctattcccagacgacttctgtatagctaacggagagaagatcgagttcaagaacaacgctggatacccacaca

SEQ ID NO: 112625 - DNA, 336 bp, Arabidopsis thaliana columbia
ctttccgggtacgccaagtaggtatggtgatgcctcatttagcccggctttgcaccacggtgagaaagttggaccctttagtccacatggtggtgttcacacgaggtggcctagtgaaattgattctgaaatgggtggtgcttttgctcgtgggtatgttcaacaagctgtgtctgatactgattcacgtcgttgccatcctctagcaggcggtgcgccttttattgcttgtcacagttgctttgagctgctatatgtgcctaagaagaagctttttggttaggaaagtgctcataagatgcaatgtggcgcttgttcttaggttatcactgtttt

SEQ ID NO: 112626 - DNA, 373 bp, Arabidopsis thaliana columbia
aaaaaaataaacaaaaaaaaaaaaaaaaaattaataattatataaatacaaacaaaaaaaaaaaaagaaaaatataaaaaaaaaaaaaaaatacaaaaaaaaaaaaaaaaaaaaaaaaaaaaaggggggggccgttttaggggacccaggtttccggccccgtccttggggggccaagtcttttatttgggggcccccaaattcaattccctggccggggttttacaacccaagtccggggaaaccccgtgcgtcccccaatttaatggccttgcgggccatcccccttttgccggttggggaaaaacccaaggggccccccccggtcgcctttccaaaaaggtgcccaccctgatggcctaatgggcctccc

SEQ ID NO: 112627 - DNA, 480 bp, Arabidopsis thaliana columbia
gctgaagcagaagaagagcatcactcacaagttcacatatatagataagcttgtctcctatggaaccgaagtcacagccattgttgagaccgggaaaatcaagaagctcactggagtcaaagccaaggaacttcttatttgggtcactatcaatgagatctataccgaggaaccccctaccaagatcacgttcaagacaccgaccacactgtccaggactttcccggtcacagcttttatagtcccagaagaacctgccaaggaggaacctgccaaagaggaacctgccaaggagaagagcagcgaagccaccgaggccaaggaggctgttgcaatcaaggaggctggcgcagtcaaagaggcggcctaatcagctcagcttcagcagataaaagagacccgaatttttaagtgtacttcaagaatttgaacaaatcatggagaagtagtgtttctcactgctctaactatcatgtatta

SEQ ID NO: 112628 - DNA, 475 bp, Arabidopsis thaliana columbia
gttggaatggcagatgatgtttttgctttagtttagtataacacccatctatatctagcaaatgtggtgaatctcagcaaagagctaatgtatcagcaaactcttcgtcgttttgctcattttaacgcaatacagcttagcgatccagcccctttgtcagagttgatattgttggctctgaaagaggaggatctagatccaggaaatgatacaaaagatgatctgaaagaaagaattgctgaaatgaatacagaactcctcaaggaaaaagcagaaatgttagaggagtatttcagcgtgcacattgactccagtgcaaatttgtcaaggcttcctgtgatactcgaccagtatacacctgacatggatcgtgttcctgaatttttactatgcttgggaaatgatgttgagtgggaagaatgagagagtgcttttaaggagtttctgcagctattgggaacctttacgccatgca

SEQ ID NO: 112629 - DNA, 413 bp, Arabidopsis thaliana columbia
gcaagagcaacccattcggtgcttcgtcaagtacactaaacctaagcacggacctgagactcggactcagcttcgggacatcctcagggactcaatatttcaacggtggctatgggtactccgttgcagctccggcggtagaggatgcggaatatgtggcggctgtggaggaggaagaagagaatgagtgtaacagtgtagggagcttttacgtgaaagtgaacatggaaggagttccaattggaagaaagatcgatctaatgtctcttaatggctactgcgacttgatcagaacccttgatttcatgttcaacgcatccattctctgggctgaagaagaagacatgtgcaatgagaagagtcacgtgctaacgtacgcagataaggaaggtgactggatgatgggtggagat

SEQ ID NO: 112630 - DNA, 396 bp, Arabidopsis thaliana columbia
  unsure (1)..(396): unsure at all n locations
cgccattctagttgctccaatgtgtaagatatctgatatggtgaagccacaccctatagtgattaatctgttaactagagtcgaagaaatcatacctaaatggaaaatagttccaacaaaagacgtgattgacgctgctttcaaggacctcgtcaagcgagaagaggtaaggaacaacaagctgatatatcaagacaagcctaggctcaaaaccgcacttgagatgcttaggacaagcatgaacctagaagacactctccacgagataacaatgccattctttgtattacacggagaagcagatacagtgacggatccagaggtaagcaaagctctgtacgagaaagctagcacaagggacangacgctcaagttgtaatccaaggatgtggcacg

SEQ ID NO: 112631 - DNA, 449 bp, Arabidopsis thaliana columbia
gcccacgcgtcggccatctagtgtccaaggaagaataagtaatgtgaagccacaccctatagcgatggggctgtttactagagtcgaagaaatcatacctaaatggaaaatagttccaacaaaagacgtgattgacgctgctttcaaggacctcgttaagcgagaagaggtaaggaacaacaagctgatatatcaagacaagcctaggctaaagaccgcacttgagacgctaagaacaagcatgaacctagaagacactctccacgagataacaatgccattctttgtattacacggagaagcagttacagtgacggatccagaggtaagctaagctttgtactagaacgctagcacagggtacaggacgcatcaagatctattcagggatctatcacggactgacgtcgaatgagtctgattgtaacgtggaccttgttattgctgac

SEQ ID NO: 112632 - DNA, 420 bp, Arabidopsis thaliana columbia
tactttgaacacacttcttttattaaatcggatcacaaaaaaaaaaaaaaaaaaaaaaaaaaaaaaaaaaaaaaaaaaaaaaaaaaaaaaaaaaaaaaaaaaaaaaaaaaaaaaaaaaaaaaaaaaaaaaaaaaaaaaaaaaaaaaaaaaaaaaaaaaaaaaaaaaaaaaggggggggccgtttaaagggaccaaagttaacttccccgggcatgcaaggtaaaagttttttaaagggggccccaaaataaaattaacgggccggggttaaaaaactggggaacgggaaaaacccgggggtaaccaaaataaaaggccttgaaaaaaaaccccttttcgccagtgggggaaaaaacaaaaaggcccgaaccaatcgcctttccaaaaaattgcccaacctaaaagggaaaagggaccccc

SEQ ID NO: 112633 - DNA, 347 bp, Arabidopsis thaliana columbia
gactagttcaagaacggcgagcgggccacatatttttatagagagagaatagtgcacacacatattgtgggtatatgacacacactacacatcatacacgtgtgggggacacgacaccgcatagtgcacgaggaaacgcaggggttatatgagtctacacaagagtctagcggtgcacacattaaagtgttgggccctactctatatctatgggggggtacaccacaccacacgcgcggggggcgcgggagtatttatagcgtatctcacgacacgtgtcgcgaacactggatgcgatatatgtggggcacgggggcggggtactctagacacacatcgcgacgcgt

SEQ ID NO: 112634 - DNA, 435 bp, Arabidopsis thaliana columbia
  unsure (1)..(435): unsure at all n locations
caccattggagaacttgggctgcttgcttcatatatgcggcttggcgcaggtacaagagaagagttatggagaataacctcactgcgattgaatcaatggaaaatgaagaaggagaagtaggagaagaattagtagtagtagaagaagaagagtgtgttgaggagagtcctagaacaaagatgaaccttggagttatggttttggcatcgcgttttgcagctaatacaagacgcggtgttgcagctcagagagttaaggatgtagaattaccccggtttaagaaacccgaggagcctgatttctctgctgagcatgatgattgactgatgtataaccaggagaagaagctgactttgttccatagaagatcttaatgacaagaacactacagagtaagtttcctgttcctttgngagacataaagaaagaaactc

SEQ ID NO: 112635 - DNA, 314 bp, Arabidopsis thaliana columbia
gaacgaatctttagcaatcggccggatcagatcctggttcgggtttggatcctggaagtgataatgggccgggtcagagtcgggttgggtcgacggtgcaaagagttaagagggaagaggtggaagcgaagataacggcgtggcagacggcaaaactggctaagattaataacaggtttaagagggaagacgccgttattaacggttggtttaatgaacaagttaacaaggccaactcttggatgaagaaaattgagaaggagctagaagagagaaaagcaaaagcgatggagaaaacgcaaaacaatgtggcg

SEQ ID NO: 112636 - DNA, 441 bp, Arabidopsis thaliana columbia
gcttctacactcgagcccactctcttctcctccttttttcttccaatccggtcacggttcctatatctccggtccggttccgtcttcgtctccgtcgtctctcatcatctcccgtcgcctccgttttcgaccttcattcctccaatcaggacgcgaattcgaacagagaagacaaagacaccaaaattggattctccgatgataaatcgagaaaatcaggttcaaatcctccacgatggaatccaggggaagtagttatgaacaaatcgaagaaagggaaatcgaaaactgtttgggtttgtgagagctgtggtcactcggaagggcaatggtgggggagttgtcgtgcttgtcatacggttgggactatgaaacgtttttctgaaggttctgagtcaagtgctagtgggtggggtggcaacggtactggctcgggtttta

SEQ ID NO: 112637 - DNA, 429 bp, Arabidopsis thaliana columbia
cagggccagagaagcatcaggcggtagcactgagtatatactctgacctctctgagttcttcagatgtgcgatgaggggttatcaagatacactctacacgcacaccatgcgtcagttctaccgtgagtgcaccatcacgggaacagtagattttatatttggggatgggactgttgtgtttcaaaactgtcaaattttggctaaaagaggactccctaaccaaaagaacaccatcactgcacaaggccggaaagatgtcaaccaaccctcaggattctcaattcaattcagcaatatctcggcggacgcagatttggtcccatacctaaacacgacaaggacgtatctaggaaggccatggaagctatattcgagaacggttttcattaggaacaatatgagcgactgtgtgagacctcgaggatggc

SEQ ID NO: 112638 - DNA, 437 bp, Arabidopsis thaliana columbia
atgggtaccggaaccagtgaagggattcctcgttatagctgcctcactaatcctttgaaaacatgttcggtatgcacaaaagcaacagaaccaggaaacagaaataggagacttaacaccagcattcttgttcggtacattagaccatccggaacaagtaacatcctcattgattgtggcaagttcttctaccatagtgcccttcgatggtttcccaccttcgggctaagaacacttgatgcagttgtaattactcattctcatgctgacgcaattggaggtctctgaaactgacaagtcttgatgatcttcgtgattggacaaacaatgtccaacctcacattccaatttacactgctatacgtgatcctgaggtgatgaagaagacccattattacttggttgatacaagtgtcatcatacccggagctgcagtc

SEQ ID NO: 112639 - DNA, 459 bp, Arabidopsis thaliana columbia
  unsure (1)..(459): unsure at all n locations
gtacccaactgaggagctcaagagcttggtgaatattcttggatggcaggttctagctattggaaactcggcgacacccaaggattggagtcttaaaggttccatctttttgtctctcgatgctcaagctgaattgggttatcgagttttagatcacttgccttatgattctttcgtaaggaagagtgttggttacttgttcgcgatccagcacggtgcgaagaagatctatgatgctgatgatcgtggggaagtgattgatggagatctaggcaagcatnttgatgttgagttagttggtctagattctaagcaagaaccgattttgcagtatagtcatgagaaccccaataggactgtggttaatccttatattcatttcgggcaacgttccgtttggcctaaaggtttgccattagagaatgtaggtgagatcaatcatgaggagtattacactga

SEQ ID NO: 112640 - DNA, 264 bp, Arabidopsis thaliana columbia
aaaaaaactagtataaattaagggtgtgtgatagaattaactactacagtttttacgagtttgataatggactttgtaggacttggagctgcgtggaaagtggctgacgtagaggaaggttccactgtcgttatctttggccttggtgctgttggactagcggtacatttatttcaaattaatataaactatatatgtgatgattttgcataactgtaacaacaaaatattataaagatcttgtagtataaagtaatttgtaaa

SEQ ID NO: 112641 - DNA, 452 bp, Arabidopsis thaliana columbia
caaccctatacacaagaaggtccctgtcctcattctctatggtagatcgatagccgaatcattggtgattgtcgaatacatcgaagatacgtggaagacaactcacacgatcttgcctcaagatccttatgaacgtgccatggcccggttttgggctaagtatgtggatgaaaaggtaatgttagcagtgaagaaagcttgttggggaccggagagtgaaagagaaaaagaagtgaaagaggcttatgagggtttgaaatgtttagaaaaggagcttggagataaactttttttcggaggagagacaattggatttgtcgatatagcagctgatttcataggatattggttagggattttccaagaagcttcaggcgtcacgatcatgaccgcggaggaggtttcaaaacttcaacgttggtcggaagatttcgggggaaatactttattta

SEQ ID NO: 112642 - DNA, 369 bp, Arabidopsis thaliana columbia
ggtatccatgagatccataatgctgttgttgctgagcttggcgatacccaaattattatcagtctcagaccgaaatgtcactcgagcgccagcagcaaaaccctagggatggtgctgggtctcaggctggtcaaccgtcgaatcaatctcagcagcagctctggcaaaactcttactaaataaagaaagagagtggtttttttcagcttctttctctcgcttatagaggtttgtgtggcgagtctgaagagggaaatatggtgtgttctaaaatgtaacttatcatcatcttttgtctcctctgttaacttaaggaacatgcaactctgatttcatcaatgcaacttcagaaatgaaactttttttttt

SEQ ID NO: 112643 - DNA, 459 bp, Arabidopsis thaliana columbia
cgttcttgtccaaaactcccaagccagaggagaatgctttgggagaataacaattgaagccatggcctttaagcttcctgtacttgggactgcagcaggaggcacaatggagattgtagtgaacagaacaacaggtctattgcacaacactggtaaagatggcgtgttacctctcgccaaaaacattgtgaagctggcgactaacgtgaagatgaggaatacaatggggaagaaagggtatgagagggtaaaagagatgttcttggaacatcatatgtctcatcgaatagcttctgtgctcagagaagtgttgcaacatgcaaaaattcactcacgaacaaccaattcggatcattaaacaaaagtttagcaaggaaatgccaatattacttcattttacagtacactctctatagagttttcgtatttattctggttatagaaacagtgtttttaact

SEQ ID NO: 112644 - DNA, 465 bp, Arabidopsis thaliana columbia
gactatcctaacttaaagagcggataatgttgtttgtggtcagagagagagagagagaaagtgaggttgttcgatccatggccaggggtggttaagagagaatggaaacgttgctggccattcttaacccgcgttcgtctggaccggcggtgtgataaccaagctaacctgacggctgcctggggaagacgctacataactccaagttcgaccggcaacacagaaggatgttgactgaagcataatgaggaagctgacaaggcatatagatatgggactatagtgaacgcttgagctatgaatcatgttcaataaccgcgtagatcattctatatactctttcattgtgtatgagtttcgaaatcaggttttacttttctgaaacttagcagtggaatggattttgttgacagtctcttattcccattcgagtggaaatggatgttattgccctttttgaatcat

SEQ ID NO: 112645 - DNA, 373 bp, Arabidopsis thaliana columbia
atcgtgtttacaccgatagctcgaagctcggaattgcttaagggggatgtacggaggtacaccgaggcccaaggcaggagtgccgcatatacaactgctaacgtaacaaggttctactgtctggttactgctctatgtaacccatctccaatggatgcccgggaaatattagagacaacatttggggcctcatatttttgctgcattagcggcaactcattcacagaaacatatatatagcattggactataacatttattcacgtgcaatgtgagtgccggtgcactacgagtctctcacatatcaacacatgaccaacttgccgatgctctaaccaagccattgcctcgtcaacactttcttcagttttca

SEQ ID NO: 112646 - DNA, 463 bp, Arabidopsis thaliana columbia
cggagatctctctttctcttcttctccatcctttttctctcggcgcgcgcttcatccccaccaccttcgaattcgtgtacgatctctaaaatccagttttgctatcgacttatctcttattgcgccattgttatgcataagaaggggattttaacaatctagggccggtgaataagatcatacttgaaaaatctgattttgtagatgaaatcgttgtgggcaatttgcttgtttggttaggccctttgagggaagctgctaggatgggtgtgaagcaggctctaaggagcattgatgcgtttccaagagcagaggatcatttgcttcagaagacacaatctggcgctgttgtatctattgttggacttcttataatggctactttgttcttacacgagctgagttattatcttaacacacttacagtgcaccagatgtcagtggacttaaagcgtggagaaac

SEQ ID NO: 112647 - DNA, 449 bp, Arabidopsis thaliana columbia
aacaagaagaacaacaacactaagcaaaaaaagttatgttcaagccgagagagacaatggcatcaacattcacgagctcaagcagtgttcttaccccaacaacattccttggccagactaaagcctcaagctttaacccccttcgtgatgttgtctctctcggatctcccaagtacactatgggaaatgatctttggtatggacctgacagagtgaagtacttaggacccttttccgttcaaactccgtcttacctcaccggagaattccctggcgattatggttgggacaccgccggtttatccgcagaccctgaagcctttgccaaaaacagagctcttgaggtgatccatgggagatgggcaatgttgggagcttttggttgcataacccctgaagttcttcaaaagtgggtccgtgtggacttcaaagaaccagtctggttcaaa

SEQ ID NO: 112648 - DNA, 406 bp, Arabidopsis thaliana columbia
  unsure (1)..(406): unsure at all n locations
agaccagtctttctcttcttctccatcctttttttctcgaagcgcgctgcatcactcgccgctttcgaaaacaagaacgaaatgtactcatctttgttgctaaagaccaatcttgcatatgcgccatttctatgcataagaggggggttggaacaatctaagcccggagaataaaatcatacttgaaaaatctgatgttgaagatgaaatcgttgtgagcaatttgcttgtttggttaggccctttgagggaagctgctacgatgggtgtgaagcaggctctaacgagcattgatgcgttttcaagagcagaggatcatttgcttcaaaagacacaatctggcgctgntgtatctattgttggacttcttataatgggctacttgttctacacgagctgagttatt

SEQ ID NO: 112649 - DNA, 350 bp, Arabidopsis thaliana columbia
caggcgcatttattttggaaatcaaggatgtgttttggtacatagggctgtataatttgacattgttctgaaaattcgaatcggatcaaccattagtagtgaaaaaaaaaaaaaaaaaaaaaaaaaaaaaaaaaaaaaaaaaaaaaaaaaataaaaaaaaaaaaaaaaaaaaaaaaaaaaaaaaaaaaaaaaaaataaaaaaacaaacggggggggccgttttaaaggatccaagttaacgtacgcgggcatgcgaagttatagtttttttataggggaacctaaattaaattcagtggccgtagattaacaacgttgggactggaaaaaccttggcgtaaccaaattta

SEQ ID NO: 112650 - DNA, 462 bp, Arabidopsis thaliana columbia
aaggattgtaatctttgtcttgagagaagtcttgatttctataagaaatggtacaatgggaagagaggcaccattatattgcggccaagttgctttttccggtgggaattgtatactttctttggtgcttttgatagtattaatgctagacacccaccgcctcctccacgcccgctttcaccgccccctttaaagacgccttctgtaaccaaccaaaccaatattaccaagaagaatgatagtagaatctcaggaggaactatcgcggcgatagtcgttgtagttgttgttacaataatattgattgttgtaggcttggttatatgcaagagaagaaagcaaaagcaagaaattgaacttccaatcgttttaaatgaagcggaatctgttcagtttgatttaaagacaattgaagcagcaacgggcaacttttctgagcataacaagcttggtgcaggtgga

SEQ ID NO: 112651 - DNA, 328 bp, Arabidopsis thaliana columbia
tagagaggagtatgaaggtatcgaagaagcgcatattcgtataggattagagataggttgaggaaagaagttcttgtgccgttgcataaagcgcttgagtttccggagttgttcatgagtgctaaggaatggaatttgttgaagtataatagagttccttctgttgctatgaagaattacaagaagctgtttgaggaacatgatagcgagaggtttaccgagtttttggaggatgtgaagtccggaaagaagaagattgcggctggtgcgttgcttcctcatcagataatcaaccagctggaggatgatagtgggagtgaagctggtg

SEQ ID NO: 112652 - DNA, 381 bp, Arabidopsis thaliana columbia
cggacgcgtgggctcttctccaatatccttaagtgggagagttttgggttgatcctcgaaggtctattgcaaaagcttatgagaagacggaccaagcgattctatcgaatagttctgacttgggtcgtggtggttctactgctgtgactgctatattgattaatgggagaaagttgtggatagctaatgttggtgattcacgagctgttctttctcatggcggcgctataacgcagatgagtacagatcatgagcctcgtactgaaaggtcgagtattgaagatagaggtggatttgtatccaatctaccaggtgatgttcctcggggaataaactatttcatctgttgtacacctggtcactgcagaaccaatggcggca

SEQ ID NO: 112653 - DNA, 447 bp, Arabidopsis thaliana columbia
  unsure (1)..(447): unsure at all n locations
gcagctcctttactgctccaactacgatttccactgttgcagagatattacatccttcgaattcaagttttgggtattgatcgtgagaattcaaggaacatcttttcttcgatgtgattacccaataagctgaaaacaaaaggcgtgattttgtgattactctggcgtaataatgcctcagtatgggtcaacgggtcaacactgcgagttcacggcggcgtcttacttctcgtggccgacttcaagcaggctaagcaacgccgcggaggaaagagctaactatttctcaaacttgcagaaagaggaggatgatgatgatgaggtttcttctgaacccagtctccacaaaagcctaaagggcaacgagccactactttacttgagctcatgaccataagagccttccacagcacgatgntgcggggttatagtcttggaacagctata

SEQ ID NO: 112654 - DNA, 451 bp, Arabidopsis thaliana columbia
gggttttcgtctctttcactcgtaaccggaagtgtaggtctatgatcctccactaatttcacaaaaagctcatctttttattcgttttcgaatcgattcgttatctgggttcaagtatcaaattctctggtttcgtttttcgtttttgatttgttctctctctttcggaaaaagtttggttttttttttgtttgaaacaatgggaagaggcaagttcaagggtaaacctaccggccaacgccgattctctagtgctgctgatattcttgctggcacatctgctgcacgtcctcgatcattcaaacagaaagaagctgagtacgaagaagatgttgaagaagagtcagaggaggaatctgaagaagaatccgaagatgaagctgatgtgaagaagaaaggagctgaagctgttatcgaagttgataaccctaacagagtaagacaaaagacc

SEQ ID NO: 112655 - DNA, 444 bp, Arabidopsis thaliana columbia
caaaaatattggcctctttctctctttctctcttgctctctttctttgttgggttgatctcttcttccatggcgatccctacggagacacaacaccaggagaaggaggcttcagatgcttctgcagcagctgcacaaaagagatggactttaagcgatttcgacatcggtaagcctcttggcagaggcaaattcggtcacgtctatctcgccagagaaaaacggagcaatcacgttgtcgctctaaaggttcttttcaagagccagcttcaacaatcccaagttgaacatcagctcagaagagaagttgagattcagtctcatcttcgtcaccccaacatactccggctttatggctatttctatgatcaaaaaagagtttatttgatacttgagtatgctgctagaggcgaactttacaaggatcttcagaaatgcaaatact

SEQ ID NO: 112656 - DNA, 294 bp, Arabidopsis thaliana columbia
  unsure (1)..(294): unsure at all n locations
cacgaacatgaagcaaagacttgtgcctggcagctcncttcctcatttgatcaacaagttcatctgcaattcgaagaggaaaagaagatcaagagataaatccattagtttcagctacatcagtggaagaggactcagttaataaattgatggggatggaatattgtggagaaggagatgaagaatgtttgaggagaaggatgatgacggaatctcacttagactatatttacacacagcaccataagcattgacattaattgttatcattttgattaattagcatacatatat

SEQ ID NO: 112657 - DNA, 460 bp, Arabidopsis thaliana columbia
ctctctttcgatgaattctacaaacacaagttcttgaggctatgattgatttgtccttgagagagctgccacactgggcatagaagattttccttttcttggccgtataaagaacagtagggtttgggtcaaggacacaacattttcttcaagatttgcggatctagttaattgattgtattattcatcagtattgggatacatccaataatattgagtcgtcttgtttcagacaacatggaacaagggaaagaaaagtggctacaattaacggaagacttcaatttgacctttcacaggatgcatacctcccacagaggcttcttgaaaacctgatgtatatttacaatactattgaaatggctcgtgtaactggagtccctacctcctaccttatttcaagaggagagagcatcaaggttctatctcaactacttaggaaagctaaacagaaaacctg

SEQ ID NO: 112658 - DNA, 439 bp, Arabidopsis thaliana columbia
aaaagtcttcctctgacatttaagccagaatgtttcgtttaactctatatgggattcagcaagttggagaagctatggggaggaatccagcccctcacaaatctaaagaaaataaatttgggatattcctctaatttgaaagaaatcccaaatctttcgaaagccactaacctcaagacgttgacgcttaccggttgtgagagtttggtggagattccatcctctatttggaatctacagaaactggaaatgctgtatgcgtcaggatgcattaagctacaagttattcccaccaacatcaacttagcatctcttgaggaagtcaacatgagtaattgctcacgtctgagaagttttccagatatatctagtaacattaagcgtctctatgtagcaggcacaatgattaaagaatttcctgcatccattgttggacact

SEQ ID NO: 112659 - DNA, 355 bp, Arabidopsis thaliana columbia
aagaagttctcctaaaggaagcaaaagtgtgttgtcatacataaggagaaaacttccagcgatacttcgccggtatattttcagccagaggcagcaaaaaacgtagcttgtggagttaaattaggcaatggattgatctgtgagagatctccggtaaaaggacgtaagagatgtgaagagcataagggaatgagaatcacctaacctctgcatcacttgtttatgttatttgttacctaaccagaattgtttgtaccaaaaccgttttggtttcggtattggtttgctgaacaatcatctgtactggatgactcacaatctcatgttttataaatttaaaatcagttttgattag

SEQ ID NO: 112660 - DNA, 429 bp, Arabidopsis thaliana columbia
acaaatcttaaacgttttactttgtgctgcactactcaacctcaatggccgcctcaacaatggctctctcctcccctgccttcgccggtaaggccgtcaagctttcccccgcggcatctgaagtccttggaagcggccgtgtgacaatgaggaagactgttgccaagccaaagggcccatcaggcagcccatggtacggatctgaccgtgtcaagtacttgggtccattctctggcgaatcaccgagctaccttaccggagagttccccggagactacggatgggacaccgccggactttcagctgaccccgagacattcgcaaggaaccgtgaactagaagttatccacagcaggtgggccatgctcggagccctaggctgcgtcttccctgagcttttggctagaaacggagtcaagttcggagagg

SEQ ID NO: 112661 - DNA, 168 bp, Arabidopsis thaliana columbia
atttgttgccattcagtcatgtgcggcgcatttacaatttgtgggatggagcgtccccagtatgctctggatcctcttggtcctcccttggaggcccattgttccaactgcaaggcaatacttactgctgttgaaggctccggtgtactcaaggtacatagagcatat

SEQ ID NO: 112662 - DNA, 240 bp, Arabidopsis thaliana columbia
ccgatttccggtcgaccacgcgtccgcaagccatcgatgtttctggacccgacggcgctcccgtccaaggaaacagcggtggtggttcatctggcggacgcggcggtttcggtggaggaagaggaggtggaccccgatctggaggtggattccgcggtggtggttctcttttcctatggttttttacattttttaccatttgttgttttggttctttcttttcttccttttgctttcaga

SEQ ID NO: 112663 - DNA, 339 bp, Arabidopsis thaliana columbia
gaaaaacctttccaaaaatggcaaagaaccgtatcttagtcttcttcttaggggtattagcgtcttttacactctccagtttcccggtaactgtttccggcgagccccctatcttattcactttcggcgactcttcctacgatgtgggcaacacgaagttcttctcgtcggagttcgatccagccaccacgtggccttacggcgattccatcgatgatccctccggtcgttggtctgacggccacattgtcccagatttcgtcggtaaaaactaaaagtcttacactttcttttagggttctttgaattgattccaatttcattgctattaagtcgatt

SEQ ID NO: 112664 - DNA, 215 bp, Arabidopsis thaliana columbia
aaccaacccaacaaaagcccaccaatctctctcatactctctctcgccgctactctctgctctgccgccggcattctctccggtacgtctctcagatccatccgggatttggagcatgtgtacaaaaagactgatgttggaatgtgcagaatgaacacatttccgaacatcttgcccagcaaaagggggaggattcttctcttcaaacagttctg

SEQ ID NO: 112665 - DNA, 452 bp, Arabidopsis thaliana columbia
ctttgaacatattcagacgcctcctagaaaaattgaggactatgtctcttctagtttcgttatggtaatctctctaactctcttttcgatacaaattatttctctctctatcctctttgcaattgaattcattaataattaacccacaagaaaagattgagaagtttctttttgcatagtatattaagattagacttggttgtgtattattgtctattgataactcaatatttctttttttagttataacttataaggaagattcagagatcttctagtatcaacaatgtttacactataatatttgatggatataacacgtaaatatgtttttgaaacggtttacgatagggaaatattagaggcatgggggatcatcaaatccaaatacaagaaggtggtgaacaaaaagtgacgctgatgagaaatctcattgacggaaacaacaacaa

SEQ ID NO: 112666 - DNA, 445 bp, Arabidopsis thaliana columbia
agagaaccctaattcgatcgacattctttctcgttctacttgaagaagttctccttagattgcccacgaaatcgatcctcaaatgcagaatcgtctcaaaacaatggaggtcactcctggaatcgagtaggttcgcggagaggcatatgagtcttcaaaacagccgccggagaatcttagctgcttacaactgcgactgcggcggacggaggaagctcctacccgagtcacggtttgaaggggacgaagagattgtctatctgcactgcgacgcctcacgaccctcgatgacttgccaaggtgtgatctgcttccccgagcaagattggatcatcgttttgaacccatcgactagccaacttcggcgattcccttccggcttgaaccataactgcagatttagaattggattatggaagactttctctctcggaaactgggtaat

SEQ ID NO: 112667 - DNA, 430 bp, Arabidopsis thaliana columbia
ggcaaacttgtgtacacttgttggttttcttgttattatcttcttcaatgtgtttgcacctgcctcttctgccagtcaccccgtcgaatggtcgctcgggaaagactatagctcgttggctaccggaaagtccttcgcggtcggcgataccatcgtgttcaactacggcgcgggtcacacggtggacgaagtgagcgaaagtgactacaagagttgcacattggggaacgcaatttcttcggacagtagtgggaccacaagtatagctctcaagacacctgggcctcactacttcatctgcggtatccccggccactgcactggcgggatgaagctctctgtcattggtccagcaacttcatcagggcggagtactggagacggtaccactgtcaaaaatacacccgtacaagaaggaaaaactacaccc

SEQ ID NO: 112668 - DNA, 449 bp, Arabidopsis thaliana columbia
ctcggctctcgcatcgatgaagaacgtagcgaaatgcgatacttggtgtgaattgcagaatcccgtgaaccatcgagtctttgaacgcaagttgcgccccaagccttctggccgagggcacgtctgcctgggtgtcataagcgtttactgtgagtctctcaaagaaaccaaaggcagagaaaagagataacacacacaaaaaaaaaatggcatcaacctcactcctcaaggcttctccggtgttggacaaatccgaatgggtcaagggacaaagcgttctcttccgtcagccttcttccgcttctgtcgtcctccgcaaccgtgccacctccctcaccgtccgtgccgcttcctcctacgccgatgagcttgttaagacagcgaaaactattgcgtctcccggacgtggaatcttggcgatggacgagtcaaacgcgacttgcgggaaa

SEQ ID NO: 112669 - DNA, 241 bp, Arabidopsis thaliana columbia
gcctcactcactattatgacatacattacccacatgacctgatataattctgactcgatctcattgacactgaatggctggctcgaagaacaaaatccgaaccaacgggttgatgggaacaatgagcttgctaggtatgaggtgaacccaaagggaggagagcctgctggacgctcatcacaaccatagagaccatggacacatgacatacatgtttgaactgcagagtgcacgacagtga

SEQ ID NO: 112670 - DNA, 461 bp, Arabidopsis thaliana columbia
gccaaacaggcctaagactaagccacggttgaaagttaaaaccatgattgatatctatgcttctgcgaaagaaggcacattagaagatcttgataaaagaaatggcacaaagtgggctatgatttcgagctactctaaccgtgttgtctctgatgataagcctgaagtgtccaacaaagtaaagaagcgaagcgtgtcgcgtgctcgcattgatgaagatgctgctggcattggacctgtttacattgatgctaagggccaaaaactgcggattttatctaagtttaacgagaaagcttctgatccatcaagaagagagcatgaagaagtttgtgagaagaaatcttctagtgaaggtaaagggggcaaaagctttaggaaaaaactttggggagagaaacattacaagcatcgtaaactagttcctcaaaacagaaaactcactgttcgtaaaagcaatg

SEQ ID NO: 112671 - DNA, 461 bp, Arabidopsis thaliana columbia
cggacgcgtgggcttaactggtcaaaatttaatatcttcattggcattacttgtcagttgatatcttctatggcactgaagtgatcaatgaaggagttgtatggaaccaaagtgatcaattaaatagctgtttcaccaaaacaaaaagttatgttatgtcattttcaaatttttctttgaattcctaaaatacttgtaaaggttgtaggttaggttatttgaaattcaaaatgtaagtggattagtatgttaaaatcaaaaaaaaatgaagagaagacatgcgaatagccaaaaaaataggcaagaactaaaaagcacatacaaaaagtgacgacaccaaaccaaacatcatttaggtatggttttaacgtctgcatcaaagttgctctgcgtattatctgcttgaaatgactcattcaatagtataatctaattaataggaacacttcaaataggtgaaa

SEQ ID NO: 112672 - DNA, 539 bp, Arabidopsis thaliana columbia
  unsure (1)..(539): unsure at all n locations
gcgacgccgacgtcgtccgagtagagggatgggnngtcaaacgaccggatgatgtatgtgagtagaggacccgcaatggcttatcggtgggcttccgctatgtcgcgcggtcatcttacacatcgcgcgtgcgtcgtgttagaccttaggatagatagaaacttcctatatacctctatatgccaagtagcatgtgcatagcaccatgacatgagtaacacctcgtaccggaacctccagtgccgatatagaattacggaccttagtagtgtcttcaacaagcattgggtctccttctctcgatnactcgatgatatatgggcatcatttaacccttgggaagaacctactctggactggcgaatggcttggtttcaatatcaattgggtcggcttataatagccgctgttatcaacctgacccttagctatgccactcttccggngtgggtaccttcacctttcttccctatatacatacacaacatacacatgtcaaagcatggaagtgattcaaaacatatgacaatgaaggaggg

SEQ ID NO: 112673 - DNA, 338 bp, Arabidopsis thaliana columbia
gtattacaacacaagcataatatagtgatctttaatgtgtttggacgtaagaaggctgataataagaagatgcaaatttgtacatgccacattaaaaatcacgagcattattatgtacattcataatcacgtataagcaaacacatctcatcattgtctttttttaatgaattggaccgcaaacatcaaaagttgtctactttaacttaacgaaaaataatactactccaattcaaaagtaaacatcgaatgtatacatgttttcgatatttgtatttatgaaattgatcttatgaatataccttacgttttgtggattgtgtgtattataacttttt

SEQ ID NO: 112674 - DNA, 173 bp, Arabidopsis thaliana columbia
  unsure (1)..(173): unsure at all n locations
ntcgatcgccacgcagtccgnttagagaanntttgtgcgcccttgggagnntccctttattattaatataannnaccaaggannttttaccatgntnactgcaatgtttatgaagagaccgnncgagaagcgagaagggcctatgtngggtcgnncttctggtaaccctggat

SEQ ID NO: 112675 - DNA, 455 bp, Arabidopsis thaliana columbia
cttggattacagtttcctctttctctgtctgagctatggagattactgtaatcgcttcttcctcaatcgatgaaggaattggaagttgggatctcaaaaccgggacagagcagcttcaattcaagccgtgtgcttctccgtcgcatggtctcaccgccgtcggcgagaaattcctcgcctcctctcagctctcagcgagaaatacctctggctcgattttttactggtcttggactaagcctcaagctgaagtaaagagctacccagtggaaccaataaaggctcttgcagcaaacaatgaaggaacttacttagttggtggtggaatctctggagatatctatctttgggaggttgcgactggcaagttgcttaagaagtggcatggtcattatcgttcagtaacatgtttggtgttctctggagatgattctttgttggtttcaggatctcaa

SEQ ID NO: 112676 - DNA, 437 bp, Arabidopsis thaliana columbia
gcagtatcttttatgattggttgaactttttaatagtaaatattcttaatctgcgtgcttttatctaaaacaatttatattgtaaaacagagaaagtattaatttgatttgttctttctttcgtttccacttctttcatttgaataatatcctttgttgttttgttcaatctttcatttttgtattataacgaaactcaaaagaaggtattttgaccactaatgttgttgttaaagttttaaacatcctttttggataatttaatttttattgtaaaggcaagaaatacataaatatttaatctgctaatctccttttttttcttgcctcgaatccgaattttaacatataaagaagcgagacaggttcgaattaaataatctctcttttaaagagatctttatagaatacataaaaaaaaatcaaactatttatag

SEQ ID NO: 112677 - DNA, 454 bp, Arabidopsis thaliana columbia
cagcgattctccaattcgacggtgatacgaaaatgctcgcagacgctgaatcgtttctgtttcatcttctaaaggcggtgccttgtgcgtttactcgtcttaatgcgttactctttagagctaattactatccagagatctcaaaccataacaaaaatcttcagacgttggatttggcttgtacagagcttaggtcacgtggcttgttcgtgaagctattggaagcgattctgaaatctggaaacagaatgaatgcaggaacagctagaggagatgctcaagcttttaatctcaccgcgcttttgaaactttctgatgttaagagtgttgatgggaagacgactttgcttaactttgttgtggaagaagtggttaggtctgaaaggaagcgatgcgtgcttaaccgaaggactaaccgtagctttagccgtagtagcagcagttcgatctccga

SEQ ID NO: 112678 - DNA, 455 bp, Arabidopsis thaliana columbia
aaagaagtagagaacactgacacctgtatatctgggagagaatcacgagaagacaggctgtgctgactctgtaaccatgcgcagaccggaaaatatatgacaaaaatgttaaatgagattaaaagaatgagcaagttgaaactcgggaatatgtagcggaagattcacctatctgtaaccatatccaaaacagctccaaatgtagagactgaaaggaaaagagttgtgtgttacgttcaatcgtttctgataatgtagaacaagaataaactgtgtatgggactaaaaatattgatcaatgagacaaatgacatgaaatgtcatatttaatcaatgtcaggatcatagaggaagcataagtaatgagttagttgaagctaagaaaagagatggggagaatgaaaagagcaccttggttaaatttacgagcgcaccatccatccacagcatcacaa

SEQ ID NO: 112679 - DNA, 420 bp, Arabidopsis thaliana columbia
gtccgaaagctcgagagagttatttacatttgctattgagaagggaactcgtatgacgtgaacctgaaagaacatgtgtggttattgaccgggagttgggggcacacgcaccccttcttttacatatgtactcgctcttactgtctagttgctccaccttaatcaaactgtgtaccgtttgaacatttctcgctatgtatgtctcacttagaaagcactcaaatcccctatttggtgttaccccgtctgtcgtgctcttgatctatcacgtctttataactgcactgttgtttcgatacaactcattcatctcctacttgtggataactctattttccttcgtttaacctatctgaattctcctcttccttctttttttcacatcctattcttcaatatccactttctgacttttttatt

SEQ ID NO: 112680 - DNA, 427 bp, Arabidopsis thaliana columbia
  unsure (1)..(427): unsure at all n locations
ctggggatatacctccgcacgtaagttccatatatcatggggcagtgttactcctccaaaacaataatttatcaggggttattccagacacactactactgaatgttattgtacttgatctgagaaataaccgactgtctgggaatcttccggagttcatcaacacccaaaacatcagtattcttcttttgcgggggaacaattttacaggacagattcctcaccagttctgcagtctaagtaacatccaacttctggatctttccaacaacaaattcaatggatcgataccatcatgtcttagcaatacatcatttggtttgaggaaaggggatgattcttatagatatgatgtcccttcaagatttggcacagctaaggatcctgtatattttgaatctttactcatgatagatgaatntaatat

SEQ ID NO: 112681 - DNA, 454 bp, Arabidopsis thaliana columbia
cggacgcgtgggtgcagctttcatgatctttcctttacctttgcagggtcagcaacaaatattctggagatcaaatggcgacattcaggagatatgtgaacataatccggaatagcatactgaacattcaggattctctgagcaaatattttcacaacagaatagattgtttagctagcaagtaataaaatccatagttacatttttcaactattgaagcatgaagaaagtgaaaggctcacatgtatagttttcctgaaattctttggttcctcgggatcttcgaaaggatatgctccaaccagcatgacatacagagtaaccccacaagaccaaacatctgcaacctgaaaaaaaagaagaacaattaggatgcatttgactaattcaaccaaaactcaagaattatcagtttacaaatcagactcttaatagctttcttcaccaaaattct

SEQ ID NO: 112682 - DNA, 230 bp, Arabidopsis thaliana columbia
gtctcaagactccaaagacaagaaagatgcattcagaaagaaacaccagtgcggaaaatttattcagagagaaaaaatccgatagaatcacacaataaagaacatatatagcaatgaagcgctaagtcgctaacagacactagacaatcctattgatctatcccgttaaccagaaacaacaaaacaggcacaataagcagatatccccaagaatctagccaagtgcaaaa

SEQ ID NO: 112683 - DNA, 414 bp, Arabidopsis thaliana columbia
caactagactgatcaaaccgatgagtaactccagcactacagttgtagtcatggttgttgattgtgtagactttgatggttcgtttgggaaacgagctgccaagtctctgtttcaagtgcttcaaaaagctgaaaatgatcctaagggtagcaaaaacctcccaaaacttgtacttgttgcaacaaaagtagacttacttcctacacagatttcaccagctcggttagaccgatgggtgcgccaccgtgccaaggctggaggagcacctaagctaagtggggtttatatggttagtgctcgcaaagatattggtgttaagaatctgttagcttacattaaagagttggctggtccaagaggaaatgtgtgggttattggagctcagaacgcggggaaatctactttgattaatg

SEQ ID NO: 112684 - DNA, 459 bp, Arabidopsis thaliana columbia
cggacgcgtgggaaaaaaaatatatatatatatatagaaataacacacatttttggtcatgtctttattgggagaagttttttaaaattatactactttccaaaaatatcatttttatccattttcaaaaataccacaaatatttagagttttttaaagttataaaatataccaaaaatattactatataatttagtttatgaatatattattatgagttttggttattaagaccttatataggcatatagcatgtatattaagctcataatatatcctgttactatataatttagtttatgaatatatatgagttttggttatataaataaataaatcgatcagaccgtattaaaaaggtgttcataagtaaaactttactacgatattagacgtacaaatgttagtgtactgtttatatttttgaatttagatccacatatattcttgtttattaaa

SEQ ID NO: 112685 - DNA, 453 bp, Arabidopsis thaliana columbia
aaacatactatctctgagaaaagcagggaagatagtaaagtatcgagctttggtggtttgaggtctggctcaagggttgcaccttgtagtgacgatggtgattctgtagtcaagaattgtaaagatgatgttgaagagagcaagaaagatagtgaggaactgtctttgatacgggaacagcttgctctgattgagaaccaacagtctagtctcttagacttactacaggtatacacttggtctttaataagcatagtgtccctttatgtagataaattgtttggttatgaatgttgtagatagctcaatcctcactgattttttttttcattttggatgtagaaattcatgggaacctcacagagtggaattcagtctctggagtctcgtgtaagcggtctagagatggcgttggatgaaatatcgtgcgatctggcggtttcaaacgggaga

SEQ ID NO: 112686 - DNA, 443 bp, Arabidopsis thaliana columbia
gtttgtcatgttttttaaagcaatgaagattacttcaaagaagctcattcaagctctgttcagtttgatgcatctaagaataatacgagaccattaacacagtatgattacggagaactatgcaatggagcaactgaagaactaaagattcagaatatgctagtggaagtgtcccttttcacctccatacgccggaagcactattcaaagtgagagaaggtatcacttatggcattcccatattttaatttgctcaaagaaaaattaaatatttcttagaatctcagaccatttccaacgaagagtcttttgaccattttcaacgggagatctaagtctaaatatccgaaaagtaaatcaaagttgccaaaaaccaatagactcagatccaaaattggaaatttagacaatggtttgaatctcataagtgtcacatcataaat

SEQ ID NO: 112687 - DNA, 446 bp, Arabidopsis thaliana columbia
aacatagactatggaatcaagtaacatttaggtcacttatattttaatgcaccgcatctaacgcgattagtcattaatacacggatcgtccgatctaaaataaaatttgtttttattttatatatacagtatataacctttctcattatttcttcttaaatcattacaatcatcacaaagccatcgcaaattagaagagatttaagatggccaacaacatctcctttccttgcgccatcatatttttctctatcaatattttcttcttaatcaagtcatcacacgcaatgccatcgtttaacgtccaaaggtacggagctagaggtgatgggagagcagatgcgaccaagtcctttttgacagcttggtcattagcctgcggctcacgggctcgagccatggtctacgtttcccgtggaacatatttggtcaaaaacctagtcttt

SEQ ID NO: 112688 - DNA, 223 bp, Arabidopsis thaliana columbia
gcaagatatatccatgctcataattgcgttaagatattcaggaaaaggagcctgctttaagaatatagagaaggctgaaggggccatagcactattgtccatcttacttctgatttcttcagtcacggattagtggccagtatttatattttcaccttctgctgtaccttttcacttttttcttgaccttgtaatttttaaaaccttaagtcattcgttttat

SEQ ID NO: 112689 - DNA, 437 bp, Arabidopsis thaliana columbia
gggacaacaaggccaaccatggggtggacagggaacaaaaggaacacctgacccaatgctggttcaaactttgaatcgaactttaactttttgagcagaggtattgcatcagaatcttttggatagttgacgcgaggcgcctttatccgattcagaggtaggaaggtcacacgtccacccttgagagaattcaggtgtctaattatcttggttgaaatatcatcattctcaactaccacgttaaacaggctggtcgtagaacaagagatgacaagagtagatcataagataaaaagtagattcacagtaattgtaggtgtgaggtaaactcagtaggtttcctgcatacctgtttccagcagtgacttcaactgcagtgaaaaacttttcatcgcaatcaaccaactcaacaagtggaccaaaaactccattgattc

SEQ ID NO: 112690 - DNA, 450 bp, Arabidopsis thaliana columbia
ggcaaatctgttcccgcgctggcgcggcttgacaccgcaagctcgtggtctagctatggactgaaatgatggcgcgcaaaagggagcgcaaaatggccgcagctacggacgaccaactcggctttgcccccgtcgacgatgccccgatcggctacatgaagcggacccgcgattattacgcggcgatcggctacaccacgccctaccgctgggcgcattacacctccgcgccgttccagccgctgaacaagccgctcaaccagtcccgcgttgccatcatcacgacggcggcgccgttcgatgcgaccaagggtgaccaggggcccggcgcgaaatacaatggcggagcaaaattctattcggtctatgacggcgacacttcgcagcaacacgatctgcggatctcgcacatcgcctatgaccgcacccacaccacggcgaccgacagcg

SEQ ID NO: 112691 - DNA, 360 bp, Arabidopsis thaliana columbia
aaataaaatgtgattgtaagttatataactgaaggatagacatttggtgagagtcctctaatttatatgagcaaatttcagctggggactttggagcatgtcaaaccagggaacctctgaagcaactcttcacgggttcgtctctgtgccaatttaccatggggttaacacattagtaagaaggaaggggtggtctctagagtgttccacttacatagaacctggatattgtggaggggacacactctagaattgagttttcgcatatagagaaagggacacctgggccgcggcacacactgacacaaagagaggggagagtgttatagcacgtgtgtgaaaggggctccacacacatgt

SEQ ID NO: 112692 - DNA, 398 bp, Arabidopsis thaliana columbia
gttttaacccgcggtttaccgcgggcaatcggtttatttggtttttatactaaatatttgaataaatttgatatcctaaacttataaatataaatttctagtgattagtgaagaatcgtaatatatgatttggatattattgattattgatttcgtgattgaatatagtgtttttagggatggaatgtgatcatattttgatttcaaaaaggacatagattccttaattttattgaacggtttagattgaatcagatcatataaagtttaggagattgttaataccaaattgcccttaatgattttaaatagcaaagaccataatccaaaattgaaatcaaaattgagaccaaattagaaaaaaaattcaatttgtactttccttttaataataaagg

SEQ ID NO: 112693 - DNA, 360 bp, Arabidopsis thaliana columbia
ttaacctaatgtagttatacaaaataaattagacggtacgcttttggaaatgttacagaattaagatgacatttaatcaattatttttaaaaaattaacgagtgatgaagaatatatagtatttttacgtttcatgcacatatctctcccacttgctttatatatgacgccacgtctatgacgtaggccaaaacagtaacatcggatactaccagtcgcacattcatttatccaaaaacaacgattatcgactatcattaaagtgatcccaaacagccaaaaccgcaaaagatcgagattttccattctttcaatccggctcaatagcccatgccgcgaaattgatccctaacgctcaaa

SEQ ID NO: 112694 - DNA, 459 bp, Arabidopsis thaliana columbia
gttcattgcaatagcaattgtctcatgagtttctcttgagattgctccaagagacattccacctgtacaaaaccgttccacgatagaggaagcaggctcaaccttcccaacagggatagggttacggtcacttttgaactcaagaagatcgcggaaaacctacaacaagaatatacaaagaatcatattcacttgttccagaaaacagacaatcagatttgaagatgagattatagcactcaccgtaataggacggttggctaaatgctgctgatagactgcataggctgtctcactcttttcgcggacggctttatgaagtaatttagacatttctgggttgtttccatgatattcacctttcatataacaaaatatactaaattagagataatactggaaaagcttatagggataatgaatggtagcaatttaatccactaaaaggacagtaaaata

SEQ ID NO: 112695 - DNA, 410 bp, Arabidopsis thaliana columbia
gtttgtttgtttccttctgttgtattatacttgatctgtaaaaagatcatgagtttattaagagtgtttgatttcagactcctctttgttataagtctattactagttgttgtctcttagtttcttttatcaatagagttgagttatatggaataacaagttgaaaagaaaccaggttcttgttgatgtgtgggttggagaaaaaaagttctttgattatatatgtaacatttatgcattactgtttaatgtaacgtctaatgagtatgatgaagggagattgaatcaatcccactctcacatcatgtttgagatgacaagtacaatgccacaaatattctgaaaatcaccactgttcttcacagctgaaggatcaactttgaaatccgccatgtcttgttcacatgttg

SEQ ID NO: 112696 - DNA, 456 bp, Arabidopsis thaliana columbia
atctccataacctccaccaaagttagagcgagagtcaccgaaccgcttcgatggggttgtgaccgagtttggttttttaggctctgccttctttatctctacctatacaaatacagggcagatgtcagtgttctgattatagctacaaagtctaagaatctcaacaatatttgtaagagcggctagttacctgagtccctgaaagctcaattctgttccctttcgccaagagatgatcaaccatatcttcactttcatatgtaacaaacccaaagccacgtgatcttccagttgagtgatcacgcataatctgatgttccttcagctctccaaattgcataaagaactccttgaattcatctatacaaacaccaatcaccagatgagaaacttagtaaataaaaacatgattctgaaataataaaatcatattatgggagagtgtttaccatcatc

SEQ ID NO: 112697 - DNA, 283 bp, Arabidopsis thaliana columbia
ttcatcgtcttcttcgggttgtggtgaagcatttaggtccatcgcagcaaataattcaatggcaaagcaacagtctgtatcaatttgcgaggaaacacaaaacccgtataatagaatgcaggaaattgacaaatcaaagtaaacgagatctatcccaatttcgcttctctatgcagaattcgaagaatcaggaaaatggtccctgatatcgaaattgaaatcgaaacctagcagagagagtctcgctcgtctagacgaaacatattcgaaactgttgctgaat

SEQ ID NO: 112698 - DNA, 455 bp, Arabidopsis thaliana columbia
gatagggttaagcctccttcacgacccttgctttcttctcctcgatgaacccacttcgggtttagatagtaaatccgcttttgacgtcattcacatcctcaaatccatcgctgtgtcaagacaacggaccgtgatattgtccattcaccagcctagcttcaagattctctccatcatcgatcggttgttacttctttcaaaaggaactgttgcgtaccacggaagacttgactccctcgaaggtttcttgctcttcaagggatttactgtccctccgcagctcaattcccttgaatatgcaatggaaatacttcaagaactacgagaatccgatggaaacaccgacgctactgatctcccttcaatcgaaaaccggaaacagagagaaaaacagagtattgttcgatatagaaaatcaaagatcaccgagataagccttctcgcgagaagattct

SEQ ID NO: 112699 - DNA, 266 bp, Arabidopsis thaliana columbia
cataactacataaccacattagcataaccaaccaaatcgggaaagaagggcgtcttttcttttttctaaaatcaaaaaaagccaacaatacaaatttctccaagcacgatcctctttcaaataccaaaagcgaagtaataaatacagactaacctctctgataaaaaatggaagcttaagaaagcatacatcacaagcaaaagatcagaacactatagaatgtttcatcgctcatatcccacaaaatcagatggatcctcccaaaa

SEQ ID NO: 112700 - DNA, 360 bp, Arabidopsis thaliana columbia
gaaggatctagatcgtgcagcgacgctttttcatgcaatgtgctgaggggctttttaatgctttcattgcctatattatcattcccaccttctgcagtttcaatcaccggccaagtcaggtaaacaattataacgttttctcaggatttaaccatcagagtcttacctgccatctcaatgcgagattggtcaatatgctcagacaggtgccttaaatcagttgaagaaggcttcgagactaacaggctctgtcaatatccatgttaaaccagtaaatagaaaggtagaaaacttcgtaaatgcaagcaaagatgagaagacgaacatacacattttaacaataaggatgggtaagaaata

SEQ ID NO: 112701 - DNA, 349 bp, Arabidopsis thaliana columbia
  unsure (1)..(349): unsure at all n locations
aaaacaagaattaaattcatatttagccccaactaaaacaaatgaaaaagcganatgggagattttcaatgcttcagcataacccaanaaaacatttgtctataataatgtgatcccccctcttactatgagtaccattttaaacgaatccatttgcacaaacaataaaacaaacaataatgctgtataggattggatcaattcaaaagaacagcctataaagattatcgacaaagactaaaaatatgcaacgcatgcataagatggttcgattcaacacacaatacaaaggaattattctttctataacaaaccacaaagaggaagggtttttcactctattatctat

SEQ ID NO: 112702 - DNA, 367 bp, Arabidopsis thaliana columbia
cttaccaactaaaactttgatttcatccaaaactgaatcttttgccatgggggtttggagatttttcatatcttaaaaaatcccaaataagacatcaaggacaattgcatttctttgacaacaagcaacaagaaagaagcaaaacgcaccgttttgccttccattccaaattgacaaaacttaatgttgttagcctcaaaaaacttgagattctcctctgagtatggttcacgacacatataactgttttgatgaatcaaaaaacgattaattactccaatcataatcaattatcaaacaatgtaattgaataacccagaagattaataaaggatcttacatgatggaacgaaaatttaaggtttta

SEQ ID NO: 112703 - DNA, 258 bp, Arabidopsis thaliana columbia
  unsure (1)..(258): unsure at all n locations
aacaaaaccaatatcctcaatctcttacccacccaccaagccaacacacgaagcttttaaactcttcgaccctaaaaaannccccncagacaccaccaccacaaaccacaaccaccatatctacaccctctcaaacctccacaaacacacctcaccataacataccaacaaaactctcaaaaaatcacccaacaaaaatcaaaccactcaagaccataacccctacaccttcaataacgcaacaccaacctaaaaacc

SEQ ID NO: 112704 - DNA, 317 bp, Arabidopsis thaliana columbia
  unsure (1)..(317): unsure at all n locations
gttaaaacaattttttctaaatataanacacccaaaaaggcgaatgaggcggtttattattctttcaaataancctaaanagcctacagacaagacggctgataaggttaataagtatatacattacacggcggacaaggccatacaagctccggattacacaactgagaatactattgaatcaaaggataagacatctcataaaactggaaagtataacgactatacggtgaagaaagcgacccaagtgaaagacgttacagtgagtaaactaagatagctgaaagatcgtacccttgatacaactaatagagcta

SEQ ID NO: 112705 - DNA, 276 bp, Arabidopsis thaliana columbia
  unsure (1)..(276): unsure at all n locations
ntcactctatttttttttgttcacttacaaacccnaaacgggaaacagcgagatttttaaattcttccaaacccnacannnnacncatgaaaatgtctggacaaacaataaacttaggacccatgctagctacaggaaaaaccatcaaacacatatctatagcaggtcacccaaacttgacaagaccttcagaaattcacacacacaaacaacatatccacaaatcaaacaaatcaaacacataaataattgttctgtacaatctccgatatgaaa

SEQ ID NO: 112706 - DNA, 358 bp, Arabidopsis thaliana columbia
tacgttcactgctatctcaagccagccaacgtcctcgtctggccttccggcacttttggagagccatgggatcttaagcttgctgatttcggttcatctaaagagccttctacggattctaggtcgttatttcctggtacgctgcagtacatgccaccagaatctcttggacatgatggagtgatgggaccggccgttgatatatggtctctagggtgtgtggttattcagatgtttggaggttgtccagtgatgaccagagactgttacatgtgggggcttcccaaacttatatctccggtggccaacgacttcttgatgcggtgcttggcgttgcagccgtcacgtagggccaccg

SEQ ID NO: 112707 - DNA, 339 bp, Arabidopsis thaliana columbia
  unsure (1)..(339): unsure at all n locations
canacaactattcccccctactttaacaccacccacacctaattnccccgcggcttcagcaatctttcaatctctcaaacaaaacaananaaactaataatccgcaaaagctcacacacacaaacagaggaatctataacgaacgcttgcttcttgcttatcaacaaaagcggaaacaaaacatcaagatatacgtgacactatgcaacgtataaaccatccatctactaaaaacccagatgggatctgcgcttattgacttcaagaaaagctacaaaagctagcaacttcatctttcccacttccaaaacacctaacatcctcttcaacttcttcctc

SEQ ID NO: 112708 - DNA, 368 bp, Arabidopsis thaliana columbia
cggacgcgtggttgaatgtggtcgacaatttattgcttgtgcaccaaatggatgcaggggttgttatcatctactacttatttgaggattctcgagctcctgtatctgcgcctcttcctttactgtggaggggttaccaagtctctgagacatcgtctcaagctgttaacaaagaaattgagagctcagaatcatctacaagcaatgaaaacatagtcatgtatgaagatggctggacctttctggttccagaccttattctggatcagacaaacaaggttttatggaagatacatttggatcttgaggcaatttccgctagcagctcagacaggacgtctcttctagaattcctgcagcgaaggaag

SEQ ID NO: 112709 - DNA, 304 bp, Arabidopsis thaliana columbia
  unsure (1)..(304): unsure at all n locations
cacacacctattttttaacactttttccacaacctaaccggcaacataagaaattttatgattattccacctcccaacanaaaacccacccacttcctctcattttcacaaaaacctaaaattaaccaatacaaccaaacacaaatttctctatacatacgctatcacccaaacgaaactcatctctaaccatataacacaatccaacaacaatcaaacacactccaacaaaatcaaaaatataattaataaaaaacactacccaaactgatacaacatccatcttctctaccctaaaaacccc

SEQ ID NO: 112710 - DNA, 322 bp, Arabidopsis thaliana columbia
  unsure (1)..(322): unsure at all n locations
gggggacccacgcgtccgaatacacgctttaactacctttttattaacttttaaacaaaacaacacgggactttagaaattttcacattttttaaacactcacacccancaaccccctacattcgttcttctgatgatgaacgatatctacatttcaaagaacctaatatcccaaaaacactctttatttataacacaaacaccttctcctaaacacctccttctgacataacccaacaatctctctaccaattnttactacctttatctcaacacacacaatatttcaacctctaaaaaattgctaccaatattctatcat

SEQ ID NO: 112711 - DNA, 271 bp, Arabidopsis thaliana columbia
  unsure (1)..(271): unsure at all n locations
aacaaacttaattataataatatttaaaacaccatacccaggcacctacgagatttttaaatttttacaaaaacaaaacanaaaccanaacatccttactacatacaataatatcaaatccactgctagaacaacatactaccaaattaccttccataaaaaaactatacccaatataacacaatcaacattcttaacaatattatataatataatattatataccctcaccgaccagaatataaactacaaaatactgaaaaacacatca

SEQ ID NO: 112712 - DNA, 349 bp, Arabidopsis thaliana columbia
  unsure (1)..(349): unsure at all n locations
gtaaaccgtaatatctctttttttaacattttaaagcccggggagacagggaactttttcatttttcacaaacataaaangaacataataacatttgaagaatcataagtaggtagagttcttataaccaagatcaaggttttatctaatcgccttaaaagagaatcattgccaggtaggatcaaactggttgtttaacattatatatcaacagatgcggtgctacaccaaactgcagtcctctgtgttgaggcccaccaccatatatcatgaaaagaaatactgctgcacatatatccgctgcttcctgattacaaacaaaagcagtacattgtctcatctgttatat

SEQ ID NO: 112713 - DNA, 367 bp, Arabidopsis thaliana columbia
cttacaacaacaaatcttaaacgttttactttgtgctgcactactcaaccgcaatgggggcctctacaatgtctctctcctcccctgccttcgccggtaaggccgtcaagctttcccccgcggcatctgaagtccttggaagcggccgtgtgacaatgaggaagactgttgccaagccaaagggcccatcaggcagcccatggtacggatctgaccgtgtcaagtacttgggtccattctctggcgaatcaccgagctaccttaccggagagttccccggagactacggatgggacaccgccggactttcagctgaccccgagacattcgcaaggaaccgtgagctagaagttatccacagcaagtg

SEQ ID NO: 112714 - DNA, 291 bp, Arabidopsis thaliana columbia
  unsure (1)..(291): unsure at all n locations
ctcacacatggttttaattagtattccattatgataacaaggaaattctggaagtttttagatttttgaaagctcaactatngcattttaatatggatatattaaaatttatagaagaataaaataaactaacaagaaagggcgaagtaatgtgaaacatcatgagtgagttccaagttgggtttgatcaataactccaaacagacccatttaaatgcttacatgtgaagttctaaccaacttacctttctcatttcgctttcctcttaaccatcatcatcattaccatat

SEQ ID NO: 112715 - DNA, 156 bp, Arabidopsis thaliana columbia
  unsure (1)..(156): unsure at all n locations
ctcaaacaaaattttacaatttccataaacatcccacccagggacccaggaaatttttttcattttaaaaacccaacactcnnaacatatacatactactacctctcaaactaaaatagaaacttcaaaaacacatttctatcaccaacttaaaca

SEQ ID NO: 112716 - DNA, 361 bp, Arabidopsis thaliana columbia
ttaagagattaagaacggacggctcgcgatgcttgctttcgttgggttctgtttccaagctacctacactagccaagatccaattgagaatctcatggctcatctggctgatcctggtcattgcaacgtcttttcggtgagttaaaattgttatgatcatttatcatagattcatggtgatgatatgtgttatgtgtattgataagacttcattggtacgtacttcttttgcaggcatttacatcacattaatgaggattagcttggggcgaatataatattttttatatatttatggatgttgaacttttgtatagtgtcactcgccgttgttacaacttctgcttacttaattaacatg

SEQ ID NO: 112717 - DNA, 238 bp, Arabidopsis thaliana columbia
  unsure (1)..(238): unsure at all n locations
ccggggcgatctccacgcgtctcgaaacaacatattaataccaaatttatacaccccttaaaaaaagaaaaaaacgaagggctgggaagtattaagatcttcaaaaacaacaaccaanaatgaggagtctccatgaatcatcaccatcaactccacaaatagtgagattcataactccccctactaacatcctaacactcctcgtgctctcaggactaacactaaccgtaacggtgat

SEQ ID NO: 112718 - DNA, 371 bp, Arabidopsis thaliana columbia
tcgacaaaataaagtccaaaaaagagttaccacaggcttagcagttgatccaggagtgcatgggattatgagatattactcgtacatgctttcttaagaagttttaacttggaacggtgaattgtcaatgttaattggtgtgttgtgctgcagattcttccaagggaacaaaagaagcatgagtacaacgaggctgtgaagaaccggtacaagcatctttctgaggttaagcgcattgtgaggtaaatgaccaatgaaaactgtggttttatcccatgctttaactctggagattgtcaaaagataactatagtaacatggtaacgttttggttattgtgaattacagacacaggcacttgccaaaaccaa

SEQ ID NO: 112719 - DNA, 373 bp, Arabidopsis thaliana columbia
  unsure (1)..(373): unsure at all n locations
cggggcgtctccacgcgtccgacaaaagtgtttaatcacaatttttttctcattccactaatatgttaaaggaggcatggaattttttagttactcatatctacatncccatttaagaagttaatcaccctgtcggaatatctacaaacccgatttatgtcctctattgactagcacagctgcacctcaaataaatacatttgtcgcagattattgttacaacataaaacaaattctttgatactctttcctctttgttacacaactctccccgtcaaaactgaaaaccacacgattacctatccaccgatacgtccaacatactctatagttacacttgacttttcctcgtacatatcatgctagattcaat

SEQ ID NO: 112720 - DNA, 352 bp, Arabidopsis thaliana columbia
  unsure (1)..(352): unsure at all n locations
cttatccaatttttatgaacctaccttgacctctctactagccgncttgcaatttttatgtctcactaaacccccactccctagggtntgaaagaccctctgcgtactctgttcttcttctctcttcagataaaacaagtcctgcaaaattaacacctgacgtctcatcgattgctaactacggataaggaggaactagttacatcaccttgtttgaaagaacataaccacttcagactctctgattgatcctctattgatagctcaactattcccaatgttgttgggaagagcaaactcaattccaaagctaccgaactgaagctaggtcttcctgagtctcaatctcctg

SEQ ID NO: 112721 - DNA, 230 bp, Arabidopsis thaliana columbia
aacaaatacataaatcacttttttttaccttttacaccaaacacaaaggggcttttgggcctttttacggtcttcagcacacaccacccgccactctaacacatacaatatccaaaacatcatctctaccaatagatatttaataaaccttttattatcaacatcataattccaccctaaatacacttacctattatccaactatcacacatataaattaaagttcatac

SEQ ID NO: 112722 - DNA, 337 bp, Arabidopsis thaliana columbia
ctcaaacatattataactactttttgtaaaactcgacatagggacagcggggatcttttgcggattccgatccaaagactgcaccatcacaagtgtgaaggacaaaaccacactcagggtcacaatacatggttgattgaataacgctagccaaatgaaacaattacctaccgatataacgaattgaactgtaccaagaaccacaccgaactgattgagattgtgacttgccccatccctgagtatacacacatgtataagaacatgatctaactcaatataaccaatgaaagacatatcaggaataatataaaccagccaaacggtaaaggttgac

SEQ ID NO: 112723 - DNA, 361 bp, Arabidopsis thaliana columbia
  unsure (1)..(361): unsure at all n locations
aaaaaatacatttacataatttcatcacaatttccaaccaacattacaggaagnaaggagattttaaagatatataaaacccccaaccnccccnttaaccatagcattaacgcaactcttcatcctgatcatctctgcacagacactactgttacctaaagtcctgcttttcaacgagatccaatgtggctcaatggcaaggaaatatatctttctggaagtatgtaccaaaattacttgaggtaaataccaaatcttgctccagatatttaagacataaaaaaaggtatcaatataaggaaaaaaaataaggaaaaactgaatatacatattcttctcataaaaactaccctacaactgc

SEQ ID NO: 112724 - DNA, 316 bp, Arabidopsis thaliana columbia
atctaaacctttttcctctactttaaaatccttctcacaagagcaaccggggctttctaggattttaaaggaatccaaccgcgaatgggaaacccacatcctaacaactctgacaacagcaaccaacaatttctcgacaaaccctacatcaaatagaacaatgcaattatcgcacaggacaaacattcgcccatgtaccatcaaatgaaccagaatcgcaatgctgaatacatcgctggagatactacccacaactcaatcaaaaaagcccacaacatactcaaagttcctgtgtctaccatgcacatcgaatcca

SEQ ID NO: 112725 - DNA, 362 bp, Arabidopsis thaliana columbia
ataaaaatctattttcttattttcatacccttcccataaaactattaagagctcttgtacattcttatgcttcataaaaacctactcacatgtgctcatatttctctctatccttctacaatccaatatccaaaattatttaccactcctttttacctatacttgtgttactctctaaaaccctatcaatatttctcaataaaagtcacccataataaattttcacacatacatcaattctacctaactccctatatcttacacactaatttacaattacaatacctttcacaacatctttgctctaattcattacctcttctatattcaatacctagctaaagcatccaaggtttcctatg

SEQ ID NO: 112726 - DNA, 257 bp, Arabidopsis thaliana columbia
  unsure (1)..(257): unsure at all n locations
ctcaaacaaactttaactaggtttatcaacaccccacctgggcacacacgcgaactttttaatttttcaccctcaacaccagcangaaggaagcatcaaaatcctttatactcaaagaggcccttcttccactcaagagctagccgtgcttgtctgtgtaccgatagaaagaacgctaatcactataacctgttagacaatatccaaatacgttataggactaatgctagcattcccgatgattatcatctatagtc

SEQ ID NO: 112727 - DNA, 295 bp, Arabidopsis thaliana columbia
ctaaaccacaatttaacaatgctctgtatactcacctttgggggcccatgagatttttataattttaaaccattaacaaaagactattcgacgcacgacaacattgatggagcataacttgaatatctacaaagacttatatgtcattgtgacccctacaacttcttacttcattttaatccattccttattaaaccaaatatcaaatttaagatccctattttacttgccatgtactcttatatatccacatgtatattaactactgtttaaactactataactttacaaacat

SEQ ID NO: 112728 - DNA, 213 bp, Arabidopsis thaliana columbia
ctaaaaactaattatcactctttccaaaacatccaactactctacaaaagacgcctgggactttttcagatttttacacacacacacacacgcccggcacactacttagatcaagagactcaaccccataaactcttagaatcatgtcacttcatcaagcacttaaaagcctcaccttcaactcctacttgatttactctctctactgcacca

SEQ ID NO: 112729 - DNA, 368 bp, Arabidopsis thaliana columbia
  unsure (1)..(368): unsure at all n locations
aaacatccaaaaaccctcttttttttgctcttctcatcacttcaancacgcggcacagggaatttccaaatcttttaacactnacannggaacgaaacaccttgcttagtacttgaaactatataggatgagtgtttaaacttactggaccgtaattggatattgcctttacaccaccagttcctccaagataagcgcgtggaatcacctcctccacatacatgttcaacgccgttgtgcctttctatacaagcaatcaaatttaagaccaagactctttgctacaaataaaacaataatacctcttcaaggcgattaagaccttgaagtagttttgaacaggagagccaaacacaagaaacgtttac

SEQ ID NO: 112730 - DNA, 211 bp, Arabidopsis thaliana columbia
  unsure (1)..(211): unsure at all n locations
aaataaaatatttttaccaatttctatacttttagacaaaattaacaagagcaccttgggcatttttcatttttttactacaaaaacnaccacatctaaccactcaatcaataagaccgtccactctaacaaaagttacatccagacgttccataaagagactcttaaaataaacaagaacaccttcatgtacacatccgtgtagcacaaa

SEQ ID NO: 112731 - DNA, 253 bp, Arabidopsis thaliana columbia
  unsure (1)..(253): unsure at all n locations
atttaatatatatattttaaaaatcttttacaccttaaaagaggctacgagaattttaaaattattaaaaacncaaaacattgcaaccctcactcaaatattcacttaaaacaaaaccaaacacgattcttctatcttctatgcaaacctccttaatcaacactcacactacatacctaaacaatttttatagccataccaccaaaaaccatctaccgatagttaacctctccaaataccactcatataccta

SEQ ID NO: 112732 - DNA, 252 bp, Arabidopsis thaliana columbia
  unsure (1)..(252): unsure at all n locations
gtttaatatatttatattaaaattaatatccccctcaaagggagcaacgggaattttaaaaattttaaaaacncaaaacancgcancncncccctaaatattcactgaaaacaaaaccaaagacgattcaaaaatcttctatccaaatctccttattgagcactcacaacacatacctaaacaattcacatagacataccaccacaaaccacacacatatactcaacctatccaattccaactcataaacct

SEQ ID NO: 112733 - DNA, 218 bp, Arabidopsis thaliana columbia
  unsure (1)..(218): unsure at all n locations
aaacaacataattatataaaatatgataacccccaacctaggcccaaggagagtttttaagtatttaaaaacacaaaacanaacggcacaccacgacatagaaagcaataacaacaaaaacacatggaacaagataccgaatcttaaccgtcaaagcaaacccgcacaaactaacactaaacaattcttaaattccagaacaaataaaaaccacccca

SEQ ID NO: 112734 - DNA, 205 bp, Arabidopsis thaliana columbia
  unsure (1)..(205): unsure at all n locations
gaaaaacggatttttactgtgtccgtacacacccccacnaggagcgctgggactttttataggattaagagacaaaaacncccaaatccccccgtcaacgacagcatatacgcaacgcttgaacccgaacatgtctggacaggaactactgttgccaatagtctcaatattcaaccgaatccaatgaacattaaaaacacagaaa

SEQ ID NO: 112735 - DNA, 230 bp, Arabidopsis thaliana columbia
gaaacccacaactcaactctttccttcaacatctctcctggaccatcaggacctttctaacttatcaagcaatcgacaaacccaaaagctacccgcatcgaccgacctcaaacccaggtcccctacaaggatccaagtaatgcacattccgctctcaatacactaaacattcactattataccttgcagattaacaccaacctcacatatgatatgtggaattcgaaaac

SEQ ID NO: 112736 - DNA, 256 bp, Arabidopsis thaliana columbia
  unsure (1)..(256): unsure at all n locations
aaaaaacataaacatcacaatttcataaaaattaaactacataaacatagagagtttgggctttttatggtttttaatgaaacacaanaacaccctacagctgataaaaatccaaataagccatgcttatataaaaagcccttctgttctgttactagaattttattaactaaacaaaaatccttatttgatatacatgagataatcgcacataacgacagatcacaaccacattactaaaaacttacaacaaaaa

SEQ ID NO: 112737 - DNA, 271 bp, Arabidopsis thaliana columbia
ctaaaaacaacatatttttattttatttctgttaggcttcataaagaagggggggttgggattttttgatttactcctctcaaaatttgagaacgttatcatataattttttgagatagatgataattgattggatacattcctaaatatattatatattggtcgagtaatttaattaccttaccatagagcttatatctatagttcggggcacatttaacttatgtttaaacttattatgacatatattttgttctttgaaatacatatt

SEQ ID NO: 112738 - DNA, 235 bp, Arabidopsis thaliana columbia
ctcacatctacttttgaattttacagatccatcattccaaggtactcggggatcttttagagtattccagtacataaaaatccaagctctcaacaagagaatgtctactaacccaagagatctcagcacaatgcactttatgaataaacgtttgcgttcatctaaaaatttgcaacgaacgctttcaacgataatcttactttaccacagagaaacttgttgtatgttggttaca

SEQ ID NO: 112739 - DNA, 362 bp, Arabidopsis thaliana columbia
atcctaaatgaataatatggtttgcaacatctaaacccacataacaaagggaggtccgggcagttctaacttctaggcgtaacacataaacccattcacaacacgcacccggaccaaatgatacgagcattaacaccctaattaaatacactgagaaaaaacaacgcgtgacaccaatcagtgcacctaaattccataaatgattgtatccaatctagggtgaccaacacccatagactaccctctgggtttactaagggggaaaaaaaaattaggcctgtacataactccactattcaaaagtacaaacccaccactaatcttatttttctagagcgatgatcatcaggtctttgaatcac

SEQ ID NO: 112740 - DNA, 135 bp, Arabidopsis thaliana columbia
ataacacataattttaccaatttctttcccatcactctgagagccccagaaaatctttttcatattcaacaatcaacactccaacaccaaaaacgccactccccttaacactctaattttcacttcttgcaattt

SEQ ID NO: 112741 - DNA, 340 bp, Arabidopsis thaliana columbia
  unsure (1)..(340): unsure at all n locations
caaacacanaattttacactttttttacccaacatcatcaaaactccaaagccgctttttcaaattcaagaatctaccaacncaaataaaacactcaactcccactcacacacaaaatgtaaattttaataatatttaatcacacattccattcataatatcatcaaattacaccattaaccactaaccatcaaaacaacacaaaaaatactnatatcaaatcccttcaacattttaccctttttaaaccaaaataaataaaacaaataccatcaatcaaaaaacaatcccaaaaatttatttcaaaaaaaaaactacaccccccgcttaaatcaatatt

SEQ ID NO: 112742 - DNA, 285 bp, Arabidopsis thaliana columbia
ctgacacgtattatgacattgtcctttaaaattagtaacgaaagaccagggactaatgatgaaactaagtaataatcattataaaataataagtgcttctcgtttccctgatcgaagttccgcattgaatagtttaatagcacaaattgctatctctttatattttcttgacaatatcaaccgttagatattaacgctaacttcagagaaatcttgtcttcttattctaacgttaacttttattttaccaaatatctttttacagtattctcaatcaaaatcaac

SEQ ID NO: 112743 - DNA, 360 bp, Arabidopsis thaliana columbia
  unsure (1)..(360): unsure at all n locations
gtcaattttaaaaaactctttctttcacttctctcataaaacttattggggagtcgcaggagaatttactattaccctcaaacnatatnagcatacaatgcttgacgctcatctaagtttggttatgatatcacttggaaagatccgacttcaattatttgtggacctttctgttcactcctagcccgtaggctttatccacgtctgaccaccgatgtcaaacttttgaaacctttaagaaacttgttattggtcatatattccaccacaaacgtaaaaatacgggtttttacatctcatggtatcaataaccatttataataggtcattttctttagatatctctaacttaaacacact

SEQ ID NO: 112744 - DNA, 233 bp, Arabidopsis thaliana columbia
gtataaaagattatattgaatttcgtcatcctgtaatacggggttagtgcgtgattttttattcataagtgaaataacatatcaaatctgtatattcctacagaaaataggtggttactatttactagcattatattggtcattattcatttacacgtggtcattaatatgtcgctaatatataatatgaataaaactgtgacatgcaacatacttgaagtacgatacttctt

SEQ ID NO: 112745 - DNA, 146 bp, Arabidopsis thaliana columbia
gtcaaaaataatttatacaagttccttcccctcacacccggcctactggggaattttctgcctactaatacacataatctccaatatgggaaccctcacatagcctaatcggaacagagtctcttataacaaaatacacttcctag

SEQ ID NO: 112746 - DNA, 191 bp, Arabidopsis thaliana columbia
  unsure (1)..(191): unsure at all n locations
ataaaaagaatttaaccaacaacctaaacatcaaacagagccgccttgaaaattttcaggaccttcaaaaancaaccctccgatactagaaccaccaacactacccaccccaacaacgtcaacaagaacatacccgactccctcctcctcctacacaaagcaacttataccaacctaactcaccaaaccaa

SEQ ID NO: 112747 - DNA, 223 bp, Arabidopsis thaliana columbia
gaaagataactagttccaagaattaaaaaaattcaattttaattttgggaattatcaatcattataggtggtatgaacaaaaatggagggggataaaaagaactcaatttattgttcaagaaaatggactaactccagaataagattaacggacttataattgaatttttgggggagatcttgtcaagcataattatcattaaaaaatactctttatttactt

SEQ ID NO: 112748 - DNA, 455 bp, Arabidopsis thaliana columbia
ctgcggtaccggtcccggtccgcggttccggcccacgacgccacgcagacgtttgaacctacgcatctcctcattacaagctaaaaaacatggtttgctctcagaaacatctcaccttctcaatgctcttcttatacttcttttgcttcctctctttcttctctcgtccttctctttcctcaacgtttctcgtcgacggtgtctctgtctggaaaatccccactgttcatatcggcgactctgttattttcagacataagtacggatacgatctctacatcttcagaaacaaagatgcattcaatgtctgcacctttactcaagccactcttcttactaaacctaattccacttccttcacgtggtatccatcaagaacaggctcttactacttttccttcacaaacaacacatctcttcccaaaacatgccaactcaaccagaagctcacagtc

SEQ ID NO: 112749 - DNA, 499 bp, Arabidopsis thaliana columbia
gaaagataactagttccaagaattaaaaaaattcaattgaaaatttgtgaattatcaatcattataggtggtatgaacaaaaatagagaaagataaaaagaactcaattcatcgtctttggcatctgcactatctcaggagtcagaattaacgtaacttattaattgaaaaactctttaagaaattaatcataaaaaaaaataatacataaaaaaaataactctattatctaacttcaatcaaaacatataaactttttttgaatgaatatgtaaaaatttgaaaataagttgtttgattctttttttttattgaccttagaacctagaatacgcctctttctactttattaaaattgaatttactaaaatttgaactcattagattaaattaaatagtagagcagttttcctcatttaatctatcgaatgagactaaaaagaaaagaggtatcctacacggagaacgagattagtaaaaaaaaagatttatttatttt

SEQ ID NO: 112750 - DNA, 230 bp, Arabidopsis thaliana columbia
cggaatttagttttgttataacataagtgatgttcttattattctgtgcaagaaatttgtattccacatagtatttcttttgaatatttgtattccacatagtattttattattgattaatatataattttcaaataaaaatgatgagaaaattcaaatattttcataatctatgtaatttttttaacgtgtacatgtgcaaaactcttaactacaaataaattgatttt

SEQ ID NO: 112751 - DNA, 495 bp, Arabidopsis thaliana columbia
aaaaaaatgtgtgggtgtgattgtgtgaacaagcgtgtgattgatcttaaacgcaaacactaacaaaaaaaaaaaaaaaatttcttgttgttgcgttttccagaacaaaccagtttcaatcaaattctgttttcttcatctccacaaagataactaaatccgatctcgtcttcgcaatcatcaaccatcaatggaagttgaagaagaagttaaacaaatcatagatgaggtcaaagagcttcatgactcccccgcttttttcatctaatcttcttctaaacaagagctctctctccgtcaaaaagcctccgccgttgattcctctatccgtcgtctccactctactatcgtctccaacaaaaatctcgatcctaagctcgtcgaaaagcttgaggaagatctgcatcgtgctatatgcatgctttgtgacagagaaacatcttcatttctcccattcaaaccacaaggacgctttgtgagaatgttttgtggacc

SEQ ID NO: 112752 - DNA, 307 bp, Arabidopsis thaliana columbia
gcgttggaaaatgcggaacatgttgacccagagagacctgttttggtcgataaatatctttctgaggccatcgacatcgacgttgggaccctcactgattcctatggacatgttgtgattgatcgaaacattgtagcatatacataaaaaccgacgcgcattctagagactcaggtcgagtgcttgcaacacaaaccatgacagcttctagtttgcaaactattcgaacatcgaccactaagctcgcgaagaaactaaatgtgtgtggcctgatagactgtcagtacgcactcacagcatctggtga

SEQ ID NO: 112753 - DNA, 418 bp, Arabidopsis thaliana columbia
gttgtttcccagtctgaggaaattcaatctccaagtattttgcccgacgatgtaccaggacaaccagacgatggcaactgtgagaaaatggataccatgcagaacaatacctctattgatattggcataacttcaggtaagacatgtcagccttcatcttctacccagcctgaggatgagaacagaaatagcttatcacactgtgaaccgtcagaagtagttgaacaaagggattcaagagatcaaagttgcatagggtctgtggaatctcaagtagagatcagctctgctatactggaaaatagatcagctgatatccagcccccgcaatccattttggttgatcaaaaggatattgaagaatccaaagaacctggtatcgagagtgctgatgtgtctttacaccaattagctgata

SEQ ID NO: 112754 - DNA, 300 bp, Arabidopsis thaliana columbia
tgaattccaaaatcaagtatgtggagagtcagtttgcatccacccttgctccaaagcatcctcggcaacttccagggaaagcagttcagaatcctaaggactatgctactacaaatgctatcacaatccaccaagaagatgagtctccaccaaatcatcagactccaaatactgaggacagtatgattcaggagggggggattcaactcaaattcctgcacttgtcatccaacaattcatcaagactattaagcacacacctttgctgaatactcaccactctaaaaaacatttcaaaaa

SEQ ID NO: 112755 - DNA, 436 bp, Arabidopsis thaliana columbia
ataaaaatgggtaatacctattgtatcttacgaggttgcattgaacatgctaacgtcggtgtggtcgagcgttggtgtatatcagagcatgagtgctgaaccggacatgtcatttataaaccctctcgccggtcaatggctgatcggagttctgtccactaggatcgaatctcttgatgtcaaaattgaaacccaacctaaagttaatgtgactgtgcagctggtttgtttgattcagtatcgcgtaccgaaaagctatcccgatgattcgttttatgagcttaaacaccctatagagcagatccaagcttatgactttgatgtgcttagggccttggtcccaatgatgacgcatgatgctttttttgaacaaaaaggtgaagttgccaagtatgttattgaggagcttgtgaaggtgatgggttcttatggatac

SEQ ID NO: 112756 - DNA, 156 bp, Arabidopsis thaliana columbia
ataacaccttgcaaaaacttttatatttcttaaatatccattttttctttttaaaacctccataactctcttgaatttcatccaaagcggggtggggctatctatcaaacctaatcactcatttttatccaataccctaaaatacccaaatataaa

SEQ ID NO: 112757 - DNA, 187 bp, Arabidopsis thaliana columbia
ataacaacaacaaatatttattatacctcatacataaccatttttttttctcacaagcttaacatggagagttgatcttcataacaaagaaggtgcatccatcgctgctacatacaaacatcataacaattactttgatattgcaaaatctattcactaattaggaaacttaaacattcgaaataat

SEQ ID NO: 112758 - DNA, 231 bp, Arabidopsis thaliana columbia
attagatgaattgtgctaacagtataataccgcaatttgaaaatgagagagatatcatacttttttagtggtttgtacgaatatgggggcagctagctagaacttatgacgtcgtatttggcgaaagctcataccagatgcgtcataataaagcgtaactcacactcttgtatagatcgttcaggtggtgcacttgaagaggcttatgaatgctcaacaggcctttctcac

SEQ ID NO: 112759 - DNA, 496 bp, Arabidopsis thaliana columbia
caaaggcatctttctgcgaaattcgttattaagtttattctatgcaacaagacatacataaccgatgggaataatctatacgtgcttacgttgaagcaagatggttccttttgttctgtcgtaggcttatgatgttgatgtattttatcatgtagctagctactccttgtggattaatgattaaatataaaaaagcattggagtattttaattataaactgtataccaatgtttttgcaaagtcaatggctttctttaattcaatacgagaactataatatttgttatagctaatcaggttttcttatccatatatttaactaacaaaaaaattctctttcacccacattatcatcaattattataagatacaaaccgacactaaatacaactagactaagattcaaaatgtttgtagtttatagatgatacgaaataatggtccaaactggtcttccgctcttctttatgtaaccgattcaaatggatacataat

SEQ ID NO: 112760 - DNA, 500 bp, Arabidopsis thaliana columbia
  unsure (1)..(500): unsure at all n locations
gccaaacttaagtagcccacaagaataatgcagaccaaaaaaaaaagcctgactattcgattaacggtcgacaaacattattccataatacactactttgacaaaaaaaaataaaaaataaaaaaattgtgtttatctaatgccaattcaccttcggtaatcactttttattcaacaaatagcattggaatcgtcaaaaatcaatttatccacaagtgttttttttgttcaattatgcgtcaaaatcttatcaaacttgtgcgaaaaaaaaaaaaaaacttatcaaacttgtatttaacattttgccattttttgaatttttgaattttctttaaatacattttttgttaatgaattttctttaaatacttgcgaaaacttttgtaacttgtgtttgtggttactctagtttgaatgtcttaccagtttccgtgtacaaaagtaaattagaaaaatttacagagaaatttcacaactntatcgacttttcaaactaaaaa

SEQ ID NO: 112761 - DNA, 493 bp, Arabidopsis thaliana columbia
  unsure (1)..(493): unsure at all n locations
cggacgcgtggggaacaaagtgcctagccacatcacggcaaggtggtccccataaagcacaatgcacatcatgccaaggcatccgtggatgctttttacgctctaattcatctttcaaagcatnctcccaagtattgggttcagactctctggaaaattttaagtacgttcaaaccaaaaaatcagagggttgaattcggaaaggtgaaatgactaatggacatcctggtttgtatttaatacaaaaatttaatttcatcacagctaaaaataactagcaagtgacacataagttcttagtttttattacatctaaaaatcaactctttattcgcataaagaaggaaattcttacctggggttgtaatagtcctttccaggccatgtcacagaagggttatctccaactttatgttcaaacgtgtcatatcggccaaaacacaagtctagcccttcgataaagcaaacctgattatcgacgatgacgagtttt

SEQ ID NO: 112762 - DNA, 199 bp, Arabidopsis thaliana columbia
gtccgcatacaccaggaggagtccttaactctaaccgcctttctgttttagtttttgcccgccactcataggctgtggcttttttaaaagaacccgggggagccatatataaagccagtcatatacggcaattatcactgcttatatacccgaaccttatctatctatctattaccactatgaagcttgcatgaaacta

SEQ ID NO: 112763 - DNA, 212 bp, Arabidopsis thaliana columbia
ataacaccctgtcataactattatccctctttcttatccatctgatcaccccacaaccttaccatggggcttttattaaaaacacgtgggggtccacatattgacaagaacacacccgcatccttatacattatcttgatattgccaaatcgatcctctttttacgaatcctcaacatcgaagtcataaccccaccatactcaacaatactt

SEQ ID NO: 112764 - DNA, 234 bp, Arabidopsis thaliana columbia
cagacaccagaacatgaatattatgctgtcagcggatgttttttttcgaacaacgaccttcctgatgggttttgtataaaaactgggactggtcctgttactatacttaatactagaaataaccatttcccattggtcaagagtatatcgcgcttctttgatccatttacgaatctatattttgctatgtaactaatcaactaagtgtgactactacagctttatctgggaata

SEQ ID NO: 112765 - DNA, 481 bp, Arabidopsis thaliana columbia
  unsure (1)..(481): unsure at all n locations
aaacgtttgggagacccggttacgatcctatagtattgttcttttcaccgttgaagttctatgggggggttgcttattacggagggggtgagtgttgtttggtgacagctgttagggatgtggatgaaatcttatanccttatgacgtacatacgtttctcgtcaaggaaatgagaaactggacaaaattctgaagctgtaggcgaataatcgtaacaagaaaagcatgctggtggtttctgaatttattggttgctctccatcgctaagcggagccattcgtgttaatccatggaatgttgatgcattagctgatgcaatggatagtgcccttgaagtatctgaaccggagaagcatcttatacatgagaagcattacaagtatgtgagcacacatgatgttggctattgtgctcgtagcttcctccaagatcttgagaggagttgtggtgagcatgtacgatagaggtgttggggaatt

SEQ ID NO: 112766 - DNA, 392 bp, Arabidopsis thaliana columbia
cggacacctggacggaaccattataaagctcttgtagacgattatttttttttacgaaaccctcaaatgatggaagattctcgaaatggggggggagttagttttgaaaattttggaacatagttgtcatgaggacaacaatcaacgagccttatgttattagtgatgtgtcctacgtcacgtgcatcaaggtggttagactgtgctctacaagggtgaatacagcgatgttaagccggtgaactggtccctggagccttacatggcattactttactttcttctataccatgctgtggcaaacaagacttgctaatatgtatcaaaactttactagatggtaatattgggatagtcctatgttctaggtggcttgagccttacaactctac

SEQ ID NO: 112767 - DNA, 233 bp, Arabidopsis thaliana columbia
cgtccgaatcgtacataaaatttatataccatccttaaccattttttttttctccggccataccctatgaggggttatgtaataaagtggggggtgatctatttttgtgactacacaaaatatgtgatgaatcttataccttatgaaaacatattctctcttttagaaaatgacaaactggacataattatgatgctcaaatcgaataatcgtaacaagaaaatgcatgcttt

SEQ ID NO: 112768 - DNA, 186 bp, Arabidopsis thaliana columbia
atcacacctagacataaacattatacaactttagtatttttattatctcgtgaaagaaaacctgttgcgattataaaaaacccggcgggggggtcatctatatttttaaattctaatacatatatatcaaaagtccaaaaataaacaaatcgtttatttatttagattacacctacatctaatgca

SEQ ID NO: 112769 - DNA, 489 bp, Arabidopsis thaliana columbia
gttcttcgtcctcgctcgtcgtcgcgttctctctctcaaactctcatatatacttgacctatactaggccctgagtctgattgcgagaatcgctggcaaaaaaatgcaattttcttgtgatcctgatcaagaaggagatgagctgccacaatatgaacacatttatcaaaatgacttctcttatcgaaagcacatgaaacaaaaggaagaagatatatctatctgcgaatgcaagtttgatttcggagaccctgacagtgcttgtggtgagagatgcctcaatgtcattaccaacactgaatgtactcctggttactgcccctgtggtgtctattgcaagaatcagaagttccaaaaatgtgaatacgccaaaacaaagttgatcaagtgtgaaggtcgtggttggggactagtggctcttgaagagatataggcggtgcaatttataatggagtactggggtgaagtaatatcatgggaagaagcaaa

SEQ ID NO: 112770 - DNA, 236 bp, Arabidopsis thaliana columbia
atcacaccttgacataaacataatactactctcgtattttttttttctctttaaaacattcctgaggcgattttattaactacgggggggggtccatttacaatttttaagatagaatgttctatatcaattattcaaaaatagccaaatcgtatatctatttcgaatatactacatcgaatgaattaagctcccaagactcaacaaaacaattttgattttgatatttatataaa

SEQ ID NO: 112771 - DNA, 477 bp, Arabidopsis thaliana columbia
gtcagttccatcatcatatgcatgtctaacaaagatgaagtctccatggacaagggaaggtcttctctcagcaaggccaggaacttcgagggacaaatagataccccttctcttcattgaaacattctccatatcataagctcgcatgtcttcctaaacaaccaaaaaattacaagaaacatgattcatggtacaagaggtttattgagttattaacaaaaatctgaaacaatgaggatacctcgaggttgtaatctttccataatcagtaaagttttatagtagttagcatagttccttgctgtaagaccttcgttcaaatcatcagggaattccttattctcgatcatctctctaatctcctttggaatttcatacagaggaagcctatttctaaaactacgttcaaccacctttgaagggcgtgatcccttcacataatcatccacagcaaaatctttcttcggagcccttcta

SEQ ID NO: 112772 - DNA, 377 bp, Arabidopsis thaliana columbia
ttttaaaatattgactttttgtagtacttttgtcatctttgaatttgtttcattatatggggggttttcaaataagttatctcgaaagtttgtaagatagtatatgttgaatcttaattggatgactgacatatatattagagacacctcacaataaagttttagttttttgtcttttgtttttttgggtgtaatccatatataggaaacaaattcacttggcatgttccatgtttttttgaaaggtttgaccatttagttctggttcttttcatgttataatttgatagcacagttaataataatgaatttattatcttgacaagaatgattgatttaacatgtctggcttttctcactgtattctaaattgactg

SEQ ID NO: 112773 - DNA, 227 bp, Arabidopsis thaliana columbia
atcacactcagaaataaatattatccctcttacgtattcattttatctactgacaaccttcactatgtggcttttacttaacccggagagagggtacacctattgatctgaactatacaagcatccatatcatgaacattgatattgcaaaatcgattcatctttgtacgaatacttcaaaatcgaattaataacctcactcactgtcaacagatactagtactgat

SEQ ID NO: 112774 - DNA, 239 bp, Arabidopsis thaliana columbia
  unsure (1)..(239): unsure at all n locations
ggcggatgaaagactgttggtatttgtgganagtgatgtttcattacacttatatttttttgnnagatgnnngcggattttgtgtgggagaagattccgataggtgaggggggcagtgaatgttctgggatcattgaagaagtatgttgaagtaagtgataacattttatgtggttgtgtgaccagtgtatgctgcttgaactctgagtattatatttgttggagtatgcaattctctg

SEQ ID NO: 112775 - DNA, 210 bp, Arabidopsis thaliana columbia
attagaccttgacatatacataataattgtcatgtattcaattttgagctttaaaacattcatgaagcgattctaaatcacagagcagcggggtcatctataatgctaattctcataacctatatgtgacaagaattatacttacaacatcgtatgtttgttgcgactgaacataaataacattcattaagttggcatagagagattaat

SEQ ID NO: 112776 - DNA, 235 bp, Arabidopsis thaliana columbia
actaccacttttaattgatgtcataagtctttgtgaattaaaaatcaatgctcgagcctcctccattacccaaaatattggcaaatagcaggaggcaataatgtatatcatgtgagatatgcaattttaggcatgcaaatgcgtttagcaatttaatcgttatatcttatgaaaattttgaataaatacaagtttacaaaataatgtaaatactaaagtttagtatccatcataa

SEQ ID NO: 112777 - DNA, 217 bp, Arabidopsis thaliana columbia
ctgacaccaggacaaagacataattttactctactatacgaatttacttttttaagcctacctcatgctgtgccattttccccagcagggggaggttctacctatcttgacatttgaaacttggatgtcatcatgccttactttactagatcttattatttttggtgatttatcctactactactgcataacggtcctaaacttctacaatgctatt

SEQ ID NO: 112778 - DNA, 316 bp, Arabidopsis thaliana columbia
gccaaagttgaccactacttgtagtaaacaaaacctttggctttaactctctcctgcaaatcccagatctttctctgtctctgacccgcggaggcccctagagattgatcaccatcactcttgtacgcttcctcagtactcacctatgagcgtcatgctatgctctcgttaacgcctaacacctctctcttctccatggatctgccaacgctcctttgctcacacctgtgctacttcttattatcctccttcagtgtcccttgggaatccttgccgttgcttatctccgactagcttgttaaaaccgccaaaagca

SEQ ID NO: 112779 - DNA, 238 bp, Arabidopsis thaliana columbia
actacatctttacatatacataatatctctttactaaactatttttcactccaaatcatccctgagaggtttataataaaagcggggagggctaaactttatctttttaacttacaaacttataaatcaatagaaccctaattatcaaatcttttattctattctattatacctttctctcctgcaccaagctttcatatctcttatcaacaattttgaacctacaaaaataattaaa

SEQ ID NO: 112780 - DNA, 504 bp, Arabidopsis thaliana columbia
gggatacgacactatactggtggatctagtaagaaacatcatataaagattagaaatgaataaattttgtgggatatgacaagctgtgggatacggcagagagtaaaagtcggaacgagtcggccgattggaccgcagcactatttgaatgtaccaaatttaccgattatgtaatgttgtcacgcaatatatctcaattgtataagggatccagttttgtttttcccattgtattattggttcttatatatcccctttcacaatatatattacatatttttgtatgatatattacatactttaagaaagctaaaccaaaattaaatgtgagagtatgaaagaagagaagacgaagatggggttgtttgtatttagttttttttttttggtttaagggttgtttgtatttaaatgagcaaaaccgaaatgattgatgaaaaagagaggaaggaggagtaaatagctttctgtagccaaacatactcgtctgaaattgatggcatt

SEQ ID NO: 112781 - DNA, 165 bp, Arabidopsis thaliana columbia
ctcacaagtggacgaatcaatagcatgcctctagtaaacaaattgtccagtttgctcgtacttgtttcgaggctgagtacccgagtttggagatggtttatattatctgtgcatgactctcccagtgtacaagtccttgaattcacgcatcgtgtgtctctttgg

SEQ ID NO: 112782 - DNA, 452 bp, Arabidopsis thaliana columbia
gcttgtaaattaatgacacaacacattaaaaattgtaaaactaggtatccacacattagcttcatattttcaatatggtttgataagaaaacgaacctaagagaacgacattgactcccatagcttttagaaggttctttgtagtccggtatctcacctcaaccatattccttgttaagataaaaccccagcaaggatgaacacgacaaaactagctaacatggctaacatcaggccactcgaatgtccaattttggcgacgcataggagatgcatccgagtacaacgagcacttggggatgaaaaaagcctacgaatctcaattttgacgcttctaagaaaacctataaggaatgtatagagagagaaatataagtgcaatgtagtgagatcgatcacactccctacaagataggaactatacttgacttagttcacaacataaattattg

SEQ ID NO: 112783 - DNA, 217 bp, Arabidopsis thaliana columbia
ctttcatctaacttagctggaatctaagtttatagattagctttttacttttagattcatcgttgcatagttggtcgagcttattatggggtgtgggggagctcatcataaggagctaaatattgtactctggaatcaaattgctgcatatgaattgctttcaattatcttatcaatatttctggacgactaggatgaagataactctgaattcatt

SEQ ID NO: 112784 - DNA, 192 bp, Arabidopsis thaliana columbia
  unsure (1)..(192): unsure at all n locations
cttacaatttgaaataatttaccantnttaatcctattagatttttaaggcatcatcgaatctattggaccattcgaagcggcggagggactgacagaatttgatccttgatactccgtgtttcttgtacttacaattaccatgtaccttcgttgatgaggtgtgaccaacgtcacagacgtatatggtgca

SEQ ID NO: 112785 - DNA, 216 bp, Arabidopsis thaliana columbia
cttacctctgttcacatatttagctcttcatctctatttttttttcctcgtgtgatcctcccggtgactcttctaaagaatgcgggggggcggaatcttactcccttaaccgtaatcatttggaggaccacaaaatcaaatttaagcatcatatccttattcacgactatgcatactccatatctcaacctatatatcacaaatactacacaggca

SEQ ID NO: 112786 - DNA, 269 bp, Arabidopsis thaliana columbia
aaaatacttgcataaatttttattaccactttcttattcttttttataaccgaagtcacacaggtgtggttcttatagatgagggggggggtataaaatctttaacaaacccatcctatcttatttctaaatattcatactgaattctccatatcttaatttattatatttttaattatcatccatcatcttacacaaaaataaatttctctaaatcccttttatcaaattaattccatctttttcttatttatttttaataattacta

SEQ ID NO: 112787 - DNA, 379 bp, Arabidopsis thaliana columbia
  unsure (1)..(379): unsure at all n locations
gaannccggggtcgttccacgcggccggtgagacacatcgatgccttttcctccggaagaagaaacccaacccaagcggggttcgtatttctttgaaaactccnaacgcgatattaatcaaccaccaccacctccaccacaatctcaaccgcctccaccgcatacgcaacatcaaacgtacccgccgataatgggctatccaagctaccatcaaccacctccaccatacccaaattatccaaacgcaccttaccaacaatacccttacgcacaagccccacccgcttcatattacggttcattttacccggctcaacaaaatccgatttaccaaaaaccatcttcttccgagttcttcagataaattttcaccggttta

SEQ ID NO: 112788 - DNA, 257 bp, Arabidopsis thaliana columbia
ccggcgcggacaaagtttttttttttgttcgaaatccgacaacaaccgtagtttttaaacttaatagaccactgcctgcatagaggcaatgtacatgtgatttttgctggaaaatggacaaatcccagaagaatcctacttcccaaatcggaacttcaactcccaaatccaaattcgaggattctccagtgttcaactacataagcaacctctctccaattgagtcggtcaaatctatctccactgctcaaaccttt

SEQ ID NO: 112789 - DNA, 381 bp, Arabidopsis thaliana columbia
aaaagatgtatcacatgatgatattcatgtacaagaaggctggcaacgatgggaaagctcgaaaagtattttcttcaatggttgggaaaggagttccccagtctacagtcacttacaatagccttatgtctttcgaaactagttataaagaagtttctaagatctatgaccaggtgatctgaatgattcctttcttttaagtaattagtatatactagaattaccattagggtatgtattggcctgtaatagtagtgatctaacccttttaactaaaatgtttaacttttcagatgcaaagatctgatattcaacccgacgttgtaagttatgctttacttatcaaagcatatggaagagccagaagagaggaagaagctc

SEQ ID NO: 112790 - DNA, 382 bp, Arabidopsis thaliana columbia
gcgacaaataacagatactcttttttttttttttaaaggatatgtgagtaggcagatcttttactttaagcaaataccatatctaattaatactactaataactatacttgcatgattggttaatataatctattttctaaaacatttttgacatttttttttattctaacctttaaaactcctagaaatatattttatatttatagtcaataagaattagttaaacactttctttgaattttactaaatatgtaattctttgcacttttaatttttttttatggtttatttgagttattaaactttttaattaagttaactattatcaaattcaaagttcaaacgataatgacaaaataattttgtttcgttacattgatt

SEQ ID NO: 112791 - DNA, 361 bp, Arabidopsis thaliana columbia
tcagaagcatttttagtttgtgtttggcctcctctgcttctacaaacggggggtcctaattggtttcatcatcggccgcccttctaatggggtccaaaatgcgcatattgtacacctataccgccggcaatctagaaatattctccaccggtgctgtatacaccaccgatcaagaagtatccactcgtcaccatgcgagcattcaccgctgaagtatccaactacgagcaaaacttacccttatccgccagtgaagtattctgcaccagaacatgttccaccacctattaatattgatgctgctgctgtacaagatccaacgacgatttatgaagtatcctccaccataacagtattcacc

SEQ ID NO: 112792 - DNA, 303 bp, Arabidopsis thaliana columbia
ttttgtggggggagattcataagaattgcataataagaagcttgctaatagaaagaatcaaacagaacaagggagtgaaacatcatcattaacaaatctttatcttttctttctcaaaacatcgtacaccaggctcgtggaggcagcatgtaatacacacagctagttgatcttcatctgcaaacttaaataaaccatgaaggacgttccataatgtacctactgtgattggtttcaaagctatcacaaagtgaattaatttgcaggcgattaatgccacatggtcatcacagatgtttgtga

SEQ ID NO: 112793 - DNA, 162 bp, Arabidopsis thaliana columbia
cgaaattgttgttgactaatttctttatcagcccaattgttcttaatggggcgtatcagtcagtatgatggaacaaatataaagtctgatacgacccattaagaaaaattgggctgataaagaaattaggcccagcgataatcacgtagtggtggtgagaat

SEQ ID NO: 112794 - DNA, 384 bp, Arabidopsis thaliana columbia
gcgacaaattcaagcattatcactggctacaacatcagtgccagttgcaaaagggggagttcctgtaaagaaaacaacagggaactccacttcgagagcagacctaatggtaactgctaattcagtagctgctgcagcctgtatgtctggcctggcaaccgctgtaacagtgcctaagattgaaccaggaaagaatgctgtttctgcgttggtgccgaagactgaacccgtaaaaaccgcttccacagtttctatgcctcgtccttcaagtatatcatcagcactgaatactgagcctgtaaaaaccgctgtggcagcctctttgcctcgttcatcaggtattatttcagcaccaaaggttgagcctgtaaaaaccgctgcttc

SEQ ID NO: 112795 - DNA, 272 bp, Arabidopsis thaliana columbia
gcggttctttgtacatagacattttagtaactgtactttcagtatttaagagagggagattataagcttaacgtgttaaaaattgtggtgtaataaaatctgaaaatctgtctacacaccataaactttaggctaagcgtactcaaaaaccaataattcactcttgtttacttgtaaatttttgcagaataaagtttatattattaaatgtgcccatcacatatttactgacaagatttttcttcagtcttatgttacacatgtattgccta

SEQ ID NO: 112796 - DNA, 385 bp, Arabidopsis thaliana columbia
gcggccaattcataggaaaggcattacattcaaccttacactccatcaaaagagggttctccacattctagtctctctcccttactctctccctaccaatcttccataaaccgaaacattaaaataacaaaaaaaggatataaaaatatcatcttcgtttaaattaacatattcttttccatttctcgttctcatactccctaaaaacttcaaatactaaaccaaaacagtatagcaatataaaacgaagaaaactcaaaagtaaaacataaattctaaatcaagctttccccttttggtctcaactctgaagtacacaaatgaaataaacataagactgaatgactgatacacaatatttctatttattatttcttttaccatg

SEQ ID NO: 112797 - DNA, 338 bp, Arabidopsis thaliana columbia
  unsure (1)..(338): unsure at all n locations
gcgaggatttgatgaatcatcagatagcgattaaagctcctcctctgnagggggggtcttcatcgtctgttgcggcgcttgatcagctaccgacaagatattcttgtccagatactgttgatgatactgcccaaagatgccgggaaatagcgccttacctgctacacctaaaatagtgtagctagtagcgaatcaccataattcaacgatttccagttctctcaacacccatgagactacattgattctcactgatacaatttgcgttctgaacatgctctccctattacatatagcccatcacgagaattctccgccatacacatttataatcatag

SEQ ID NO: 112798 - DNA, 202 bp, Arabidopsis thaliana columbia
  unsure (1)..(202): unsure at all n locations
ttcccgggtgcgatcccacagcgtgccgagttatatacaccatctctagtattcatactccatccgaattcatgaagaatggagaggaagatgatgtagagtgaaggcgagcgctgagttatagatccgtcacaatcatctanntcttctcaccaggaaagagtcagtctcttttcaaagttagaattattgccccttcaag

SEQ ID NO: 112799 - DNA, 359 bp, Arabidopsis thaliana columbia
ccaaattttgattcttatttgtccgataaaaataaattaatttcggtggtcatgccccttaaaaatagaggagggcatatgagaagtagtacatggattacgaaacgtaataataagagaagactcaagataaaattacttaattaattagaggttagagcagctaaactacaacaacaaataaaattttcagccattatcaattaatgaccatatataaatatacctgatacattatcatgatgttgaagttttttttttctttttgaatatcttgaagtttaatcccaaaagcccaatatatcccaaaggcggaacccacaccagattaaaatcatctttttttgagaaaagatccc

SEQ ID NO: 112800 - DNA, 334 bp, Arabidopsis thaliana columbia
  unsure (1)..(334): unsure at all n locations
gaattaatgcggggttccacccatgcgtgctaaaacctacatatcaagtctttatccatgcactggaaaaccaaggagagtttacccctaccagtgatcttgataattangagaaccttaaaacaacattatcagtatattcaaacactttgcatcatttcatgtacatagctccaaatgatcatactgatagaagataataccctcatgatactgagcctgcacatgacacacaaacttttctaagtacatgagattctgttttaaaaacaatgatcggatttaagttactagactcacatttgatttcttcaagcataaagaaagtttcttg

SEQ ID NO: 112801 - DNA, 255 bp, Arabidopsis thaliana columbia
cgcgacgtcgaattcgggtcgacccacctcgtacaaaccgagctctaaaaaggagtctgcaacgactacggctcaagaagacaaaattggggaaaaaaaagaaaagattttgagatccatagaaaaaggagagcttaggtttggtccttactaatacatgatgttcaacttaatcaagactaatagctgccctaacgtataaatttatcatttttttgccgctttttatgttttccttttacttaactttttact

SEQ ID NO: 112802 - DNA, 331 bp, Arabidopsis thaliana columbia
gattagtttccgagaagttttcctagagattggcctggtaatcgcatggaagtttttcaaacactaagagcttgaataggtttgacttgtgacagatgctatatagactaagtagcttgtggactacatcgtttttatgtttatcattcacgacataaattttagatatgtactatatatgcaagaaaaaaaaaatcttaagaaaaaaaaactaaaataaataaatatatatgaaatgcatcgtattgttgttcataccatataattttcaaatagattaagtaaagaagagaatcatgttatcccaaacctaactttttcttaaagccca

SEQ ID NO: 112803 - DNA, 381 bp, Arabidopsis thaliana columbia
cttttgagttatggggttatggacttttggggttagaaatgattgatggtggttgtgaaaaagattgttgatgtgtgggcaggtattgacttcttggagtttagagcttcagagattgctgctgcagttgctctttctgtttctggagaacactttgacaaattctccttctcttcttccttctcaagccttgaaaaggtaagagaagtcaccaaaagtctccttcatttacaaaagtagtggttcaatagattgtcaaaaatatggaaaatcatgagacatagatataggcatacattaatgcacacattgtcttttaatgtcccctctttgaaatccctttttattcgaaaaactagtttgtgtgtagaccaaaaagaa

SEQ ID NO: 112804 - DNA, 341 bp, Arabidopsis thaliana columbia
gcgatctccttcagtaacaataacaagtaagcgtgtgagaaaaccctacaaatgggatcaaagctacagtagtagcagattgcaaaaccataattaagagatacacgtttcataagaatctgcatccgaatggaatcaaaactatgagctcctggatttcttctaagcaatcataggttcccagaaatggcaaacctaataccacaacaaaaagagagaaagagctcaggttgaacatacataccagtttcagctgaaaaaggcctgacccatctttgcagggttgaagaaactaaactcgccgacctcgagatgcccgagttccctgctagtgggataca

SEQ ID NO: 112805 - DNA, 382 bp, Arabidopsis thaliana columbia
cacgcgcagctcttgaaagtctcttgtgcaaagccctacaaggtgaagaggagaaaagtgttatgctgaaactgagaaagtttggtcaaaacaatcatccggattcttcttctgatgtgtgtgttctcgttaactcctgcacgagtcgggattatactgaaaatatcatcggtgtctgcttcgttggtcaagacatcactagtgagaaagcaataacagatagattcatcagattgcaaggagattacaagactattgttcaaagcttaaatccgttgattccaccgatatttgcttcagatgaaaatgcttgttgttctgagtggaacgcagcaatggaaaagcttacgggatggtcaaaacacgaggtgattgggaaaat

SEQ ID NO: 112806 - DNA, 297 bp, Arabidopsis thaliana columbia
atcaaaataaagaaaagttataattaatttggaatacaacaaaaaaaaattacaattatttaagcaaatttttatatttaaaagtatttaaaattgactagattttttgttgagtaaccttatattttcatttgatcaaatcaatttaacatcaaatatcatccatataacttctcacttactttataccatacgtataattgaatttacttttcatatttgtttttgtctagcttcatgtatgcatctcaatattaacaacagtggttatcatattattatttcttttgtctaaaa

SEQ ID NO: 112807 - DNA, 383 bp, Arabidopsis thaliana columbia
gcgggttgaagaaagaattggcgtaccagtaatgatcacaaatcacaagtggctgagctttgttgccgacacgtaacccaaaactctcacccaacaccgaccctctttttcatgatgtttacaaggagaatgatacgactcttctttgcttttagataacatcaccattacaaattcgtcttaattatcgtatatatattattgacacacaaagagagagatatgtgtaagagactaatttggcgttgcccaccaacctaacttcccttctacttcatcaacaactcgtgtccactttctcatactaaccttggttcaagattataattataaacacgcctcccgcgtgaatagacaacgcaaacatcataaaaacatcataa

SEQ ID NO: 112808 - DNA, 219 bp, Arabidopsis thaliana columbia
  unsure (1)..(219): unsure at all n locations
accaccttcttcctaaggcagatttcttagcattttgaaggctcacanactctnncctcacaacaaacatacctactcttcctctgatatacacattctcttcacaacaattctcatcatcatcttcatcaccataattaaccaaagtcccctaacctaaccatgacatcacttgtgaaaaaacaataacaaatacttacaaaataccacgaacttatt

SEQ ID NO: 112809 - DNA, 383 bp, Arabidopsis thaliana columbia
gggctgctaaatttggaactaatcaatcgtgctgggggcaagatatggggggccatgaagatctctctctttttggtttataaaagtcatactttttgttgtcaatttgaacaaaggaccaacggtgggatctgatcatgtttgatgtttctgacaaaaaattatattcgaaatagatttgattttgcctttctttctcatttcttatgttattgctaacgatcggttcaaatttatttcatttcacatcccccatgcgcaagagatatgcaatcatgcgattgagtataatctattttcccgttttcataatatttaattagaacaggctcacaaaagagctattgagtctcttttttttttttttgttaaccatgatcttt

SEQ ID NO: 112810 - DNA, 379 bp, Arabidopsis thaliana columbia
gataaacaaaaatcaaagacactgtaagatgactcccagtttcaagcttgcctaaaaggcaatgataaatataaaatataaaaattgggattatttcatagcaaggcgatccttttaagacaataacgtttataagtatagtcatccctaacctagcaatatgaagaatcaaagaccaaaaaagaaaaaatgctttgtttaaggtccaggctcttgacaccaaaagcaaatattgaagtacgtcaaatatagagaagtagacttgtaccttaacctcaaccgaaagtgttgggactttcttaaaaacatctcttaagctgcgccggacaaaaatgtccaatccctgtccttcacgtatcattggtttaccaattgaacc

SEQ ID NO: 112811 - DNA, 428 bp, Arabidopsis thaliana columbia
  unsure (1)..(428): unsure at all n locations
gccgataaataataatccacaccaagagttctgatatttagtagatagaaaatctttatgtgagtgtaatttaagagcatgtatccacgaacatcgatatatcagctctttagtgtcttaaccccttagttaaatttctctcaatcgatatttcaaagcatttctagtgtcatagtggatagaacaatttacatattnctcctctgcaggttcttcttcaacgactagggaacaacatatgtgtttttgaacatgcttttcattgtgtggacaagaaaaaaaacaaaatgtcatcgtatatacctcgtagaattcatcagagatcagtgccattttatgagcaaatggaacgcggtagttacaatcatatacacagtctgttaacgggttaccgagcacatagccctgaagatttattggacgattgc

SEQ ID NO: 112812 - DNA, 226 bp, Arabidopsis thaliana columbia
gcgatttcacctccattttcttcgatcaatgctagaaccagaacctacgctagctcgcaccttaaggaggtgatttaattttcacacgcaatagggaaaattttctccacttgagatctatatttgttggtgcaccaaccatggctgtcattgctctaaagtgaccatctgaagaagcagctgttgataatatctctgcgccaaggatcaatgcctgcaacagtga

SEQ ID NO: 112813 - DNA, 386 bp, Arabidopsis thaliana columbia
attttgcattttaaattattcacaactgcatttttttttgtcttaaccgggtcaagaaaatcgttgatgctttacctagaaagctaattgtctttgttacacatcaccatcgtgatcacattgatggtctttctgctatacaagagagcaatcctgatgctattctagtggcacatgctaaaactaggcatcgcattggtatcattcttctatattgttttccattcataaaatccaacttctaatgttcggatactctctgagtccaggtggttggtctggtaactataccccagtttctggaggagaaaacatctatgtcaacggtcaaaaactgaccgtcatttttgctccggtaccatccagctctttaaatccttgatagc

SEQ ID NO: 112814 - DNA, 376 bp, Arabidopsis thaliana columbia
gttgcgttttactgtttgtgtgtttattctgtatccccaaatcaggtgggtttctcatgtttcataaccataggagctgaacaaagagttatccagaaaacttgaagcgcagacgcaaaggttagagcttgtaacagcgcagaagatggccatagacaatgtttcaccagaaaagcagcagccggacactcatgttgttcaagagagaacaccgattgcagatgaaggcgatgaggtactctctcatgttctctgtgttcagagtttataaagttcaatctgagaaagaccacagtttaatgatatctctctctctctttaggtggtagaaagggttctaggatggatcatgaagatgttcccaggaggaccgtcg

SEQ ID NO: 112815 - DNA, 389 bp, Arabidopsis thaliana columbia
gcaatagacaaatgtatcatttaacttttcaatacagaaacacatgggagaagaccaagatgtgcgttgggacattaaacgaggactcgataggataaaaaacctcaccttcaggtgcaagataaatccttccgagttctccatattgagcgagaatatggcgaagtctaacgtgatccatgtgtggtgggatacgacttaagtagcaaacacctctattgtcagctttagaagcttccttaagcaatttatctttcaacttctttttccttctatcagccttttgactcttcattggttccttggactccttctcctcggatattccattcgtaagctcgtgagattcctcactctgcatcttcttcagcagctgctgaatccatcac

SEQ ID NO: 112816 - DNA, 329 bp, Arabidopsis thaliana columbia
gaaaaattgatttttattttcctctcgcttggttggtgcatgcacgaggaaggtgttttatcttttttttttttctctcaaaaaccgacttgacattgtatctatcggagtgttgtaaattatgcaacctcttttgataaagacgagactctttttcatcgcaacaatgacatatcctaattcttagaaatccttatttggctgctatagaagaacaacatatttttttctttttccaccagccattctcccatctactcgttggtgcaatattcacatggaaaacagttggatttaaaggagattacaaaacttaattcataaaatcg

SEQ ID NO: 112817 - DNA, 379 bp, Arabidopsis thaliana columbia
gcgaaaacgtgaaagtcggaagctcctttgcttctcttggaaacaagtgcggagatgcttgctccatggttgaagctgagctcagtcgtttcttcgccggtcaatgtttcaactccaccgccgtttgatgcagtgcatggtaaggacttgtgggcgttcgcacaggataatctgtgccacagccagctgatcaacgaggccatggcttgtgatgcaaggcgcgtggtgccacgtgtagctggagcttgtcaaggcttgtatgacggcgtggctacggtggttgacgtaggaggaggtaccggagagacgatgggaatacttgtaaaggagtttccttggatcaaaggatttaactttgaccttcctcatgttattgaag

SEQ ID NO: 112818 - DNA, 219 bp, Arabidopsis thaliana columbia
  unsure (1)..(219): unsure at all n locations
gncgcgatatgaagagtttgtgaggataatgagagattcctaaagaggaataggtgtagtggtactttggagtagatgaggaaggttcttgtagttaggtagcttaggaatagatgagtatatatttatagagagaagtttcttttaataggtagttagaagatagaatagattttagattagtgagggatatagagaaagagattcttctagttagat

SEQ ID NO: 112819 - DNA, 383 bp, Arabidopsis thaliana columbia
gagaactcggtggcgctgggtcttttgatgcagaagaatgccactgcaagaggcaataatgagataaggatggtgaaaatatactctcggataaaatcgaagagcatactcgggatcagctacaatctgtatgagaagcttgcaggagttaaggacgaggacaaaaagacaaagatggtgagagaagtgaagccagacaaagaattagatgatatcagagagatacttatgggaaggcctggacttcttgttcttgacgaggcacacacacctcggaaccagagaagttgtatatggaaaacactatccaaagtggaaacacagaaacgaatcttgctctctggaactcctttccagaacaacttcctggagctgtgcaatgt

SEQ ID NO: 112820 - DNA, 384 bp, Arabidopsis thaliana columbia
  unsure (1)..(384): unsure at all n locations
cacatccaatcacaacctcatcatatatctcccgctaatcttgggaagttgatctttttttttttagcttattatcccctngactttgatctcccatcagttcatcttcttcttcttcttctgatcaaccatggctgctgctataagtgctgcaatctctttaccttcctccaagtcatcctctctccccaccaaaatctcctctgtatcccctcaaaggattttcctcaagaagagcacagtgtgttacacaagagttgtgtcagtgaaagctcaagtgacaactgatactaccgaggcaccaccagttaaagtagtcaaggagtctaagaaacaggaagaaggaattgttgtcaacaaattcaaacctaagaacccttacac

SEQ ID NO: 112821 - DNA, 390 bp, Arabidopsis thaliana columbia
gtttgtttgtacacactgagtgattaccagagcgattcatgtagttgggactggtgacataacataaagagaagaaaagataatccttcattagaaaataaagatccaatcagagtcaaagagatgagtttaagaaacattctacagtaagaagtccgacacccttaaaagactaaaccagatagaaacctaaaactgactccaataacaacttcaacaccataagaagctgggaagcgctatgtagctcaatcaattgtaactttccttgatggcttgggggtcctgtcagataatatcccactaggaaccgtctcttccatcacctttgggactgtgaaattgaaatctccaagcagtgcatacttgtaatcctgattggcatcgatg

SEQ ID NO: 112822 - DNA, 471 bp, Arabidopsis thaliana columbia
  unsure (1)..(471): unsure at all n locations
cggaattncccgggtgcgacgccatcgcgtgccagagtgtattttcactagatgcgccataatctatttttagaggacaaaggannnactctctcatggtagtcnncgttctctcttttctggtccgccncctctctccgagcgatagggttgttaggctatgagacccaacagcatccatatagtgaatcgagatgattctccgagcgccggatgacccggaaagaaaagaagaaaagagtttgatcccgaagtgcaccataccaccgttcaaagatcaggagatatatagggcgagcgattcctatagcactagttgggttaaagaagtcctttgaagatcaatagagttaccgtcgtcaagagacattatcagccgtcgcgagctttggcccatcgctgccgtgtatgttagataagctggttcctttgtgcctctttattagggccgcccaagagaacaacttttct

SEQ ID NO: 112823 - DNA, 391 bp, Arabidopsis thaliana columbia
  unsure (1)..(391): unsure at all n locations
gccgccacgccgtccggtcaccgtaggctgaaagatagagagagattgagaaggaggagagagggtagagagagtcccaagataatctaaccatatnctccattttcntctttactgttttnttctttagcttcttcctncctttttatacctacccgtgtgtgctcaattcgtgtaacaatttcttattggagcgtgttattcaagcataagttattttaggattttttttttgtcaatctctaaacacaattgtaaatgtatcctactttcgtatgtcataagtatatatgcaatgaaattcctaacaactaaactgtcttttgttagtagaattttatacaagtattatactattatgtgtgtttgatatgtttacaaaacactttac

SEQ ID NO: 112824 - DNA, 374 bp, Arabidopsis thaliana columbia
ctacgctatataattcatatttaaatctggtagactatctgaagaagttgcacacaaacaaaataaatgataccaaaacggttgatgtcaataaaataacaagttatacaagaaatggttgttgctaccaaaatagaaattatgtaataatatattttgcagatagatattgaaaaagaaccttaacaaagctaatacttggaaaaggtacattttatttctatcctaataatataattatttagtaaataactaatcaacttggttaaactaaaataaacccaaagttgaattggtcagcatttgacctatagtaaacaccaccacttatacactctgaaactatatattcttaatgaagaccaaagactttc

SEQ ID NO: 112825 - DNA, 373 bp, Arabidopsis thaliana columbia
cctacatgttatttgcataagcaaaaagaaaaaaaaaacaggcacatggtaagtttttcagcaaatcacgttcccctaattcattgttcagaatatttctccttttctgagtttatagatattatttaaaatttataaatatttttaattatacatattgtaaagcctagacatcctccatacaaaattatagttaaaaaatagaaacaaccagaaaatgaagctatatgcctatatatgatgaggatcatataagaagacaatcctccataaggctaacaatagtgtctctgagggtttcttctataggagtagtgaactcaattcccaaactcttcactttctccacacacactttgtatgccatttcatg

SEQ ID NO: 112826 - DNA, 371 bp, Arabidopsis thaliana columbia
cggacgcgtgggtaaaaattcaagataataagacaattgaaataaatatgttactatactatttgaagatgatagagacgggatatacgaggccgcatggaagaaaggaatagaaacatgaaaaattgatttatttaaacgatgattagaagcttttttcaatacatgcatatgaaattaatgtgttctttccaaaatgcgcacaaataaatttggacagatgcttcttgggaaatagatatcaaaatactaataacataaataaatatgagttttttcgattttggaaacggacccatttgtcgaaaacttgaaatctaatccagagaatccgacagaaagagaagcatccggatccataaaattttagc

SEQ ID NO: 112827 - DNA, 319 bp, Arabidopsis thaliana columbia
  unsure (1)..(319): unsure at all n locations
gcggccttgntgaccatcggcattatagtggtcggagtcttagatccggcgggaaccgagaattacggcgttgtggccgcctccaaggaacgcgaaccgtaaacggagggttccggtttccgtccatagacgctcttcgacgacgcaccaaaccaactacaactctaccggaaaactagccactccgacacaccggatcgacggtgtcggttccataccaagcatcccaacacactggggcttaacccctttcttctatgaccggatcttcgccgatttccttaagccgttactctccaaaccgggcggatggatgcca

SEQ ID NO: 112828 - DNA, 384 bp, Arabidopsis thaliana columbia
  unsure (1)..(384): unsure at all n locations
cgaaatnccgggtccgaccaacccttccgccctatttgccattcgacattttagattcaagagtcttaaatccggcgggaccggtcaataatgggtgtgtgggcaccataaaggaacccgaaccgtaaacatagaatgcccattgccctccatatacgctgtggcgacacgcaccataccaactacaactgtaacggaaaactattcactcatacacatctgatcgacggagatgagtccatacaaagcattccaacatactgcagcttaaccgatttattatatgaccggagctaaggcgattgaattactccgttactcttcaaaccggacggatggataacaactgcgacagatccaaagatcagagctcaaacaaaccga

SEQ ID NO: 112829 - DNA, 368 bp, Arabidopsis thaliana columbia
tgcatttgtctcaacccaaatgtttgaattttcatactgtatatttaaagtgcataattcaatttttttatttatttattaataatattgtaaaccacaaacacatgtcttgggttttttaggtttttcttttcatggttttgtttgaattatgcaatttaaacatagaatttaatacgttaattaattttttgaatcaaactaaaaccgaaccaaattaaaaccaaaccaaatcaaaccaaaccaaattaaaactgacccaaacactaaccaaaacaaactagttacggttgaatatggttagaattttacaaaatccaaataaactgaactgaaccgaacccaaaccgaacctgaagttaaaccga

SEQ ID NO: 112830 - DNA, 378 bp, Arabidopsis thaliana columbia
tattgatacaaatatgtgaattttaatcatttagaaagtggggcaaaggttaaatcaataataaccgatgctaattacagatttagcatcagttgcactaactgatataattgtttattcaatttgtttacataccacatatctcccacagaagaaaaaaaaacctccataattttttatatatatagtgattctggttttagatggtgtccaaaaagtgtaaagttactatcccaactaaatttaagtgttcgcttaatattaattaataaagatatttgtttcataaaaactaatttagtattattttataagttattataattaatataaacacttacaattatttattataaatgttgcaaatattaacgttat

SEQ ID NO: 112831 - DNA, 376 bp, Arabidopsis thaliana columbia
aagaaaccaatgatatcggtttgttaactatgactctctaagggataggattatagtagctagtatacactcgagcataatcttaaattggtaaatattagtattaactaattgctatataaaatagatttgactggtgatattaaaaattagatatacttgggagtaacgaaatcgtaataaatgcatgttttctcattaaacaagataattaaaattgaatttgttttcattttatagttatgatagaatggttaaaaaattaataatttatttctaatgatgaaattgtaatatatgtctgctttggcaattcattcgttttatattaggtattgtttaagaagttaaaattttgttttatcataagtgtcgt

SEQ ID NO: 112832 - DNA, 374 bp, Arabidopsis thaliana columbia
ctgaacgacttcaaaactctttttatggtgaactattggatgcaggtgccaccgcttgttccagggcatcagtatgataagcttccaagttattacatcttcgcaggctttgtttgtgtacctcttacacagtcatacattgacagtactttgatttgcaattgtgcaattaaaaatatgcctgaaaaggctgctgaacaacttgtcataatttctcaggttcgttatttgaactacttagataaaaatatttggatgtttggttgtcatgaaggcattagacttactggatttgtcttcttggtgtaggtgttagctgacgacatcaatgcaggatacactgatttcaagaatttgaaggtaattaatgcatt

SEQ ID NO: 112833 - DNA, 307 bp, Arabidopsis thaliana columbia
gatgaagtccttgatggggaataagaattttaatccaaaaataaccaaggtggaattggaagttgccaaggaggacaaaaaggcggtggtggtggtggccaatgaggacaaaaaggctgtggtggtggtggtcaaagaggacaaaacggtggcggtggtggccaaggaggacaaaagggcggtggctgtggtggacaagggtgacagaaaggtggtggtggtggctgacaatgaggacagaaagttgtcggatgccaatgtggacataatggtggcggatgccaacgttgacataagtgcatttgtg

SEQ ID NO: 112834 - DNA, 371 bp, Arabidopsis thaliana columbia
gcgttttaaagtaaggatcacatgtgaatcgagaataactagatgcgtttagtatgggcttaaattccacggcccacaatggattagatatacaaaataaagctcacaagtcacaaattcatccatcaatgacactcctaacttcctatgtgacctttttagtttttagcatttgagtttgagcaacgtcctcgacatacttgagctgcccactaatactatcccttcagacaaaatcttgatgaaatctgcaataagcgttgtcgcaaaaaacataaaaacaatcgttaattccaacagatggaagtcattttctcagatgaacattagaaaatcacatttttgtaaagtactgattcaattttttctac

SEQ ID NO: 112835 - DNA, 367 bp, Arabidopsis thaliana columbia
ataatcttctcggttcagggaaacctattacattggtcacaggatttatgtctagtctatgaaacaatatgctctaaataaataaaaagtagttgtttttctggaactttcctatgtcgacatttcactttatattttccatctattcagttcttgagttattttttcatagttggaaaccctgattgagcaattttcaagcaaagtcgtcaagagcccttgtcgtattttctttagtacttactaaaaattaaaaacataaggtggtaatgaacaagaacaatgaaatcaggaacatatatagagagattaagaaacatcaagaagacaagaacgtaggaacatatagaaaataagaaaaagcaag

SEQ ID NO: 112836 - DNA, 363 bp, Arabidopsis thaliana columbia
gtagattggcacaggatgcccacaatcaagctggtattgcccatagtggtggtttaggacctttattgaagcttctcgattcaagaaatggatcattgcaacacaatgctgcatttgctctttatggccttgccgataatgaggataatgtgtcagattttatcagggtgggaggtatccaaaagctacaggatggagagtttattgttcaagcaactaaagattgtgtttccaaaacactaaagagattggaggagaagattcatggaagagttctgagacatctgttgtacctaatgcgcatttcagagaagtctatccaaagacgagttgctcttgcccttgctcatctctgttcacccg

SEQ ID NO: 112837 - DNA, 405 bp, Arabidopsis thaliana columbia
  unsure (1)..(405): unsure at all n locations
aatnnncagaagcccggggcgttccacgcgtgcgctctctctctttttttctgcataagaaaacaagctccccaagggcaccggtgcctttttaagtttattcgcacttctaaacctttctcaatcacgctggcgtaataaacggtatcgtttggtcatgaccaccaacaaagtcatagctatatgtcagtcaggaggagagtttgttactatcaaagatggatcgttgtcgtattctggcggcgatgcttttgcaattgacattgatcagaatacttcaatgactgatttcaagtctgagctcgctgaaaattttgggtttggtttggaggcaatgacccttaagtactttctccctggaaacaagaagacccttattaccatctctaaggacaaagatttcat

SEQ ID NO: 112838 - DNA, 307 bp, Arabidopsis thaliana columbia
  unsure (1)..(307): unsure at all n locations
gaaaatgaatacttcggtgctttcaattcttacacattgtatcaccagggccaggggccgatgaaatagctccggagattgngatcgctattagtagacctccgtcaacggttctttccaagattttctgcagacctacttgaacaacatcttgagctcactacatctcctttagagaccctccttctagtaaataccctggggaaaactcaaacctaagatcggtgggacctgctataactctctttgcatctgatgccatcacacctacacctatgcggatagtcacaaaggtcttactgagaat

SEQ ID NO: 112839 - DNA, 372 bp, Arabidopsis thaliana columbia
gcggagaaaaagaacttacatcgaaccagagagaaactttctttctggtggggaaattggaaaagataaaaagacgactttggtcgacacagcttgtccttcaggattcaccatggattatctccaaggttaatagattgagatataagagtgtcatgggatagagattttggatgctactttctaacgacgtcgttttaggtactctgtttatttctatcctgtgaagcccaaaaacggcctaatatttacacattagggctttagaagaaaacgctagggttttaaaaattgggttttttctttctccttttcggcttgtcaattttgattttgggttacaaacttactgatctagataaaacccagacc

SEQ ID NO: 112840 - DNA, 375 bp, Arabidopsis thaliana columbia
gcgcgaagtctgtgtcatactttatagtcgtgacggagaactcatcaagacggggccggaggataaatccaaggttcgagacatggcagagaggtttagcaaactaaacgatagagagcgacgcaagaaaagaacaaacctttctctgtttctacgtaagaagaacctcgacgacaataaattgtctgagaaagccttagagatgaatgattcattagaaagtggtctacgggttctacaagataagcttctgttactagaacccgagaaaaaccagaccgagttaggtcagagccccgtcatcaacaatggacagaaccattggtgaatattggtgtgtcaaatacagagcaagacctatcgacgtcatcattg

SEQ ID NO: 112841 - DNA, 375 bp, Arabidopsis thaliana columbia
cgagattccggaagcaaaacattcctaaatttcgccaagtgagccgccgtgggagaagagaagtctctgcttcagttccgtagttttccttcactcaagacctctgatttcgctctcaccgaagaaccttcatggaggctggagaacaacgtgtcgtcgaatcgccggagaggaaacaagagaagcggtggcgtttttaccaattttgcgtccctttccgtagcgattaggagagatcggagagaatctacatttaacggtcgtaatggcggcggaggcggagcgttcgcatcggtttccgtggtgattccgaaggaagaggatgaattcgcgcctacctcggcccagctgttgaaaaaccccattgctttactg

SEQ ID NO: 112842 - DNA, 377 bp, Arabidopsis thaliana columbia
ggatgagaacagagagattgtctaaggtgttagagaagaagacgaaggagttggaggagattcggggagcgagaggttctagtccgacgtctaatatggttgaaccggagttgttgtttttgagagagagtgtgacgcaagaaacagaaaaacatgagagattgataagagagttaaacgacgccgtatcgatgagtttgcaagagtgtatggttcctgtctttgaggctttgggagatttttgttttgctaattttaaagcatatcagaacattgtaatcgttaccacataaactctatgattgcgtcaatcataaaaataaataatgtataggaaattaaataaagaatttcatcagatttcgtatattattata

SEQ ID NO: 112843 - DNA, 377 bp, Arabidopsis thaliana columbia
ggttcttgtgctgcagggttttttcaatgaacatgagcaataaacgtaagcagcaaccttcgtatattgctgatcatttcagcagtttggatcaggtgataacttctctgagagaagctggacttgaatcttcaaatctgattctaggaattgactttaccaagagcaatgagtggacagggagatattcattcaatagaaaaagccttcatgccattggtaaaagacagaatccatatgagaaagcaatatcgattattggtcgtactttgtctccctttgatgaagatgatcttataccttgtttcggttttggcgatgtaacaacgcgagatcaatatgtattcagcttttatcccgagaacaaaagctgcgac

SEQ ID NO: 112844 - DNA, 373 bp, Arabidopsis thaliana columbia
atcggaagccaccctttttttttattttacttcgaatattgggggcggtgcaataattcgtggcaatctcacaagccaagaatttaacagctatacaaaagtagttgttaatgcggcaggaccgttctgtgattccattaggaaaatgattgatgaagatacaaaaccaatgatttgtccaagcagcggagtacacatagtgctgcctgattactattctcctgaacgcatggggtagatagtccctaaaactaaagatggccaactcgtgtttatattaccgatgttcgcaagaacagtagcaggcactacagactctaacacttgaatcacttcactttcagaacctcatgaagatcatattcaatttata

SEQ ID NO: 112845 - DNA, 372 bp, Arabidopsis thaliana columbia
tctaaaacaaaggcaacgctcgggaactcagcttgtccaaggggtaagaaagcaggctgatgatgccaggtcttctactctgtctatgccatatcgagtgcagcgaatagaagagtttgtgaaagaactcgattcaggcgatctgaaactccgtgttcgggttcttgagtcggaaagagcagcccggaaagcgacaatactgcagatggcgacgatgtatacagttcttggaggaactctacttaatattggggttacatttagcaaccaaggaagtcagcttgttgccaatggatccttcattggagcagggatattcatgttattggtactgaggtctatgcaaagggtaaataagcttgataaatttga

SEQ ID NO: 112846 - DNA, 317 bp, Arabidopsis thaliana columbia
gacgatccatggacgtgagtttgctttctatggctatcgaccgaaaggggagataaaatctggtgaggcattcatctttcatttaagcgtttttagcatgtattgaattctgcaacatggtgaacaggatatatattcaaaacaagacgtcaaaaacttgaagtccagtaagagtctctaaagttcaattaagaatcaaaacatatgtaataaaaagggatctaaaatgttaccgatatctagctctattctaatttgtctattatttgtacgtgcatgcatctgcattatatacttgatgggacatcggacataac

SEQ ID NO: 112847 - DNA, 378 bp, Arabidopsis thaliana columbia
gagattagagagatgccattttttttttttaatgggcaaactaaggtgggggggataccataagaatataattgggcattttagtataatggtgatgaagtcgaaagattgtgcagtaaaatgatagagaaattaagcaaattaattgatctcaaccaaaaaaatttaacattcaaaattggggaaattctctaaataccacatttttgagttgttcttccaaaactctacttaaatggaggaaatacaaactttaaattgaaaataggaaacttaatataatattttaattttatttgtaatttcttttgattgaataaaaaatattttacataaaaatgtgtggtattattagaaaaataaactaattatcgtatt

SEQ ID NO: 112848 - DNA, 379 bp, Arabidopsis thaliana columbia
atcaccatcgacatatcttataaccgcaaccaaaaaaaaagtacttatcgtgaaaaactaatctaaagagactaagcttcttttgagatggcaccaacggagatgaacatcgaaagaaaggtagaggctgacgtggcggtgattcctaatgatggaaaaagggcttacgtcactttcctagctggtaaccaagactattggatgggtgtggttggtttagccaagggacttcgtaaggtgaaagcagcttatcctcttgttgaggctatgctcccagacataccgaaagaacaccgtcaaatcttggtggctcaaggatgtatcatccgggagattgaacgcgtttatccgttcgaaaaccaagctggttatgctatgg

SEQ ID NO: 112849 - DNA, 366 bp, Arabidopsis thaliana columbia
ctcactactcttactgtaatcccttagatcttcttttcaaatggcaatggcgtccgttgatgttgagtatcgctgcttccgcggaggtctagcatgggccactgatgacagagctcttgagactgccttcgctcaatacggcgacgttattgattccaagatcattaacgatcgtgagactggaagatcaaggggattcggattcgtcaccttcaaggatgagaaagccatgcaggatgcgattgagggaatgaacggacaagatcttgatggacgtagcatcactgttaacgaggctcattcacaacgaagctgtagccgcggaggccaccgtggaggtggtggcggtggatacctaatcagatg

SEQ ID NO: 112850 - DNA, 372 bp, Arabidopsis thaliana columbia
gcgcttatacttttgtttttcctgatcaatgagtatactatctacggtcacggccgagtccaagaccatcttcgcgaatagtggttgttgctgatgaccattgcaatttgtgttgtcattggaggaatttccaccgtcctctggcatgtaaacgctttcgacacaatcttctccatataactcggtgaagagatgaatcacctcagcatgtgacacgggaaaaccacgagaaaacgttaggaataccgtccgttctttatcagtcgcgacatggttagcgttccagccccaaagaccatgaggaaaaagaaatgaatttgtgtttggaagattatccctactagcaacgatattaggcaatacgttgatgct

SEQ ID NO: 112851 - DNA, 115 bp, Arabidopsis thaliana columbia
cgcaacccttccgcaggtaacaaccttatacctgttagcttttaacgagggaccaagaccggggctgggaaaagaacctcgcagctggacttgaaaagcttcatgaacactaatc

SEQ ID NO: 112852 - DNA, 370 bp, Arabidopsis thaliana columbia
ttgagttcgaatccacgcaaggaaccaaatcatctccagcggggataggggtttctttctttttctgatccttaatcgtcgcttgaggttttggttttctctttatgggaatttctaggggtttctaaattttccctgtttctttggaatctacaagttgtttcgttcccaatataatgtcagattgagaaattcgaatcaaacccatttcccaatttgttgtttttcattcaaagatcgaaactttgtgtttattgactgcattttcaaagatgtgtatttcaaaagaagacgaagaagatccatcaagaaatcgaaggaatcaatcaccattatcgcttcctcaaactctgaaacatttccaaaaaga

SEQ ID NO: 112853 - DNA, 375 bp, Arabidopsis thaliana columbia
gcggtttaatataaataaaacagtctctgtgtttgagacaactatgcgagtgcttggggggttactatctgctcatctgattgcaagtgattatgcaacgggcatgagaattccatcttacaacaatgaattactagttttggctgagaatttggcacggagaatgcttcctgcatttgatacaccgactggaatcccatttggatctgtgaatttgatgtacggtgttgacaaacatgaaagcaagataacatcaactgccggtggtggtactttgtctttagagtttggcgtgcttagtcgtttaacaaatgatcctgttttcgaacaagttgcaaagaatgcggtgaggggactatgggcacgtcgttcaaa

SEQ ID NO: 112854 - DNA, 373 bp, Arabidopsis thaliana columbia
gcggaatatgaatgttaatggtggtttgtttcatggtatccactgttctccgcacactgttcttgaagaacgtggttgttttcgtttacaaggagttgaaacagacaatgaaccaggaaggtgccgaagaacagatgggaagaagtggagatgcagcaaagatgttttgtctggtcagaagtactgcgataagcacatgcatagaggtatgaagaagaagcatccagttgatactactaactcacatgagaatgccgggtttagcccgttaaccgtggaaacagctgttagatcggttgtgccttgcaaagatggagatgaccagaagcattctgtttcagtcatgggaattacactgccccgagtttctgat

SEQ ID NO: 112855 - DNA, 391 bp, Arabidopsis thaliana columbia
cgccccacccacccacgcgttcggtttaatatcaaatagaaacagattttgatactgtgtctacaaggggcatgggtcaatttttttatttatttattaataatattgtaaaccacaaacacatgtcttgggttttttaggtttttcttttcatggttttgtttgaattatgcaatttaaacatagaatttaatacgttaattaattttttgaatcaaactaaaaccgaaccaaattaaaaccaaaccaaatcaaaccaaaccaaattaaaactgacccaaacactaaccaaaacaaactagttacggttgaatatggttagaattttacaaaatccaaataaactgaactgaaccgaacccaaaccgaacctgaagttaaaccgaaatgt

SEQ ID NO: 112856 - DNA, 373 bp, Arabidopsis thaliana columbia
actgagtcgaacaccaccgagaaacccaacattataaacaacataagaagatgatgcaatccaatgatatgtgctcttaggatttccacaagtgtcccgggaaggctctcgtttagtgcaagtaagaaccattggcctgtatcaggaagtggaggtgtttccctatcaaagataaaaccatttatcactgaattgcataaccattccaaaaacagattagtgtaatttagttcaaagattctcaatgaatgttaagtacatgctaactcaaatcaacttaaaacaattttcaagattccaaatcaaaaccatgtactattcaaattgaagataccaagtaaagactatgagtctcactatcagatcaagtagc

SEQ ID NO: 112857 - DNA, 379 bp, Arabidopsis thaliana columbia
gcggataaactcaaatccatccatttctggagagtgagaagaggggaataggggaagattactgtttaagcgaaggaaccgagggaggaacaagcacaacaaaagacacgtcaacccatataaatgcttcaactgatgcaaatgctgccctaaggacaaggccattaagaggttcattgtgaggaacattgtggagcaggctgctattagagatgttcaggaagctagcgtctatgacggatacacattgcctaagctatatgcaaagacacaatactgtgtttcctgtgctataaacttatacgtggtgggagttcttaatcgcaaataaacgtaatattgtcccttatgccacgactaaaatttttgcagaatagct

SEQ ID NO: 112858 - DNA, 352 bp, Arabidopsis thaliana columbia
gcgaagttgcagaagcggtttgggatagcgaaaatggaagggaaagcatatggagggaactctgtggtatgtgaaggaaagttcttgatggctatgggaaaagaagagtgatcacgcctttgtttctttcttcttcatacgggccttgtggctgctaattagttgtcacatcctaagttgagtctcatttctatcttcaatttatgatgtttgtttgcacattatgattatattaaaaaagcaacttcagttttaataactagatgacccaaatatatattatagtttgaaatgagatgaaagacaattccaattcagcgcgagataccattacatatttggctggggaaag

SEQ ID NO: 112859 - DNA, 182 bp, Arabidopsis thaliana columbia
  unsure (1)..(182): unsure at all n locations
cacacacngaattccancgacatcaacccagcgaaaagaggggaanagcggaaaataaaggataagcaaaagaacanagcaacgcacaagcacaaccgaggacacgncaacccaancaganaccccaaccgcggcaaaagcgacccaaaggacaagaaacacaagaggcacaacgaaggaac

SEQ ID NO: 112860 - DNA, 185 bp, Arabidopsis thaliana columbia
gcgcgagctcctttctgcattgactttaatgaactatgggctgaataccgaggtcactccgtggcttggatgggccaacatgttctcggtatcgcaatgatcataactagaactacagaaatgaccatgtcccaaatcttaagggcgaaacagaccttatcagctgcgccttattgtacgatatc

SEQ ID NO: 112861 - DNA, 385 bp, Arabidopsis thaliana columbia
gcggacaaaaggtcgtcggcatcttttgcagaatcaaaaggctatagctgagggtcatgaggggctagccctaatagaatatctctaacgaaagcaccaccttggtaccctacacaatccctatttttgatgagaacgattacatttgtgaccgtcggttgcaaactttgtaccgtgaggaaagaggtgagactcgctgtgtagctctgagtgagaacaagcactacaaaacaccagacaaccaccacaaaccttgctaaattgctcactacattctcacctatatacacatgcacaagttttcactttatcattaacaatcataaaataagttgagatatctaaaaaatattgacaatgttattatgtgttgagataaaagcta

SEQ ID NO: 112862 - DNA, 382 bp, Arabidopsis thaliana columbia
atttcaaatttaggatatatacagtatgttctattgtatatgtattggactaatgcggtaaagctgttatagtgtgagaaggacgtaacgagaggtcttcgtggacctaataataataacgttttacggttttatccaaagaccaaaaagctactagatctacgattcaaaccaacacgcataaagatgaaaattaaattttaaaaacagatctataatcaacatgtcatgtttggttggtctatttttttcaagtttttgaacactcccaactttccctccactcctttagtttaccacaatacccaatctatctaaacatgtaaccaccaaactccaaataatttgcatggcatgtttgagtaatgtgatccatgaattt

SEQ ID NO: 112863 - DNA, 373 bp, Arabidopsis thaliana columbia
ctataacattgattgatgcctgttattccctacgcgcatgaggcatagcgggagctgtggcggaaagtggaatttcaaccaacagtctgtatagagcagacaagaggtcctccggctctgagaactattactagctctttacgctctcattaaggcctaacataccatgagctgctctttctatgaactgaagcgctggccaactctagcaagcgatataggacatgctgcaaatgaacctctttaatgattgacagacgaaagccggcaaacggctttgctggtggtggatatcgaatttagctacctcacgggtgcgttctgcaggagactccatcttgcacccgggagagagctaccatacccaagggat

SEQ ID NO: 112864 - DNA, 372 bp, Arabidopsis thaliana columbia
ataccttaagcatcttttccaagccccactctaaatatgggcataatgtataatattatagtggatttgttcaaccacaattacatgtaattattttccaaatttaaatccgaattttagatactaggttgaaaaaaccgaattttaatactcctttgggatgaagtacgatgtatttaaggctgctcattttctaactgaaataaatagttatcttatttttatgtagggactattaacaaaaaggctaaaaagagtttataagaagaaataggctaatcttttgataagaaaaatatacagtttctgattcaaggtttagaatttatatttgttggattagcttttaggcttctgagtttagttttaagg

SEQ ID NO: 112865 - DNA, 374 bp, Arabidopsis thaliana columbia
tattagtccatttgatgaagactgatgaatcgctgttctaggtcaatgggagcacaggataagcaaaaatatacctggataacacagagtatatcaggaatcttgttttgggactcatcaacaggacctgtgtttaaaagcagttaggaatagttctgaaaattaaacaggttgggaaaaggacaagctgcataccaagtaacacaaacaaatgatgagcaggagcatcagccagcagttgaagatcattaggagaattcttgtagtgagacgagacacatagcgccatcattctctgtaggatgcacttatatcagtctattgtcaaaataatgtacggatctcaatcaactacatttacctgtagaaacaat

SEQ ID NO: 112866 - DNA, 344 bp, Arabidopsis thaliana columbia
acctacctataccataaatgtatcctgtgtcaagcactacagaaccgggaacgggggcaatttataagatctatggtgtacctaccaaccgaacagcatctcgaatgtgctgttgcactacttagcattttgtctaacgaaaatgatgaaagcaagtgggccatcactgctaatggaggtatacctccactaagccaaattctatagactagaaacaccaaagccagggaagactcatcaactatccatatgaacttgcgcaatcatagcgaagatatacgtgcttgtgttgaatgtttctatgctgtccctgctctcttatggctactaaagaatggttgtgc

SEQ ID NO: 112867 - DNA, 364 bp, Arabidopsis thaliana columbia
  unsure (1)..(364): unsure at all n locations
tcgctgatgagtaaacctccgatttttactcccaaacaacctcnccaaaccagaatcagcgaactttaacagaccattctctccaatcaacaaattattcggcttcatatccctaacaaccacaccaaaaacaaaccatcaacacaatcaaaatcaaatctttataaacctaaacataacttcttacctgtgaagaacccatttcttatgacaataagctaaacccttcaaagtcatcaacatataagacttaatatcaccaggagataaaaagatattacgatcacgaatcactgcttctaaatctgtttgcatatactcaaaaactagatgcaaactttcatcgtgagggaaagcatcaatg

SEQ ID NO: 112868 - DNA, 384 bp, Arabidopsis thaliana columbia
tctgaacccagtatgacactatgtaagtacaatcattacgaacacaacggacctaagagcaagcaataacattaagagaaatgtacctgtaactccactgccttatgtggctgaccataccattcttcatattctgcaatattacgcaaccggaagtcctgaaaagcgtattttagatgggcatataactgaaagaaaaggaacaaaaaagacatttcttcaaggattaccgctgaaagatcaacgatttttaatgccgtaggcagttccttaatgatttcctgttgaaatacacactcatttccgttaagctaagaaaagctttaagaaattgaaaaggaagaatgaaaggaaatgaacctgagttgttccgtgaggtaaaca

SEQ ID NO: 112869 - DNA, 385 bp, Arabidopsis thaliana columbia
  unsure (1)..(385): unsure at all n locations
gcgtnntcnttcattaaacagaatataatttagttattatacataaccaggggcggacccgggttgtaggcaggtttggcaagtatcccatactaactcttttaaatattatacaagctactactaaacattgtaattcagttagctcaaatgatttttcagcaacaactgctccatactaacccgacttcaagtgcccaaattgtcatttttgtatatattactataattctatttaagaaatataacatgttttcgttttacaatttttctttaatttttttttgggttgttactttaaagtataaactaagatcctaaacgttcatattcaaactaaacgtacattagtttctatattcctcatcatgctatattccgaaag

SEQ ID NO: 112870 - DNA, 289 bp, Arabidopsis thaliana columbia
cttcctcttgtctcttcaatgcctctgtatcttccttaaaccctaaacaggaccccagtgcgccgacaccggtcaacctttctactacgccaccgtcccgtggtcatctcctgtaccgccgatggcaacaacatcaaagcccccatcgagacagccgtcaaaccttcttaccgtacccaggataacattcaagatgaggcttgtcgtaatcgctccaactccgtgaaaccatatttagcaaaatacatttcagttaatgcagcatctgaatccacggagtcttactctt

SEQ ID NO: 112871 - DNA, 396 bp, Arabidopsis thaliana columbia
  unsure (1)..(396): unsure at all n locations
accgacgcgtccgataacgaactataacttaaatgttaactatataagaacataantcccgggccgggggagaagtatgacgatgtaaggagaaaccaccaatgtaaataacactccgatcatggggacgccggggaaggattccggagacaattttggcgagagcagccgtgtactggccaagtagctcagcaaatatcactattgcaaacattgtttagaaaaactaatcataggaataatgtagagtatcaaaaagttcttgtggacaaaataatataggatctctgtatattcggatgggtgaatatttttgggtgatggatatttaagaaagtgagtagtagttataggatggatagggattataggcgatgtggccggtcacgtgggtgt

SEQ ID NO: 112872 - DNA, 385 bp, Arabidopsis thaliana columbia
caatgtctatgggatgctgatggcaagatcaacttacgaagggatggagctagctgataagaataagcgaccttttgtattgacaagggctggattcataggtagccagagatatgctgcgacttggacaggagataacctttcaaactgggagcatctacatatgtctatatccatggtccttcagctggggcttagtggtcagcccttatcagggccagatatcggtggctttgctggcaatgcaactccgcggctatttggacgttggatgggtgttggagctatgtttccattctgtcgtggccattccgaggctggcactgatgaccatgaaccatggtcctttggagaagagtgtgaggaagtctgtcgtgccgcattg

SEQ ID NO: 112873 - DNA, 383 bp, Arabidopsis thaliana columbia
gcgccttgaggtccgaaggtatgagttcatccctgaaagagagggtgagagggatttcaacagcgttagagagatggtagacgagaacacttttgcgatatttataatcaacccccacaatcccaatgggaactactacactgaggctcatcttaagcaggtatttacgtacgtattagtactcttggagaagtatatattcacatgattggctagatgatctagacttgagatcttttagtttgtgtttacgtttatattgacatggttttttctttaaattaaaagactacatctttgacttaattttataagaaatatatatttcaaacgttgtaaacgtaaccagcaaagcaatacacatttatttcgtttacaatttg

SEQ ID NO: 112874 - DNA, 373 bp, Arabidopsis thaliana columbia
agaaaacaaacaacattagactacctcttccaaaccaccacacatttgagtaacaaacataaagaaaactcgtaccttaaggatatcttcaacctcgtcccaaagggaaccccaaatacaactccttacaagcgaaagataagtaaacgtgtttggcttacaatccctttgagccatgtgctcatatactagcaatgcaactttcgattttcttgatttttcgcaagcgcttatcactagattatatgatgaagttgaaactgttaaacccgaaccttccatttcatacaaaagcttcacagctttctcccaataaccaagcttttggcatgacaccatagctgtgttgtacaaatattcatttagacaacac

SEQ ID NO: 112875 - DNA, 353 bp, Arabidopsis thaliana columbia
  unsure (1)..(353): unsure at all n locations
aaaacaacaagaaaaaanggcaataaccaacaaannaancagaacacnggggcnccnnagcgccatagcgggcgnccacngcnnanccnnccgngnggagancgacgagggcgagccaccacagcaaggagaacaagaagggccccgncgccgncccggnggnggcncnggcgagggangggaggaagagncgacgaancaaccanaccacnncaggaagcggagnnncagngangggnnccagncaaaggaaggnnnngngagagngcngccnaagnncacaaaacangcaccggcncncnnccgaggaancgagaaccacaganncncgnnggnggagaaggagccaacaa

SEQ ID NO: 112876 - DNA, 379 bp, Arabidopsis thaliana columbia
gtactataataccaccgagtaaagactcctaagatcgtttccattgggaaataaaatcagcaggtattttatgggtgcaaatggtttaatacgttgttgttggcttatttgaaagaatataagcgttgcatacttgcatgctaattacaagtcccccttaagaaatttctgtttcatttatttcggtacacatattcgatgagtttaagatatatttttcttaaaatataatatacctaatcaaaacctaacactaaactctacaaaagcattcactagaagtagtttcagtttgaaaccaaaaaaaaaaaaagtagtttgaaagatcaaacttgccctcgaaaatccaatacttttttcattgtaattaatgtgaaca

SEQ ID NO: 112877 - DNA, 378 bp, Arabidopsis thaliana columbia
tatcatggtctaaagttgaatgtatgatttagattttgcaggtgtgtaccattgtcaggggggttggtgatgatgtccaggaaaggttggtagacattaaaggcgacgagtctgaggcctgagtgtctattcatcagtaaccgggttgtgttctcaagtttagtattgaacatgatagcatcattgttcagtctctcaacacaacttttgtttcctgcaccgaaaagagtgatagctgcaggcaggcaacccatcggcggtagcgatatcactccgattctccttgctcctagttcatacagattctgttacaagtgacagtatgattcttgttcacacaaaaaagggtaaataactgatacgatttttttgtgtttc

SEQ ID NO: 112878 - DNA, 383 bp, Arabidopsis thaliana columbia
tggaattgtagagttgacatttacctaaagatgcattttggaatatctgaggatgagttgtagttaatcttcgaagggaggaattatagacggttcagaagacccaaaaatggctaaagtaaacttgtggattgtttcttgttaaataagcaagcttagaggctcctctacggcgggttttgctttttcccgaacctatcagtactgtacgtaatatatctgaaacaaacgtaaaacaaagtttttgatggttgagcaaagtttgctttatgtggtacttgtttttcgaaacctcaaaggctcaaaccattttatccgaaatatgtgaaatagcagatcatttaatttaaaacatttttttttggctaaccatgcttaatatc

SEQ ID NO: 112879 - DNA, 213 bp, Arabidopsis thaliana columbia
tacttgttcagtcaatgcttaattccaaagcatagagaaccacacttgctcacctcttgcaggctaccatatgccattaggacaccgaaatagctgacatgtcgacatagcaacacagttagcttaataaaaaagtcaaagggaatgaaacaagatatactaaagtgaaagagaacagttaacaagaagcacttccaacccgatattagattt

SEQ ID NO: 112880 - DNA, 336 bp, Arabidopsis thaliana columbia
atcaatatgatcatctacagaggtgaagaagaagcagaactttaccaaagaatgcatcggcaagacaattgttctccaagtactcatagacaagaagcagctgggttttctcaacacagcatccataaagcttcacaagattcgggtgctgcagacaagcgattataccgatctcgtttataaactctttattgccttgacatgatttggaagatagcttcttgaccgcaatcaacgttccatttggtaagcgcccctgcattgttgagttttggttttaacgttacctgtttttaagaatactaacattgatttttctagagcttgagactcttt

SEQ ID NO: 112881 - DNA, 372 bp, Arabidopsis thaliana columbia
gacaaacacaatttatgcagcttcgctttaacagtctcaacttgactgggatatgatatatgagagttatagtgcagagtttactaaactttgagagtaatggtttttataaatatcaatcagtggcaactggcccactggccagtgtgtaacaacaagcaaagatccagaaagattgacacattaagagctaattaaattattcgaacctaattttcttgttcagatttgtttcacttttaatattcatagtcgtaaccttactcgaaaaagacatccacgttatttgtaagagttccggtgcatatcacccatcgcttgcaattactatctagttgctacaaagtttagaaatcaatgtcaaaaatgaga

SEQ ID NO: 112882 - DNA, 193 bp, Arabidopsis thaliana columbia
atcttgcctcttcacaacctcacattcactgcacaccgatcacaccgagtttactttgtcccggaagaaagaaaaataatcataccattgaaaaaacgcttaagcattcactcttaagataaacacataaatttggctaactagtttataaacattgaccatatacatcaaacaactctttggagaattgccc

SEQ ID NO: 112883 - DNA, 365 bp, Arabidopsis thaliana columbia
agcgtgacggagaacattacttgagcagagttactatcttgatgagtatcacaaagcaaggcttaaggaagaatttggtaagtatcatatccttatttcttctacttttttctttccatttcattatgtctgaacagcagactcaaattcatgctgcttattttgtttgttcagacgttgaaccatggagttttgatcaatgtgttggggaagcagtcatcctccctgctggatgtccataccaaattagaaagaataaggtattacttttagcacccaacacactctttccttcttttgtaatctcaaagttatgaatctttttaacataacttttgcatatgtttgctagtcttgtgtaaatg

SEQ ID NO: 112884 - DNA, 370 bp, Arabidopsis thaliana columbia
cagaaactgaattagatcagctcatctgagaagaaaaaaacaaaaggagagaattaaacaaaccctagatcgtttgttgagaggaccatgctcttcttctaaatcatcttcagcaatctccaatttcaccggtagctcatctcggcacctggccgccgattcagactccggtcttaaacctccagatttcctcatttccaccatcccccgaaaaaacaaacctttccttctcaaaaactcaaattcagacaaaattcggataacccacaaacgaaatcacgaaattattccacaaaaggatttatttatctggaacgcgaaagagaatcaaaagcaaaccctagaaatcagagtataaaacatttacggg

SEQ ID NO: 112885 - DNA, 362 bp, Arabidopsis thaliana columbia
aaactatcacaccgtttcgattcttccgctaaactctcgccgtcggatgaatttttggccggcgacccattttagtggaagaccttatcctacactcgatttctttcgtttgagtgtcttagttaaaaagttacttcctttctgggaattatctggtttcggttcttgcaattttctcggtggttgtttggtagctgtggaaatttttgtgtctgggtttgtttgtttctgtttgtgttgctaactaggtttctgggttcggtttgattaattgaaagttgggaagggtgagataataaaagagacgaataaaaaaaagaggaaagtgtttgatgttttgcatctgattctgaatcgattta

SEQ ID NO: 112886 - DNA, 369 bp, Arabidopsis thaliana columbia
acataatgctcagagagattgaagtgtcaatgatgacacgttgttgggtgggaagctctagtcaatttcatccttcacatttaaacacctctgaaacagtaactggctaactgctcctacccattatagagatgcagcttccttgacgtgcttgatttgggagtatgttgtaccacctccgcaaacgtatgcatttcacacagaccacaggtccacaacagctgactgctttatcttcaaaacacgcctctttgtttcaaagtcaagagtcgaactatcaacattggcagaaattgctcaccagacttctaaaccaaactcaactttaaacattctccaaataccgctataaggtctccctaaaactct

SEQ ID NO: 112887 - DNA, 418 bp, Arabidopsis thaliana columbia
  unsure (1)..(418): unsure at all n locations
accccggcacgtaccggccgcggaattcccaggcgtaccctctcgttcaaacatcttcatatagattcatgacgagtctcatcgaaagttcgaatctttcgtcatctgattagctttctcttagggtttatttcgatttcgatttagtgttctccatcaatggcgacacccatggttagttccgctggaggattactagcaatgctcaacgagcctcatcctgttttgaagcttcatgcgctctctaacctcaacaatttggttgaccaattctggcctgagatctccactagtgtccccatcattgagagtttatatgaagatgaagaattcgatctgcatcaaagacagcttgctgctttgctggtctctaaggttntctattacttgggcgagcttaatgattcgctgtcttatg

SEQ ID NO: 112888 - DNA, 348 bp, Arabidopsis thaliana columbia
accactcattaccaaattcatggaaaaaaataccaaaaccccatttcaggtcaaatagcttctcagttttactaatctctctcatcttcttcccaacatcaaagaagacctttacttctggttagaatagaccaagaacactgagtacgacaaagaaccatgatgaatctttcttctcgtcgcgcctcttccactctcacattgagcttcactgttctccttttagcttccacaggttcgtatggctcaacattcacattcgctaatcggtgcggctacaccgtatggcctggaatcctatcgaatgctggctcacctactctctccaccaccggattcgagctccct

SEQ ID NO: 112889 - DNA, 347 bp, Arabidopsis thaliana columbia
gaacataaagattctcatcactgaccgtcattgtgcaaatcctttggcgaaaaatctcgcagaatgtggtgttgggaggtttggtcaagtggagcttattccaatagatcatggtctttgcttaccagatacactcgaagatccttacttcgaatggattcattggcctcaggcttcaatacctttctctgaagaagaacttgactacatacaaagtcttgatccagagaaagatcgtgaaatgcttcgaagagagcttccgatgattcgagaggcttgtctcagggttctagttctctgtaccgttttccttaaagaagctgctgtttttggactttgtcttgcag

SEQ ID NO: 112890 - DNA, 367 bp, Arabidopsis thaliana columbia
cttcgatccgaaaacttcttcgccaatcttccttttcttctcacgaatgtctccttcaagctccgttcccagcaatgtcatggtacagaagaacaaaactcgtattcgattccctgcgacgcaacataaacccgaagattctacctcgatctcatgttacttcgagaatcaacaatccaattgggtcttctaatccctcagctaagttctcttcaatctcttcgcgagaagtaggattaagatcatggacatctctcggccgaaacacgaacagaatcgcgtataatccgtttctgagtcaacccaagagatattactacgttgatcgataccaagttcgtcatttcaagccacgaggaccaggacg

SEQ ID NO: 112891 - DNA, 368 bp, Arabidopsis thaliana columbia
  unsure (1)..(368): unsure at all n locations
gactttctctagttttcgtctctgttttgcattgaagtttttttctgttgacaaaaaaagaaagtatcttccaagaaagaaagaaaaaacttacaaaaggatatattgtgaatggagtccatgaaaaaaagtctgttggcaaaactataaattatcctttctaaatagctgtttagaggaaacaccaggaaaagaagaaagaaacaaaacaatgtaatcttagaggcaagcaagccaagcaacctggcctagaaatgcatcaaccatcttgtttgatattcgaagagcatcttcagttttcccggcttttagatatgcatcaatcattgttgtgtatgtaaaaacatcangaggcaccaatctgtctg

SEQ ID NO: 112892 - DNA, 371 bp, Arabidopsis thaliana columbia
caaaagtcgttaaaataagtgtcaattaagatatttatgcttttctaaaggtatgtatcctagaataaaaaaactaaaataaaaataaaagcgaaacaaaatcaagttaaccgtctcttgaaaacgtaatatatataatcgagaaagattcaaaattgatttaaaataataatcaaaccaataacagttatgcatgcaagaagttagaggaaacgcatcaggtatatagacgaggctacgaaagaaaagaatgatcaaatctagttacgcttaaatttggatatatctaaggtttcttcgtcaatatatggagcttacgaaaacgaaagagtgagctacgaggaactaaatcaatgaagataagaggaatg

SEQ ID NO: 112893 - DNA, 368 bp, Arabidopsis thaliana columbia
  unsure (1)..(368): unsure at all n locations
gaattcgggtcgtccacgcgtccggtcaggtgatgtgagcctcataatgggtcatcaagttggcaaactggagaatagtttttctacaatttattnatttattnctgacattataaatagttttattaactagactaccccaaatgtttacagtttataaggttaataagaaaatttactgggacattttaaagtctagtttattctactacatgtttttcaaaacaaatactcattttgttttaatttaattatcattttagcacttaaatttaatctcataataattatcgtttttagatttttaatgcaaatgtttaataaaaattgtgagtattaatgtcttgacaaataattttttttgaaac

SEQ ID NO: 112894 - DNA, 360 bp, Arabidopsis thaliana columbia
  unsure (1)..(360): unsure at all n locations
cggacgcgtgggcggacgcgtgggttattttcctaaatatataggacgactcattttcgattacttttaatattattttttgttaagattacttttagtcatttgggcaacatatgcataatcaaatcttgtaagaccactttagagatctgggctttgaggaagacaacaatgagaaagcttctttttctaatgtctatgtctttgaaatgttacaaggagcaattaaaatagtgggtaaaaagtttcattacatcagtggggctgtgtgttcaatgttagctactctgacacggctcatggtagatntattgaatagttgaagagagcacaccaattcttattggacatatttgacag

SEQ ID NO: 112895 - DNA, 373 bp, Arabidopsis thaliana columbia
gatgacatgaagaaaggatcatactattaaggttttaatattaactaacgtcgacatgtgattactaacagtgatgagaggaacacccggtggtcttgactggacaagattcataagagtatctgcattgtgaactgagcttttattgcaaagatttgctactgcttttgcaaatgcactaacagccattatcacagtattccttggaattcctcccaaatgatcagatcttgctgcccattccattatcttccccattagcttcaaagttctctcccttcaacaaattataacagaacctcaagctacttgcatacagggccggttctgatgtgcgaaccggaaattatcatatctgtgacaaaattcgatg

SEQ ID NO: 112896 - DNA, 377 bp, Arabidopsis thaliana columbia
gcttttcttttccctgtatcagatttttttttttttttggctcaacatcaactttcatttaccaaatgattacatccaattaaaggtacataacattcccctctatcaaattggacccaaatgcaatggtttgatctagtatcaccctgaaacactatcggatccagcgctacctgatcgaggaaccattgcatttttaaaccacaatgagatagataatactctacaaatcagaatattatcatctctttgaccacctacagagactctaagcgacacgagaacaactactaaaacggaagagaccaaaacctagtctggagacaaccaaacatttaaccattgaagaaaagtggaaggcacaatcgttgcattgg

SEQ ID NO: 112897 - DNA, 363 bp, Arabidopsis thaliana columbia
taacaaacaaacccatccctaattgttttttccatttgctatttaactaattaatcgcctctttgaccattttttagagacatctcatctctccaggtgacagaaatgcatattagtgtgtttaccaccactccccaaaaataaaccaaaaaattttgtttacaaaatatcaaatgcctaaatcagtgacagtattgcctaactcaaatctctctctctctactacaacaaatggcttttcacgactgtttctttagccttctccacgacgtttttggtcatatgtacacacaccaactgtgccttttttcttttgtatattaacatctctctcaagtggcccaggtctttccaacctacact

SEQ ID NO: 112898 - DNA, 371 bp, Arabidopsis thaliana columbia
ctttcttggttcctaaaggaaagacttatctccttaagtctactcgatttagaggcccatgcaaatccttacgtaactttcagatcctaggcactttatcagcatctacgaaacgttcagattacaaagacaaaaaccattggcttatcttagaggacgttaacaatctatcaatcgacggtggctcgacgggaattattaatggcaacggaaaaacctggtggcagaactcatgcaaaatcgacaaatctaagccatgcacaaaagctccaacggctcttactttatacaatttaaagaatttgaatgtgaagaatctgagggtgaaaaatgcgcagcagattcagatttcaattgagaaatgcaacaaa

SEQ ID NO: 112899 - DNA, 352 bp, Arabidopsis thaliana columbia
aatctttaatgtaaaaaaaggtatctaccccgcttaatggatactcatttgaaataattgtgggttttttaaaaaatggagtcgatcggattcgcaccaacgtaaaccataagtctcagacacaatacagcatatgaacgatctatatttcgacaataatgaatcgagctcgtacattctattttattcatacgtactgatccgcgatatttataaaagaatttcctttttatgtgtcaacctattatctaaacgagtcgcacatacgacgaagtacatgttcctcgtcactgaaggcattcccgaagcgctagtgatttcatgacgcttctgattggctgacttgtatctc

SEQ ID NO: 112900 - DNA, 368 bp, Arabidopsis thaliana columbia
cagagatctattccttttagcttaatctgttatttagttatagtgtcttaatctttctagtatgaaatgttaattggtcttaacaagttttaacctttgggttgattttctgatatatatataggaaggatcctaactacaagagaacagtaatggcctgttttattcaagcagcttacttgcttgaactcgacagacaagagaatcgaaacgagcaaaacgctctcgcaccaaaatggtggattccattcaagtacaagttatcacaaacgctcattgacgagagagatggatcaatatttggtgctgttcttgaatgggacagagcagctgcaatggcagatttggttgtcatcagaccaagtggg

SEQ ID NO: 112901 - DNA, 365 bp, Arabidopsis thaliana columbia
gaggattgttctaggattgcctcttgatggtcccatcaaggttgatgatgttaagaatgcgtaagtctttaaattgcttccattgctcccgagaaaccgaaaaagagtgttcattgaaggtttcttgttttgcagcttccgatcttctgcgttgaagtggcatccagataagcaccaggggccttctcaggtatggtttttaaaacaaatattggattgtttcagtttttttatttgaagttcatgtgttgataaattgttttcggtaatgttgtggaactcgcaggtggcagcgcaagagaaattcaaactctgtgttgatgcatacaagtccctctgttctgcactcgcttgacgttacacat

SEQ ID NO: 112902 - DNA, 233 bp, Arabidopsis thaliana columbia
gggaaatatctgtcaaactgcaagctcaattaaaagacacacagtaccttaagttcccctcgagaaaggtaaggcctcttttcaccatcttgtgaaaaacgaacctttcccctttcttctttagattttgtccactctttacatatttcagactgattccacatatcttccatatcttcgggggaagctcgagagtcccagtatgtgaaatccgtgtctgtgtcaacccgagg

SEQ ID NO: 112903 - DNA, 459 bp, Arabidopsis thaliana columbia
  unsure (1)..(459): unsure at all n locations
agccgtccgcatactaaagatgatagtcgtcaatcctttgagccatacgaagagtcagagacctcggtagattcataatcagttcgacgagaaggtagatatngcggcgacgtgagagaaaccttcatcggctttacagatgtcnttcgattccangnntcgcagcagagtttagacctctttnnccttctctttaattttngnnactcccannaccggagataaagatgtcatgatcttatccatggnncggcgatttcaattcttcctcngtnacccgataaccttcatatctnnccgccgnntcgataaanntagtttcgatggatacccaaacggtnntcgatcttttgccgccaccattcgnngccattggagaaagaaggaaagggtttcgctttcttagagaagttggcgaaggggctataatagctctgagnnattggaagaagaaagaaa

SEQ ID NO: 112904 - DNA, 219 bp, Arabidopsis thaliana columbia
cggacgcgtgggtttccaccaagcaatagttgcatgctattacccattttcaaagagtacaacaaataatcaaatggttggcgacaattaacaagttatccaatttgcaggaagatagccaggaaaggacttttattctagaagaataattgcatgaactactttgcatataactcggagaagaatttatatgatgaacgagtaagttacaggaagtcg

SEQ ID NO: 112905 - DNA, 207 bp, Arabidopsis thaliana columbia
acgcgaaagagaaaatcagttcattcgtctatggaacttgtacttccacacgctacaaactcatgtcctctcactgttcttgggttgttagaacgagccgactctgtctttggcgactgtccttcactcctgcacacaaccactggtcatacgtggactggaactcattctctgtgtctacgcgtgaactccactttttcttgcgct

SEQ ID NO: 112906 - DNA, 366 bp, Arabidopsis thaliana columbia
gcggcgagagcgtttgatcgaatgaatggtaaagagattggtgggaagcaagttgtgatcgaatttagtcgacctggtggaattaagaacaggttcaggtcatctaggcaaccgcagctaccatttcaaccgcttcgagagccaccaatcctaattcctcctttgaggcgggcagtatctttcatcaaagataaaaacaagaatgtgagccctaaaaatggagttattgctgttgatgcttctatgcgttccttatgtatcatcgatgctgacgataataagactcgaggaacccgaggaacggaatccgaatgcgcggagacaaaaagcaagaatgtggcttagggggggaagaaagacagatga

SEQ ID NO: 112907 - DNA, 352 bp, Arabidopsis thaliana columbia
cttaaagataaccccaaatgattcttgcaatattagcccttgtaatagccacctttctatacggtggagccaccacggtccaagctggatgcagagacactctgaccagcctttccccttgtctttattacctcaacggtggctcatcgtcaccttcttggagttgttgtcgtcaattttccacggtggttcaatcttcaccggaatgtttgtgctcagtggttaatagcaacgaaagctcattttatgggttcaaatttaaccggactttggctctcaatctccctaccgcttgcaatgttcaaactccatcacctagcctgtgtaacaccggtggttacgtaccaaccac

SEQ ID NO: 112908 - DNA, 197 bp, Arabidopsis thaliana columbia
tttcttcttcacaaaaattcttctttcaccaaactcatcttttcctttataaaggagtaatatcttcaccgcccattgaagagacctacaacatatgtattaggtgaaactttccttttaagactatattgagagatctctgaatttatttcaaagtggtggcatggaatcttcaggtgatggaatccccccaatta

SEQ ID NO: 112909 - DNA, 351 bp, Arabidopsis thaliana columbia
tgccgctttcttcttcttcatcatctctctctcaaaatcaccccttttaaagttggttcctttatacgcaaaagtgaacgcagatcttaatgcagctactgtgatttcgattcttagggtaaatatattcttttactcattggattggcactcctcagcatctgggtttttgcaaagcattcttattacttccactgattcaaacatgtggaagtttaaaccttttgctcaaaaagaacctgcgggtctcgaaggtcgatttctcgagataggaaatctgaaagttcaagttagaaatgtcattgcggaaggaggtttctccagtgtttacttagctcaagatgtaaatca

SEQ ID NO: 112910 - DNA, 347 bp, Arabidopsis thaliana columbia
gtctaatttagcccatgagatgactgcagagttccgtggtctctgtgctgaagaggcttaccttcaacaggaactagagaaacttaacgatttgagaaacaaagtgaagcaggaaggagaagtgtgggatgaccttgtgtctagctccagtcagaattctcatctagtttcaaaggcaactaggttatgggattctataatggctcgtaaaggtcagcatgaagttcttgcgtcaggtcccattgaggacttgatagctcacagggagcatagataccggatttcaggatcggccctacttgcagcgatggatcagagttctcaagttcctcgagcagaattactct

SEQ ID NO: 112911 - DNA, 347 bp, Arabidopsis thaliana columbia
gctgatgtcacgaacttatatctttccgccatccacgagacaggggccggatggtattttgacatgttctctccaaaaggaattcccaaaagtaggccttccagttgagagtttcatattagaattaatgtaaaactcgtatttttaaggagaccacaaaagtaaacaagtctcataatttatggatgtggaatcatgacattgttctgctaaacaactgctgcctatcatcatacatgagcgaataagaagtgctagaggggattatataccctccaatatcaaggtaacagtaacacaattaaagaacatccttactgttacataagaaaatgttttgatatatc

SEQ ID NO: 112912 - DNA, 348 bp, Arabidopsis thaliana columbia
cccgaacccaaatgatcctcttgtgccggagatagctcatctctacaaggtagataaatccaaatacgagtcaactgcacaaaaatggacacagaagtacgcgatgggatgataagacaaaggtggtctagacaaggaaaggatgtcttacttggcaatggaaatagaaaactgaagaaaaaacatttaccttttctgttttttggttagttttagcaatggctgctatgatgtgacgatcataatcgaaagacttttttagctgctcttttttacttgtcttcagtgctctgatcatattcttatttttccaattccattttaattggaaactgctattgcaacaac

SEQ ID NO: 112913 - DNA, 312 bp, Arabidopsis thaliana columbia
  unsure (1)..(312): unsure at all n locations
aaaaaaaggcccccccgagctaggtgtgtactcttttttgtctcgtctctccnacaacgtcttcctctttgttctcttaatctcgctagttgccatctccgccgcgagaacacatcctcattatgttatcaaactcccttcgcactcttctcacttcttccgtccttctgaaaacgacaaccattctaactcctgtactatatcagctgctctattcgcccgatctaccctatattggaattacaagcatcactctcatatattccatgcctatcaactttttaggaaaggtggattgaaatacgacaatat

SEQ ID NO: 112914 - DNA, 348 bp, Arabidopsis thaliana columbia
atcagagagttatggaagaggagagaaacaatccgcatcattcgggcgcgggtcttctttcttggtctgagatccgccgtcctgactattccaccgccgctaatcgctctaaccagccgtctgatggaatgaacgatgtacttggcggcggcggtcagatcactaacgcggaaactaaatcacttaatacgaatgtttcgtataggaagaattgttctgggcataagctaaaagaaatgactggtagtgacatattctctgataatggtaaagatgatccaaatcaccagacaagaatccattatcatcaggatcagctgagccagatatcattcagcggcgaagaga

SEQ ID NO: 112915 - DNA, 344 bp, Arabidopsis thaliana columbia
attaatataaatttaagaaaaacaaataatactggagttatgttgcactaaaatatatatattttaatatatatatatatatatatatatatatattgataagtttatacaattgttaatttatgatattaatgagacaatatgtttacatatgatttattatcttattaatttatcgatatgtatcaatttttacactagtcccaacacagaaccaaaataattgattaatttaaagaggtttatcgaatattaatttatagatgttctactatatatcatatctttttttaaaaagaatcttcattgtttatgtgtagttttttttctaaatgagtcatgat

SEQ ID NO: 112916 - DNA, 331 bp, Arabidopsis thaliana columbia
  unsure (1)..(331): unsure at all n locations
atcggagagagtgggaaacatggagaaaaacaagagagctatcggatttgtacttctggtcgtacttatcaatggagttatgatgacgagatcaaatgggtatgaaggagaagaagagtggggaggagcaggaggaggagagtggggaggagcagaaggaggaggagcatggggaggaggaggtggaggatgttgcactaggtgcggcacaggaccaggaatagttgagtaatttaaagaggtttatcgaattttaattnatagatgttctactatatatcatatcttttcttaaaaagaatcttcattgtttgtgtgtagttttttttat

SEQ ID NO: 112917 - DNA, 347 bp, Arabidopsis thaliana columbia
aaaaaaaattctctgtttcagtaagaattttatggagttttgagaataatgttcggagtacattggaaacgcaaaacacttaaaaagtgttgacaaaagtataggaatctgcttcggtagaagattcgagagaggagaggaagcatcggtggttttggagttccttattcttctcttctttccaaagttttgtcattcgccaagattccttaaaaacttgttcacacatcataattatgcaccaataggttataaatcataatccaacaagttagtcattggctttaattttaaaaaatcccataagagtaaaatcttttagaaagttaatcaacccacacatgggc

SEQ ID NO: 112918 - DNA, 348 bp, Arabidopsis thaliana columbia
gtcgcagatacagagatggatgaagagaggaaaagaacaaaaagtggaccttgtgtcagtgcttttgtagatagaggagacttcgatcctaatgtttctggaggtgtagctagaagtaaggcaaaatgctgtgccttaccaaatggagatatagtggtctctttacaagtttatattgtcgactgtcccaaagaacccatcatagagatactgcagtttgagaagcatcaggaccaggaccaaaatcctgagaacgatgaggatccatatgggaatcttttaaagtggttgataccgctggataacactatttctcagcaaccccgttctttaccacctcctataacc

SEQ ID NO: 112919 - DNA, 354 bp, Arabidopsis thaliana columbia
  unsure (1)..(354): unsure at all n locations
tcacgattcacgttaccgtgggatcatcggaaaaagatcttgcttnntgtgtgcgtcggctttagcttattgacatagagagtgtgagaatcaggtgattcacagagatgttaagagtagtaatataatgttagataagagttttaatgcaaagcttggagatttcggattggcgagacagattgagcatgataagtcgccggaagcgactgttgccgccgggactatggggtatttagcgccggagtatcttctgacgggtcgtgcttcggagaagacggatgtgtttagttatggagcggtggttttggaagtggttagtggaagaagaccgattgagaaggacttaaatgt

SEQ ID NO: 112920 - DNA, 348 bp, Arabidopsis thaliana columbia
taggaaacctatcaattaatgtcctctaaagtgtggtgtctctttcttaggggcatgagatttactttccaagggatgaatctacatccacaacaatatacatctattcatatttataaaatttattactgcaaaaatatacaaaattttgaacataaaatatgaaggaaattgatagattaaacaaattaaaactacagcaaacactaagtaaataatcttctcaaaagttataaaacaatttgtactataaatagaggttgatttgtgtaaacataatataagaatcataattgttttttttctaaaacaaagtttgtatttgtaggattttattaattgaagatt

SEQ ID NO: 112921 - DNA, 346 bp, Arabidopsis thaliana columbia
caaacacaacaatggggttttgagaaattccggaagactcaaagggcgtggttttatatttatttgtaaaaggatttatttgtcccatttcaatttccatttttgtaatttgtcataatgggaaaaggcgcaatcaaagaagaagagagcgaaaagaagagaaaaacatggcgatggcctttagcgactttggttgtcgtgtttttggcagttgctgtgagctctaggacgaattccaatgtcggtttcttcttcagcgatcgaaattcttgtagctgttcacttcagaaaacaggtaaatacaaaggtatgattgaggactgttgctgtgattatgaaacagttg

SEQ ID NO: 112922 - DNA, 343 bp, Arabidopsis thaliana columbia
acagattcagtctatcgtgtcaagtgcctgtctctttcgttgcccaaatgtccgatcaaattcgtgcggcgtgtttgcatggcgtttgctccgattctccgccgcgcctccgccgttaagaacctcttctctttaacaagactcgccgttggctctgccctctccactaggtctctccaaaccggagcctccggcgatgattctcaatcgatgggtgggtatcacgtgagccccggcggattcatgcgtggagccgtgtatcgcgagcccaataagcctctaaccatcgaagaatttcatattccccgccccaaatccaatgaaattctcatcaaaaccaaag

SEQ ID NO: 112923 - DNA, 300 bp, Arabidopsis thaliana columbia
cttagaaccatatatatgtgaattttgaaccccatatcaaataatgtggtttaaaattttgagctgatataaaattaatcacttatctgttatactaaattgaatatccttacttgcattagtttctctgaaattaaaaacgtttaatataaatcattaactttaacgatcataatatatttatttgtcgaaaatataaatcactattaatttactacgttacaacttacatgtatagtgtttgttgaaatgtaaggttttcaatgacgtttagatagatgaaataatttcgttccaaaa

SEQ ID NO: 112924 - DNA, 346 bp, Arabidopsis thaliana columbia
aaacaacagagtgattggcgtcgttttccacatcaacctgaattgaaagggtaaaaatgaagaggtggtgttgagagatgttgatacagctatatgaatgagtgtgactgaaaacaaacgaatctgaatcacatacgccaaagcagtccagttttctcgttgctgcatattagaccacaagattttgttagttgcgcttggtatgatccatgcgaatgctacacaagcaccaaacagactaaactgtaaatctgttacagtcgcaaccgcaactcccacagatacaactgtaagtgataccacctgaaaaacatcagccacaaggttacttactataccaaagttt

SEQ ID NO: 112925 - DNA, 337 bp, Arabidopsis thaliana columbia
cagaaatattgtgactggtttcataggtagcttgacgaaaaagaaaggggttattctgaggtggccgtgtgggaaaggtaatgtcaatggggaagagagaaatgaggagaaaggtaatgtcatacatatgccaaagctttcagagttttgagcgagtctttggtgacaaaagctacgtgttatcttcctggccaattaatttgctctaatctaattctacattctagtctcactgtgatcgatcttctaattatgataaaaaaaaattgtggctatataatcaaattatgaaatttcttaaaaatcaaatatggaaaagatacacaacaaagatgat

SEQ ID NO: 112926 - DNA, 343 bp, Arabidopsis thaliana columbia
ggtttgttgactgtaaattacatcggagaattgtagtgatcggggaaagggagtggcgttgttgggttggttggtcttgattctttcagcttcgaattagcttcttcgcttcttcgttctgggtttaaggttcaagcattcgagataagtacagaattagtggagaagttcattgaattgggaggacacaaatgtgacagccctgcagatgttgggaaagctgcagcagccgttgtggttgtactatcccaccctgaccaaattcaagatgtcatttttggtgatgagggtgttatgaaaggtctacagaaggacgctgtattgcttttgtcttcgacaatat

SEQ ID NO: 112927 - DNA, 336 bp, Arabidopsis thaliana columbia
gaagaagaagaagaaacaagaacacaaacttatctctttttgttatcttttgtctgaattaaaaaaaaaatggattctacttcgaatgatcatcaagagttggaacaattcgaagccattgatgatctcctcgaagatttctggttctttgataacttacttgacagaagatcaaggatcttgaggtactgtcattcagatccttacccttttacttcttcttcttcttcaacttgtcccaaacccgaattaccgaaaattggagattcggattcggagattaagcttctagaagcttctactgggggagactttgttccgccgccgtgtatagag

SEQ ID NO: 112928 - DNA, 342 bp, Arabidopsis thaliana columbia
  unsure (1)..(342): unsure at all n locations
ctcanaaccatatatgagaaacaccatttcacataccttaaactcttccatatgggattcatttcatggtcagggacatgaatgacccacacaccaatgctaacggaggctgttgttgcagcttactggctctggttccagcggatctcaaggtggctcaagggtccacgtgttttgccagttattaacagtcatcccgatatgctcgagcatcgtgaccgcatgcacgactggatcactgagaacctacgtgcgtttggcggcacttaccaaacatgtatctgcgccgtacctttcttggcaaagaagcatggtctcctgaccgtgacgcgccatctcaag

SEQ ID NO: 112929 - DNA, 336 bp, Arabidopsis thaliana columbia
catacagtagcatattttcttcatcgcgagagaacgcttattgcggggtggactacttgtcggtcggtggtgttcgtcagtcttatcgctctatctatcatatctagcccactcgcggctctataaagtctacggtgtaccgcacattatctctgagatgtggttagattccgtcactgatttgcctcatcatggtcactataccaagttgccttggtgtagaagcaacgtatggcattattttcttggcgtattaacatcagctgatacagattacggaatctataactacattcaggaccacattccgacacacgtgatccatcaactgtttcc

SEQ ID NO: 112930 - DNA, 347 bp, Arabidopsis thaliana columbia
acgaatgtgaaaaagtttgaaaaataacacaatatttttttttgttcactaaaatattataaattatgcgaacattgagttttttttttttgccatttaaaatgttcacagtggctaacatgattgaaatcttagtagtaagactcaaagttagtcattcaactaccatagtgaatcttttaacctcgaaaccaccataatcagtcttcctgtaaataatcacctaatcggatgttgctacctaataaaaaattattcatttaactataaaatttatctatcacaaaacgaaattatatatccgtttgggtttactagagaggattaatgattatattttatgatta

SEQ ID NO: 112931 - DNA, 343 bp, Arabidopsis thaliana columbia
catggattcaagaaaggtcagttaagagagagagatggaaacccgcgcttacaagtatatcttgccctatccaagcataagagtattgacgtttaaccgcccaaaatacagcaaatgctatgcaaaagggacaaatagccagagtcaagtatgagacagcacccaggaaaggaactttgacatatgattttccaaagcggcggaaccatttgaaactttaccaatttaacggcagtatcagattttcttttttacttctcaaagagggaagaagcttgaataccctagcatttcatagtcaacaaaaagaaacaactcatgggttctatctgattcattattt

SEQ ID NO: 112932 - DNA, 341 bp, Arabidopsis thaliana columbia
gacacgattattcatttttttcttctattgtaaaataacaaaaatatccagttattacatattagcttgtctatcattcgatctgaatttatccacgatctaattctattactcattcgatatgaacttgtccccgatataacatattattaaaatatgttaacatattattaaaatatgtccccgatataacatattattaaaatatgttaacgtgtaggtgaagacaataacgctcaacttatctgtggaccaacatagatggcgaaaatctaaataaaattcaaaattcttaaatgagaacaattgcatataagatgtaggattcataataatagagc

SEQ ID NO: 112933 - DNA, 350 bp, Arabidopsis thaliana columbia
ctccagtagagttgcctccttccttctcttccaatggcgacttctgctgtcaagtcaacgatgaagcgatcgacgtctctagccaaatcctccgagagtggcgacgactcttcttactctacacggaggtcagcttctaggagacaccggagtttgagccgtttctctcaccgcatgccggatccagacattgaagtgactccgatgaggaagggaaagtttgttaacaccgtgagaggttctggattcggtgaaattagcctcgatgatttagctgtcgagttttttgaatcgttctccggcgagagcgagattagtagcggagaaagaggacgatctggtttaagaaa

SEQ ID NO: 112934 - DNA, 320 bp, Arabidopsis thaliana columbia
cacatatcaaagtttttaatatttgcgtaattgaactactcaaaggagggtaattcgattttttttactaacctaaacaactctagaccactgatcataaacattaatcaactgccaactcaacatttacttatttatataaactatatttggtaacgtacacccaaaaaataaacatatgctaactatcgactcaagactataaactttgtattaaaagaatatgattataattcacaacaacccatctacttatttataattgactcactataaccaatatttaatatctcatacttgctattctacacgtacacgag

SEQ ID NO: 112935 - DNA, 204 bp, Arabidopsis thaliana columbia
acatacgcgacaacggagatatttcacgtatttttccattcaccctacaaaccataggtggaccttcgactttggagtcgacagatcttaatacagcactctcctttcaaactgcatcaacactcacccctataacaatctattcttaagattaacaatatattgtgccgatcaccacctatcaataaaaaaagcaactatttc

SEQ ID NO: 112936 - DNA, 343 bp, Arabidopsis thaliana columbia
gcccatatctccagcctttatagaaaaaaagagaagataactaattaacttcccttgatttggagttttttagctaaacattacatattttctttcttaatcttcccctttcttaattcttaaaaaaacatatactgtcttgtctttaaccaaactcttctcttttatttttgtggcaacaaaaataaatagtgaaagggaatcatctcaaactcctcctagatataaatatttaggttttcgtcattaaataaaagttattttggaaaaaatagaaacaacgaacaagatacaaaaggacatagaattgattattccaagacgacgaatgtgaaagctggct

SEQ ID NO: 112937 - DNA, 342 bp, Arabidopsis thaliana columbia
ctcgatttgttctctgaaattagggttccggagggtgggggtttagcgagtcataccgtagggcgttctgaagcgatcattttggggaatctccaatgttgttatcgatttttctattggtgctctgcttcaaaatttcaagagattctaagattttaggcgagcactgttgagcacaatttcaaaaggtaatcgactcgtctgattggcattgcatgtttggttatggcttatgaagaacaaatactgggcgagtcgttaatttcgatccttttatcttgggttttagttccacaacacagatttgttccttgggaatcactgcttcaagggttataatct

SEQ ID NO: 112938 - DNA, 338 bp, Arabidopsis thaliana columbia
gtacggattcgtggaagatcggcggcgattgggcgcctgttccctcggttcgtttccgggccagcgcccagcgtgcggttcgtgcgcctaacgtcatcgaactgttcaccgcacagggcttcaacctgttcgacatggacgatgatccctgcgacttcaccgatccgaacgaagacggcaccgcctcgcaggcagcttgcgtcggcaccaatccttggcaggtgtcgcaaggtcaggctgacggcggtaacctgagcagccctgctggccagtacaatgtgctgcaaggcggggagacgaccctgacgccggaaagctcggacactctgactttcggt

SEQ ID NO: 112939 - DNA, 347 bp, Arabidopsis thaliana columbia
gccaatacaaggttgttggatatttctctatgcattggtcaagtaaagctaacaaataatggtctatttgattgttacaaataaaaaataaatctaccaaagagaaattattttgtaggcttgttgcatagaaaattggaaaattttttgctagctacacgaaatatcaaaaaatacatggtcacacatgccaactatactattatatcctcagctacacgaaatagatgtattgcatgaccacatgtctaaactatacgacgtcatgtagttaacaccatagacatacaattccggtataccaatggattgactccggtgaaaaccaatgttgactagcaaaaata

SEQ ID NO: 112940 - DNA, 344 bp, Arabidopsis thaliana columbia
caaatattttagttttcaagaattgtgtaattgtactactcatacgtgatttatttgaggatttggactaggctaatcgactcttgtccactgatcgtaaacatttatcagttgccaatttaacattttgttatctatatgaactatatttgttaatttacacccaaaaaattaacaaatgctaattatcgcctcaagattagaaattttgtatgaaaagtatatgttataattgacggaagtttatctactgatttatcattgattcacttcaacgaatatttaatatctcatatttgttatgttagatgtgtaggagaaaaaaaaatttatttaaatgaatt

SEQ ID NO: 112941 - DNA, 385 bp, Arabidopsis thaliana columbia
  unsure (1)..(385): unsure at all n locations
cgtnatttttcgctttttgcgtgtcctntacttatcnnnacttgtaaacccaaagctacagagatgatctttatataatggacccgcaactcnntttttcaattccnntcccatcaanntcttcttcaaatttgttctnntctagttggtggnntggtgatctanngttttcaaagannatcgattttgcccaagtgggttacttacttgataacccctttcttcttcttntgaaatngggttctttctgtaggagccagaacaattcttgttaccctggtggtgctggctttatcgggacgcatactgttgttcaacttctcaaagatggttttaaggtttcgatcatcgataattttgataactctgttatcgaagctgttga

SEQ ID NO: 112942 - DNA, 240 bp, Arabidopsis thaliana columbia
ccggggcgggcgcacaccttccggagactctctctcttttcgcttaatatcatcggggaaaagaaacccaggcccggaaccaataaaacccttccgcgattcccggggaaaaaaacagtgccaaacattttcgcctctctattgcccctatgtatattatatacgtctcaagcaccgacagatttccttaaagatttccaccaggtttaagcgaggctttctcctttttattacactcct

SEQ ID NO: 112943 - DNA, 204 bp, Arabidopsis thaliana columbia
  unsure (1)..(204): unsure at all n locations
aatagaaaaatttaatccaaataaataattttgcctaacggtttttccgtaaattttaagcaaaaaagcagtaggaacgagaatgaaaagtgcagtaccattaaatgcaagaatatctacttccataattaaaccgntaataataataattcttttttccttgggaatatctcgggattaaatcccatagagatgagaaatctt

SEQ ID NO: 112944 - DNA, 332 bp, Arabidopsis thaliana columbia
cttatccttccgtgtttatatttacacgttcgagccaccacaggggggggaacatgaaagttcttgtggccattctactggtgactattcctaggtatggcaggaagagtatacttatcatacataccactctaagaaacagagtttcaaaaatcgtttccaaacaaaagatagatttgtgagaatactgtctatattaacaaaaaattcaccggttctatttccagtaatctataactacatactctaattattatgaatggagccaacaactctctttgttcctcaccatttagatgccaatactgtttttatagtcctacaatgtaaac

SEQ ID NO: 112945 - DNA, 342 bp, Arabidopsis thaliana columbia
ctagaaacgtccaattccgaccgaatacaacttttgttattgaaatgagaacaaaacaatggtattcaattgaataacgtaggacccacgttgcttttggaataacgtaggacccacgtcgcaactcaaaaatcacaaaatcttcatctatcctttttggcggcaaaatttcttaacgaggataatcaaagaaaacaaaaggcaaatcggtcggttggtccaacaaatggtcccagagaaaaagatattgcctatgaaaaatggctaccaccttcaacgagattggtctcatgtattgtggtctgtggatattataatataccacacagtctacacacaatg

SEQ ID NO: 112946 - DNA, 324 bp, Arabidopsis thaliana columbia
gttaattgcgagtttttgtggtttttttcggctatgaacttgttgggttttaggactaaacccatgccgtataagtgttcgggttacgggttaaccggtcgtaccggactgttccgttcgatcgtgtaaacactgatgaaaagcaatatcaagcacctctgtattatgaatgcaatacaaatacatgacagaagaagaaggcctacattcatattgattcattattaacaacaaattacatcgttacacaaagtttgctgaataaataaaaattaataattactggaatgagttccaaacatgagtattgtgtggctttcacgt

SEQ ID NO: 112947 - DNA, 344 bp, Arabidopsis thaliana columbia
  unsure (1)..(344): unsure at all n locations
gttaattgcgagtttttgtggtttttttcggttttgaactcgccggggggggggactaaacccatacttgaagagtgtncaggttactggttaaccggtccgaccggacggttctgatcgtgcgtgaaaacactgataaaaagcaatatcaagcacctctgtattatgaatgcaatacaaatacatgacagaagaagaaggcctacattcatattcattcatcatcaacaacaaattacatcgttacacaaagtttgctgaataaataaaaattaataattactggaatgagttccaaacatcagtattgtgtggcttttacgttaaaactatacattcttata

SEQ ID NO: 112948 - DNA, 343 bp, Arabidopsis thaliana columbia
gtttgaaggaaaggctcgggaattagctgtcgttatcaaaaaaggaggaggtggaggaggtggaggacgcggaggcggtggagcacgaagcggcggtaggagcaggggaggaggaggtggcagcagtagtagccgcagccgtgactggaaacgcggcggaggggtggttccgattcatacgggtggtggtaatggcagtctgggtggtggatcggcaggatcacatagatcaagcggcagcatgaatcttcgaggaacaatgtgtgcggtctgttggttggctttgtcggttttagccggtttagtcttggttcagtagggttcagagtaattattggccatt

SEQ ID NO: 112949 - DNA, 339 bp, Arabidopsis thaliana columbia
ctcctttacctctacttcttttttgctcagaccgaagaaaggcaggtggggccgcccaaatgcacggtccttgcgaaattggaaacggtagttcttcttcttccaagagaaatcgcaatggtgaaggcgggaccttcctgccccgaagtgccttcttcgggacacgagccgggcctttctacacacacacttctgcttttgtcagaatggtcaccaaatatggcggccgcgctcctagatactcggatagcccgagtagtgtaggctacgagagggttagagcaatgcgatttgtgtaccactaactccgcaatagctgctatggaaggaggtaagcct

SEQ ID NO: 112950 - DNA, 339 bp, Arabidopsis thaliana columbia
ggaaactgttgacggctactattaatggatccagattgtctgatgaaccattgctcttgatttgagactcttcaacacagtctccttgtgaatagtcttctgtttcttcttcttcttcttccacgttatcctttctcttcgaagtatgtgcgtcatgatcactattttcatcgtcataatccatcattcttcttccgccttgttctctgctactcaaactataggaagcaccctgcataaacacaaagttggagcttcttgagtcagcagattccatgctggaatgagagttttccttctcaattttgatcctttctcctctaagtttattactcttct

SEQ ID NO: 112951 - DNA, 339 bp, Arabidopsis thaliana columbia
actatttacttctataaataaatataactattaagtatgaatgactctgttatgtaacttgatgtggataaaaatatgaaatcggactatctaataacatacatattattttgataactcatgaatagggatatatcactaatgaaattatgattgaagtatgagtccttctaaataaatcataatatgtattcacattggtgtcagatcatataataagcatcatataacctgactgatggatatgtacaacggtgagatatcgaatagatggatcatatgaacgtgtggttatctccaatgttctgaccgacacctttagcattatggtgttatcag

SEQ ID NO: 112952 - DNA, 346 bp, Arabidopsis thaliana columbia
gaaaacagttatgagagaaggtagcaaatatcttgttgatggattagtggctactggaggtgatttagaagtagtggaatgctcacaaacgacgccaccggattcaggaatgttcaccggtgagctttctttggtgaaaaatgaagcaggttctatcaatcaagagatcagtgaggtctctgggaagaaagttggtaccaatctcggcagcaaagtggtatgttttttactcatggttttatagcaaatgatgcgtttaaactacaatattggcttttcgttggttgcttaattttcttcttgtgatatgtatacagattcgtcatccggaaaagattttcaagaa

SEQ ID NO: 112953 - DNA, 346 bp, Arabidopsis thaliana columbia
ggagcgttggaccaggaacaagaaacattgagatcattgacctagagagtgacgtgattcacataagtggctcatcaaaagctgttgaagtgactcaggaatcaggcgatacaagtaaagagcctctgaaagctcaggaagaacctgataacgactggagaagttcggtcttctttccagacagagaagccccttcacattctgtacttgtctttgaaagttctaatgctagaccatctgtagaagatcttagcaacaccattgagcttggtttaaccccgcaagagaagaacatcagtagctctaaaaagcggaagaagaatacggaaagatgtgcatctaagaa

SEQ ID NO: 112954 - DNA, 344 bp, Arabidopsis thaliana columbia
ttcaaagggtacctttaacaaggcttcatggcgtggaattgacgtggctgttaaaacctttggagaggaaatgttcactgatgaagacaaagtgaatgcatttagggacgaacttgcactgcttcaaaagatacgccatccgaatgttgtccagtttctaggggcagttactcagagtacccccatgatgattgtcaccgagtatttaccaaagggagatcttcgacaatatctagacaggaaaggacctctaatgccagcacacgcagtgaagttcgcccttgaaattgctaggggaatgaattatttgcacgaacataaacctgaagcaataatccattgcg

SEQ ID NO: 112955 - DNA, 270 bp, Arabidopsis thaliana columbia
cttcttccttatttttttttttttcttccagcactccacaatgcgaagcgtattactttagttgctcactttctactcagatttgatgacagcacatcaggccatggcaccagccatgtcagcttatctgtttaataatgcttcttcttcttaatacaaaacttgctgtataccacattgtatactccattcagttctacccttctgcttcccatattttcacaattctcttaaaaagctctatctattatgtatcttattcctctttct

SEQ ID NO: 112956 - DNA, 342 bp, Arabidopsis thaliana columbia
taagtttgtcaccttaatactgtagttctccaacgaagcaacgttggtgagatcttgttataaacctataatcacaaaccaatattcatatcggtatgaaatattttcgcattttcaatgattttttcttagaaatattatataacatcttcgacacgaatatatgtgtgaatatatggcatatatgattgatgcaaataagagtttcaaagaaatgatttaattagaaaattttccttatagagatatatacagacagtaaaaaataactttctaaattaactcttcttatcacatatataactgaaaatgtaaccaaaatacaaactggatccaactcat

SEQ ID NO: 112957 - DNA, 311 bp, Arabidopsis thaliana columbia
gaatgaataaaaaaaagaatgccacatccgctcgggtgggaccaacaaagtcgggggcttactcccactctttatcgaattacaccgattaattggctatcgaagattgtttctgtattccaaaaaattagcaacaaaatttaacatattttttttattatgagaacaaatcctactacttcaaatccagaggttccgattcttgaaaaaaaaaacctgggacgtatcacccaaatcattggtactgtgctggaagtcgccttcccccggggcaaaatgcctaatatatacaatgctctggtggtgtaacg

SEQ ID NO: 112958 - DNA, 270 bp, Arabidopsis thaliana columbia
gtcccacgcgtcccgattcgtttgattcgaccttctgattttttttaaaacctatcctaaaatgtgggacccaatttattagcaccgggtcccatcatcacttacaaatgagagcacacattttactaattataactactattgataaacggacgcccctttagaggatccaatattacaaacccatgcttgctatagaatcccttttatatatttccatataaattcaattcactgtccagtgatactcatctttcttacttgtataac

SEQ ID NO: 112959 - DNA, 346 bp, Arabidopsis thaliana columbia
ctattaatgtatggcacaccatactaacttttggcctggcgcttgacctgataggcatgcccataacgtcttaccacaaataattccgacccacactagaggacggagccaacatcgaggaaattcaagcagatcaaatcggacatttggccacgttttcaacgaagacctgcttggtagggtacctttccgcatcatatggattctcagtcaaatggagtattgatatgaataccagctgtcgtgatgacgagaatctatctggttaaacgatcaaacttattctcgatagatgataccttcaggataaccagagactattgtccatctccagatgcgtaggagt

SEQ ID NO: 112960 - DNA, 345 bp, Arabidopsis thaliana columbia
gtcaaaaacggctaattttctcagcctgagatccaatcctctacctccgatttgtctcctccaccggaaactctcctttcctccgagcttcctcggctctgaatcttccgacaactgcttcgaaacctttccacagttggattcgtgcttcttcacgtcgccggttggttctcggtggttttggcggcgcttctttgtggatgaacaacaatatgtccggtaaatttggcggtaaatctttcattgcttccgctaggcagaccaatccttctcccgtcgaacaggcgttgaataaggtggattggccagagactttccctttcaaagaagaagatttccagagat

SEQ ID NO: 112961 - DNA, 343 bp, Arabidopsis thaliana columbia
atgcttcttgggtatttaggtttgacacagcttcacacccaaaaagaagggagctacgtctgagttaaacttggaggtggaagccttctttcgtttctcgacggtgaagtaagaccaaacccatgagcttattatcctaggtcggaacaagttgataggatccccttttacgcccccatgtccctctcgtgtggcggcagggaggcgtaaaaaggaaagagagagatggggtttctctcgcttttggcttggcatagcgggcccccagcaggaggcccgcacgacgggctattagctcagtggtagagcgcgcccctgataattgcgtcgttgtgcctgggct

SEQ ID NO: 112962 - DNA, 345 bp, Arabidopsis thaliana columbia
ctttgtgatgtgtaatatgtaatgtaatatcaatgttgatgtatattcaggtggtcttcttagttcttactacttgtcgtaacatataaagatatttagtaaacgtactctgattttataatatcagatggaccgtttcttaaatggacttagaaaatagaatttgtgatagtgatcagttctgagaaattctataaataattgtatcgaatcttgggtgacgaaaaccaaaagattttcctctctgttttttaagttggaatttccagttggccggctaaattcctccactattaaaaattacaaaataaataataatcttatttctatagaatgattatcatc

SEQ ID NO: 112963 - DNA, 340 bp, Arabidopsis thaliana columbia
ccgggtttcaaaatcgggtctttcccctaatcgaaaagcacgaattttcaaccctagccgctttcgaaaattcccccaattttatttttttcccctaccaaattttcttcgaatttcagctcagatcccttccttcttccagatcgatcttcagatctattgttttttaagaatgggtttcaagcgaacgtttgacgctgaagatgttcaagagctcaacgttaagaatggaagacagattagttactgtaataagctggccaaactagatgaaggagttccatatcgtctttcactggagaagccaggtgtcgtagcaggatatgatataagtgatctc

SEQ ID NO: 112964 - DNA, 302 bp, Arabidopsis thaliana columbia
aacaactcttttatatctattataaaaagatgataaaacgatagggtgggtgagttttccagatcagtgttttcaattctagaaaacatctcatactagggtgcttattaatctgggttcaacaacagcgagatccccaatctcttactagaaaatatctccctgcgagactgattcgaccatcgcacttacatcgctctcttatgttaccagcttgacatcaccgaaatatactaatccgttaattcttttttacaagaaatgaaactcacatgctatgtatctattgagttctataaaac

SEQ ID NO: 112965 - DNA, 333 bp, Arabidopsis thaliana columbia
ctactatacaagcttggaaaacctcaaagaaccaacgttaatttcaattacttaaacatcaaccgagaagttgatgcaactgagaagaacaaatgctaattgcagacctcttataaaggcaaacatgaatcctccaaagaaagttgctgttacttgtatgaatatcccaacctgtgcatcaaaaccatcacactctcagtattttgtgtcagcaatgaatgtaaaataatcgattagttagtattcctctgttgtaattacattttttaagttattcggtgtaattcacgaacaatgttttgtaaaagaacttacatcaataaagacaataat

SEQ ID NO: 112966 - DNA, 337 bp, Arabidopsis thaliana columbia
tcataatctgacatgactgcttcattacgaacacataaccatcgggggggggaatgacctaaaggtgaaccaaaaagttggtgcacctgagaagaacaaatgctaatagcagacctcttataaaggcaaacatgaatactccaaagaaagtagctgctacttgtatgaatatgccaacctgtgcatcaaaaccatcacactctaagtattttgtgtcagcaatgaatgtaaaataatccattacttattattcctctgctgtaattacatttgttatgcatttcggtgtcattcacaaacaatgatttgcaaaagaacttacatcaatatagacaat

SEQ ID NO: 112967 - DNA, 370 bp, Arabidopsis thaliana columbia
gcgctgagaccagtgaaacaacttctgtcgaagctaaggagacatctccgggcgagccgaccaaggaaacaactcctgctgctgaaccagaggttgcagccgtcgaagagtcttcttctgctgctgctggtgaggctgcagcagttgcacctgagaaagtggagaaggctgcaacagaaaacgctgaagcaaaggtggaggcggttgccgtagctgcacccgaaaaggttgaggttgcagtggaagcggagaaaaaggctgaagctgaaccagtaaaggttgaggctgaaccagtaaaggctgaggctgaaccagtaaaagctgaggctgaaccagtaaaagctgaggctgaaccagtaaaggaggagag

SEQ ID NO: 112968 - DNA, 169 bp, Arabidopsis thaliana columbia
ggcaaacatcaacaatgtgaaactgaaacttgattcttcagctcaagtggacatcaacaatgtgaaactaaaacatgattcttaagctccaagtaaacatcaagtcatcaacaatgtgagctgaaacttgatgcttcaggtcaagtaaacatcaaacacatttggcttt

SEQ ID NO: 112969 - DNA, 199 bp, Arabidopsis thaliana columbia
  unsure (1)..(199): unsure at all n locations
aaaaacgggggggttcaccccgccgcccttaaacattcttacggattttctcaaaaacacaacacangagggaggggggtttacaaaattttgcggtggcaccacaaacagaaaacacgatgcaactgcaataataagtcattcaatttactattcgtcctagatagccacattcgagacacgttggtgaacacataaa

SEQ ID NO: 112970 - DNA, 393 bp, Arabidopsis thaliana columbia
  unsure (1)..(393): unsure at all n locations
aatcccgcggcgtcccacgcgtccgcacctgaagaagcaaagtggtcnttagctacacgaacttgaccctccttgcgtcgttcaaaaatttttttaacccatcanaataacatacaactttaaacctcacaaaactcaatctcaacccctaacattatttatttacgcactttctttttattaccactcaacacaactgaaacaattgcttaattccctttacaccaccgttttatcttataccacatctatcatctctactacaacacatattttcttaatacaaccttaaaacatctacgatatccaaaaaaatcctacataaccattttaaacctaaaaagaataattttacctttatctactaatctattctaactctcaacgaattcc

SEQ ID NO: 112971 - DNA, 374 bp, Arabidopsis thaliana columbia
gcgaaaaatgctcgttagtccctattcggtcgcacaatatttactcgagaagcacgtaataaatttaacaaaattttaaaacgttgcacaatcgtcgcaatttagtcacaaaacagttacacaaacgttgcaacgtgcgactgtgttctgctgtcgtcgcaaaaaaattgcacaaagcgactgttttgtgacattttggaataggtcacaagacaaacttttgaaatccacatagtttgatccattctatagataaacattactgaaaaacaaccattttagtacataaagaactttaggtatacaaatgattggtttcaaacttatttgagaacttgtttgaaaagatcaatcatgaaaatgaattcacatga

SEQ ID NO: 112972 - DNA, 205 bp, Arabidopsis thaliana columbia
ctcgagcgagtgaaattgttgggccacctcagatgcctaatgagttgatgacgttttgggatacaaaagtggagacacgccatcccataagactctattctcggtatatagacaaagttcatataatgtttaaatttacccatgaagaagctcgggatcttattcaacgatatcttacggagcattccgatcccaacaatgaaaa

SEQ ID NO: 112973 - DNA, 365 bp, Arabidopsis thaliana columbia
attaaaagtccaactgatcaccacgtctgtattgtaaataagcagttacgaataatccagccaaagtaataggaattagacctaagacgattccaaataaaaaaacttcaatcatttgaattttcttttgttttcatttttgaaagggagaaaagagaggtactatctattcctagctcttaatctgtattgccaatgaatctcaatgaccaaaatttggtaattaacacggtaaggaactatcgaacatattaataaataccaacgaaatccttttttataaaaaaatctgcattcaattaatttcaaataagtcgtattttgcttagaccaataaacagaactgaggttatagttaaagctgc

SEQ ID NO: 112974 - DNA, 365 bp, Arabidopsis thaliana columbia
cagcactgtagacgtttgatctctgacaacaaagctgagccttctgtgtatgatactatgccaactgggccagatgctcctactgagcatgtgatattggatgagaataccaaggctcaagagcatgactactacagaattggggccttcaaggcgagtcccgatcataaattggtggcatatgcagaggacacaaaaggtgatgagatatatacagtgaatgtcatcgactctgaagacctaaaaccagcggggcaacagctgaaaggacttacttattatcttgaatgggctggtaatgatgctttgctctacataacaatggacgaaatcctgcgacctgataaggtttggttacataaatt

SEQ ID NO: 112975 - DNA, 358 bp, Arabidopsis thaliana columbia
cgaagaacgaaagagagagagagagtgagagagagagatatgatggacggcgttgaaggcggcacggcgatgtacggtggtctcgaaaccgtgccatacctaccggcgccttattaacatttgggcagaaaaaaacaatggcccttctgtttttgtaaaaaacttaaaagttctttttattttggttgggcaatttgtccggaatttgatcaagccgaaaaattccaaccggttgtgaacaaatgtacaagaattggtgattcttaaattggcagtcttaaaaaaatcaatggtaaatctggtctttctggaacaacatttactgagagattagaacttcttgatgatgaagaacaca

SEQ ID NO: 112976 - DNA, 363 bp, Arabidopsis thaliana columbia
ctgaaatcgtagccatcagtctcagtgaactcaaggccatccttgtcatgctcaaggatctggatgatacaagacttctccacaagtgcttgcaagaagttgagcacgccatagacattccaggccttatcgtgctgtctgagcaatgcaatctcctcctctgttttgttcttgagctttgctctgaattgacagaaactttggaactggtagacaaactcatccaccatatcccacaaccactggttcggcaactgcatattcactacgccgtgcaacacaacctagaaagaacaaacggaagaaggtctacttacttgtatttattcccagccaatacatacacaaaagaaatcaaaatca

SEQ ID NO: 112977 - DNA, 365 bp, Arabidopsis thaliana columbia
attggaacttttttcctctgttttctcaaaaagtttccgctttttgctcgctggagaagaaagaaagaaagaagtgaaaaggaatcattaccatggctgatccggcgattaagctctttggaaagacgattcctttacctgagcttggtgttgttgattcttcttctagctataccggatttttaagcgaaactcagattcctgttcggttatcagattcgtgtaccggcgatgatgatgatgaagagatgggtgattccggtttaggacgagaagaaggtgatgatgttggtgatggtggaggagagagcgagactgataaaaaggaagaaaaagatagtgagtgtcaggaagagtcattgagg

SEQ ID NO: 112978 - DNA, 371 bp, Arabidopsis thaliana columbia
ataaaatattatatttttttctgaatatgatgtaattctaatttttttaaatggacatatgttattcaacctatgaagaaataatatgtgtacaatgtcccacatcgcttagaaaaattggacaatggttcagacccatattataaaaggaccaaaatgattctgattacgaatgagcaggaagcttgatttatcaggcgtccaaaattaaaatagttatccgattttactgggattttttattttaaagaattgaaactttaaaatgtttcaaaaaattataaatattataactttatcaaaagttaaatattataattttaaatttttttataaagtttatctttaaaaaatgctttaaatatttataa

SEQ ID NO: 112979 - DNA, 280 bp, Arabidopsis thaliana columbia
  unsure (1)..(280): unsure at all n locations
tccacacatccgataaaaaaaaatataaaaaaatttttttttacccaaaacnaaaaaaacggccgcgacataaattattcatcctctcaacacaaaacaaaagtacaatcacccacattgcttataaaaatcatacacatccccatacccatatcatctaatcccaccaacatattctgattaccaatgatcaataagcttcatttatcacccctccaaaattaaaatacttatccgatactactaaaattctttattttaaacaattcaaactttaaaa

SEQ ID NO: 112980 - DNA, 254 bp, Arabidopsis thaliana columbia
aaaacccggggcgggccacgcgtacggaatcaataatgcttatagttttttttttgttgatattaactctaaaaggggggaccaaactaatttttggggtctccaccgactgtgagaacccgaaagaccatgacaagccaattcaacaggtgatcgctgagatgacggatggtgttgtggacaggagtgtggaatgcaccggaagcgttcaagccatgattcaagcatttgaatgtgttcacgatggctggggt

SEQ ID NO: 112981 - DNA, 368 bp, Arabidopsis thaliana columbia
gaaggtttgtgttgcttatggaaaagtgtatttggtgcagcaattcctgaaagacttgttgaaagatctatgcatatacaacaacaaagggagcaaccaaggaacttatgagctgaagcctgaatacaagaaagccactcaggaataggtttggtcaaaaggttttttcagggtttgttttggatactatcttttgattatctatagtgaggttaagcttgatcagttacttaaattgtaactgatcttcatggctataataagaaaggaaggttcgttcaattgtatgccttaagtattcacaatattaacgtaactaatcctttttagtgatgctttagaaagtaatcagttgttttaacttttgg

SEQ ID NO: 112982 - DNA, 364 bp, Arabidopsis thaliana columbia
aaaagttactgtcacttatgtttaattgtattaagtacaaaaaagggggaaagacttgttgatgggggtatacatatacaacaacaaagggagcaaccaaggaacttatgagctgaagccttaatacaagaaagccactcaagaataggtttggtcaaaaggttttttcagggtttgttttggatactatcttttgattatctataatgaggttaaacttgatcagttacttaaatcgtaactgatcttcatagctataataaaaaaggaaggttcattaaattatatgccttaagtattcacaatactaacgtaactaatacttttgagtgatgcttcagaaagtaattgactgtattaacta

SEQ ID NO: 112983 - DNA, 374 bp, Arabidopsis thaliana columbia
ggtctgatatttcagaagatctttttttaatatatgggaaacaacaaggggggggatactcgtttttttggtgtgttcatatacaacaacaaagggagcatccaacgaacttatgagctgaagcctgaatacaagaaagccactcaggaataggtttaggtgaccaggacctgtatgaacagcgttagatactatcgtttgattatctatagagaggttaagcttgatcagttacttcaacttcgaatgaaacttaatgggtatcataaaaacggaaggttcgttcaattgtatgccttaagtattcatcaaaatcaaggtcgaatctttttgatctactcattttaaaatattgtccactgttttaacttttg

SEQ ID NO: 112984 - DNA, 368 bp, Arabidopsis thaliana columbia
ggagaagaaggtctcgatttcaaattttcttaaggaaaagtttcaaaatttaaggcggcagtttcgcgaaatcaatgggcttttctttttctattttcattatggaaaatttcgcgctaattcacttctaggctcttatggatgaccatggtggttctgatttgagcctcgaggatctcatggatgagtattcttctcgacccgcacaaatagctgaatggttatggtgtattgaatatgtagccaaatttgtcaaggatctaagctgcttactcgatttgatgaacattggttatcagtaccctgatgactatgggaagaggattaatgaagtcctgtctcttagagtcttggagttcatgtttgat

SEQ ID NO: 112985 - DNA, 369 bp, Arabidopsis thaliana columbia
gtgagtgcaaatcccatcataccaactaatataaagttataccatcaatgatattctatcgtgaaaaaatatgtaaagtctaatatcattaagtatcatttattaaaagaatgaattgaagggaaaaaaaaaaaaaaagataggcaatccactagtgttcataatgaaagacgatggtcgatgtaatatgtatactaatattatatctctagctttgatcctcaatagtcaatatccatagtgtttatagtgttttaacagcttttgtataatgttaactgtgcaaaatacatgacataaaataaatgattttttttggcttttatgttataagtactattagttggttatctgttttaaaggtttttc

SEQ ID NO: 112986 - DNA, 357 bp, Arabidopsis thaliana columbia
aacaaatcttaaacgttttactttgtgctgcactactcaacctcaatggccgcctcaacaatggctctctcctcccctgccttcgccggtaaggccgtcaagctttcccccgcggcatctgaagtccttggaagcggccgtgtgacaatgaggaaaactggtggcaaaccaaaaggcccatcaagcaacccattggtcggatcttacccgtggcaagacttggggtccattctctggcgaataaccgagctaccttaccggaaagttccccggagactacggatgggacaccgccggactttcagctgaccccgagacattcgcaaggaaccgtgagctagaagttatccacagcag

SEQ ID NO: 112987 - DNA, 358 bp, Arabidopsis thaliana columbia
tgtgtgttcgtgcgtaaaagaattgtcatttctttaaaataagaaggaatgaaagattgaaaggtatatgttctaactaaaacgtgtgattaagattggacttttatacatagttgattactttggatgtatctttttgtttaatttttgtttcaataatgtcattgagtagtcgttgtgaatacgattgaccaacggttgcagagatatattggaggatttgatgtgatatctcctaagaatttcagaagttcattgaacgtttttttggggttagtgaaatagtatcatttgtatctttttgcataatttttgaaaaatcattcatatccacttgattctcattcaaactttgaat

SEQ ID NO: 112988 - DNA, 368 bp, Arabidopsis thaliana columbia
aattaatctacgtcacatactcgattttagttgtgagctgcaaaagtctcagtgattgctagtaagaaaaagtttgttcatctgcttttggtttggtccattatattgaatcattaagcgaattttgatgatacattgtgactactttgggttacatcatcatttatcttttacaaagggtttttgagtgtgactttatgatgtgtcaccaaacctcttatgacccattcttacggtgtagcaacatttcatttgttgagtatgtctaaagttagagcagaagaggaacaagtccttatctccaaatatgaaaaaaagttttgaaaacttaaatgatgagagagctttagttggagggtaagtggacc

SEQ ID NO: 112989 - DNA, 368 bp, Arabidopsis thaliana columbia
  unsure (1)..(368): unsure at all n locations
cgtatatatacattcatagcatggtgctcaatctaaaaaccttgatgcgactgattgagacatccatcgtcactgaaaagagaatctatcagaacggtagatctgttttcaaaactcgatccaggattttagtggctgagaaatgcctctgaacaggtaaccatgtgctgaacgaggggtatggcgacacctctgatacatctnatcaacaagatcaggggggcctgagaagagtgcttccaatgaaccatccctacaggtcctgacccatcccttatatatccgagctgctgagcgttctcaacaatacaatttctgtagcgaacggagcacattgtgaatctatatccaggttatgtgacttatgt

SEQ ID NO: 112990 - DNA, 351 bp, Arabidopsis thaliana columbia
ctaagtgcttcatcatcaccttttcatcaacataatcacatatctcaagggtacggaacggtcttttcttgataatcaagcaaagttctgaatcatctatatcgggacacagggagctgtttgttatctctaaaaaggggtttctggaaacaaggattacataatccacgatctccatctatcgatattcattaatatataaaatcgtgaatgatactatatatggaatcgctaggagaaaaaatgaagttcagcattagtacttccttatattacgaagctcgcctcgggtacagcattgaagacgttcctccaaacggtggcttcaagaattgcaaatcttctgtctac

SEQ ID NO: 112991 - DNA, 442 bp, Arabidopsis thaliana columbia
  unsure (1)..(442): unsure at all n locations
caggtgaccggtaccggaattggccgggtgcgacaccacgcccgtgccgggaagtacgnnatctggggcaatgtgtnntcggatctgattanntgacatataccatggagggtgcgtcaacaggactcctgttgtttattaatnntaaaaaaagtgttgtatcgccgtttacatttggtacacgaaagagctgttttttataacgctacatcgagtgtattcatatgttcaattattaagattccgaaatgtagcctattttttttatagataatattatcctatttcaataaatgcttattagtcattactaagaaaaagtctagtattgatatttagtcattttgaaatatcttttattggttttagttttaatagtagaaaataacaaatagaaaaaactaaatatatagatattctcatattcatgtactacttaccc

SEQ ID NO: 112992 - DNA, 371 bp, Arabidopsis thaliana columbia
aaataatcgtcgttgaccattgaccataacttagtcagtcatatatatgaaaatccaaccgcccactattgttcccctattcacaaggtccttgctttctcagacgtaaacaacaagaaattatattaacacaacaacaacaacaaaaagaccaaccctatttattcatattttctcttatatgcaactctcaaagaatccgatcaaacaaacgagaaatcgagagaagaattacaccgacgatttcaccatgaagagatctgtaatcatggctcctgaatctccggtttttttcccacctccgcttgttttctctccgacgtcggtcaaaacgccgttgtcttctcctcgttcgtcgccaccgaagctga

SEQ ID NO: 112993 - DNA, 334 bp, Arabidopsis thaliana columbia
gcgtcggtttttccatttactatttatctctcaaagtctggtaagtgtaaaaacatattatatattggtcaacacataaaaatcaatggagggagacaaactttgatggacttgatttggtacattataaatccaagcgctctatatatggccattgctcctttaagatatttacaacatctacaatattctctctagatcgatcaaaattactagccaatattgaatattgattacaaaaataccatacatattgcaaaatatatggaatggagaaacaactacatatagatgacctgtgattgtaatcgagtggtaataaatttttaatact

SEQ ID NO: 112994 - DNA, 370 bp, Arabidopsis thaliana columbia
cttcatttctctgcctttgtaaactttaatttattttagaactttatctcatatagaaatctcaaatatatatattacagtttttgcttaacttttatatttaaaataaatctgaaagttgtaagaaaattattttccatatcagatttaacattgggtgcagtcttgggaaaatatataatcgttagaataattttctcttttaatgtgataattcgaagacgtatgtaacaaacaaaaatgacaataataaatattacagtataaatcatttcaaacatatactataattagttattttttgcttaaatatgatggaattgttttgatattgcttaagaatcaaaaatgttttactctagataataaa

SEQ ID NO: 112995 - DNA, 296 bp, Arabidopsis thaliana columbia
aaaaacccccccccaaaaatctaccaaaacctcttaaacaaaaaaaaaaacaaaaaccgccctttaaaaattattgtccgctccacaccaaacaacaaaacccttatattctaaaacaaatcccacactactaacaaaattattttccatatcacatttaacattgcgcccaatcttcccaaaatatataatcaccaacacaacaatctctcttactaccacactacgaatacaccaccaacaaacaaaactcacaataatacatattacagtataaacaagtctcctcaaacacc

SEQ ID NO: 112996 - DNA, 366 bp, Arabidopsis thaliana columbia
gctgaaacatccaaattgacaaaaactttcctatgatcacaacaatcctgctgcaattaaaagagtttatggatctttctctgtttagatcattccaataaacatttaaaaaaaaacacttttggtcaatcaagcttcttattatcatgtttacttagtattactacctaattcagaattagttccctcgaatgtattattgcactatatgtttgattttattttatattttaagttgtctgattcgacatttattgtaaacttgcaaatttcttgaaaattacttcatgaaaacaatttttgtgaaatctcatgttatgcaaatatatatagttgttaatttattaagttttaacatgtaaaaga

SEQ ID NO: 112997 - DNA, 360 bp, Arabidopsis thaliana columbia
tttgcttttttttttttttaaggtctatcagagactttcatagcgatattttcactatatgaagccagatttgctccttttttcgatgattttcaatacttatgcttaattttaagatacgctatatattttcttcactcgttacatcattattcagaccaagtaataaaatttgccaagaaattattccttgttaaatacatcaaacgtatcatatgatccatatgaaattgatccaaacctatccatatgaaattgaagttggcgcacttggtccgacggcccaataacgtggcactaaacccaaacatcacagaggttctcgcgttgactactctgtcaacaaaaccgaaacagatg

SEQ ID NO: 112998 - DNA, 365 bp, Arabidopsis thaliana columbia
gagagtacaagcccttggtttttttcagattgtgatttattttgcaatgtagatctaagttttgacataaatttgagatccagttctctaagaaacttcttcttctttaacaatggcggtttgatttgatttttgctctctctcatgggtaaaactcgtttcacctacatagcatcgagatttcggttaatcaaatctcctgttattatggacatagatcggtaaaaaggtttcccaatggatatatttaaatggacacgttattatggataccaaaaacttgtttgttgatttttctttcagtttgcagagacctccaccttcaagactttacggacatgaaactttggtttctttacaaacca

SEQ ID NO: 112999 - DNA, 268 bp, Arabidopsis thaliana columbia
ttcatcaatctcccgccgcgcttcagacaagaaacaatgtctgggctgctggatggaatccccgaagcagtggctctgagatgcctggctcatgtgcctttacaccttcatcccaatttagaactcgtctctcgctcctggcgagctgctatccgcagtcatgagctcttcagagtccgtaaagagctccgatcttctgagcatctcctctgcgtctgtgctttcgatcctgagaacatctggcaagtctacagtcccaactgtgatc

SEQ ID NO: 113000 - DNA, 369 bp, Arabidopsis thaliana columbia
gtaaaataagactcctggctttgttgaatatgtacaaatattcgattaaaaatgtgggaaacttgtaacctcttttgattccttttggagccattcctggttctcatagttaaaataaagctttgctggtggcagagtcactgcgtaaatattgattgaagcatagcggaagcaagcaaccattctcccaaaactgcattaagaaaaatttaagtgatactcattactggcgtggtcatggttgtttaatacaaggccacaaccgtcaaacatagactgacacttgccgtatagatgacaattagagaagtgaatgaccaacactacagtactacttatgcagagcctatctagacagtacatctgatg

SEQ ID NO: 113001 - DNA, 390 bp, Arabidopsis thaliana columbia
  unsure (1)..(390): unsure at all n locations
ccggaaaaaaaaagggggtggttccacgcgnccganacacactattctaattttttttttaaacaacnantaatcacaagccccttccttcgtgntttttgcgccccttcacaccccacacacaacacataaatccaactagaaacataactcactcgccacaacccgatggattcaaaaactaaataacctttaatctctctcaaaaaatcagtaaatactttacgctcctctgtgacgatactccagcgaaatatctttacattgtgctcaacaccggcagcaacatcgtctggctacaatgcgctccttgtccgaaatcttactctcaatccgacccgatattccacccgagaaaattcaagacctatgccacaatcccctgttctt

SEQ ID NO: 113002 - DNA, 399 bp, Arabidopsis thaliana columbia
  unsure (1)..(399): unsure at all n locations
ccacgcgtcgcgctctggtatcatctgtcttctttcttcttcacagcctactataantcttctgggtgactcaaaaagttgtctgtgtgtgtctaaatacctaaattaccctccaacgccctactgcatctctcctatcatacgcgccatctgtgacgctcatcaagcaagtatcactttaccacaagactctacatcatcagctcttcaacctacggacccagatctgtttctcaaatttggttgccgtaacgatttcactctctcttctccagattccatccaagaatgcttcaccaatcactacgtaacccttgcgaatctgtgccaacaccatcacctccgatcacttcaccttccgctattaaaactttggattctctccttacagtgacctct

SEQ ID NO: 113003 - DNA, 336 bp, Arabidopsis thaliana columbia
aaaaaaaaaaaaaaacgggggctaacaaatatctttggtcgctctttaataattatttattccctctgcaaagaaaagtgctcaaagacagaacaacagaacattttctaggtggtgaattcatacactcaagaagaaagggtgggttattcataaccaccttcaagaatagagctatacctatccccaaccacccggacgaactgtctaaattctaaacaagatttttactagaaaccaactagatttcttgatatatataaatcatcatagccctataagtccttattgtatggataagaccacaatttaaaaaatcaccactttcttacaact

SEQ ID NO: 113004 - DNA, 370 bp, Arabidopsis thaliana columbia
gtttttggtacggaaacacttaatttgtgtgtaatcttaatttttccattaattgtagcagaactttttcgttgtcttgttgttcaggtgaggcagaaaatggtttggagagacttcatcattgtgcagaggaggagttgaaacagtttatcgggaaaattgaagacccatcaaaaaatttcggtgagctccgagcgaaattaattgatttgactaaagcaactaaaacctacttcgaaaatctggtgaaagctttggagaacggtcttgttgacgtggcatataatgagagccagtcaatagaagaacctgaatcttttaccaaaaggtccaagacaaggaaaataaaaactttaatttagagttttag

SEQ ID NO: 113005 - DNA, 387 bp, Arabidopsis thaliana columbia
  unsure (1)..(387): unsure at all n locations
ccggggggtttcacgcgtgcganatttaggaattttgaaacctttgtcgaagagaaaagaggcaaaanctcgggattttgatttttttagggcttttggaaaaagagcaaaatcgtgagagatggatctgattcaatcctacgaagaagaagacgaagccgttgcttcctcgccggaatcttcaccgcctcgtatgttaaaggcgaaatcatcggcgccggaggtagacgatacggcactagctctcacggtggctaacgtgaatcaatcgaaatcgaagccgattgacccgactcaacacgtcgtcttttataaccctacccatgatcagctgtgggctccgatgttcggccccgcgcatccgtatgcgaaagacgggatcgctca

SEQ ID NO: 113006 - DNA, 123 bp, Arabidopsis thaliana columbia
aataaaaatactttcaaacactgtcattatatataaagacacaacggacgagtggtctccccatactcagtggactcacaaccaccacgatcccaaatacaagaactcaacacattcctaaac

SEQ ID NO: 113007 - DNA, 293 bp, Arabidopsis thaliana columbia
  unsure (1)..(293): unsure at all n locations
nacttatatactaaatcattttcttgcccagatccaaacaaatcaccgggggcttttgcaattccggggggtctccaaaaccacaaatacagctttcttgctccctcccttcaatcaatcacgatcatcatcgctgtatttctactcctcgtactcaaacacacaatacattcatctataatcatatacaacaaagtctctatttccctcaagaatacaattcattattcatcataacatccatcaaatctgaaactaatactattcgagaaatccaaagaaacgtaacaaac

SEQ ID NO: 113008 - DNA, 367 bp, Arabidopsis thaliana columbia
atggattacatggaatgatgtttcctctctttgacacaactgtcaccagggtcaagctagcaactcatggtcgtcctgaggccatgaatgcagtactcatttcctcaattgctgcttcaacatttaacccgcagttggaagcgtgggagccccttctggagccatttgatggaatattcaagttggaaacatatgatactgctttgaaccaatcgtcaaagccaggaaaacggctgcgaattgctgctactaacattttgaacataaatgttagtgctgcaaaccttgaaactcttggcgatgccgttgtttcctggagaaggcaattagaacttgaagaaagagcggccaaaatgaaagaagaatc

SEQ ID NO: 113009 - DNA, 371 bp, Arabidopsis thaliana columbia
acctgcttcactcaaatcatgaccctgaaacttatgattcattgaactagaagcaacaacaccaccactaggacctgcttcacgactatcaagatcaagagactttaacttattaacaacatctgaagaagaacgctcatgctccatacgagctttccaagcatcagaagaaatagcaaaatcttcaggaccagaaacaccaatatactgataaattcgatctatttctccatcatcaactccatcgactcgaaaactagtacgattcgggaaatccaaagaacgagttatcaacaacgaagaagaatcttcacctgcgtcataatcgatattcctcctcaccgcatcactacggtctaaccgccgcgccg

SEQ ID NO: 113010 - DNA, 366 bp, Arabidopsis thaliana columbia
gcgtgggctgacgcgttttttcccaaagacttagagattagctgggggggtactcagaaaacatagggtagtttctcttcaatttagtaactataaacttctaaaaatacaagcaatcatcttcattttggtaatttatagaaatctggaacttaattagaccaattaatccaagacattaggatttttccttcgaacattctccaatttctgagcaagaaaaacaaaaaataaaaagctcagactaccttgacaccagagtctgaaaccccaatcgctactccattatccgccgtagcttccgcaatcagcttccgtttaagaggattagacgacggaggacgcggaggcaatggacttttcaat

SEQ ID NO: 113011 - DNA, 374 bp, Arabidopsis thaliana columbia
tccggtttcattcatatctctctctctctctgggccttactcaatcaccaccaaataacagacaaaaaaacgccttcatcgccggcgaaagtgagtcggagaatggcgtatatgtgcaccgacagcggaaacttaatggctatagcacaacaactcatcaaacagaagcagcaacaacaatcacaacatcaacaacaagaagaacaagaacaagaacccaacccctggcccaatccatccttcgggtttactcttcccggttcgggtttctccgacccgtttcaagtaaccaacgacccgggttttcactttccacacctggagcatcatcaaaacgcagccgtcgcttccgaggagtttgactccgacgagtg

SEQ ID NO: 113012 - DNA, 367 bp, Arabidopsis thaliana columbia
ttgaaagaccattaacatcattccttgcccagatccaaacaatgccatcggcactctctctatttagggttctctccaacttttcaaatccctaattcttgctccctcccttcaatcaattccgatcatcatcgaggtctctctactccccgaatttaaagatcagagccgcgacttcctctgccttcttttcctcggaatttttcagctacgttttccaggtggtgtgtattgtcaatcagttgacctttgcttttgtagccagatcgttcgtgctttgagtttagggctcttttacaaggtttcgtgttggtggaatttctctacctaggtttgggggaagagttcagtaatttcgttgtagatc

SEQ ID NO: 113013 - DNA, 220 bp, Arabidopsis thaliana columbia
cccacacgcccgcatgatttgtacattcttcaaccggtacttaccttgtcacagattttccgctgtagtctctcgattttattaggagatcgagcaccgcacttcgagcttcacatctctttgttcaatctcaaaggtagaaattcacgttaaattacatgtgatttcacttgtttttttgatactgtttccatatagatcgatctaattctgggttctt

SEQ ID NO: 113014 - DNA, 370 bp, Arabidopsis thaliana columbia
cttccttacaaatcagggagccctaacagccatagctattatggcagcccggcatttgggtctaatatgtcatatcctggcagcccattggctcatcatggtatgccaaactctcttatgtcaccttacagccctatgagacgaggtgaagtaaatatgcgatatcccgctgcaacaagaaactatactggaggggtaatgggttcttggcacatggatgctagtttggatgaaggatttggatcttcaatgcttgaagagttcaaaagtaacaaaacaagagggttcgaactttctgaaatagctggccatgttgtagagttcagttcggatcagtatggaagccggtttattcagcagaaactcgaga

SEQ ID NO: 113015 - DNA, 372 bp, Arabidopsis thaliana columbia
gggataaaacgtctatatgatatacaaatctatcactgagttttcggaaaataaagctcgatcataaactcagtaaacttaccgtacatagttactggactcagtaaaatacactcggacaaatctattcaaggagccgcttcgagtagcataaatattattactcaatggccgaagttctaggactgaaatgaatgggattccgtcgtttgtccttacaagacaaatctgcaaagtatttgactttggggtgtgaataatttcgctggacgtaccatatcctctctgctctgatcgcagtgatgcccaattggtatcagggtctcccattgtagatattgtttcccaccaagtcctacctatatacagatc

SEQ ID NO: 113016 - DNA, 368 bp, Arabidopsis thaliana columbia
agcgtttcgacaccatgtcctactcttccttcaccgtctcctgaaaaagagaggaaaccatcccacaggaatctgagtaccaaagacatcatcctcattgcgtctggagcactcctcatagttatgcttatccttgtttgtgttctatgttgcttgctgaggaagaaagccaatgaaaccaaagccaagggcggagaggctggacctggagctgtagccgcaaagactgagaaaggaggggaagctgaagctggaggtgaaactggagggaagctggttcattttgatggaccaatggcgtttactgcagatgatcttttgtgtgcaacagcagagataatggggaaaagcacttatgggactgtgta

SEQ ID NO: 113017 - DNA, 272 bp, Arabidopsis thaliana columbia
caaaacacacctaactaaactttataatcacaccacactcctatccgaagtagcatttctaattttttctgatccttacaaaacacccaagcacacaatctagaaactccctatccaaaccccttacatttcaaacaaattaacaacacttctccagcaaaaactactaacatctaaccctaccaaaccaaaattttgaacaacattatccctgaccacctataccccttatttacattgtctctcatcaccctaaatcccaaaaccatttt

SEQ ID NO: 113018 - DNA, 318 bp, Arabidopsis thaliana columbia
  unsure (1)..(318): unsure at all n locations
aacaaaataatattgcaaatatttcctataccaacnaccacacagaagcggagactttagaaattttacggccttacacaagcacaaaattacccaacttaataattactatgggccaaagtaaagaaatcacaatcactttttcttctaaacaaccacaactcaatatatcaacaactactttcaaattaactaacattaacaaactacaacatactacatcataagcatacaaatacttaaatactattactaaatgcaaatttgtctccaatacggattcatacttaaatatatttactctaaaataaatcttaa

SEQ ID NO: 113019 - DNA, 374 bp, Arabidopsis thaliana columbia
ggtaatttaaaactggtattcatgtactgaacaagtctgctacataaaaagagtctagtttaaacaaaccgactctggttagctctacatcccaaaactctaaagtctgctgcagaagattctaattatactaggagttaagaaacttcaaacacactaaaacccgtagagctctaagtaaagatgttgatgcaagcttgagctaaatgtaaccttctaagatagattctgatacctctcccttggtaaattcccaaacatgataataaaagcatccaggagacattcatctcgataataacgccatcttcactcttcaacccgctttcagtcaatgagagttcatcttcttcaaaatcgtccaccatttcagc

SEQ ID NO: 113020 - DNA, 314 bp, Arabidopsis thaliana columbia
cacttggtaacattaatctttttgtgcaaaaacgacccactatcctggggcatgaaattaaggttttcgtctgcaagtataacgacccaatttatgttaagatggagaagttggagattatgattaaacttgcctctgacagaaacatacaccaggttcttctggaattcaaagagtatgccacagaagtagacgttgattttgttagaaaggctgttcgtgcaataggccgatgtgctatcaaactagagagagcagctgaacggtgcatcagtgttttgctcgagttgatcaagattaaagtaaattatgtt

SEQ ID NO: 113021 - DNA, 361 bp, Arabidopsis thaliana columbia
ctaggatgtaagttatataataagcacagccaaatattttttttatgtctgttgcatattcgttcataattgtggagttatgaaaatattgtaatccatattacctcagatcaaattttacatgagtgtaccaaacatataaacattgattatcgaaaccatgctctttgtgatttgccataacctttctttttgtgaattaccaaaatcacttaggtgatgttctcaccaaactttaacttggtatccagtctgtgcatttccaagattgatatacacaattactaatttaatactctaattctctagattaatataagtggtttggtcgatcggtttaattattgtatctggttttttt

SEQ ID NO: 113022 - DNA, 361 bp, Arabidopsis thaliana columbia
cgcctgctcatcatgagattgatcggtataaggcagagattaagaagctggaggaatcagaatcagatatcaaagccttatctgtaaattatgcagctctcttaagagagaaagaggatcagatttccagattgaatcaggagaatggctcattgaaacaaaatctgacctcaactagtgccgctcttaaagaggctagaaccgacatttccaggggatcaaacaactatgctatcaagggaaacaatgatcagtcacccaataggctacacaaatctgtttcgcatttaaaaagtccaaaccatatgtccaatggaaaagggaaggatactgattcgtttataaaggaaaaggaccttgc

SEQ ID NO: 113023 - DNA, 255 bp, Arabidopsis thaliana columbia
ggggggttccacgcgcgcgctattctgctatttctctgatgttttgccgacagtctctaaccatggggaggcagatttaaaatatctatgcgagtgttcacaaagaccacgtcgattctggaaagtcgaccaccactgggcacttgatctacaagtagggtggtattgacaagcgtgtcattgagaggttcgagaaggaggctgctgagatgaacaagaggtccttaaagtacacatggatgaggcacatactta

SEQ ID NO: 113024 - DNA, 370 bp, Arabidopsis thaliana columbia
atttaaaattcagatagtgagagagatgattatattttttgaaattggaaggaaacttggagtaaataatataagaagaaaagatgggtcggtggaggttggctttataggttctgttttgacgaacacattatcaaaaggtataagtaagctcttttctcacctaaacggctaaacctaccttcgattagaccattttatttttaattctcttacatttatttaaaaatattttggataatatgattttctatcataataaataaaaatagatggataaagacaaatgagagatcaaattgtggaaatagtatgttattttttaataacaccggccaatattagcttattgcacttttatttcttaaaa

SEQ ID NO: 113025 - DNA, 367 bp, Arabidopsis thaliana columbia
gcttaatcctgtgatcaatcggtgccaatgctattggattgtccttggggggttgcattaggagtttagcggggcggctgaataatgtagactacaaagcttaagtagctccgctgaccgctgcttcaacgctgcatcacacccgctctggatcacgagtaacagctttgcagcaagaccaacctcaacagcaagtggtgaacattcttctggagctaatttgcagacagaccaaagaatcgacagcgcgtagttagtgcaattctcagacaccctcatcagcaccctaactgtataaggtattgtgtttgcagagtctttgacagcaactcttacttccacgtctgtacacaaagcatcaagaaca

SEQ ID NO: 113026 - DNA, 296 bp, Arabidopsis thaliana columbia
gctaaacgttctaaatcttttttataatcacctctctggtaaaatccggggcgtctacgctatatttatgtactcacacgacttcatcggaaatcccggtttatgcggtctttgtcagaagatcacacggtctaaagacattggctatgtttggattctcttaacgattttcttactcgccggcttggttttcgtggttgggatcgctatgttcattgccaagtgcagaaaactcaaagctttgaagagttctagtttaacaacatctaaatggaaatcccttcacaagcttcatt

SEQ ID NO: 113027 - DNA, 344 bp, Arabidopsis thaliana columbia
gaccacgttagaactcttagaatgagagttttataattgttatgagggttccataaacataaacaccccacactttaaaacacaccaattgaccaacaattaatcaacactaatacaagttttaacttattgccataacacacaacacaaactcatctttctttctctgcttcacttgaatctcaaatccatttttagaaagtctctacggctgctgtaggattcagttctgtaactgcagaagcattcttcattgctgcgaaccgtggctccttgggctgaaacttgacccctgcataaagcttcatgtagtcatcaaagacgaaactcgggtactcggaatc

SEQ ID NO: 113028 - DNA, 343 bp, Arabidopsis thaliana columbia
taaaactttggtcatgtacgtttataactgcgtttttgcattgtctctcggtatatataatcatttctaagtaatccactcttgataaaactagtaattacagattaaacacgtaagctttcaggaaaatcttccaaaaattcaggttcattccggtgaaaaatcattgttcatacattttgagtttgttatgacgttcactacaaaagaatattcattgtaggacaaatccatgaaagattatgaatttatgaatccacataatatggaaataaagatggatttgttacacctaatggtttatacatatatattaatataaagtagcgcatgtgcataaaga

SEQ ID NO: 113029 - DNA, 366 bp, Arabidopsis thaliana columbia
  unsure (1)..(366): unsure at all n locations
cggggcgttccacgcgtgcgcanccncatcattcttctcctttttgctatatcgaatgccagagaaagggcgggtgggtatctttccgtggctaaacataacattcacatcaacattgtggtcattggccacgtcgattctggaaagtcgacaaccactggacacttgatctacaagttgggtggtatagacaagcgtgtgatctagaggttcgagaaggaggctgctgagatgaacaagaggtccttcaagtacgcatgggtgttgcacaaacttaatgctgatcgagagcgtggtatcaccattgacattgctctcttgaagtccgagaccaccaagtactactgcactggcattgatgctcct

SEQ ID NO: 113030 - DNA, 350 bp, Arabidopsis thaliana columbia
ggggggcccggcacccacccacacccccatcaattcttcttccttgttctttatccgacgcccgcaaaagcgcggaagggaaatttttcagggttcaaaaaaaaccacacaccaacattgcggccattcgccacctcacaactgcaaaggccacaaccactggacactttatctacaaattgggtggaattgacaaacactttaactataagttcgagaaagacgctcctgacaataacaacaagtccttcaagaactcaagggtgttcgacaaacttaaagcttaacaaaagcgaggtataaccattgacattgctctctctaagatccagaccaccacaaactactgc

SEQ ID NO: 113031 - DNA, 352 bp, Arabidopsis thaliana columbia
cagtcctcgatatctaaggaccaaagtagctatggatggaaaacgtgcaatgtgactgctggtccagactacatcccttgccttgacaattggcaggctatcaaaaagcttcatactacaatgcactatgaacatcgcgagcgccattgtcctgaggaatctcctcattgtcttgtgtctctgcctgatggttataagcggtccatcaagtggccaaagagcagggaaaagatctggtacaacaatgttccccacaccaagcttgcagagatcaaagggcatcaaaattgggtgaagatgagtggtgaacatctgacgttccctggtggtggtactcactttaagaatggtg

SEQ ID NO: 113032 - DNA, 173 bp, Arabidopsis thaliana columbia
gtatattagtagatttagtctttcgtttgtgcgataagattaaccacctcatagatagtaatatcattgtcaaattcctctcggtttagtcgctaaattgtatcttttttaagcctaaaagtagtgtattcgcatatgacttctcgtcctaactttttttttaattaacaaaa

SEQ ID NO: 113033 - DNA, 350 bp, Arabidopsis thaliana columbia
agaaaacctagaaggccaaaactagaggagaaacccatataacacacaccgacatattcatatagatggtgggctcggaacatcatcaccatcatcaacaacatcatcatcaaaaccatcagcagcagcaacaaaggagcaaagaagctttagggatggtggctctccacgacgccctgagaactgtttgtctcaacaccgactggacttactctgtcttctggtccatccgtccccgtccgagagttcgaggcggtggcaacggctgcaaagttggcgacgacaatggaagcttgatgttgatgtgggaagatggatactgcagaggaagaggaggaacagaaggttgc

SEQ ID NO: 113034 - DNA, 430 bp, Arabidopsis thaliana columbia
  unsure (1)..(430): unsure at all n locations
cacgcccgtccccgctctctcannacaatcctacattatatgtagggnnttgctgcnnttctgagtggcgtagcaggtaaccatgttttatgcgccctccacttttcttnnaatgccanntcttttnntcctcttccctttctccttctctatantanntattttctgacctcnntgcaaaaccttnnaattcatcccatctnnctcaaacccaccatttntgtggaaacccaccatttcacagttncgcttaaacttnnttccatttgntagtatcaatttcatttattcattganntatggatgtctccaacccacgatgctcctnnngtagctgttgtttgcagcttacctggcttcttnggttccagcggatcttcaagtgtggcttaaagggtcccacgtgtttggcccagttttgggcagtctt

SEQ ID NO: 113035 - DNA, 188 bp, Arabidopsis thaliana columbia
taaaacttctatataattctcatttttatcacttaactcacacgggatatgtcgctatttttaattttatgtaacttaccatacatatcttctatactcattaaaatacactcacacaaatctattcaatgagccacttccactataaaaaatataaccactcaaagaccgaatcactatcacttaaa

SEQ ID NO: 113036 - DNA, 345 bp, Arabidopsis thaliana columbia
accgaatactgtatccttcactatctcatcgacgtccggaactgcaagtgtggcacaagattatagtggatatacgccataccagacctcttctgacccacacaactattcaaacacgggatattccaattactacagtggctatcaacagcaacctagccagtcatatcctcagcctgtaggggcttatcaaaacacaggtgctcctcagcctctttcctcatttcagaatccaggatcttatgctgggactccaagttattcaggaacttactacaatcctgctgattatcagactgctggaggttaccaaagtacgaactataacaaccaaacggctggaag

SEQ ID NO: 113037 - DNA, 338 bp, Arabidopsis thaliana columbia
ctttagttatgtcacattagtatactatgagaatatatcaagattctactaggtgtatgcataataagggtaagaatttctcttacttttgttcttcttcgtgaaggtccctcctacatgcctgctcttcatcttcaatataaccttcatgttcaataaccaaatcaaaatcataagaatgatgccaagaaatggttttaagcagagactaaagcatattactagatatatacatcattcacaaaattgctttctcttcttttattggtctctgaaatcactttttcatgttccttttttctattcttttaacaaaatcacactcatgtaggtgactt

SEQ ID NO: 113038 - DNA, 353 bp, Arabidopsis thaliana columbia
ctcttcttctcccatcgaagagtcgtcttcttctgcttctctttcgtccgttgccttcaatggccgaatttccagaatccggcacagttatagagccggtgagcttaaaccctgactcggatctgtcgaatggccgagccgagatagacacttccgctccgttcgagtcagtgagagaagcagccactcgtttcggcggttttggtttctggagaccttctctcaagagactcccagatgcttctcaggaaaatatccaagaaactgatatcatgggactcaaagcacaagcttctgagttacaaagagaactaattgttaaagaacgcgaaacgctagaggtgttgaaggag

SEQ ID NO: 113039 - DNA, 222 bp, Arabidopsis thaliana columbia
gaaccctccataataggtctaggaaaaggtatatattcagtttacatttctaataagtatcatttctttatgtcgacagtaagattatttctacatgtaatagtactatagtaaaaaacgaaattttaaatagtgatatgaaatttgttcccgtatataaggtgatcacttttgagtaaataatatgcgaaatctagtgcaatattcctaaacaaccatacc

SEQ ID NO: 113040 - DNA, 346 bp, Arabidopsis thaliana columbia
gttttgggaaccttcggttaccacgcaccagagtaatgaatggttctgaaataatagttgatcacacagtattcttgaggaaggaaagattgtaactgtacattttcgctgttgcaggtatgcgatgactggtcaactgacacagaagagtgatgtttatagttttggtgtggtgcttttggagctcttgactggtaggaaacccgtcgatcatacgatgcctcgtggtcaacaaagtcttgttacttgggttagtactaaaaccatgttgctttaattttctgaggataatcttactttcgaatttactgattgttcttggcatttgccgtcttaacttcaggct

SEQ ID NO: 113041 - DNA, 351 bp, Arabidopsis thaliana columbia
cttcaagcctcttatgcatgttgggtttaatggaagatagttagagatttatagtactgatcaaatcctgatacaggttgttgaagatggaggaagtgaagaggtttggcacaggaggaagacttgatccctttatttacaaggtatgaaacttaaacctgcacatccttcattgtgatatatattctagcaataagtacatataaattgatctttttgcctccttatttttctgtagattgcatgaaagattaagacattaatgctggaggcaggtaacacttatatcccctttcccactatctagttatatacagtttggtttgatcctgatatgggctaggaaaacgt

SEQ ID NO: 113042 - DNA, 197 bp, Arabidopsis thaliana columbia
ggggctcgaggtaaagcctcaacatcttatataatcctttattatttaaatcacaaatactcaaggggacagggacaatttattcgactttggacaaaaccctcaccaaaaaaaacacccccctacaccttccaatactcatgctctaaccccaaatactatagataccattccatatatccctacaaaaacaatct

SEQ ID NO: 113043 - DNA, 349 bp, Arabidopsis thaliana columbia
atcacaagtaaatacaaaaattttcatttaacaatatgaagcgaccaaggggccgggcgctttttttgcggtatggttctcaaaaccacaaagggtttagattcccatgacaaagatgtgcaatcagccaatcgcttgtgggagctatacgaacggtggaggagtcaccacactgttgctaggagccttgaagagaaagctaagaggttcaacgtgttcaagcacaacgtgaagcacatccatgagaccaacaagaaggataaatcttacaagctcaagctaaacaagtttggtgacatgactagtgaagaatttaagagaacatacgctggttcaaacatcaaacatc

SEQ ID NO: 113044 - DNA, 344 bp, Arabidopsis thaliana columbia
tccgaattcaaatcccttggagcgctaatcgccaattctctcatcctcctttagatttccctcgttttatcagagcttcttcttcctcaacctcacagaagccgaaaacttacgaaggtccgaaaccgaggaagaatttagtagctgatttcatttccaaaaacgatgacttggttcgaagcttaccgatctacgtcgggggcgcttctcttttggccgttctctttaatcggactgtttccggtatcgctcctgttgccgatgctagcagctcacagtctagagcagatctattagcgcttggcttggctgtcaccaatctattgaccggtttagtctggtta

SEQ ID NO: 113045 - DNA, 354 bp, Arabidopsis thaliana columbia
caaaaaagaagatatatatattttgaataatagaaaagatcagtaaagaagcctgaatgacatggtttctgaagttaactttctctctttcctttctggttctgtattcaacatagagaatactgatgaggtaagcagtccaactacctaagatgccatagaagagctgaaagagaatccctgagagcatccccagctgtgagaacgagtatggcagtgtcaacagcacttgtgccacctatataatagcacattcatgaatcagaatcataagcagagagactaaatatatagtaaaaccaaaacttgttcatcattttcatctgagagaaagctattacctgattggaagca

SEQ ID NO: 113046 - DNA, 305 bp, Arabidopsis thaliana columbia
cacaaacaaagatatatatattactcaatactaagacaagaggctcataaggggcctctatgacatgattcacggaagttaacatctctctaatctcctttcatagctctgtatctcaacatacaatcatactgactgatgtaaccatagccaacttcctaatatgccatacaacagctgaacaagaatcccttaaagcattcacagctgtgagaacgagactggcattggcaacatcacttgtgcacacctatataatagcacattcatgaatcataatcattagccgagagactaaatatata

SEQ ID NO: 113047 - DNA, 338 bp, Arabidopsis thaliana columbia
  unsure (1)..(338): unsure at all n locations
gtaccgcccggatcgcggctgcagtctccaggcgtgacgctactctttcttccggtgttcaactttttgaatgttctccaccggtgcagtatccaccaccggtcaataaggatacatcggcaccatacnaacatacaccggtgaagtattcaccatcgatcaagacttaccctcatccgccggggaagtttcctccacaaaaacagtttcaaccgccgtttaaaagatttcttcaccaaaacaatattcaacggcgattaaaaagtattcttcaccaaaacaatattcaacggctttcaagaagtatcctccggcagaacagtattcaccaacgatca

SEQ ID NO: 113048 - DNA, 370 bp, Arabidopsis thaliana columbia
gtcttcgtctctctctctctctctctttgtctccgccatgacaagctcgtcatctcctgcacgcaaggcgttaagcaagatcgcgtgtaataggttacaaaaggagttatcagagtggcaagtaaatccaccgactgggtttaagcacagagttactgataatcttcaaaaatgggtaattgaggtaacaggagcacctggtacgctttacgctaatgaaacttataatcttcaggttgagtttcctcaacattatcctatggaagctcctcaggtgatttttgttccaccagcaccgttacatcctcatatttacagcaatggacatatttgtttagatattctgtatgactcatggtctccagcaatg

SEQ ID NO: 113049 - DNA, 353 bp, Arabidopsis thaliana columbia
atttcataatctttttcatggcttacaactacaatatgcatacttcatgaagagtagctatcataggtgcgggtgttagcggtttagctgccgctaagcacttagcacgtcaccatccacaagtctttgaagcctctgattcgattggaggtgtttggagaaaatgtacgtatgaaacaactaagctccagtcggttcgagtaagctatgagctctccgatttcctttggccgaacagaggcgaaagcagcttcccaacttatgtcgatgtattggattatttggaggcttatgcaaagcattttaaccttgtaaagtttataaaattcaactccaaagtcgttgaacttagg

SEQ ID NO: 113050 - DNA, 351 bp, Arabidopsis thaliana columbia
gggttgcaaatgctaaagttgttaaacgaatccaacacaaactaaaccttgtaagtagacctttttgtttttagtttgttaatttgcaacttgaaggttactgtgagatgtctggtggcaactgtcttagtacgtcgttatgagtattataacttctcccttgggttgtaacaggcccaatcgaagtttcaaagagcagagaaactgttgtccaaaatagaagcctctatgattccaaatggacctgattatgatcaagaggtcatctccgaggaagaaagagctatgttccggaaagtgggactgaaaatgaaggcatacttacccataggtgcgtcctggtctcttaag

SEQ ID NO: 113051 - DNA, 362 bp, Arabidopsis thaliana columbia
gaggacactgtgttttgtggtgtttttgatggtcatggtccgtatggtcacattgttgcaaagagagtgagggatttgcttccactcaagttaggttctcatttggagtcctatgtgtcccctgaggaggttcttaaagagattagccttaacactgatgatagaaagatctcagaagaccttgtacatatatctgccaatggagaatcacgagtctacaataaggattatgtgaaggatcaagatatgattcaaatgctaataggctcaattgttaaagcctacagattcatggataaggaattgaagatgcaagttgatgttgattgtttttgcagtggaacaactgcagttaccatggt

SEQ ID NO: 113052 - DNA, 358 bp, Arabidopsis thaliana columbia
ggagattgaggaaatgaaaaggtcaacagcttgacttggtcgcattggggcagacatgctgatttgaatgttcgagctaagagttgtttaatcggagtagtagccattactttggatcctcttcttcttcccaagaacctaaaaggttgacgaaggcagagtctcttatccggagggagttgacttctgacattagccgttattaataagtctgttagtcaactcttttcttttttcggaaaaacccctttattcttcgtatatttcacttaactccctgtattctcttctgttcaacgaacaatttctttacttttctatttcgtgaaataatttcctatttaagtgagataacttc

SEQ ID NO: 113053 - DNA, 347 bp, Arabidopsis thaliana columbia
ataaattaaggaaataaaaatttcaacaccctgacccaggggcactaaggcaaactatcggttttttacacacaaactaacaaccgcataatcaaacaactaaccattacttccaatcctctaattcttcccacaaacctaaaatttttaccaactcaaactctcccatccaaaataaaaccactatctaacattatcccttactaacaaatatcatactcaacacctttcttttttaacaaaaacccctttattctcaacatatctaacctaaccccctaaaacaaaatccttttaaacaaacaacatactttactatcctattacctgaaacaatttcccattta

SEQ ID NO: 113054 - DNA, 367 bp, Arabidopsis thaliana columbia
atcatcatcatcaggaggtgatgtatatttcatcaatcgcgtaaggtaatatgtagagggcagatgttcatcaatgtaattttctatcccaaaactctccattatcattcttctcaccatcaaatccaattccactaattgctccgaaaacaggtgtatcgtctcactgtttcaaatgcaaaaatgtttcaaacacaaaattcttgtgttctataatcaacatgtaatgcgtataatcaagtgaaaaccaaaaattttgtaatgcacattaaaaggcctaaatggattgacttcatgttcgtacctaatactcttgttcccatgatcaggccataattgttgagtaaagtcgttgactctctccaaa

SEQ ID NO: 113055 - DNA, 207 bp, Arabidopsis thaliana columbia
acgtgcttttatgattccaaccgaacacaactgacaagcgcttaataattaaccgccgattcctatctctatcattcgacaacagatgaagataaagctaaacatcaaatccgctactacatcaaaacataacactctcccactgcaaaaatcattctactaaacactatgatcgcaccatatcctacttcaaccatagtctccggt

SEQ ID NO: 113056 - DNA, 411 bp, Arabidopsis thaliana columbia
ccgtccgacgagggtactagatgtagctatgccagatggctgtttcaattgaaagagacacagcatggggacatgtacaaggacacacctccaatggctacttctcatcatgcgaacatacacatctttatggatgaacaagatcgtctcaatagaaacgagttccttcaatatcactagatgacttgattgcttaatttccgagattttacgcaagagtgcaacatcatatcccacccttatatgttcatacagcaactactcgtacctatagagcaccgaactagaatcatgcactaattcacccacactcagatgtctctcaaatgaatcaatcaatcacaggattggtgttactgaacaaaacacatggatctatatagatgcttacagattcctaaccaatgccta

SEQ ID NO: 113057 - DNA, 285 bp, Arabidopsis thaliana columbia
caacacctggatatggacagggagagggctattgtggtacatactgagactgcttgtgtacattagtagttgttctttatacaaaagagaatgaatcatacatgtttatcttgatcaacatgaagaatagtttactctatgctatatgatgtgaccccatatgcaggggccatttatgttcagagtgatcggcacatgctacacttgtatattatacacgggaacggatatgtataaaggttctgtgaaagcttaatagagataaagtctattattgcaaaataa

SEQ ID NO: 113058 - DNA, 368 bp, Arabidopsis thaliana columbia
cgactatgaaagcaggttgtcgacaaaagttgattagcccttcaagagcggcttcttgtaacggaaggaagcctgtgaaagctgtaactctcaacaacacgaaggagaagaaagcttcgagttgtagcctcatgaacctaataaatcaacacattgttgttagacaaagttgagaataaacagagttttaggttttaatgttataaaaaacagaggacttacttgcggaggaagtgatatatattgagtatacaactacagatcattgatagcacaagagggcttgaagaagctccataatggattaaatggtgaaatagatcgtcctgaaccatccgaagaagcttagggcggccgctctagaggat

SEQ ID NO: 113059 - DNA, 384 bp, Arabidopsis thaliana columbia
aattccgggttggaccaaggggtccgaccattaccattgaccaacctttgggagtattatttggtttccaataatgtaaatatgtatatatatatattttttgtttttttaagttttctaatcatttttacaatgcagggaaagaggatcatttgatttcaatcggctggatagttacatgcatcagtttaagggaagcagcacgaggtaatttccccccttagtttttgactattctaattacgccttcaagaaataattttacttaaagaaatgcgaatacttcaatgtttataagataaaagagtgtaacgcaaaagtacattaaaattacttccattctaattcaggattcaatgacagattctactttaaccagaaata

SEQ ID NO: 113060 - DNA, 363 bp, Arabidopsis thaliana columbia
gttgttattgtactagttactccaaccatcttctgcattcaccgcaaaggctatcacggtaacctcatgttctttgtaatttcgttgcagctatttgcaacaaagaaggcagactctatgtcatgttggacactattggatttgtacctaaaccccagcaccgtaagatttttatatcactctgtttagcttctgcttattctagagctacgcttagcaactcttcttttctaggatgccccattcccgttgattatgaccctgataaggtgctcctaccaagtgataaaaccgcagatacaattgtcagaaatttgacctacgtaacagaggatgaatcctctaagtctcagtttcctctat

SEQ ID NO: 113061 - DNA, 354 bp, Arabidopsis thaliana columbia
tgaatatattgatatatctatctctactcgtcagcaagctgtcctcatgcttctctcgtcattcatttgctttttcataatgatgttgtcttattgtctacattgttttaaggaacggttagctacgatttgtttatacatttaagtaggctcagaattatgccaacaaaagatagtttcagagtttattgcaacaaaaaatagtttacaaaaagggtcccaaaacccatttaatcatttaaatgatttagggtactgttactaattatgatatgtgactgttgaaaacttctacaatgtttatagcattttttgtaatggaactcccaaaaaccctgagggctcttaaagatc

SEQ ID NO: 113062 - DNA, 370 bp, Arabidopsis thaliana columbia
ccggggggaaccacgcgggctgtacttctctctctacctttacataaaccacctttgacatcaaaacagggggaacccatgtacattcccaaatttttaaggaccacaccacttcgttcccacactaatcaatataggcccgataatctaaccctgttctcaaggacattatcccattctctttcactcaatcaatatctaatgataaacttcaccacatccaattggacatagaagactatactataaagccagataactcctacccatccccaaccaatacccttaatacatgctaataaccaacttgcacaaaccccaatcaaaacaccaatcctttaaattaaaacaacaaccaaacaaaggatat

SEQ ID NO: 113063 - DNA, 347 bp, Arabidopsis thaliana columbia
gttttatcatgatagacctaccgttagccctacgtcaggggagaaagaggggatgttcgctatttataaataatcaattacaacagataaatattgcgtgagagaccttgaatgtcctgacgttgctacgcccaaagatcaagaacacatttactctcaaagcaggaaaaaaataattctggcttcttcgttctagctttatcttcattagcttgcacttgctatccattcagatacctggcaatacatcacattatgttatctaatataagatgcaataaatttgctatcgcgtatggcatgcaatacagctgaccaaacataagaatctgttgtgtgacaaacac

SEQ ID NO: 113064 - DNA, 353 bp, Arabidopsis thaliana columbia
tttaatacctccgggccacaggagttccttccccaataggattagggggccttttaaggttttcattgttgtcctggtgatttcagctcgaaaaggtgaatttgaaacaggatatgagaggggtgggcagacacgtgaacatgttcaacttgccaaaacattgggtgtctctaaactgattgttgttgtgaacaagatggatgacccaactgtgaactggtcgaaagaaaggtacgatgaaatagaacaaaaaatggtaccgttcctgaaagcctctggctacaacacaaagaaagatgttgtcttcttgcctatatctggtctaatgggcaaaaatatggaccagaggatgg

SEQ ID NO: 113065 - DNA, 310 bp, Arabidopsis thaliana columbia
cctaaaacatgttatctccttatatcaagaaaaacctccggctcatatagagatctctaaactgtttagatctaaaactatacatacataacaacacctgcctcaaaacttaaactctttgccacaacattacttctaacaaaactatttatccacgtaaatgcatccagaaccaatacaacactaaatgaacattcatccttgaacccaaataaactaactgccctaatggacatgagaattttaaacacccctacacatagaacagtaggaaacttattcttctccaccagccacccaatcaacgatt

SEQ ID NO: 113066 - DNA, 363 bp, Arabidopsis thaliana columbia
tgcagttggatctgacaggaatatttatgcatggaaagattcctacacttaagatatgtgtgattcagattttccgtgcccatttgtggcagaagatccatgagagtgttgttatggatctctgccaagtattggaccaagagttggacgctttggagatagaaactgtacagaaggagacaattcatccaaggaagagttataaaatgaacagctcttgtgctgatgttcttctatttgctgctcataaatggccaatgtctaagcctagcctggttgcagagtcgaaggatatgttcgaccagaaagcgagtaacaagtattggatagatgtgcaacttcgatggggagattatgactctc

SEQ ID NO: 113067 - DNA, 371 bp, Arabidopsis thaliana columbia
atctcttcacacaaaagcttcaacccttaaactgaagctgttatattgcattgtaattggtgaatatatagatgtgatcatttccttttttcaccgttgatccaataattttactctcttagcgacctttttattttatgtgttgttggttgaattatttgtttgttctagtcattgcactactctcttaattttttgtcatcatcaaacaaatataataaaatctagaagatttgaatttaatttccacggttagttaaaatatcaccaagaaagcacaaaacacgtataattctacaattaatgaattaattacatcataaattagccgttaatctatataatgaaactacaattgacaagttcgaatg

SEQ ID NO: 113068 - DNA, 342 bp, Arabidopsis thaliana columbia
  unsure (1)..(342): unsure at all n locations
cacacaaaaacttcttcccttaaacttaaacatacatataccaganaaacgggggaatttatagattttagcaccccccttaaccacccataatccaataattttactctcttaacgacctttttattataagtgatcctgcctgaataatttattcaatctaaccatctcactactctcttaattatttgtcgtcttcaaacaaatataataaaatctagaacatttgaatttaacttccacccctagataaaatattaccaacaaagcacaaaacacctataattctacaaccaatgaactaattacattataaattaacccctcatctatataatcaaa

SEQ ID NO: 113069 - DNA, 355 bp, Arabidopsis thaliana columbia
atcaagatgcatacgcgtgcagtggacagaagtgttctgcacagtctatgctttttgttcatgaggttggtttgatcctaattgttatggtgaaactacctttgaatcttttgtttacttccattttcttctgtctttggtgttttcaatgtattttctctctgagcagaactggtcaaaaacccctcttgtttccaaattaaaagaactagcggaaagacgcaaactggaagacttaaccattggtcctgtccttacagtgagtttcattgtttctccatctgttgttaatcatctgatgagattgtatcattaaaacttattttttcattattgtttcaagtttacaactgag

SEQ ID NO: 113070 - DNA, 366 bp, Arabidopsis thaliana columbia
tcgattataatctggtccttagatttatttatggcccccgaggagccgtatgaggccatagacctcatgtggggggtctgaaatagcggtgaaaatagtaatgttctcgccgactaggattatctaacagtttaagtacagttgatatagttgaggcacaatcaaaatatggtttttggggatggaatttgtggcgtcaacctataggttttatcatttttctaatttcttccctagcagaatgcgagaggttaccgtttgatttaccagaagcggaagaagaattaatagcatgttatcaaactgaatattcaggtataaaatttggtttattttacgttgctttttatctaaatctattaattt

SEQ ID NO: 113071 - DNA, 357 bp, Arabidopsis thaliana columbia
aaacaaacctgtaaatcaaatacaggttgcacatcatcttcatccgatgcatcagtatcatcattgacatccaagggaactatatccctctgtttatgaactgtggacaaaaaaccaaacatcagacataaacttacaaaatctcaaacaatgagcaatctatcacacatatctcatcagaatcgttaattaagaagaaataagctagtaagcacttaataataaggacatagtcattccaataatcaattaagctttaggaaacaaaagaaaggacaaatttttcgaagtgggtagaagtttacaggcgtcaatctcgtcatcgtattggtcttcgacgatatctttgcgagtttt

SEQ ID NO: 113072 - DNA, 266 bp, Arabidopsis thaliana columbia
  unsure (1)..(266): unsure at all n locations
caagaacagcnaacagaacaggaaggcgaaagngccggcaacnacaagaggagaaagnacaaggcgggaagggcaaacaacncaaaancagagggagcaccaaaaagcggaacccagaagaaaacaaaccgcagaaagggccgccaacancgaggngggncgcaaaaacacaaggaccggccagganggcncccacagaaaccnaaaccaaggggggaccaacacacgggcagaccaaacnggacccggcgccccaccgacaaaac

SEQ ID NO: 113073 - DNA, 330 bp, Arabidopsis thaliana columbia
tcaaaaacttttctctgaatttctttgagttctcataaaatgaaagggatggatagttaagatcgagggggctctcaatactgctttactctcacagcatctctttgcttctgttgcttccgtaatgttggaggatgccaaaacattctacttatctcctcccaataactcacatttaactcctacatcacacacacctacttcttctaactgttgaaatccaccaaacgacccttcttctttaacttcttttcactctttatctatatcacatactttaactcttttccactcctttacacactataacttctcacacttcattataca

SEQ ID NO: 113074 - DNA, 364 bp, Arabidopsis thaliana columbia
gtaggttttaaacccaaaagcttgtatctttagtggaaaaatatcaagtgggctgcttacctgtcatgaggtgcatagcacgcaagaccttggtctccggtgtcacagtgataagcttattctgcaattgccagttcacagatccagtcagtttcaatccacaaaagcaaaaaaaaaatcgtacaatcgtgcatttacatacctcttcagtcataatgtctccaacttttgtcgatttggatgatctcccttgcacaatgatcttccgtagataatctagagaaatcacaatgccgaaaagtgaatcacacataccacaagacacaacaaaaaaattattaatgattagatctaattttacctc

SEQ ID NO: 113075 - DNA, 358 bp, Arabidopsis thaliana columbia
  unsure (1)..(358): unsure at all n locations
caaaaaancccaacnaacagcttgcttacaaacccgcacaaaaccacgggggggcaaggagcaagcgggaggggaaaagaaaaaaaaacaaaagggaagaaagcgaccacaagaggctgaagagaagcaaaagggcaacgcaaagcatgcaagacagcttagttacaaaaaccataaccaatttgacgaagctattccatatcatcatgcttctatggagaagaagacaaatgggttagaggatctgattgggctctgggagaatcctacggggactaatgatgcaaatcacgtcgacaagggttttgaaacaaccggtttgaggcaggaagaatctcagtctggagtgacgactcag

SEQ ID NO: 113076 - DNA, 353 bp, Arabidopsis thaliana columbia
ggctcaaatacgcttaaacaacttaccacattataacacccatccgtggggttgttacttgtgttggttggtttctcacagaaataaatccactcctcttatcttatattaaaccaaaataaaatcaactcgagatgtttaaacaagctatatttataagatgattatacttcaaattatcaccacaaactttaaacatgataaataactaaacacatagccatagattacggttctcatattcaagtttaaagaatgcaaaggagccaaatcttatccttaaggaattaaaagaaaatgtgtagaatataaagaccaatgacttttttatttcagatcttactcgactgaat

SEQ ID NO: 113077 - DNA, 337 bp, Arabidopsis thaliana columbia
  unsure (1)..(337): unsure at all n locations
aaacacaaacgagananggagangagccaaaacaagacaaaagggcgggggccacaaaaaaaaaaggggcaacagagcagacacacgccgaaaagcgagagacacacagacacacccaaaaagcgcaaaagaagaagaaaacggagcaaaaaaggcagcaagcaacaaggagccaaacagggggcggacaccaagcgcacaagaaaccccgagcgcacaacaaacacgggagcaccagacaggaacaacaacacaacggggacaggaggaacacgaggaccaacccgaaaggaggacaaacaacggcaggagaaacacggcaacaacgacagggagc

SEQ ID NO: 113078 - DNA, 359 bp, Arabidopsis thaliana columbia
cctcctttgtggctgcctgtattgagtgatctggtcgagtataatgctctgttgcttccctccgggggggatagactagaggatcgggtagaatccttgtaagttccttctacacctgaaaacacaccaaaacatgcaatatgtatgcaagatgatcctaaatgcctaagtgtacaaaataagctaaatgtgatgcaaaacgatatgaaacaatgagtgatcactaagctaaatgatgataaatacatgtctaaaatgagtaaaatatagtgttatcaacttccccaaacttatctcttgcttgccctcaagcaaacaaaaaaatcttaagttgaaggagaggtttgaaggttgggatt

SEQ ID NO: 113079 - DNA, 385 bp, Arabidopsis thaliana columbia
  unsure (1)..(385): unsure at all n locations
cggnccggagggcggggggcgacccacgcgnccgaacaaaaggccaagaccaagganacganccagacaaacaaancgggaggggcncacaggagggggggggggaaaaaagacnnaaagacgccgaacggaaaccaccagagagacagagacgacacagaggcgggcaccaaggcagaggacancgccagcaacaacaagagccaagcaaaccaaccggccgaccaccacggagcaaagaacaaagcccgggggagaccgaaaaaccgcacgaagcggaggacccaacagagaaccggcgggacagaagaaacgcgggggacgaaaaacggagcaagaggcgccgaagggacaagcggcagaggaaccgagaaagcacaaggag

SEQ ID NO: 113080 - DNA, 350 bp, Arabidopsis thaliana columbia
gtagcgtcgcgctcctttaaacgcgacggacgcagccttctctggtcatggtttcgccggaggtgtggttcaacggagatttattttcagctggttagtagttttgagtgactactgaggtaacaatggttgtagaaactatcgagaggtcttgtgagggttcaaagagaagacatgtgaacggtggagatatcgctgttccttgttcgggagaagagtgtagcaatggagatataaatgtagctcctggagtttcagcgaaaagagctagggtttctagagaaatgacgtttgaagatatttacggtgctgatgcattactcaatgatgatgatgatgaggatgatgat

SEQ ID NO: 113081 - DNA, 317 bp, Arabidopsis thaliana columbia
  unsure (1)..(317): unsure at all n locations
naagcanncacaancgggggacgaaacnaaaccngagagaaaaagccagaagagccaaacgcagaccgggggagagagnaagagggagagcaccagcncngnagaaaagaagganncanncancananccagaaaaggcgccaaaggaaaacccnangggggcancncagccaaacaaaaacccnaccacgacacggccgccaacagcaacngacagaacacccaagagccacagccacgcgaacacaaacacggcacacagccccggccccaaggagggggagagagagaagaaaccaaaaacgccacccagggaa

SEQ ID NO: 113082 - DNA, 384 bp, Arabidopsis thaliana columbia
  unsure (1)..(384): unsure at all n locations
ggaannccgggggggacccacgcgnccgccaacnaaaagcccaccagaaaagtttccaccagnacaacagcccccaggcggaacaaaaagacgggggggggaaccaccaccagnacaagagcccccaaccccaacacaaagcccacccgaaaaaccaccagcagcacaaggaccgccaacaccaacagagagccaacccagaaaaccaccaccgcggcaagggccaacaacaccaacaacgccagcaccgccccaagggggaaacgggacaccaccaccacaagcaaagcgaacgcaaccaaaagacacaaggaacgagggaaacaagagacagaacacaaacccccgcaaaggacgccaaaaaggcagccaagcacaagagag

SEQ ID NO: 113083 - DNA, 380 bp, Arabidopsis thaliana columbia
  unsure (1)..(380): unsure at all n locations
ggggcggcccacgcgnccgngcaaanacancaccaggagggcttgccaancacgagaaannaccgggggagggancaacggaaacggggggcgcccgaccacccccaaccccaacagccacannnccaggnggnanngacagngaagaggaggaaagggagagcgacaaaccaagaacccgagacagccaagagaaacacnnnnccaggagnggggggacccgaangganacannncagcaaccagaagaagagcggacccaacacaannccaaagaaggccgagcgnngaggaaaaagncgcaacaaaacagagagacangaagcaaaacaagcgagaggacaaccnccagaggggcagcaaagagcaaaacgccaaaa

SEQ ID NO: 113084 - DNA, 319 bp, Arabidopsis thaliana columbia
  unsure (1)..(319): unsure at all n locations
ccggnccggaaggcggggggcgacccacgcgnccgccagcacaanaccncaccgcagctacacagaagaagacncagaacgggaggggcacaggagggaggcgggccagaacagcgnaaccaaccngacgggcaaagaagacgggacaaagaaaaggcagggggaggcggccacagcccaggacaccagcaaccgcaacaacaaaggcgacacccccgagaagagcacgacaggaccggacagagagaaagcagcagaccccaacaaggaggaagccgacaagacgggggaaaagaccgagaacacaggaaacagaaag

SEQ ID NO: 113085 - DNA, 380 bp, Arabidopsis thaliana columbia
  unsure (1)..(380): unsure at all n locations
cgggggcgacccacgcgaccgcaaccacagagaaaacatttttctcacactccaaaaaaaaancggggggggcncagagggggagggaggggcgcaaaaccacncccaccngnncaaccaccccaacaaccacagaaaacacaacaactactacttcctctcctatttaatcggaggctccaaggcctaaacgagccaaaagggctaagaaatcttctccttctggtgataaatctcataacccgacaagccctgcttctacccgacgcagctctatttacagaggattcactagacatagatggactgggagattcgaggctcatctttgggacaaaagctcttggaattcgattcagaacaagaaaggcaaacaagtt

SEQ ID NO: 113086 - DNA, 250 bp, Arabidopsis thaliana columbia
  unsure (1)..(250): unsure at all n locations
cggaannccgggggggacccacgcgnccgaannacacagagcgcanaacattagngagacaagagacncncncncngggggcggcncaacgggcgggggggcgcccaccggcgaaggggggagcnaaggaccaacgcaccaaagngaacggagancccggcgccggagaccggaagaaagaagaaagggnnganccgagagcacaaccaccgnncaagaacggagananaagggcggcgannccnaagca

SEQ ID NO: 113087 - DNA, 316 bp, Arabidopsis thaliana columbia
agggaaccttctctgctttatttaagagcttactctgcggaactttcaaggtgtgagagtgcaggtggtatacttagtgctcttgcttatctagagaaagagatgaagctaacccaacaaaaaaaagacgagggaactaattctttagcttctttttaccaaaagtggtgttctgcgtactaaacttttttcgatttgcttggattcgaacaacatgttatcacagttttgccatattgggtttgggcttggcttttaaggccgggtatgcctttcaatgtcaaatgagggtttttgatggcgtattaccaccctt

SEQ ID NO: 113088 - DNA, 354 bp, Arabidopsis thaliana columbia
taattattgagtcgtcagagctcttaagataagaagatacacaaaatttgaaaatttaaatgaaaacaggaaaatactcccaaaagtgtttttagactcaaaataatgttagttttcttcatcattgttaaattcatatgtattggatacatgggttgatggtaatatgaaaggtcttgaatatggacagcacaacgcaaagtacaacaaaccaagtggaataaggtcggaatcaatgtggtttaacgtaaaatggatggaacaaatagtgtgaaatggatataaagaaaatttgaatggtgttcgtatttacttcttatgaatttttctttcatgttgttcgacacgtcaaga

SEQ ID NO: 113089 - DNA, 366 bp, Arabidopsis thaliana columbia
agagagacttattttcgttcttgcaatcatattgttctcacaattgaccaaggaaagagaaatgcgagggattctctgaatttagagagaagcaaaagagtttttttttttttcgagaaccaaaaatggagaatcaagaggaagatgaggtggtgctggcgaaggtgacgtcggaggttgaggataattttgaggatgaagggttggtttcaaattcaacattggagaaagttgctgcagcgaagaagtatattgaaaaccattacaatagacgcatgagacacattcaacaacgtaaagaaaggcgttgggtgctagaacaaaagattgcatctttagatgtatcagaaaaagaacaactcgagt

SEQ ID NO: 113090 - DNA, 138 bp, Arabidopsis thaliana columbia
atggcgtcttactcatgaaccgttcaggaggtcaggccactgacgagtacggaaacccgatggcagcagcggtatgacaagtactgaaatcctatgggaggaggaggatactgaactggtggtgtgtggaggagctac

SEQ ID NO: 113091 - DNA, 199 bp, Arabidopsis thaliana columbia
tcgtaaatctcctctttttttctatttctctgatcgccgccgggaacattcaatattccgggggttcaacggaataaaaactctccgtttttatttatcccccttttttaccttttttaagttatctgatatggtgtttccctaaaacgcttattggatttgagacttgatccatgctgattactgaattttcacaatc

SEQ ID NO: 113092 - DNA, 317 bp, Arabidopsis thaliana columbia
gaataaaccaataatatatggtctgaattctatctagtagtagtctacatggcttaacccctaccactctctttgtttgtttcttcctctttataatccatctatctttagtatctaaaatttcactaattttggtttcccagtggatcttctacttaggatataaccaaaatgcatctatatttaaaatttacatacacccaacataaaaaaatttgtgactttgcttactttgcaatctgatctacacaaaaagaattgaattatgacattttttatctgtgagatttatatgattgtctagtgctgtacactcc

SEQ ID NO: 113093 - DNA, 349 bp, Arabidopsis thaliana columbia
aaaaggtagagatccaactattttttccgttttccgtcataggaacattgcccttttgagggaatattgggtcttggtaactgcccactccatatctatcacaaaaatgactataaggactttatattctctcaatccagccacaccaaacctttaataatataaatttccaagaccaaacgtttagctctggtctaatccccaataaaaacaaatgatccctcacaaatcgaaccatttcatgttactttaactcaataagacatcccatcatgcggatgttcactcctagatccacatgatttaatatgacttcttaatatctcaatatcgctgtggtatacccatt

SEQ ID NO: 113094 - DNA, 338 bp, Arabidopsis thaliana columbia
ggccaagtagtcttttttgtttaagttttatccagaggtattttagttttgatggggtatggatattaaattgaagcaccgtgtgaatatatgctacagctccagcgacttctattggttcttaggcggtgtttcatgtaagagaagaacaaacatggaaccgcctagtgattgaaaagggagccaccggttatgaattcatagaccaacaaggggacttcatctttatacaacaacccaagagcttgacaacgttctttggttaattgtgaaatcacgagcactttgttgatagaactgctatactagtgtgttgattactattcaaattttattta

SEQ ID NO: 113095 - DNA, 379 bp, Arabidopsis thaliana columbia
  unsure (1)..(379): unsure at all n locations
aaaatattattatattttttttttgagaaacttttaaagtatctgaccaatggagatgacctaatgtcttaataattgttctagccatctattaaattacgaaactatatatttttgaaggtgtgatcagtgaaaataagagttaagtggctatatacacatcacataagaaatatttagcaaccattttcggttatttttatattgatttcagaaaagttaacattattggagctaagtgtttatagacactgtagaatgccatgataatttaaatttatccaaaagtgaaacgttttcaatttaatagatggttatttttatattttacttaatagactattaatgattntaacataattatgatgattatcagtat

SEQ ID NO: 113096 - DNA, 378 bp, Arabidopsis thaliana columbia
cttgatatgaagaagactgctgctccatgatgttctcaatttgtatctggatcttttgtgtaatatttggctgcagtgtagcatgtggatgacaatcattgtcccaactagcatgacagcgtatctatatctgtattctcatggggaagtatctttggctgcttcacaaccggttagcattttgctctctagcttcgtgtctgtataatgttaattgcaaatgttctgtttgttgctttcctctgtttcctctttgtatgccagataaatctgtgaagatatgtctaaggtttgtgttatcattgctgcaggtgctcctgtacattgcttttgctttggtactgatatttcctttcgatattttctacttgtcaagtc

SEQ ID NO: 113097 - DNA, 378 bp, Arabidopsis thaliana columbia
aaaattttgtgaaatattcaatggtttcaagagaaaaaaaaacttagaatttttttactaggccactagttcactcctactttaatctctaaactccaaattctgattcttaactcatactgtatggtccgtatatgtttatagtttatacacatgggtatctcaggaacaattgctatttttatttttatcaatattatcggatttgattacatgtaaaacacaacaacaatagttagtctatgtcaacaatagttaattagaaaatgactaatctacctatcatttaattaaaaagttatagattacgttgtgattaactagagtagtactaatagttagtctatgtcatgattaacgtatgaaactaggaattga

SEQ ID NO: 113098 - DNA, 365 bp, Arabidopsis thaliana columbia
tcgccttccttgcctaacctctttttataccatttgcacgaaccctatcttgtttatcttcacccttcgggggtcttaatattactaaattcgccatcatctcctctgatttctatgactatagatcctactcaatcgccgaattcggagccggatgatcactctggagaggacttttttcacatttatgaccctaggtctaccggcgatatctttttaagcgacagcatatataatgtggagaatgatgaactgctcaacgaagcggcgtgggaagaatttataggctcctattctgtgtttaacggttgcttatagctgtggaccggatgatgattgcttctagtgttcattagaagctacta

SEQ ID NO: 113099 - DNA, 382 bp, Arabidopsis thaliana columbia
gaagttatgaaagattgggctgtatcagaaggcatcaagtatgagcatcgaggacagctctgtaacgatgcaagagtgcgaaagactgttcttgctgagatggatgaccttggaagagaagctcagttgagagggtttgagtttgcaaaggctgtgactttggtgccagaaccattcaccttggagaatggacttctcacaccaacattcaagataaagagacctcaagcaaaagcctactttgcagaagcaattagcaaaatgtatgcggaaatcgcagcctcgaaccccattccttctaaactgtgatgctttttgctttgcttaaaagtgtttctttttttttgtattacaaaggtaattgtagaactgttaaaagatc

SEQ ID NO: 113100 - DNA, 374 bp, Arabidopsis thaliana columbia
gttgtagaagatctcagcccagtgacacaaaacaatgagttaaagactttcaaattcaacagggagaccgggaatatattcaaccaaggggcattgattctcaattctcaaatgccagctttgaatcagttcaaagccattcttcagaatgtatatccgatagtgatgatgattctgacgtctgcataatagaaccttttggtcaatctgcaatcccacatcgacctctagctatgaaaatgccggtagtttcttcagaatattctacagttggtcataattttaatcaatctggaggcctgaagcttcagtcaaataaagaaaatatgatcttttaagctgtattgcatgatctcactcagcctaattttgaa

SEQ ID NO: 113101 - DNA, 377 bp, Arabidopsis thaliana columbia
cggacgcgtggggtgaggatgcgaatgcttaagagggaagaatgaacagcaatgccttacatcttgtctgctcgtgagacgaggaagatgattgtgagagacctctttatcatactggggttcccccatttcctctcccttcccacgagtaagatgccaaccaagcatccgctctgaaattttctccttctgagggtagttgaactcaacagtaccttcatcagctaagccatcctcgtctttatcaccaggaatagcaggactacctagaatcagaaattagcaaattgctataaataccaatctgatccaaaattcaaaacatactgataaactatcgatgaacaatgaagacagtatacttcagaaggatcaaa

SEQ ID NO: 113102 - DNA, 375 bp, Arabidopsis thaliana columbia
gttttgtttttgtatcaaaatattgattttccgtggtatatgtaacgcatttttattttcaagatcaatcaattaatttatgcttttaaatttacaataaatcaaagtacatcatttattattttcaagataagtggagcaaaaagcaacttgagattaactttttaaaagatatagcacaaaaataattaatcaaaatatataatttataattttctaaatcttggtgaaaaactcaggaattcattattttagggagtaataatataaaatattgtatgattttcttctatatgatttattaattattttaattggaattgcatctcggcaatgacacaacgatgattctagcaaataccgctaggttattag

SEQ ID NO: 113103 - DNA, 315 bp, Arabidopsis thaliana columbia
ctcttgaagaccttgaaaaacttggtgtttatgatgaacctcagcctgttcaacctaagtttgaagatgcgttcgggtttcaaaatgtgtatgcacctttaatcaaactcgaagcagactatgacaagatgatgaaagagtcttaaagcatggaaaacctcactgttcggtgggatattggtcttaacaagaagcgtgttgcatacttcgtctttccaaaggaggaaaatgaattgcaataggttccggttgatgaactacgtctgcgggactcggtagatgctgttcatccatcctggcattcagttggacatg

SEQ ID NO: 113104 - DNA, 360 bp, Arabidopsis thaliana columbia
gatacttactgtgttaggattttaaaataaaagtattgatgctttttgaaattatatatcagcaatggggtttgtcttatactaagtggattagtgtctcttgatagccattgtgccatatatgtgagtaagaccaatgtcgctttcttgtttgctatttcttcatattttttggttttctgtattctatatttttaggtatattcactgagattatacaacaaatgcaagttaaatgtgtgcaggttgaggaattgtattcctctgactttaactctctggattaaatatggtattttacttggtactttttcgtcttttattgttcgaaacatatgaaaaacaaatttaaatttacct

SEQ ID NO: 113105 - DNA, 359 bp, Arabidopsis thaliana columbia
  unsure (1)..(359): unsure at all n locations
tcggaaacgattagagaaagagaattttgtttttactnccctcctcngatcctgtgaaggctcttattctgggtctggggtgtccaaaactctgtctctctgtaatcttctgagctctccacaaatatgtctctactctctcttgccgactccacaaattttgagcttctttttttgaagttcttgagaacaagtgaaagagcttaatatccacaagactcttgtatctttcttaaatggctaaagtttattgtccttatttcgatcctgaataatagaacttgagctccagaatcaatcctccaagttgttctatagataacactagctgcaaagaatgcactcttgtcaatgtggac

SEQ ID NO: 113106 - DNA, 380 bp, Arabidopsis thaliana columbia
gtaattttgtagtagtctgtccgattcttctcaacgatttttgtattcatcgagtcaattgttcctgtgttttcattgattagatcttgtgaatatagtctttatagctttggttagagttttcttattggttaatgatgataaatccaaaggcttgtttctcaaacattcgcagtggccgcctaagagctttcgcctttcgccaggcttgagagttaatgctgttttatccttccttggatgtctgaaacttttgtatctaaacctgtattgttttgttttctattagggttttagatttgggactaagttattcaatgtcccattagcagaattgatttctcttagtgcttaataggattgaacaaagtccctcaaat

SEQ ID NO: 113107 - DNA, 205 bp, Arabidopsis thaliana columbia
cttgattcatctttccctgattaattgccaaaccatctgactcttcacacattctaatggggagggggggtcaatcaaataatatataggtaatgcgcctctttttaaaataaatgatattgctttgttcgtgttaataattacttctctactagtacattaatatatactcttaacttttaatgttataaatatatataaattt

SEQ ID NO: 113108 - DNA, 374 bp, Arabidopsis thaliana columbia
agaaaagctatggctgttatttaacagccttcgttgcccgtaaagaaccaaactgcaacttgcgatccagtttttttattcataatttgattttttggggaagacatattaaagaaaactataaagactgtgagatttaattccctgatttcttctttctcacacgtgttttcggtttttggatatattcgaaccgacctggttttctcaattcgggtttactagactgattgtaccgaccatactgaattttaataaatgttttcttcatcttttatgatagtggcatttagttaaaagtaaccgaatcaaacaaacagactgaaacttttttataaagttaaccgaaattttaatttatctaaacatttttt

SEQ ID NO: 113109 - DNA, 331 bp, Arabidopsis thaliana columbia
acggatgcagtagccacctccagcttccaattgtgctgcaacaagcccagggcggattccaaacgaccaaggtgctgaccttcaacatcagcagtcctggatgatgcatcaccagcatcaacaacaaggtcagccgcctgcaggatcgtattagcaatctgcaccgtcttctggtcaaccacatcatcatcactatggttgtggtggatctaaaaatccatgatcagctggtgagatccagtccctgtggatcgtagacttgtatccatggatggattataactatcccatgaacgtttttagacttactggcgaggttacaacaacttaa

SEQ ID NO: 113110 - DNA, 389 bp, Arabidopsis thaliana columbia
tcggacggaaatatggtgttggaacatattttaaagagttaatacacatgctgatgaggcaacttggttcgggtactatcaggagttatgtaccgtggcttgcgtggactgattgggtcaacatgtttggaggctcgactggaaaagaccgctaatgattttgataaactattggagagaattgtgcaggatcatgaagattgagacggcgacaagactgattttggggatgtattgctcgcaactgaaagagacaagagtttcggggtcgatattgaccggttaagcattaaagcaatcgctttggatgctattgtgggtggtacagacacatgctgcacgcttggggaatgggtaatgacagagcttctacaacacccaacgtgtct

SEQ ID NO: 113111 - DNA, 312 bp, Arabidopsis thaliana columbia
gtcaaactgtatagacttcagtataacattgacataacaagttaaaaggtgtattaacagatgttctgtattatgttctataatttattaatttatatacgtttcatacatcatgcgtaacaactttataacggaataaggatcttcatggaagaaatgaaataaatcaagaaggaacgaaaaacataactattaagaaagtaacatgaatgacttggattctaccagtgaattagatggtcgatttaggatggatcttcatagataaatgacatttagacttttatttacgagaaactcctgaaacataca

SEQ ID NO: 113112 - DNA, 380 bp, Arabidopsis thaliana columbia
ggcttttgtttaacattttagatttggaattaataaaatatattgctggctgaatattgctaatggcgggaaagcacttatgtgtaatcatcatgactcttaaattgaaattaattggtcaattattcgaagttatagtcatgacacttaaattgaaattaattggtcaattattcgaagttatagtcataatcataattccaatatttctttttaaatgtaacgttcatagatattcaagccttttatgataattttatggcatttatcataaaatatcttccatattataagaatcgttaaagtatatcgacattaccaaagaatgttacaatagtgtgtacatggttgcaaatatctggattatataagtttataaa

SEQ ID NO: 113113 - DNA, 404 bp, Arabidopsis thaliana columbia
cgggggcgacccacgcgttcgaaaattttcggtaaattttggtttcacttaatatatttggggctgttagaaatttgggaaattgttgggccaaaaataagaaaagagacacattctattgggcttataagatgaagtattttttatcatgtcaattgtctattttgcccttgattttctctgcaatgtttcttcttcttcttcatctctgcatttctttctcttcttaaaatttccagaaattttcaatttctttctttcttgacaaatttgtttttgattacaaacactaaaccctaagtgtaatagtataaagggaatcccaaccaaataatcaaacgaatgttcccaaattttagatctataaacccatcaacgaattttgaaataaatattaccattta

SEQ ID NO: 113114 - DNA, 406 bp, Arabidopsis thaliana columbia
gggccggcccacgcgttcgcaagttttacttaactatactgttcctgcaggttgtagaagatggatacgagtgctttgcaaagagacaactggggacaatattctctgcacccaattactgtggcgagtttgacaatgctggtgcattgatgagtgttgatgatagcttaacatgttcattccaaatccttaaggcatctgagaagaaaggaagatttggattcaacaacaatgttcctagaccaggaaccccacctcataaggtgtgaaaatactatccccctgtatatagatgcaatgtaggtagatgttagatatcaggtttgatatgttaacattcttgcagggtggaaaaggtcgttaactcgtcgtcgatgggttcaagaaacgagtgaaaccgacgggt

SEQ ID NO: 113115 - DNA, 375 bp, Arabidopsis thaliana columbia
agtaactacaacaattcaacattctttggaaatgggaatctgaatgggggattaacaatggaggggaggcaaaatccattcacaatatcgaatcattcgttacagaaccattcaaattcgtccttatacagtgatataaaatcagaggccaatttttttggcacagaggctacaaatgttggtatgtggccatgtaaccagctccagcctcagcaacatgcatatggccatatataaatcttcttgtatattataaggtgtgtgaatctttttttttttttttctcaaatatggattttttttaaaaatgggttgtgtatatagtttgtgttatatatcatttaatttaacagtattggtttttacatttttttg

SEQ ID NO: 113116 - DNA, 391 bp, Arabidopsis thaliana columbia
  unsure (1)..(391): unsure at all n locations
gcgattagcttgagtttagcttctttttttatctttgatctagctaaagaaacagagagtttttagagggagaagggacaganagttttcagaggaagaagaaacagagagtagtgatgacatcagggacgagaatgccgacatggagggaaagagagaacaacaagagaagagaaagacgacggagagcaatcgcagctaatatcttcaccggattaagaatgtacggtaattacgagcttccgaagcattgcgacaacaacgaagtgcttaaagcactctgtaacgaagctggttggatcgtcgaacctgatggaactacttaccgcaagggatgtagtagacctgtagagcgtatggagataggtggtggttcagcaaccgctagttc

SEQ ID NO: 113117 - DNA, 248 bp, Arabidopsis thaliana columbia
ccagtcaattccatctgctgccagctgctattggtaaagcacacgacttccagttgtagagttatcaagttgcgacccaactaacatgatataccctctagtgcctgtatgcgcccctggtacaggaaaaggccgatatggtgttgtcttaagcaccctgtcagctgcaggtcctgcctatggcaggagctcacggcagcccagggcatgcccagagagtgttcgagcagcaccagctccttgcagtg

SEQ ID NO: 113118 - DNA, 326 bp, Arabidopsis thaliana columbia
  unsure (1)..(326): unsure at all n locations
ctcaaatctcttcattttttgtcccaaccgccttagctcaccctcctggtatgtttcaaagtatgtcgcggataaaaaacaaccaanctccaatttccttcccgtatgactcagcttttgctctcccccgcgattctcttacctacacttctgctatgcgctccgactaaagctagttctcgcgcctactattctccacccttccatatgtctatagataccgctcttaacgttctccatgtctccaaatgagcttccttccactaaattcttcctgccaataaatctatcctgacttcttttaatgaccacctcaactccatctt

SEQ ID NO: 113119 - DNA, 307 bp, Arabidopsis thaliana columbia
  unsure (1)..(307): unsure at all n locations
cccgcagnaccagnccaaaattcccgcttcaacccacacattctacaaaaaccattatcctttttcttttaaacctcccctatcacacccgtacgggtaataaaaaaatctgtgcggccaaaaaaaaaatcctaaactcattacctcacctccccaagactttatatttctcaccctccctgacctttaactttttttttccactaccttctcttccacccctttatttccttctaccaataattaaaattcattattatcctacactaatctaatcaaaacacaaatacattattctattacataa

SEQ ID NO: 113120 - DNA, 146 bp, Arabidopsis thaliana columbia
cgatagagagattaatgttttttttttaggcaacgtttcatataatgggagggtattaaatttgttggtgggtctaaaaatcttacatacatccatcgacttgatacttcaaaccatcactttaacttcactgagccatcattttt

SEQ ID NO: 113121 - DNA, 366 bp, Arabidopsis thaliana columbia
gttctttccattacacttgcttatgttcttagattccttattacaggggacttacctcatcaagagcgcgtgtacatcacctcaagaagggaaccatcctcattcctctcagtccattcctatagagtaattaggagaatacatatattctacataagcttatgtgcatcacaatccattacattatcgtcctttaaagaaacttgatggaacatcgaatcggattgttgaagaagggtgaaagtgattctcccttgcaaaaacaagctttttctagtttccatccaaacagaaaataattaacacttaagagtaccttagaagcttcaaacatatagttgttaaaaatctgcttaaaggtgttcc

SEQ ID NO: 113122 - DNA, 378 bp, Arabidopsis thaliana columbia
gagagagagatataatgtccatttaatttcaaagtttcatataattttatgtgagtaaatttgcttttggttttggtaaagtgttacatacatcgatcgacttgttagttcaaagcatcagtttaactccactgagccatcatgggtcgatctcaagaacagggacagggacagggtccggttcacagcattcggctatcgaccgtgggtgcgacccggccgacagagactgttacaacccacgaaccaaccggtttagacctagccatgaagctccactacctcaaggcggcttacatctactcagccgatacagtacgtgacttaaccgtgagacacctgaaagaggccatttttatgtttgtccaccagatcgtt

SEQ ID NO: 113123 - DNA, 232 bp, Arabidopsis thaliana columbia
gttaagtgcataatgaaatcttttgttgtagtggacccaactcaaagagggtgaagatatgtattctggtaatcttatcggagaaaacaaaacaaaaaaacaacaacttgcttttctattttatttaaaggtcgtacaaatatttaatgtatgtatatgcaaattgtgtctaaatctcatctgtactaattagatgaatacaattcgtttttaattaacagcgatattcgtg

SEQ ID NO: 113124 - DNA, 373 bp, Arabidopsis thaliana columbia
aaaaatttcatgtcaccttatgttctttaaggctcttctctgtcaacggcgctattcatcaggagaacggccgggccttattctcaaccgctcttgcgtttttggttttagccagatactctttctgtgccaattcgattcaagacaatagcaacaaaatagcaaaagcaaacataacaaaatttggatattgatataaagataacaagagccaacacttagaagaccaaatctggtgcaaaaactctgtcagaaatttgagattagatctgttttctagtttgcaaaatggttatatggtaagataactgtttcttatatgaagaaataaacaaactgaaaatggctaaaaagcctggacaaatcaaaagaa

SEQ ID NO: 113125 - DNA, 283 bp, Arabidopsis thaliana columbia
caattttatgcttttagcttttttttttcatctctttattctctctctctgtctcttctgctcaagagggctaaaaaacatcaaaaaaaagatcccaaatttcgtatttcaacgtactgaatctctctctctttcgggtttattttggctcccgatatggtttaaaatttgggatttaaatggaagctgacgtgtcaattttctaaaaaaacctttatcgctaatatttccagattacctaaatataaaaaagattgaaactattttcctattcttttgaata

SEQ ID NO: 113126 - DNA, 355 bp, Arabidopsis thaliana columbia
tgcgtacttactttctctaactatttatgctacacatgtggatcacatcctgcattatctaattagaagtgggtccatgaacctaccaaccaagttaatattcatgggcgtatatttatctaaaaatgtgttgcgcatctatttttacgcatctaaataactaataacagctcgaaatatacatatataggattctagttacacacatatatatgtgtgcatgcatgtatttgtgtgtaatgtgtatagtattgtgaatgctttactcggatattgcctcccaagtgtcaataggatcaaatattcaaatttatttagacccacaccaacccactgtatttcacgttaaaatagt

SEQ ID NO: 113127 - DNA, 256 bp, Arabidopsis thaliana columbia
aaagaaatgtattctctctgcttcattcctacagctccattgattcgtgcgcctccataactcgatcgggctccaacaagcttaaatcgaattacccttaaaatgccagcttctctctatgtatctcatccaacaagatgcagcatttcaaacccgtcgtgctctgaggaattgttgcattctattggtggaatgtttagggcatagattattgttttcggaggtactttctttaacaatatcaagatgcatagtg

SEQ ID NO: 113128 - DNA, 365 bp, Arabidopsis thaliana columbia
agatgagttttgggtcagggtttatttaaaggaacatgcaaatagtccgggctcttgggcaactccaaggcatatacctcggattcattcagtcgacgccagtaatccctcgccgcatggggactttcatctctagaccccgaaatcatggtccaatccatattctgcggatgctctttttaatcgattttaggttatatttatattcttctttttcaccccctaaattcatttatgggcttctgttgggccttctaaactataaatcctaatcttatattataaacacctgagattcacaaaattctctaaagattgtttggttgtttggtttaattattgggattttttttttacataaaggt

SEQ ID NO: 113129 - DNA, 362 bp, Arabidopsis thaliana columbia
ctcatgagctccaatcatttctacatataaaagggataatttaaattatgaatcaaataactcaaaaacgagttatatagtatttatagtttatgaagtgtagaagaaaacagaaatattttggcgtgatatttttgtgaaaaagagatatttcacatttgtggctgagctccaaaaaagctttaatttcatagttatgttctttttaacaaaaatgaattgagttttcgtttggttgaaatagtttttcagtaatacatatctacttaactaaaagtctaaggatccgattggtaaccacctttttaggaaaggaatgggcaggaacatgttgttcctctttttttttaccatttaccagt

SEQ ID NO: 113130 - DNA, 253 bp, Arabidopsis thaliana columbia
gaatcacaggggggagcaatcagatgtctttgggtcctattcacgctcaatatctactctccaaatgctgtcaatcttacactcattgatttgcccggtgtaactaaagtggctgttgatggacagccgtaaaccattgctgaggatatctcaatccatggtttctcacctatgttgattagcctaattttatcatataggctatattttctgccaaccatgacattgccacattacatgcaattaagctcgc

SEQ ID NO: 113131 - DNA, 352 bp, Arabidopsis thaliana columbia
ctcactggtttccagactccattatgtttacactgcaggtgtatttcaggcctaccgagccagaaccaaacaagcctcagtcagctgttggagcaaatggtcttccaccgccaccaccacccccgcctcatcaagctcaaccgccaccaccacctccatctggtttattcccaccgtcaccacctccaatggctaacaatggttttaggcccatgccaccaactggaggtttcggacatcctaacatgtgaaagagaatccagcgaatcagtttaaaaacacattactctgatcatggtttactaagaaagacttgctctgtgactgaaaaacaaatctgttctgacatttt

SEQ ID NO: 113132 - DNA, 395 bp, Arabidopsis thaliana columbia
aaaccgggccgacccacgcgtgcggaatggacctacactaagatgttcttctagttctttgatctccaacagaaattcgtgttccagattggtcatggctgaccgaggaagaattcactgaatgttttaagaactgtgacaccagcaacttgatggttctttaacttgaccagtgtgggcggtgtatgccagattatatattacccttcactttagcgaggtcaccaaaagtgttgccgatgctatctactttatctttaagtggtgcatgccggcttttctatgtggggctacaacaactggtttcctctgctcctgcgattacgtatattaatctcaaccaatgctttcttctaacatcatttaacatttgatatgttttcttgatttattgg

SEQ ID NO: 113133 - DNA, 328 bp, Arabidopsis thaliana columbia
aaaccggggacgacccacgcgtggcgtgtttacacgacatattctcaggttttttagacgatttttcctgcttgaacaggggatatcttccggcgagttgcagcgtattggttgcttaccatctccggaagctgatataaatgagagcggcggaaataacgaagcggtgcatgatccatagttagagagagagccttgtctagggttcttacagagagaaaacttctgtacagagattatcgagtggatttcgccggaagatcttcaaacaactgcgaaactatgcatcgacggacttcattcctatttggtggcgataaatcgatct

SEQ ID NO: 113134 - DNA, 386 bp, Arabidopsis thaliana columbia
ccgggccgaaacacgcgggtcgaccacataccttgaaaaaagttttttctgattatttcaccacaccaacagtactaaagcgcgtgttttggtgcattcagggtctcaaactttaaaattttctggaagacattgatgcatccatcttgaaggattaacctttccccagcgcgcttaatgttttcaagattcaagcctttgagtacaccagactcaatcactctattatttgcctctttctcaaaatccgaaagctgctctagagctttacataaacctttatattcaaacttgtcctctgcaaaatattggaagaacaaatttaccacattgagagaaaaacatacttaaagacccatccactctataaaaagccaagtgcatta

SEQ ID NO: 113135 - DNA, 335 bp, Arabidopsis thaliana columbia
  unsure (1)..(335): unsure at all n locations
aaacaaaaaangggaggaaaaaacgcgggtcgacctacacattcagaaagatttttattgaatatttttgacccaaaacctggcccgttttaatggtctggggaccgtgtccgtgctcaaaaaccaactacaattaaaacgccggcgaggtggcggatcttgatccggttcttttagtttcttgaattggatgctttattctacattttaagaaaaagaattttaagtctgaaatttcggtttgggtcccaatatttttagctaaccttgcctttaatcataacctctggtctatctataatcccaaaactgggtatacagacgcttaggatgat

SEQ ID NO: 113136 - DNA, 348 bp, Arabidopsis thaliana columbia
  unsure (1)..(348): unsure at all n locations
cgggggcaaaaaaccgggggcgacccacgcgttcgctctgtattttagtagatattttaaagtatgagttgggatttgctagggtgctggtggctcacatgggtcaacagacgctatanaagctgcaaagtcattagcgatgtcaagtggtgctgttgttgcagtgtcaggagctgttgatattgttactgatgggaaacaggttattggtgttcacaacgggacgaagatgatgcaacagattactgcaactggttgttctctagctggtttgattgtagcgtttcttgctattgattcatcacgggtactggaagctacggtttccgctatggctgtctttggcat

SEQ ID NO: 113137 - DNA, 170 bp, Arabidopsis thaliana columbia
attcgatcaaagttttatatcacaattttatgagttactacggcgtaacttaacgcgagatgttggcttaatacaggaacaacaatccatcttaccataacctttcattacgtcatgccattgactagttctgaaaccctatccatttgtatttttacgagtacagaaat

SEQ ID NO: 113138 - DNA, 331 bp, Arabidopsis thaliana columbia
aaccggggcgacccacgcgggcggaagaccaccagacactttttgtaactttttcatactccaggacgttaatgcgggaatggggactggagagcttcacaaaactgaatctctgttctgcttatggaatgcattctaggtgtggattcggcaatgtgcaattacttttgaccggaaagcactctattaatggacacagaccaatcctttcttggctccaacattaccctcaagccttcttatatgctgaagatgtatcacaaggcaaagaggagcatcgatgtgatgacaatatgtgtctggaatcttcaaaaccttcttccttaaaata

SEQ ID NO: 113139 - DNA, 211 bp, Arabidopsis thaliana columbia
gcggaaacgactaaatatgttcatttatcaaaaaccatttttagaaaatgttcaaaaaacgaaaggggttgctggaaaaatcatgggaataaatgaggggataaattatatcataatcatattctaacatatataggataattctagggtactggcaatacttttgggagatattatttaagtaaggtcattctacaaaactttgaattat

SEQ ID NO: 113140 - DNA, 195 bp, Arabidopsis thaliana columbia
aaaaaccggggcgacccacgcgtgcgggtttttcgcctttttctaatttttttctcgtttactaaccaaccggtgttttttcagggttccatgggaaagtttaaatcccccaccaaagttgttgcaaaaattaaggcccctaacctttttataaaaggcaaaagaaaccttgaaattattattgcccccaaaggg

SEQ ID NO: 113141 - DNA, 295 bp, Arabidopsis thaliana columbia
catattttttacattttcgtttttttaagactccttggagattcttacttgcatctgtgggttaagaggagtctcacattaacattgtggccattggtcatgtttattctggaaaatcgaccacaactgggcactagatctatatagcttggtggttttgacaagcgttgtatcatgaggttctagaagtgatgcttctattatgaacaaaatgtcctttaaggacgcttgggtgttggacaaatttaattctatgcgttagcatattattaccatctatattcctttattgaat

SEQ ID NO: 113142 - DNA, 375 bp, Arabidopsis thaliana columbia
gcgagaaaacgcctatctctgcttattggcttctccatctccgatcaaatccgcggtcgtaggcagagagagagacaaatgggtatgcctagggcaacctctggtcccgcttacccggagaggttctacgctgctgcatattatgtctgtctcacacagatctgatttgtaggcgaaaaacgtacatgtcaaattacacgacgatactgcactacttctctatacgctatacccaacaagctactgtggtgaccatgcattaataactaacctagactctggaatccatcgagccgtaggatactgatatgcatgcaaaggagctactgcggctttcacttacgtgaagggtcaagaatgaaaaagatgcacaag

SEQ ID NO: 113143 - DNA, 336 bp, Arabidopsis thaliana columbia
tcgttcacttatttttcacaactttttggcaacataaagctttcaatgaactgctgaataaaactatgatggatgtaatgtaacatattcaatggcagtaccgttacaggttattcaatagagtatagttccaccaatcctcagattaatttgtctagaacaccagagatagaccattattttgtacaagttatcggtactcttcagtgatgcatattcataaactatccgcaactggaagatcaccatctttgggaatcataatcttaatactctgattcaagtattgttatgtgaacattaataaactaaaactgtttaagcataaatatgttt

SEQ ID NO: 113144 - DNA, 208 bp, Arabidopsis thaliana columbia
ttcgtatagcaacaaaattttttctttcctcatctaccccctcttggtctgggtcacttttgatcgggttgagtgtctacactgcccaacaccggctcaactacgtaccttctccatcaacttatcgcgctcgatccatcccaaatttttaaaagcgctgttaataacatatatatctatttccaccatgcacctcaactcctctaca

SEQ ID NO: 113145 - DNA, 350 bp, Arabidopsis thaliana columbia
  unsure (1)..(350): unsure at all n locations
ccccgcaagggatctttcactatcctttttattgatattgtcaggncaggagaggtagcttatacttgttatgtgatgtgcaacgattcttattatcaaaaaactgctattttactcactggcgcaacgattttggatcagcgtgcctgtctatcctcgtagagacaacatcacaaaaacatcgatttctgtaatgctacttcccaaggttttaaaaatgaatcctactcacaacattatgctcaactgaaacgagttctacacttcgataatcattgacataagctcaagaattggcgaaaataattcttgccacaagattcgcgctatgcaaatgacgctttaaacat

SEQ ID NO: 113146 - DNA, 283 bp, Arabidopsis thaliana columbia
gaagagagatagagatgacctcaggtgtatgaggcgagaagaatacttgatgagtggagagtaatgtcgtgcctggtgatctttaaacgagagttgatcatgtcttataaattgtatacaagtatcgagttttcgacaaatattttgcacaatatcataatagtgaaaataatttaaaagagaatagtggaaagattgcaggccgaaaggctcaagaacgtgcgtttgacaaacaaatggagaacaaatgacaaagacttttcttgaaactctttaatccacc

SEQ ID NO: 113147 - DNA, 335 bp, Arabidopsis thaliana columbia
aaacagtagagtaccatatttggatacctaactcccggttggggaacgacccctttaaaggatgaggcaatggctctatctgcggtattactatctatcacaaaggagataaattatactactgagctactgaatggaatctcaccgaacctgactgatgagaatctggaagacctagcttttatctcgatacaaaaaagtaaagaatgcaagtctaacatttttagcctattctcctcaggtagcacgaccgcaaaatacatctctgcattgaatatttcccgaatatgagtatgtgacttattagaactgaccctactgattagccagagaat

SEQ ID NO: 113148 - DNA, 413 bp, Arabidopsis thaliana columbia
gttacctgagaatttagtagttatattggtgaaagagctcctctcgctactgtctgttaagggtgatggtgactttaagggttaatcggcttctccgtagaaccttactccgattttcaccttgcataagctctaatggcgaagctgatgatgcatctttctcgacatcttcgtcgaaaaatcatggtccagagatagaaggagtttcttctagtcaagaaaatgaccactttggagagtttaggcaattgggtttcggaaagtcatcagctttgaatgctacgagcgttggtgatgctgaattcggagaaattcgaaaccctaggttcaatgagattgatgaattaagagaagatgacgatgatgatgaaggaaatgtaacaagtggagacgaacttgatgatgataatgat

SEQ ID NO: 113149 - DNA, 300 bp, Arabidopsis thaliana columbia
  unsure (1)..(300): unsure at all n locations
tccggtaatcgttctcgtccttttttttttccttctntcccattaacacaagagcaaagtcctactcgttaaaggttggagtattcatatcnctcttcttcagttttctctgtccccatttttcttctaagagttaaaacggtaacctcaaaatctgtgattaagtcaataaaagaacccctatttatgattctcatttactctttataatcaaaagcttcgatttttaacaaaacccataatctgagttcttgttttattattttttcgagtgatagttatattttttttttttaaaat

SEQ ID NO: 113150 - DNA, 404 bp, Arabidopsis thaliana columbia
tgaaaagctccctggaatgattgatgagggtgacgtattagtgtttgcatctaaaaaggccactgttgatgagattgaagctcaacttactctaaattccttcaaagttgctgctcttcacggtgataaagaccaagcatcacgaatggaaactctgcagaagttcaaatctggagttcaccatgtgctgattgccactgatgttgctgcccgaggtcttgacatcaaatcgcttaagacagtggttaactatgacatcgcaaaagatatggacatgcatgtacatcgtattggtagaacaggccgtgccggtgacaaagatggggttgcctacacacttgttacgcagagagaggctagatttgctggtgaattggtaaacagtctggttgctgctggtcaaa

SEQ ID NO: 113151 - DNA, 394 bp, Arabidopsis thaliana columbia
gccttgttcttcctaacatcttttaacctgagtgagtttttgtgggcctatagatagatgctgagatggagcttttagtttcctcagctaacttgttgctgatgaccaccgtacattggatagtaaggtgcagcgggatacattctcgggtcaggttgaggtaccatgtatccatacccattgtaaaacttgtctccatagtacggatcaacccattgatttccatacttatctctaggctgcaacacatcataaaacttgtaagaatcagagatgtgtcaagcagagccattcaaagctaatcacataagtgaagttctttatggggtggacggttaaaaccacaccacaccaaactttttttcaagcgaaaccattatagtagccttatacc

SEQ ID NO: 113152 - DNA, 133 bp, Arabidopsis thaliana columbia
  unsure (1)..(133): unsure at all n locations
ctaatctgtacggttcttatttctaaagggtgaaaaccaaaagcgacgcatagggcaaatttggaaagggtgttttatntatggccgccgtttgtagttcgtcggagaccggtaactgcggcgtttcgggaaa

SEQ ID NO: 113153 - DNA, 389 bp, Arabidopsis thaliana columbia
  unsure (1)..(389): unsure at all n locations
cgcaatttgcagagaagcaacttcatctacaagaagaattagagattacggtgtttcgatttagctatgcgagaaactctngccgtttgaaggttttaattgttaaagatgtcgagttctatggaatgttctgagttcgtcggtagccggagatttacagggaagaagcctagcttctcacagacgtgtagtcgattgagtcagtatctaaaagagaacggtagctttggagatctgagcttaagaatggcatgcaagcctgatgtcaatggaactttatgcaactcacgtcagccgacaacaacgatgagtttattcccttgtgaagcttcaaacatggattccatggttcaagatgttaaaccgacgaatctgttttctaggcaacc

SEQ ID NO: 113154 - DNA, 276 bp, Arabidopsis thaliana columbia
ctcacactcaatggatccattttcgtcgtccccaccatcatcagcggcggagattcttgaccggggcggtatcaaagctctcaaaatcctcggttaaggcgccacatgtaccgtctttctcgcgcacgacttcgtttcaacctctttttattcttctcccttcgcggtcaaactctttcccaaatcctttgctacctttattcgccgtgcacggtgggaaatttatgtcctccggtggcaattcgttaactctaatttaaaccatttttttccacg

SEQ ID NO: 113155 - DNA, 241 bp, Arabidopsis thaliana columbia
aataaaacttctctctgaatcttattgttttctcataaaatgagaaggatggtgaggattaccaaatgggctctggttgctactatactctcacatcatactctttacttctattgcttccgtaaagtttgaggaagccaaaacatactacttatctactccctttagctcacataaactgctcatcacacacaccttcctctactatctagaaaattccaccttacgacccttttccttc

SEQ ID NO: 113156 - DNA, 280 bp, Arabidopsis thaliana columbia
agagaaatttttacggggttggattaattaatacccgcaaaaggtccgggaacctgattggcaaaaggccgagagagattgagattttacttctttataattgaagttatgcgaatgtggggtatttttacaatgaacggttcatcgttctttttttagagttaaaaaaaagataaaatttacggggttggcatagtaccatttaaattttaaactacatcactaaataattagctgtgaaagaatacatatttctcttaggttttttttctttcttttt

SEQ ID NO: 113157 - DNA, 423 bp, Arabidopsis thaliana columbia
accactttatttttttagaactaatcaaatgataaaaaaatttgtaggtagtaaatcatggcattgagcgtttattggtatgacttcatctgctttgcgatagttgcggctgcaatcgtcacgtccttgtggtttctatcccgcagagacagaggctgcgtagtaattgatgatacgtcccacgatagcttgttaccactttatagatcgaacaaccgtggttcggctcggttatgggccagttgctggacaagattacatcccggctggctactctttactcgttccacctcttttctctccatggctgctttattggcttgggatgtcatcaagtgggacgcaagcatcttcgtctattacacagaatggaccttcatgcttgtgatcatttactttgcggtacgtcgtaacagcttttcg

SEQ ID NO: 113158 - DNA, 277 bp, Arabidopsis thaliana columbia
gttatttggtgtttctcgtttgggtctttcgaacatctttcattcttgtctttttggtgttgctccgcacgaacaggtagattgatgaaaagcaaccatggatgacctacatggaagcaatgctcgaatgcacattagagaagctcaagatccaatgcatgtgcaatttgaacatcatgctttgcatcacatccacaatggaagcggtatgggtgatgaccaagcttgtgatggcaattgctgtgggatgagtgagggtgtggaaacaaacatttct

SEQ ID NO: 113159 - DNA, 245 bp, Arabidopsis thaliana columbia
gcggaatggtcttttgctcctgcttttttttatgctactttccccagccggggggtgtctaaagttacgatggggggaaccacctatgtcttcggtggccgtgtcgataaacgtttattcaactgttttcattcggatgattctgagaccaatgagctaaaattgttggctcctagttgagaaagttcttcctggtcaaagctaaaattcaatggcaggtgatgatctgaaatgtttatgtgttt

SEQ ID NO: 113160 - DNA, 269 bp, Arabidopsis thaliana columbia
aatagatcatccgtaaaagtgcacactgattctgacaggcaacgctatgggtcccatttattgtctggcgagggcgggttactctaggggtgctctcttgagtcacatctccagacttgcttaactgctaatgcgatgtatatactctactgggatctgaatgaagcatcatatcttatgtgacgagaatcattagattgatcaaacatatgctgtgcctactcctatgatgagataccaatttaagacttgacagatgaaacttatct

SEQ ID NO: 113161 - DNA, 225 bp, Arabidopsis thaliana columbia
acagcttctactttttgaagattgttttttattctatgattggctcatgtcttaatgaattccgtaggagtcggatcgacactttgtgtttgtgggtttagtccaatttgctcttttaattcttcttcttcattggtacatttataaaaggtttgttttttgtaaagcctaaagtggtttgacatttgattctgatcccgttggaatcaaaaactggttaattac

SEQ ID NO: 113162 - DNA, 417 bp, Arabidopsis thaliana columbia
  unsure (1)..(417): unsure at all n locations
ncgttccttttgtactttacgctatctcagatcatcgtacttacttcctaggctttccaagtctcgttaagtacggtgccgtgaagttaaataatctggtatctttcgttaagttataatagtttgtaacataaatctgtgggtggataaagttatgtctttttggtttttaaatcctagtttacagattatttggatttatcgtgctcactttttttattgtgtttggcattgggattatggcagcatgcatacgtacgtgttcacgtggcatacaaatccaagactnggtgatacgtatcgaggaaagtattttacgagattggtaatgaaacgacanccgttctggacttcggataccaactccagcgtaagctaccaaattatgtggctgctttctgaagattctggttactc

SEQ ID NO: 113163 - DNA, 145 bp, Arabidopsis thaliana columbia
agtcctcaaatcataaggtccagacataagataagtgccatcaccaccaggaaagatcattgacaacccataacacatcaagtttcttacaatggaacctaaaaccctctttggccctcacaatcttgactcaagcctactcatc

SEQ ID NO: 113164 - DNA, 335 bp, Arabidopsis thaliana columbia
ggcccaagcgtcccaatgacgacatttctttgtttgtagttcgctgaacagtaatagttaaaagtaggttatttagtgttcgtggggaatgaaaattatgatatgagcaactaagaaattgtttggaattaaattcgatgtcagttttcaaacgtcaaaacgatggacaaaagagtataaaggttggtaatggaatctgctttttcgagtcgtgtggatgagcttgtaagtcacacacacttatgagttatgaatttcttctaaacatagacgtgaggtttgaattaataaaaatgcaaatgttatatattgtctctggactaaacataagtttc

SEQ ID NO: 113165 - DNA, 377 bp, Arabidopsis thaliana columbia
cacgcgtccgatggttgcgtttagtcaagctttcttgtcggcattaattgcattacttgctggccaattgccttcactgatggctgcagattgtccattagatttcagtggatcaaatttcactctagtagctactgtgtgctccaacataaccaacagaggcaaatgttgccgctacatgaacgcttttgttgcggtgtccgtggctcgttacgcgaacttgtcaactaatcttggagtcacatcagatttatctgaaacctgcattgcttccatctctagagccatggaaggctacggagtctcgagaaacgccactagtttctgcggtttgggaaccaagatccttgttaagtatgactgtgacggtcgaacca

SEQ ID NO: 113166 - DNA, 390 bp, Arabidopsis thaliana columbia
  unsure (1)..(390): unsure at all n locations
atttatttactctaaactgattctattatcttttatcaaaaccaacagggtaataaataaaaggttgttgtatacaaatgtttanagtcattgtaactatatctaagtcaaggcgtcgtcttctatttcacggcgataaaaacagagaaccttccatttgtttttttgagcgcgtggcgacttagttagcgccggcgtcggtcctccagtctggttttctttagggtttcattctctacttagtctggttcgtttttagatcatgatttgatgttggcaaggtgaagaatttttggatcttggatctgtaagagccatcgttgtgggctctgattcgtcaaaggttttgtgcgattggaactcccttttctctgttttgagaaaattatg

SEQ ID NO: 113167 - DNA, 397 bp, Arabidopsis thaliana columbia
tcgatcaccttcttttttgttacgtttttacggccttgcaggacgcaatggtgccggataaacaactgttgggaggcacaaggctatgcatgctatagagggtattcctactaattgccagatattgcatgttgaacaagaagtcgctggtgacaagacaacagccttacagtgcgttcttaacactgatattgaaagaaccaaactgttggaagaagagattcaaatactagcaaagcatagagaaacggaagaacccacagctaaggatggaatgcctaccaaagacacaatttgaaggagatcttatgtctcaaaggcttgaagaaatatacaaaagacttgatgcaattgatgcttatactgctgaggctcgggcagctagtatccttgctgg

SEQ ID NO: 113168 - DNA, 269 bp, Arabidopsis thaliana columbia
  unsure (1)..(269): unsure at all n locations
ggccggggtcaacccactcgtaccaccaattttgttccgttttttatacatcaaattcatatccgatctggagagcaatggcgtcacggggagccacctcancaagagttgaattcgtatacatggcttatactcgccaaacaagcaaagcgtcacaaacaaatggatattttcatataataagaatcaaaatctcttaacaaacacgatactactcctcaaacaacgatagatgaattaattcattgacaacatcgttaacgaagctt

SEQ ID NO: 113169 - DNA, 353 bp, Arabidopsis thaliana columbia
atctatctctagagttagtgtaaagctcttggggggatacaagtctgagaactccatcaataacctgtgaattcaggtgggaatttgtgaagaataattgcgacaatggcatttggtgtttccgaggatgaagctgaaggtactataaccatcaatgaatttatccaaagtcttgacgcagaatagcttgcatcggatttgttgtctagtggagatgaatgaaatgagtgtactttcccaaagggttacatgaaaaggcaagcaattttctcatgcattacatgtacaccataggggaatgcttgaatttgcactgcttgttgcttatcttgtcatgatggccattagctttt

SEQ ID NO: 113170 - DNA, 354 bp, Arabidopsis thaliana columbia
  unsure (1)..(354): unsure at all n locations
gggggagggacgtcgtncgcacacacctctttatcctaaactgttattatatggcgactctcatctctccgnttggtgagagtcatgatcctaacttgcgccagcgcggttatctccnnncgcttaaacccactacctttcaccccacacgtatcgcttcatccgcgcacgctcttcgttcacacagctctctcgctccctaatctgctctctcaaattgccgcaagccgccgcaccatattccgcctttcggcaccacccagatccgttcgatacgacaccgcgccaccagccttcattttccgtcaggagacaaagctcccgagactccaactctctccttacctcgatcca

SEQ ID NO: 113171 - DNA, 384 bp, Arabidopsis thaliana columbia
agagtaatgaaaattggtcgttgggtttacgataattaaacaaaggttgaaagagcatcaaccgttggtgagtcttcttaatcctcaacgacgaattcaactgctcctccattattctcttccttcttccttctttcggaaacaaccacagaagcaaagaaatcaatctcctatgagttccaagagacggcggagattcaatctccgaacagtgttctccatcatcttcctcacctttcttcctctgaatcttaactctcaagaggtctttgattcttctcaagatcacttcttgatccaatcccgagtttatgcgaaccatcgcagccttatcgatacacctcttcctggcaaagaccctgcccttgatgcctctccgccatc

SEQ ID NO: 113172 - DNA, 333 bp, Arabidopsis thaliana columbia
cccggggcgttccacgcgttcgcataaactcttttcgcttccgttctcgaccaccgctgaaaaccctggtggtacatttcttgggtatcggccaaggagataactcgaagatggtgtctgacgctagcaagaagaaggcagctcagaagaaagctgctgccgccgataaaagaggtggtaaagctgctgctccatccaaatccgccgctacttcttacaacggtgttgatagcttgtcaagcggtgtcgatgctctccaaatttctgatcggacttgtaccggagttctctgttctcatactcaatctacagatattcgaatagaatctctgt

SEQ ID NO: 113173 - DNA, 391 bp, Arabidopsis thaliana columbia
  unsure (1)..(391): unsure at all n locations
ttccggggtggttccactcgtccgcgcctattcactggcctttatttttctgagctttgaacccancttgttgtgttaggctattcttttctcctctaccaaagtcagttaaacaatttgctctgtgtgctgatgcaggctttgcttcttgccatccacaagatgaaagtatcagaagaacagcgcatggcaagcattgatacacatgaacctcttctcggctttgctctaagctgtggaatgtactcttcacctgcggtaacttaactaagtaacaatctgcgtttccaaaagtcataaacagtcattttcttaacacgaagaggtcttgcaggtgaggatctactctgcgaaaggagttaaagaagagatgctataagcacaaaaggac

SEQ ID NO: 113174 - DNA, 387 bp, Arabidopsis thaliana columbia
aacacatcattttctttccttttgtttccacccagaatatagaaccgggggggtatggtataacacatgatgagcatcaaccattctacgtcttcaacgacccacccgaccattccatataagactcctctctaccaaaccaaaccagatccttctagttagacccaaaaaacatatttttctcattcgaccgactcgaaagatctagctatacttgaagagaaaccgaagcagagtcaaaaagaagatatagtggacactggtagacagaagatcaagatgcatcggatacacatctctgctagggtttgtataccgcagatatggatacatgaagagcttcttaacgaataaatcagattgttcaacgattgacacctgtctaca

SEQ ID NO: 113175 - DNA, 248 bp, Arabidopsis thaliana columbia
gccccaccctctctctcacatctaccactctgctacctatccctcaaaggaagcatcgctgtgtcctgagaacagttccttctcccaaaacgctcaaaacttttctttcacatttctaggactctttagccattgaaaacaccttattcgatacccgtgcttgatctttcatcagctttttgtcaacactttttatacaaacgatcgatatgcctttgatttccacacattccaccacctttattttt

SEQ ID NO: 113176 - DNA, 273 bp, Arabidopsis thaliana columbia
cgaacacgaactgtgtaccgtttattctatgtttaattcataattaatgacctgacgcatttcatggatcttatccattaattcaactcttagatttggactatgaatttaaaactctggaatccaaaagcccaaaacctactagaaatttttctatgatttaaatgatggtgtaggagtagccgagtaggactacgaagctccgatggatgaattaattgatagagtccatcgataacgaagctttgagcagcacaaacgatccgcactaca

SEQ ID NO: 113177 - DNA, 374 bp, Arabidopsis thaliana columbia
  unsure (1)..(374): unsure at all n locations
atctcatctctagaactttgattcttcccaatcaaagacagaagggggcggctgttgagatccaagaggacggctgaagaggtgcgttggcattcaaacaatgctagttcagatggaacaatgcgacatccagtggactcaattacttggtccactatgaataataaatggccagagttctcttttgatccaagaaacctccgcactcggtctttcaactgatgaaatgaatccattctcgatctagaatacaaagtacagcacatggccagttctattggtcaactacaacatgcatncaacaaagtgtatgaacgcagagaatataatgctgacattattgattcctggtccaacagcaccaagcaacaaaa

SEQ ID NO: 113178 - DNA, 365 bp, Arabidopsis thaliana columbia
aacaaattatcatgaatttttttcacgaaccaacaaaccaaccagaggcgcgtttttctactaatttgggtggcaaacgaccactgcttatccttacgcgtggagatcgacgagtctcgagccaccacagcaaggagaacaagaaggctcccgccgccgtcctaggtggtggctcttgccagggatgggaggaagagcccacgaatcatccataccactacaagaagcggagtttcaatgattggctccagtcaaaggaaggctccgccagagtgctgcctaatttcacaaaacatgcaccgactctcttgcgaagaatcgagaactacagactctcgttggaggagatggagccaacaactatc

SEQ ID NO: 113179 - DNA, 380 bp, Arabidopsis thaliana columbia
cggggggttccacgcgtccgcggacgcttgttttcatttttttatagagcgcgttcgtccacgagacgggtgcttggagatgtcagtggggcccccaccacacgttcttcgactcgttgcggcggtccactgtttatcaaaaatgagttcatctgtctcaaacccccacggaatcctgcaaccaggctcatttctgcttccacaatcacaatctatgaaaaaagatgaagcagcgttagtttctgtgtgctggaatcaagattcaagttgtttttcagctagaacgagtcatggttttcgtatatataactgggaacctttcaaagaaactttcacgcgtgatctaaaggaccgtggttctaaaaatcgtagagatgctt

SEQ ID NO: 113180 - DNA, 384 bp, Arabidopsis thaliana columbia
ctaaatgtgacaccaattggtgttttggcagttattactttcaaagatatacctgaagtggggcaaaacattggttacataacgatgtttggcacagggcttctatttgcagatgaagttactatatctgccggacaaataattgctcttgtggttgcagacacacaaaagcatgcagatatggcagcacaccttgcagtagttgagtacgattcaaggaatataggaacaccagtattatctgtggaggatgcagtcaaaaggtccagcctttttgaggttactcccgagtatcagcccgaacctgttggcgatatttcaaaaggaatggctgaagctgatcgcaagatacgctcagtagagttgagacttgggtcacagtac

SEQ ID NO: 113181 - DNA, 362 bp, Arabidopsis thaliana columbia
aacatactttcctctgcttgtatttccagcacaccgaaccaaattggtcgtttaaaaattaatttgatgggccacaacacactttcaacgttatataagttctactgtctcttactcactatatacgacactcagtatcctccttatcttcttaatcacaagaaaaaatcggaacaacatcacagattacattaccgaaaaacaatataaaccgaaggacaaaaaagcaccaaatcacttatcatttatacgataactataaaacaaccctgtcttttcttactactatcacaaattaataacaccacatccaataccaacaattaatacaccatcttttacccaataacttcttaaaaccc

SEQ ID NO: 113182 - DNA, 408 bp, Arabidopsis thaliana columbia
  unsure (1)..(408): unsure at all n locations
cccggggggtcccacgcgtncgacttattatattagttagagttttattaggagtgtacatacaacacttgcacgtattttctctcaaaaaaggcttaacctaacaaaaaattgcttaaaagcagttaacagttttgttagtgtttaatggtcaaaatgtgtctcaatccaatgcatttgactaattataagagtttaagatggattcggagtgtttagacaacacttatatccattttctcttaaaagaggctcaaaccaacaaaaaaattgcttagaagcagtaaatagctttgttagtgtttctatggtcaaaatgtatcaaaacccaatgcatttaactaattataagagttaaatatagattaggagtgtttagacaacacatatacccattttctcctaaaa

SEQ ID NO: 113183 - DNA, 391 bp, Arabidopsis thaliana columbia
ttcccgggttgtgctcacccctccgatccaatctgttttcgatttttaatataacatctgtcgattctcagtgggtgcgtctcaatttcatgaggccattgtagccgataatgaattccgctttagatttagcttttccggctacatttccggttaaatcgagttctgttggcggacatcagattgcttcccctggattcaggtcccgactaagattgcgctctcttcctccttcttcatctatcaaggctgagtcatgtttaaaaagagacgtgcacaggcaaagaagcagtcttgagtcaatgttctgttatgataaaccaataccagaggaaataatcgaggagccagttggattatccatgtcagagagagagattggtgataatca

SEQ ID NO: 113184 - DNA, 401 bp, Arabidopsis thaliana columbia
ccggggcgtcccacgcgttcgacgtcatacactttaagctgttttcatcacatgaccatccagccctctaaacgtcaccgccatcttctggtcgtctaactccctcttctccttgaacacctcttgcttcccatcttcatatatttacatgaacctttcattaatagaaaccctagctagtaataaacacatattcatacaaatagagaatgagatagaggaccgcatgtgtagttccaggacttgatggccccgtgggagtcccagtcgccctcgtgaacggtgacaccttggatatgatggccaatggcgtcagggaagagttggttttcgctcttccacctcttgtagtggttcttcgctgaccctttcagaggaacttctgtcacgtatgtacctga

SEQ ID NO: 113185 - DNA, 379 bp, Arabidopsis thaliana columbia
gttgcatcaaatatgccatatttatctaaagctcgagaatacgctcttggatggaagtcctgctccacgtctgaaaatctgtgattttggttattccaagtcctctctgctgcactctaggcccaaatcaacagttggaactccagcatatattgcacctgaggtcctttctcgaagagaatatgatggcaagatggctgatgtatggtcttgtggtgtgactctttatgtcatgctggttggagcatacccatttgaagaccaggaagaccccaagaacttcaggaaaacaatacaagtaggtttcttttttgaagccatgtatctgcatatctcgctttcgccacatcctattcgtcaatgtgtgatcttgttatac

SEQ ID NO: 113186 - DNA, 263 bp, Arabidopsis thaliana columbia
  unsure (1)..(263): unsure at all n locations
acccacgcgttcgggaagttcattaagctttgttttcccaaagcaagagangctaaagggaagttggaagatacaggtgtgggggccaaaaagaaggcgagcgatatgactagtgcagctattgactaattctttaaatttccaggaggaagcagacagagagagtcagactgcgaaggagaaaagtaaagaaagtttcgagactgcaaaatcaaagccccatgatactttataatccaagaaagatatgacattttaagttt

SEQ ID NO: 113187 - DNA, 323 bp, Arabidopsis thaliana columbia
caaaaagcaaatatcttgtaactcctcttattgccgtatcctatgccatgagagtccattcgagtgtggtttgaaccctggtcgatccatgtactatgtctcagccacgggttccaaagcacaactcctttctccatgtcacatagtaataacttatcgcaatcaaccatttttttaggtatctcatgagattctaaaccgggaatatctaaggttaactcacggaccactatcttaggatcgatgcttaccgaataaatcttggatttggttgctaagatgaatcgaaacgtcatcttgtggttattgatgaacgtcttatc

SEQ ID NO: 113188 - DNA, 390 bp, Arabidopsis thaliana columbia
cgaatcaattaataaacatgcactatttttataggaggaacagaactgaagagcgggtcattgatattctgtcagccgatgcatcttcttacgagtacaataggaatctatgacgccttcataaaatctgcacagtgtaagaccatcaacggaaaaacaaggattacagtacacttggaaataagaaccttcaagtttccaatacacttacgtcttgtcgagcggccaccagatattgactctcttaccgaccaaatcctcgccaaagccatcagactccttaaaagatggaaatccatatgtcacatggtaacagataggtgacaatcaatggctaaaaatggggagagaaggtaacaaagcttattataccacttcttttctcactgt

SEQ ID NO: 113189 - DNA, 368 bp, Arabidopsis thaliana columbia
  unsure (1)..(368): unsure at all n locations
agactctcttctaccncgctttttttgctgccgcagagatcatnggggagagttcactttgaccatggcgagagcaacaangttcgagttcagacacagccaggatnngctagggggttgtcttatggatttcccaagtcaatcaaggccgaaggatacggaagcttgtataagggtcttgctccactctggggacgtcagattccttacactatgatgaagtttgcttcctttgagaccattgttgagatgatttacaagtacgcagtccccaacccaaagagtgagtgcagcaaatgtctgcaactcggagtgagttctgtcggaggttacgttgccggagtgttctttgccatcgtatttaatcc

SEQ ID NO: 113190 - DNA, 264 bp, Arabidopsis thaliana columbia
ccatgtgttgccattattcatatgctgatttcaaatcccctagccttgtaaaggaccatatgaatcttttgagagaaagtatatccaggttatagtggttgacataatgtttccagatatcattgacagttgatagattgcgctgaaaaactgcaagctgaaaataatattaatcagataacaaataaaaagaagataattatgcagatcaatgaaaatgaaacctccatgtcaaggaacaaaacgaaaagtccttaatgggac

SEQ ID NO: 113191 - DNA, 388 bp, Arabidopsis thaliana columbia
  unsure (1)..(388): unsure at all n locations
ggtgagnaatcataattctatttttattataaatgtacggcagcnaccagggaatggttcattaaaaatggtggggcgactctantaaaattctatttttaacagccgnagaagagaggaaaattcagacaacgtgttagcttgtaacatctatctaggtgagtcacctcgagtgaccaatcaaatctatccaattagcgtttaggttgactaggtttcaagaacttcattttctttctcattagctaaggtaaacttaaaaaaacaatccgaaagtttaattggcttttgaagttttttggtatttgatatgagaataggaggttattacaaaatatatacattaagacaaagcaaaatattacagacgttatgtctatattggacc

SEQ ID NO: 113192 - DNA, 374 bp, Arabidopsis thaliana columbia
gagaaagaaactcattaacgccacgcctgtacaagagagagagagaataataagtttacagagtagagaagcttttaaattcgaatcaggggcaaatccgtaaaatattcctttttttttttcctttttcctcactactttatatctctaacctttaacttttttttttcttcttcttcttcttactcttcgtcttcttcttcctcctctgtgtctgttcatcggaaaaggagattttgtttttttgttttgtttgtgtggcggcgtagccatggcggagataagtcatcctccaatggaacagcttcaagaccttgaatattgcatcgactctaaccctccttggcgtactcttctctctctctcactctcta

SEQ ID NO: 113193 - DNA, 389 bp, Arabidopsis thaliana columbia
gatacttgtattctttactattttcttgctccactaaccactattactgccaatttttacaactatatattgccagtcctaatcataatagttatgattatgctaataattttacgaattctcaaataacccacttatcattgcctaactgtgttttcctttgtttattttagttctttttagtttttaaaaagaattagtgtgcttatgttttgtatatatcaaagccagattttacaatttgagtaggaaaacgaactataagataacaaattttacccatgcaaatttaatcacacaacacaatcacaagtttaccccatgaaattattagtctaaaatatgatttacgttgaatttttaacttgataatcttgtctagttattat

SEQ ID NO: 113194 - DNA, 315 bp, Arabidopsis thaliana columbia
  unsure (1)..(315): unsure at all n locations
gcgaccggngaggaatcattattctatatttattttaaatccacatcnncnaccacgagaggttccattaataagtgtgtggcactctaataaacatctatgccnaananngccgaacagaggcaacattcgccatcgtgtctgcttgaaacatatatctcggcgagggaccattcgtttccaaccaattccatccaatcagaagcgtagccgcactaaaccaattacacctatttcaatcctcactacctaaagccaactccatatatcaatccccgagtctacaacagctaacaagtttttttcaatctcatc

SEQ ID NO: 113195 - DNA, 216 bp, Arabidopsis thaliana columbia
  unsure (1)..(216): unsure at all n locations
cgnttgctggaaactactactctcattacctttgtaattctatagctaatacgtccatcaaaccccaacttatgtaaagcacgcatctattaaataaaaggtccacacatcctctgcccgtttctctgataatgcatgttatctcgactgttcgcatgacctctatactatcaacacatcattcaaatctgttcacttataactttcgatagtatt

SEQ ID NO: 113196 - DNA, 369 bp, Arabidopsis thaliana columbia
ggatgatataatcttgtgatcgtttacttcaacttcgtttgaaacggagtgtgacgcaagaaaagatctaaacaggtctgttatgcatattctttcagttccttatcgtaactttgcatatatctgattgaaggcgtcttggtgttacaagtagcatagtcacgactatcttctttagtggatatcattcttaatgagcatggttttggagaatttagtcactgataggttgtgttttcctataattttcttagttaatattaatggtgattaaagtaccagaagatatattactgagaaatatacatttttagtataaagatgacaaattgcctgtaagtttagccctcacatcttgttgctcaattg

SEQ ID NO: 113197 - DNA, 337 bp, Arabidopsis thaliana columbia
  unsure (1)..(337): unsure at all n locations
cgctactnnagttttctcagtgttattatcacacggcagcacncanagtggggggttggcctcttcttgttgtggaaactctggncctaattggtttaatcaaagagccagcggttaaatggggaccaacatttccatattctgcacctaatccgtcgccaaacaagaaatatgcttcaccgatgcaacatacaacatcgatcaagaattatacaccgacaccatacgaccatgcaacaatgttgcatctacctccaatcaaaatttaccaccatccgccggataattattcttcacccaatcattatccacccccaaatcagaatgatcctccaac

SEQ ID NO: 113198 - DNA, 355 bp, Arabidopsis thaliana columbia
agattttaaaatccctacttcttcattatcatcccttcaacactccttggtagcttttctccgccttagctgggtgcttcttctctctcgatttgctctcacggaagattcttcagaatatctgatccgatatcagaagccccaagttcgcttgaattccgtctgagcaatggctttggtcttgcacacgtacaagggaaacaaaagtgctgagaaggcactcattgcagcagagtacgttggtgtgcagatcgatgtgccctctgactttcagatgggtgtcactaacaaaacccctgcgttcctcaagatgaaccctattggaaaggttcctggacttgagactcccgagggt

SEQ ID NO: 113199 - DNA, 351 bp, Arabidopsis thaliana columbia
ctaagtttgtgctgcaagaacttcatttgtaatgctagcgtctcaaagggtccagctcgacttgtatggtatggtcattgctgctgggacggtccgcatatcaaacgtacctaaatacctccctgacgcatgatggtgttctcgattagctcatgacactgaagcagaaaggaagatgaacgaaccacttcgcaatgtatataatgacttttgaacgggaaccggcggagaaatatgcgctgaccagtaccacgttacaagataagaacatgatgctgatgctatccatagctccgagcgtggtattgccacacaaaacaactcatttgtttgcttgggaaattggtcctg

SEQ ID NO: 113200 - DNA, 338 bp, Arabidopsis thaliana columbia
  unsure (1)..(338): unsure at all n locations
gcgacccgnacgtaaagattgttccatcttaattaaaaagacccaagcgcancaagacatgtggcattaaacagtggtggaccctctccatactcagcatttctctcatttcaacaaccaagaaagatttgtccatacaactgctcgacacacatttctacttgaaacaaatactaaaaccaatcaacactacccaattatcacttaaacttacatgttttcaaaaactccatcacctttactcatgagctacagcttacttatcaaatctacacgaaaaagttacctgattgtacatctaatgtgcattattactccaccaaactaattttcaacac

SEQ ID NO: 113201 - DNA, 276 bp, Arabidopsis thaliana columbia
gtgatttgactattacttatgatcgcgctactattcttaggatgtcgggggtcgatcaccctgttgcgaaagttcttgtccagatagctgaactccaagatagaaaaatcagtgatgggactacatctgttgttattgaagctgctgagttgctgaaaagggcaaatgatttggtcaggaacaaaatacatccaacatcaattatcaatggatataagcttaccatgaaagaatcttgcaaatacctacaataaaaatttgtgaccaaggtccaaa

SEQ ID NO: 113202 - DNA, 368 bp, Arabidopsis thaliana columbia
  unsure (1)..(368): unsure at all n locations
atccattttcttcaacattattatatcacacataaatccttaaagggtgtgtctttacaactttgtgggggccncacaaacataccacatctctttacactggtccaaccaaacaaatcatatcccattcttctttctatgattcacacaacaatgcttcactaactatggcagacactgcacgcctgaaatacaatctacatcttcttataacagactaaccataaaccactatcactcaaataaccctaccacttataatcctatcaccagtctatacacaccataccatgcatcttcataaattcaatgccgcatacccaacttatcttataatttcctccatgcaaatggtacatacacaacca

SEQ ID NO: 113203 - DNA, 236 bp, Arabidopsis thaliana columbia
gcggcgggagcccgggcacgagaaggacggcgccgcaaggcaagggcacggggagaaccgcggggaggatggacacccacgggaacgcgaacaagcgccgggcgaggtggcccaaggacagggagacgagcgaacaggaacacgaacaggaacggaagggagacaaccaacaccccgcgggaacgggagcgagagccgaacggggaaagaaagggagcggaagagcaaggctcggc

SEQ ID NO: 113204 - DNA, 257 bp, Arabidopsis thaliana columbia
  unsure (1)..(257): unsure at all n locations
gcggcgccgagagaagggaaaagaaaggagacangncaatcccaatgggagggaaggggggggggggggggaaataaaccctatactccgaattaacagcagggggtgatggggtttgacgtaaagcgcaagggaaggggtaaagggggtgggttgaagacaccaaaaggcaaggtagaaggcacagggaaggcggagtacgaaggaaagccagcgaatttggggagtgagaatgatcaaaccaagagggagaaggg

SEQ ID NO: 113205 - DNA, 358 bp, Arabidopsis thaliana columbia
  unsure (1)..(358): unsure at all n locations
acccacgcgtccgagtaaaagcaacagaaaatcaattttaccggaaagctagcgggaagcagggggctggataggggaggggaggcacaccanatgtgccctacggaaataccttcaaaatagaggtgctttacaagatactacctgaaacagagccaactgctggtggggaagcttctcgactgatcatatcatgggggattcaatttagtcaaaggactataatgaaagggatgattgaaggaggtgctaggcaagggctgaaagaaagctttgaacaagnttcgaatcagctggctaagacttataaaactcttgatccggcgtggggattggacaaggagcanggtatagcaac

SEQ ID NO: 113206 - DNA, 324 bp, Arabidopsis thaliana columbia
ggaaaagaacaaaatcaaatctagcaaagaaaatggatacagaggggcagaagaggggggcggggggggcaaaaccaagcacaggagccaataaggagtcaccaaccagaggaagaagggcatcaggaaaaaggaccaacaaaagggctgaagaaagggaaggaaaaagcaaagaagagcaagagagggcatactaaacaaggacaagggcatgagcacgatcggggagaacacatccctgacgagcacgagctagaccaagaagacgaggaaggaggctacaacgacaaccaacaccacgggggggcaccagcacgaggaaaa

SEQ ID NO: 113207 - DNA, 247 bp, Arabidopsis thaliana columbia
gcgtccgcggaaagaagcgcacttgaatttgtttacaaacaagcatcaacacgcctggcggggattctgcgacggggtgggaaacaaaataccttcagaatagtaagagctttcgataacctaagcttcttcactggggactgtccattagaaggagcttgagattgacgtagaggaggaggggaattgggtggtgagggtggcccattaacacttccattctttgattgcactggtttcttagaag

SEQ ID NO: 113208 - DNA, 348 bp, Arabidopsis thaliana columbia
tttataaaactagtcatttaattttgtaaagacaacattggagaaaagagaaaattgggggggggcaacaaatgaacgaagatagtaatcaatggccggccgggtctgaagaatcggttactttgcaaatctgaaaaacgcctaaaagagagagagaaacaaagtaaatataggggcatcatcggaataaaagaagaagaacgaggctaaaacagtaacgcaccttcgtctacttaaatacaagcgaaaacccaaatcgggtgtcactccccagcctacaaggcgactcagtctccggctagtgccactcgggaaaatcacgataactttctccttccatgtatcacg

SEQ ID NO: 113209 - DNA, 377 bp, Arabidopsis thaliana columbia
cgcgtgcgcttgacacttaattcacagtgtgaacaaaagaactttttggaaatccgacccttaaatactacaacggggcgcttttttgagagaatgagtttaaggcaatttgaaatatatcaactcttacaaaccagtggaaagaccagaggtttttgaggtgttaaatgtgcattcagaggaagttagtgcagtatcaggagtcgacacgagttcaactcgaccaaaatgctcgaccagccaaacaaaactcaaaatatatgaataattcaaaatagatatataaaatattttaaaaataaatataattttttatgatatctgagtaattaattctaaaaaattttatagtaaataaaatatttagttggaatgat

SEQ ID NO: 113210 - DNA, 200 bp, Arabidopsis thaliana columbia
ccagcggcggcagaccaacacgggctcagacggaaagcgccggcgggaaaggcacggggggggaaaccaaccgtgccggaggacagcagcggccacaaagggcagcggcgggggaaccaggccacaggggagcacaaaagccggaaaaccacacacgaccgaaaccaaaggggccactggagcgaacagaccgggggcgg

SEQ ID NO: 113211 - DNA, 330 bp, Arabidopsis thaliana columbia
  unsure (1)..(330): unsure at all n locations
acgcgtccgaaacaagaaatgctctatcctttacgtattcagctccccaaaggtcccgggggggtgcaactcttggggggggggatccctctgcaaagcgtgataaagcatggaacattgtgcttcctagagatgatgtcatgaaattaatggatcgtctcatgaaccaagaaagagttgctggatcaatcttttacaaaatgcaatgcacgaaaggattccgtcatgaaccacctacacatgtatattattgaagagacatgtgtgcccatgcaagagttntaggacttgaatagacaattgatacaaaatgggcgtatatgtgggaca

SEQ ID NO: 113212 - DNA, 242 bp, Arabidopsis thaliana columbia
  unsure (1)..(242): unsure at all n locations
cggaaagcaaaacaaaacaaaacaaaaacagagcacacaaaaanacacaccaagggggcacagaaagggggcggggaaccacaccccctccacctccacacgagaagctcagaacataaccagggcaaggccacgggaatccaccaccgcctccagggcagcccccaacgacaaaggggaagcgcagaaccggcggcaccaccgaaacacggggcaaaaagaggcgaacccccaacaaaaac

SEQ ID NO: 113213 - DNA, 375 bp, Arabidopsis thaliana columbia
ccacgcgtgcgccaaatcacaaaaacatttatttatctagagctatatagctaagggcaggttattggcgaatgaggagggggaatttcatgtgtcccacttttgttctgcctaaatttagaaatttattgtttttttttctacgcgagcctaactcgttttactcttctgaaatctaaactcttcgaatttaattgaccactccactaaaagagtcttaaaaagtcaaatatttttcttattacgacctaattttgaaagaacttcttcgttgacctatgcatcattctctcgtctataaataccattcacgtcgttcgttactcttcatctaaaaacattcatacacatacaaacacacgaaaatacatccca

SEQ ID NO: 113214 - DNA, 363 bp, Arabidopsis thaliana columbia
  unsure (1)..(363): unsure at all n locations
ggattctcgctatcttgagttttttagtggcagtccctgaagggggagaagcaatcggttgggggtgggacacattcccggttttagtcgatgtactgaactggactgactcaccggggtgccaagaaaaggcgacttacattctaatgttgatggctcacaagggataccgagatagacaagtgatgattgaggcgggaatcgaatcaacgttgctcgagttaactcttttaggaagtgcactggcacaaaagagagcatcaaggatagtngagggnctganatnagacaaaggaaagcaagtcctggatagtacaggaacatgcggagccgtatccacaccgatatactggaccagagaca

SEQ ID NO: 113215 - DNA, 337 bp, Arabidopsis thaliana columbia
  unsure (1)..(337): unsure at all n locations
acccacgcggccgagcaaaggcnaanancacaaagaaagaggttgtttaactagcggggcaggaagaggggcgggggaggggaaaaacaaggcntcttaccagaaccggccaggagggcaggccactgacgaggacggaaaccctaaccagcagcaggatgacgaggacggaaaaccaaagggaggaggaggagacggaacaggcggagggggaggagcaacagggggccaaggagaccgaacagggggccaaggggacggaacaagaggccaaggggacgggaccggagnccgaggatacggaaccgggaccgggacagaaggcagcggaaccggc

SEQ ID NO: 113216 - DNA, 373 bp, Arabidopsis thaliana columbia
acgcgtgcggaggaaagagaaataaaacaaaatctgtttgaggatcagcagcagcagcgggaggctaatggtgagagggctggctaagttcttggaggaaccttttgagcaatttgctgatgataagggcatgcagataaggagtcaaggcatcaatttgtcaggtgcgggcgatacactctgcgaaaatatgtatgaatgcattgagaatgacttgggggggtctctgcaacttggcatccacaacattactccatacagatcaaacggcatagaacgagcatctgaggtttatagttcccagaattccaaggaagctggtggtcaggcttcggattggggagggacgtccaggctcgatcaagctttggag

SEQ ID NO: 113217 - DNA, 368 bp, Arabidopsis thaliana columbia
  unsure (1)..(368): unsure at all n locations
acccacgcggccggctacttttgctcacgcagggttaggaacacaaggaagcatttngagggggagaaaggccgggggggggggcaacaaacactgatcctaaatggggacatcataggccgccgggtaaatggggaccaaaaggtccataaacaccacctaaaccgccgccaaacgagaaagagcctccaccggggcaagacccaccaccgaacaagaaggatccaccgccaccagacgagcagccaccggggaaggatccaccaccgaacaagacggaccgtcaagggccggtgaagnagcccccaccagaacagaagccaccgccgaagaagaagaaagcgggcccagaacaggagccaccgccg

SEQ ID NO: 113218 - DNA, 374 bp, Arabidopsis thaliana columbia
  unsure (1)..(374): unsure at all n locations
cccacgcgtccgggcgtcatcaaccgctttgatttgtgataccgaagcgtggaagggttggaagggacatgtagagagaggtgaaaaagactcatttgcgtgatttgatgagtgatgctaatagatgccagtccatgatgatggagtttgatgggttgctgttggattattctcgacagcgtgcaactggtgagacaatggacaagcttttgaacttggcaaaggcttctcaattgacagagaagatcagccgcatgttcaatggggagcatattaacagtacatagaacaaagcagtncttcatgttgcgctccgtgctccaaaggatgcagttatcaaggctgatggaaagaatgtggtaccagaagtgtgg

SEQ ID NO: 113219 - DNA, 336 bp, Arabidopsis thaliana columbia
  unsure (1)..(336): unsure at all n locations
cgcgtgcgggcgagaggaggggaanagatttcctatataatcaacagatggaattaaggggggggcaagagggaggagcggggggaagcctaactgacnttnacatgaaaaacaaggaaacgcaaaagagtgctccgcgcgagggggagacaatgggagaaatcctcattaaaggaaggagcataatgaaagggtgtgtaaaaaatcccaaagctacattggaggcatttaaacacggatgggtcaacacaggagatggatgtgtgattcaccctgatgggcgcgncgaggacaaagaacnnggaaaagacataatcatatcgggaggcgaaaaca

SEQ ID NO: 113220 - DNA, 220 bp, Arabidopsis thaliana columbia
tatccctttccacgtttttttacttcttttcgccatccggttgtgtataatattgggtgggaaaggattactggctttcaattctctttccgacatacactttctacttggtctgcatcttcttcttttttctgatatcacgttctcttttttattttgcggttacacactttcccggaattcttgtattcatacaactaatgcttctcttaactgttct

SEQ ID NO: 113221 - DNA, 234 bp, Arabidopsis thaliana columbia
acgcaacatctcgtggcgcaaacggggggggagagggaaacgagggaagggaatctcaaaagctcgagttcacagaaatgacccgaggacacaaaccaatcagcgggggcgtgaaccacaggcaaactcgactcttgaataacaaaacagaaggccttgcgaaggcagcaaccgctgctgcgtcagagggccggaacgcacctgaggagcatactcttcccaagcccatgaaag

SEQ ID NO: 113222 - DNA, 233 bp, Arabidopsis thaliana columbia
  unsure (1)..(233): unsure at all n locations
gacccacgcgaccggagcagcnncnacacacgcgcaagcacaccgagcgattcttccgggggcacaaaggcagggggggggcacacaaaacactcatgggtttgataacaaaccctacccggttgagtctcggcgccaccagctgcaaccacgggacaacaatctccgggcaggaaacaggcgcggagaacaatgagagacaagaatctgaaggatcaggtaaagagcaaggg

SEQ ID NO: 113223 - DNA, 372 bp, Arabidopsis thaliana columbia
  unsure (1)..(372): unsure at all n locations
ggacccacgcgtgcggagattngctactctagtttgctgctggctataagcatgtcgccggcgggggaaatacatgggggggggggcaaaacctaagtttatgtaaaagctaatcgaaaaatataggaattagtacgcaagagatcgatcaaaacctcacctgaactactaccggtggaatctcaagaatattccgggcacctggaacggcgtaaacaagttactcgagcgtctccattctattctctgagatggcctctttgatcggatctatcccacaggtagcctcaggtgccacaaccactacaccttctccggggcaattgacggcgatcttcccttccggactgatcggcagccttccggcgacag

SEQ ID NO: 113224 - DNA, 373 bp, Arabidopsis thaliana columbia
cacgcgtccgcttttctttttcacttttgggaagctctaagagctgagaggagtgtgagagagaaaaggatctttggagtcgccggaataatttgtttaaccggagctctgtctttgactctacgcttctctctcttcttcttccttcttcgtcttcttaatcgctttctgctctgtttttctcgttcatcaagctacatctactagctctctcagtgattgatttctcacagtttcatcgatttccatgcgtttaagacctaaaaggacttgttctggggtaaaggacttttcttgttcttgagagagttcattttgaggcttttctgggaattttgagaggttttttagggtttaagggggtttggttttg

SEQ ID NO: 113225 - DNA, 375 bp, Arabidopsis thaliana columbia
  unsure (1)..(375): unsure at all n locations
cgcgtccgcggacgcgtggggcgataggtataccttgaaaagagaggaagaatcggggtggcagcatgaccaccaggagggggaacattaacctctgcatatgcaagcattcgaatctaaacatcagaagctataacaacacataccattaatatcttgtttgaagcagatagataactaagtggtaagtattcagccaaagatcctaggaaaaggccaagaaaagacaataagaggaacctgcaacattgacatccgattttccagcatagaaagggcgaggcctggcgacatcaanagtggggacaccgaataatttcttctcatcataggtaccagccttcttaaaaatctcagctgcaattggaacattgg

SEQ ID NO: 113226 - DNA, 321 bp, Arabidopsis thaliana columbia
  unsure (1)..(321): unsure at all n locations
acccacacgtccaagcganncncactaaaatccttttacacatcgcctttatctccttctctagatctacgcactagggctgctaacaccaatnttaatgctagacaaatcttccacagtcttggtaatcccaccgttgaggttgatatccacacttcaaatggtattaaggttacaacagcatttccaagttgagctaccactggtatctatgatgctcttgaacttagggatggacgatctgactaccttggaaagggtatatctaaagctgttaacaacnataacgacagcatcntgccaacacttattagaaaagac

SEQ ID NO: 113227 - DNA, 359 bp, Arabidopsis thaliana columbia
  unsure (1)..(359): unsure at all n locations
cccacgcgggcgagccngaaaannaanaggtctttatcacattagattattcatatgggtgaggaaaatgtatgaggggagcataaacaaagtttgcaaggaaaaagttttataagaaaggcaaagcattggaatgatgataatggagatgaaactatgaaagcatgatgttgttagtgaaaagagaaagagggactagaaataggttgatattccccaaaatccaaaactactaaaggacacacttacaagtgacaacaccaccaagcgtggatgtgttgtgtacagcaccaccggngnattttacttcaccaatcaattgatgtaaaaaagactcatatataaatgttcacatcatc

SEQ ID NO: 113228 - DNA, 279 bp, Arabidopsis thaliana columbia
cacgcgtgcgaaaaagcttcatattgtcaccacattaattccaagaaaattcgcattaagggtctgcaaaaggtaatggggggaaaattaacatttggtcctttattcaagaaaaattcgcattaatttatttatttaagagaggattacctaaaatggggtgtataaattgcaaaattagctctggtggtctgctaggagagtgaatggagaaagagggtgttaccattaccagtacaactatagttgcagagttcagggggtccttggagtagcatt

SEQ ID NO: 113229 - DNA, 332 bp, Arabidopsis thaliana columbia
aatggatgtatatatacataacataatataaatttcaaacttcgagacgtttttttgaaaaggggagggataagtggatctaacgggtctggaccttttgagacatggccaaaacgttgctacaaagcttcttcataagatcatcaagagacgccgtcggcgaatcaacatcaggaatatccacgaaattatcagaacaagtcgacacatcggagatggctgcactcaataccgaatccaatctcccgtaatctccctcctccatgggcatcgtcggatgttcaagacctgagatcaacgaatcgtaattctcgacgcaaacactcatcggc

SEQ ID NO: 113230 - DNA, 270 bp, Arabidopsis thaliana columbia
  unsure (1)..(270): unsure at all n locations
acgcggccgggggaacanaaaggggncagcagctatggaaggaccaacaacatgcgggcaagacatggcggatttgaggagggacccatcagctgtgaagaacagtggggatcatcagaagatttggggcaacgtacttggcatctcaaacaagacgtgagagtgggatcgagacaatctccctgcagcatactcaggagacgagacatgaaacaggaatgcagaaatgggacatatataatcaaagaacatgggatctccaacccacac

SEQ ID NO: 113231 - DNA, 248 bp, Arabidopsis thaliana columbia
  unsure (1)..(248): unsure at all n locations
cgacccacgcggccgaaaacagangancggcgaaaataaaaaccggccacatccaacggggcaggtcccacagggggagggggggaacaatccaacggccacaaactcttcaccattctcatccgacaaccgtaacggcgtgaacgactacccacacactccgacaccggatcacgacaccagcgccactcacttccaggaccgaccggcaaacaagataacaaacgactcagactcatcaagcggcg

SEQ ID NO: 113232 - DNA, 374 bp, Arabidopsis thaliana columbia
  unsure (1)..(374): unsure at all n locations
gacccacgcggccggaanaaacnggagcgatgtggaaacagatgagaaccaanacnngggggggcctaaggggagggggagggaaaacaacaaacatcatttataaggaagacaacggccccacaacatgcacaagcacaaagaaagagcaatgacatctacctctccccagaaaccaggaggcataaacgcccaacttgaagaaccacggcaaggggaagcccactgtcaggggaaggacagggccacaagactaagccataggaagaaggaaaacgggggccaggaggcagaancaaaaagaacacccacgcagcaagggacccaaaacgactcaggagacgtntncacagaagaaggatcaaacacaaaag

SEQ ID NO: 113233 - DNA, 257 bp, Arabidopsis thaliana columbia
  unsure (1)..(257): unsure at all n locations
gcgggcgggcgggcgaaangcaatacccatgttgccaaacgccnnaatttancttgggaggcgacggaggcagaggggtcancaaaagctgaancangaggagacggagaagaagaatagaaggatgaaacatatgaaagggaagtggagcagccccatggggcgaaattcaggaaaggaagagaggggggcacacacagagggagccatcttaccagggggagcagctgacaaaaccggaaaaggcaccgggggcg

SEQ ID NO: 113234 - DNA, 360 bp, Arabidopsis thaliana columbia
  unsure (1)..(360): unsure at all n locations
gaacagtggactntccattttttttctcacgcacaaccatctttaagcggggggtcacgaccggggggtgcggccatctacttatangcctaccaccatacacctaaccaacagaacaaggaagcaaccgcgggagtgaggcaacagaacaaaccagcctgagagatcaacagtgatgtgcattctgcatcatggggagagacttaccgggtcataactctctgccaagatataggccaaagcagcatcagtgactgccaaagcgtctcctgtgtcagcgggccgggcaacgacgtctttcatttgaagccgagctactttcctcaactggtcatgggaaagggggcccaacaccacaat

SEQ ID NO: 113235 - DNA, 260 bp, Arabidopsis thaliana columbia
  unsure (1)..(260): unsure at all n locations
cacgcgaccggcgaaactacaacaagttcagtaagaggcatctncancgnctcaggcggaacaaggagaggacgggggggcacacaaaaccananccaaaaaagagcgagaacaccacggaggcacacaaccagcagcgtgcacatgcttagcctcaccaaaaagccccacagacacaagggcagccgcagccacagccacaacaacaagagtaaaacaggcgcacacctcctacacagcgacaaaacacaccggcacca

SEQ ID NO: 113236 - DNA, 275 bp, Arabidopsis thaliana columbia
  unsure (1)..(275): unsure at all n locations
cacgcggcgaagagaccaaaaaggaggagccaaaagccacgcgancaangaaaggggggggaccaggaagggggggggcggaaaaaagncccnnacaaaaccaanaaancnaaaacngaaaagaaaggcgaagaagaaaacggggagcaaancgacgcagagcncgggcncacaaaagagaagccgcacgagaggcaagacgaccccgagaagaaaaacgaaaaggccagcgaccagggccnggaaggagagcagaaaaanaacgggagacggaa

SEQ ID NO: 113237 - DNA, 378 bp, Arabidopsis thaliana columbia
gcgttgttcttcttcatctttattacacatttttttcaaggtcttccaaacgatgtcggttttcgaatcggggacttcgaacttccacgtctacaacaaccacgaaatccaaacgcaaccgcaaatgcaaacgtttctgtcggaggaggaaccggtagggagacagaactcgattttgtcactaactcttgacgaaatacagatgaaaagcggtaagagctttggggcgatgaacatggacgagttccttgcgaacttgtggacaaccgttgaagaaaacgacaacgaaggaggtggggctcacgacgacggagagaagccggcggtgctgccacgtcaagggtcgttgtccctccctgtgcctttatgcaagaaaac

SEQ ID NO: 113238 - DNA, 391 bp, Arabidopsis thaliana columbia
  unsure (1)..(391): unsure at all n locations
ccgggccggaaaacccgnnaacccacgcgtgcggaggagacaaacgaggaaagtgaaaaagatcccaagaagagtatgcgaggcagatacatggccggcaagaggcacctgacagaaaagcacgcagaaggagacatagatgctgagttaccggaaaaagaagtaccaagaatccaggggaagaaacacgctctgccggagctctgcacaccagaaaacagacctagagtgaccaaggcactagagcatcagataatcgaaaaaccaaagatacagcagcgcagcacaaaagaaaactactatgagccactgcgacgggattcaaacaaccaggaagaaacagagaacatgccagacccggaagacactaggatggaagaggaagagcaga

SEQ ID NO: 113239 - DNA, 291 bp, Arabidopsis thaliana columbia
  unsure (1)..(291): unsure at all n locations
cagaaccgggccggaagncccgnnggcccacgcgtgcggcggagccacccgggggacgtctatctagcccgaagccgtccgctcgggggggcgcaatggccggcagggggggacttcactcgcgggatccaaccagcagaccgactgcggcataggggctgcagcacccgcgcgaccagagtggcggataagtcccaccaacgactgcgggccgagcctactggagcaagaactcctccgccggacgggccgaggggagcattcaggcaccaaacaggcaaacggcaccca

SEQ ID NO: 113240 - DNA, 261 bp, Arabidopsis thaliana columbia
ggccgacacgtggacggccgcgtgggcacaacgtacaccaagcgaggcatggaagcgaggcggagacatataacaaccacggaaggaacaaccccgagaaccaagcgcagccgcaaaggcaaacggcgaagaccgaggcggaaccggtggggagacagaacccaagggagaacacacacgggaaccaagacacatgggacgcgggaagagggatcgggggcagaacaaagacgagaccgttgcgcacgcgagcacgggcgg

SEQ ID NO: 113241 - DNA, 145 bp, Arabidopsis thaliana columbia
ttagattgtttaatgcctgggtgggtttggaggcttgtgggggggcataccttaaaaacacttcttcttttgccgtccggccattggtgcacaaatactcgattgttgggtagtaagcgctgggctccatttccagagtgaagta

SEQ ID NO: 113242 - DNA, 357 bp, Arabidopsis thaliana columbia
ttccttttgattttacctacttatatctcgtcttcttaactgacttccgtgctctttaaaaccttttgtgaagtaaataattggtattttcgttagttataaagtttgtaacatactctggggtggataagttattctttttgtttttaatcctgcttaagattattggatttatgtgctactttttttttggtttggcatgggattatggcagcatcaacgacgtgttacgttggaacaaatccatgactggtgaacgtatcgggaaagttttttacggattgtaatgaaactgacaccgtctggacttggaaccaactgcagcgaacctaccaaattatgggctgcttatgagat

SEQ ID NO: 113243 - DNA, 372 bp, Arabidopsis thaliana columbia
cttgactggccgaaagatcgaatactggttcaggttctcgatgattcggatgatgaaagcatccaacgggtaattaaagctgaggttgccaaatggagccaaaagggagtcaacataatctacaggcatcgcttggttagaactggatataaagctggtaacctcaaatcagcaatgagctgtgattacgttgaagcatacgagtatgtcgcaatctttgatgccgatttccagcctactccggatttccttaaactaacagttccacatttcaaggataacccagagttaggtctagttcaagctagatggacatttgtgaacaaagacgagaacttgttgacccgtcttcagaacatcaatctgtgtttt

SEQ ID NO: 113244 - DNA, 371 bp, Arabidopsis thaliana columbia
  unsure (1)..(371): unsure at all n locations
cggaaatttgcatatattttattttatgacctaccaaannctattggtgaatttctaaaatatttgtttgttttatccccattttttatgaattgagccaaaattcattacaaaaattctattaaaggaaatcattgcttcatctaatattataatataccattcaattagaagtttactagattgaaaatttattacattcaaaaaactatcgatcctatatcacattcagtaaaaatttatgatacttgtatacaatgtactcaatatgtccgaacattccctacagacatattataaattatacctttgcatggatgttaaccttaacaaataagttttgctccaagaaccaatgactgttttagttg

SEQ ID NO: 113245 - DNA, 416 bp, Arabidopsis thaliana columbia
  unsure (1)..(416): unsure at all n locations
gaacaaaaaacccgggtcgttnnangncgtcgctcatgtatcttattccattttttaatatgactgcaccacnagcagagggcagattggcccaatttgtggttaatacttgaaaggggaaaggataacacttctcattcgtagccaatgtgagaagacaatgtatagacttcaatgtttaaagaaatggtgtccaaatctatctgacgatgatgttcttgacaaatgtactttatgccgacaaaattgtaattgcagcaaatgcttgcatttgaatggtgtaattgagacatccaagagggaactcgccaaatctgaaagacgtcatcatatccagaatttgattacgttgatgcttacttttcttaataaattatccatattccagaagctttatattgaattttaagcaactt

SEQ ID NO: 113246 - DNA, 267 bp, Arabidopsis thaliana columbia
  unsure (1)..(267): unsure at all n locations
aaaaaccggggnnccgcacgcgggcgagcaaccgcagcagcancgaagaacaacgaacggggacncncaggcacgggagcagaacaaaggggggggggaccagaaaaaacggaggccgnaacncacgaggaaacangggcgaggagaaaggaggccggggaggccgcaaacncgagagcagggcgggacacgcaacaaacccgaggcggcgcgaaccaggcgaaacagcgcaagaggacaaccaagggggggaacgaagggacaagg

SEQ ID NO: 113247 - DNA, 401 bp, Arabidopsis thaliana columbia
  unsure (1)..(401): unsure at all n locations
gaaaacccggggcgatnnagnatccggaggagtggcttcatcaatttttttattatcttccaagacactgcttcgggctgttggaatacattgggctgcaaatgaaaccaacaccttaacatccttagtcaagtacggtctatatcgagggtatctggaactacattgatttgcaagctcaactactatgaaaatgcttctgagagcctattcgtcgacctacattgttacaaatatcgcctttgtgaatgaacctctgttgataaacatcttgctaaaccatgaagcaagatgtacttttatctaaaagcgagttacattaaaagctttaccacccgttagtagctccattgaggataactacaaagctgtaaacaacaaacctttgttgtaacttttat

SEQ ID NO: 113248 - DNA, 355 bp, Arabidopsis thaliana columbia
  unsure (1)..(355): unsure at all n locations
aaaaaggaaagggcaaagcggggacacaacaaaaaaaaagggggggagaaaaaagggagggggggagacaaacaaaaggcggagagagacgaggaagcggagaggcaagcggangaggancggcaggacaaaaacaaanacgggggagcggaggagacaaagnagaaggggacggagagaacaacagaacaagcaccggagcaagaaaggcacggggaganaggaacaggganaaggggggaacaaggaacggangagcangcgagagacgcnggaggnggaaaaacccacgaagcgggggaggcaaccaaagaaggagcgcagaaaggggcagagaaagcggaaggagcaaagg

SEQ ID NO: 113249 - DNA, 290 bp, Arabidopsis thaliana columbia
  unsure (1)..(290): unsure at all n locations
ccggggcgtccnanncgttcgcgcctatccactgaccacaatttttctcatcccggaacccaacaactggggacattcaaaggttttggtctctgccaaaaacaccgaaacaactcgctttgtgaacagatgcaggctagggcgcccgccatcccccacttaaaaatattataaaaatcaaaacaacacaaacattgatacacataaacctattttcggctacattcaacacaacctaatgaacaattcaccatgaaaaacacatactaacttacaatcttgaacagaca

SEQ ID NO: 113250 - DNA, 360 bp, Arabidopsis thaliana columbia
  unsure (1)..(360): unsure at all n locations
aaaaccgggggcgttccancctccgcgcctatgcacttgccacaattttttttacctcagaacccaaacacttgtgagatgctaaatttttgtgctctgccaaaaacagataaacaatctgctctgtgtgctgatgcaagctttgcttcttgccatccacaagatgaaattattataagaacagcgcatggcaagcattgatacacatgaacctcttttcggctttgctctaagctgtggaatgtactcttcacctgctgaaacttaactaagtaacaatcttcgtttccaaaagtcataaacagtcattttcttaacacgaagaggtttttgcatgttaagatcttactctgcgaaaag

SEQ ID NO: 113251 - DNA, 364 bp, Arabidopsis thaliana columbia
aaacccggggcgttccacccttgcgcagagctgtatatgacctacattttctttacgccgaattcagcaagtgcggcggttcatagattgtggggcgtctcaaaaaactcatgtccgaccgcttttagcattttgctcaaatgttcaaaaatgttatctcatataatagataaatttcagagctatatatacagatcgtgaatgcacgttttccttttaccaagatataattctgctatatatgggaccatcaaactgctggcgattatctgagaacttaaaagtaattccgacctatcattcagaagttctattgacatcatacatagccttggagaaaagaaagcatatcaagaaattggat

SEQ ID NO: 113252 - DNA, 174 bp, Arabidopsis thaliana columbia
  unsure (1)..(174): unsure at all n locations
gaaacgcagcancacgcgngaaaaaccccggacgacaacaaccggggcgggacagaaaaaggcgggggggccgacacaagaacaagagcagaagcgagcgacggaacccgaaggacgagacaagacaaggcggcgcgaggaggagaaacggaacacgagaccagaagcggggaa

SEQ ID NO: 113253 - DNA, 239 bp, Arabidopsis thaliana columbia
  unsure (1)..(239): unsure at all n locations
nattctcgtccgatcaactcccatggcatttattttgcaacaatctttacccgctctgttgatttcactgcaaaaggggtggcaaaacaaattgaaaaggatgaatcttttttcttctgattaaaatggtaatatacatagaacaaaatcatacaaaacataaataaaaactgcataaacgattaagctaaagatagaaggaagagtttgttagtttgtgatacaaagtttccaacttt

SEQ ID NO: 113254 - DNA, 366 bp, Arabidopsis thaliana columbia
cgtcaccaaagttctaactattttttttgacaaatacataacgtacgtgggggataccaatgtttttggggggtgaacaacagaccataagatccgaaaggttaatgaatcatctctatgcattgcttataacggtaattgatatattctaaatcatcaataattgacaaccaaacgcttcaaaacccaatactcatctcttaatccatacttgattgttctgatgatactaagaaaaataacaaacgcgactcaaagtatcattacaaattcatacacgcatactatgtaacacactacactaactccaagttgcctattataaactattacagtgaaaacaatgttctcacaagcataaaatac

SEQ ID NO: 113255 - DNA, 316 bp, Arabidopsis thaliana columbia
  unsure (1)..(316): unsure at all n locations
aaaacagcaacgacacaccaccggcggggaacaaggacgggggggggggcaaaacaanagaccncnccaaaacagaacgcnccgaagcacccgggcacggcggggggacgaccccncgggcggaacaacgccaggggcacccaaacaaacgcagcggaggggcggggcaaagaggggaacgagcaagggcggcagaagggaagagacgacgcgcggggaaaaggagcggacgggacgcaganccagcccaccggagcaggggaccaaccgaacaccgggaaaaaccacggggacgggggcgggaacagagacgacc

SEQ ID NO: 113256 - DNA, 200 bp, Arabidopsis thaliana columbia
caccacgcgagggagatacggtttttgacacagatgctagaacgacacggaaggtgtaacgtgtcttgctatgcgccgaacacttaccaacagcgcgcgcaacgagccatgtatgaatgacttcctaaacaacgtttaccaagaacatcgatacgaccatatatagaacaccaacgcggtactaccagtcataagaacta

SEQ ID NO: 113257 - DNA, 387 bp, Arabidopsis thaliana columbia
acgtccgaaacaccattgttatatcattttttaccagcaatcaaataactcatatgtgctttaaaccaagactttggagattcaaatggctttggttagaggtatttatgcttcaaagaagacacttgaccgctctatagcagctgcagcagcaacattgagcaaaagacatgtgggttctgcgctagcctttgtcctagcttcttacttgaaccagcctttgtttcaagctcttctcagtaaatccgaagaggagttagggtttgattatccgatggttggcctgacgattcgttgcccacgagataactttctcactatactgtaacttaataggattcaaggatgatctaaattaaaattggactacacgtgcattttgctatc

SEQ ID NO: 113258 - DNA, 331 bp, Arabidopsis thaliana columbia
  unsure (1)..(331): unsure at all n locations
aaaaccggggggcccaacgtgcgcacccccatattttcaacgagtgtttaaccgtgtncagacaagaaacggtggctttaacagttttttggggttcaaacccacactccggcgatggttgcagctatccaccaacaaaccaaaatgaacggaaatgccgcaaacccccaccgaataacaacaaccaagctcatatccgattgcacaaccaccgtctatgaaaaaagatgaaacggcggcaattcctaagcactggaatcataatacaacttttttatcaacgagaaaccacgatggagcattatctataacacggcaaccgacaaagaaa

SEQ ID NO: 113259 - DNA, 257 bp, Arabidopsis thaliana columbia
atggttgcggcggtccaccaacaatcaaaaatgaacggaactgccgcaaacgcctaccgaatgcagcaaccaggctcatatccgcttgcacaaccacagtctatgaaaaaagaggaaacggcggcagtttctgagtactggaatcaggatacaacttggtgagcaacgagaacgagtcatggaacatgtatctataactgggaacctgtcaaagataccttgcagcgtgatcgaaaggacagttgtcttaaaaattg

SEQ ID NO: 113260 - DNA, 249 bp, Arabidopsis thaliana columbia
aggaggaatcaaagatagagtgttagcgtgctactgccacatgttatgaaagtttctagactgcaaaattaattgcccataacacttttgaaatcgagaaagatatcgcatctaatatggactactcatctgaccgtacattggacgaagctaactataccaaatctctcaaatcaaaaaacgctaaagactactctatcttctattatccttacctttaaaaatttgggagaaaaatattgaattttt

SEQ ID NO: 113261 - DNA, 321 bp, Arabidopsis thaliana columbia
  unsure (1)..(321): unsure at all n locations
cggaaggcggggggggnncggggnggcgggcacaagcgngacgggaggcgagcaggcctaagcaaccgacaagggggggcaagagaccggggggggggacacaaaagacggaggaaggccgacactgagagggaagaagcagaggagagcaacaggagggaacgagggccaaggccgaaggggggacgaagcaacaaacccgaacaacgacgcggccaagagagcgggcaccgacggggagggagaccggctcaagaaggggcgaccagacaaacagggccgcaaggacgcgaggcaaccggaagcgagcaccaccccaag

SEQ ID NO: 113262 - DNA, 377 bp, Arabidopsis thaliana columbia
ccttagcagacatgactgggaacttgttatcgcagactaggaggagagagtctgcggtggtgagagcgggtggtatccaagaaaatgaggctgaactagcggtcgagaagcttgcggaggagctgctgtggatgacagagaagcttatgcgttatggtgcggtggcagaagggattaagcggtggagctacgcttccggtttagcttccttgtctctcacggctgctcccagggttcaaggcctcatggttaagatttcggcgctcttaattggagagttagcaagagacagcacacaagttccaggacaagtgacattcaggctccttgcaaactggctcccactgtttagtcacgcaaggaacgggcttgcgttt

SEQ ID NO: 113263 - DNA, 377 bp, Arabidopsis thaliana columbia
tctaaacaagcttactccggatttgtacgagcttcttaaaggtcaattggtggactctggcatcacttgggcagatatcctaaaggaagtgatacagctaatttttgagaatgctatactgcagcccacattctgcgagatgtatgctcttctgtgttttgatattaacggacagctaccttcgtttccctctgaggaacccggtgggaaagaaataacctttaaaagagtgcttttgaataattgccaagaggcatttgaaggtgctggcaaattgaaggaagagatcagacagatgactaatccagaccaagaaatggaaagaatggataaggagaaaatggcaaagctccggacacttggaaatatccgtctga

SEQ ID NO: 113264 - DNA, 322 bp, Arabidopsis thaliana columbia
tccggaaaagaaaaacactttttttttatcacttctcaaataacaagcggcgggataaataataaatgctgggggaacttcactactccaacaacaaaaaaaaaaaatgaattcaaaatcgctagaaaatcttcaccgtccattaatctaatcatctaaatcgatcgacgattatcgtctctagactgctttaacaaatctagagttaccgtattctcacctgatttatctatcgatgatgatctatatgaagtttctctttcatctgactgctccggcaaatcttgtttaccttatcaacaaccgcatttcaatttttaca

SEQ ID NO: 113265 - DNA, 390 bp, Arabidopsis thaliana columbia
  unsure (1)..(390): unsure at all n locations
aaaaaacccggggcgttnacgcgtccgcagcgaaggcgtcattactgtttttttataaatcgaatcccacccaggcgcacattcccaaattcttggggccaaaacaaactacctgcctccaatccttacaacctaatctcactaagcatgtcaaggaatgatctctctatccctctctgcttagctgctgctgaacgctccaaataaaacttgtgtgtctacctttagaattaaaaaatcaaatggttgttatgatgatgcactcttatacccctttggattttatattcccacaatgacctggtgagagaattgtagctttaagaacttcttttgctgctgttatttaccctctgacttatcaatcttatatctgagtcttttcctttt

SEQ ID NO: 113266 - DNA, 212 bp, Arabidopsis thaliana columbia
gttcgctttgaaggattaaaattttttttgttacattatataagaaaaggggggtcttcataatagttggttgtgaaaagtactcaaaagaaaagagtctctactgttgttgaggctttaactttgatggaagaaaacagtttttgtttcattttatagtttcccataatgtactgcttgagatttgatattttttttcttctcaaataaaa

SEQ ID NO: 113267 - DNA, 230 bp, Arabidopsis thaliana columbia
taccaactttttcaccaccaccccaaaggaaacacgcgtggctttcaaaattttttgcccgcacaaaacaactacgcttccctctaaaatcactaaatcctcacatctaccccattttacttcaacttcgcttctttttgcttctataaaacacaatctatctctctcaaccaacttcacactacatcaattatcacaagacttagaccatcattgaaacaacatctcaa

SEQ ID NO: 113268 - DNA, 203 bp, Arabidopsis thaliana columbia
aaaacccggggcgttccttctgtccgctgttgatcttattacaaagatttatatgacttccgctaccacaagaggcggcgtttaactttttaggtgcgccaacacaaaagctacctccctcgaaactcgagcacgtgcctaccttatgacaattgcttctaccgttgctttcgcgcgtactataagctcttacgacactctaa

SEQ ID NO: 113269 - DNA, 363 bp, Arabidopsis thaliana columbia
  unsure (1)..(363): unsure at all n locations
naaagatccgcaagctcttagttgttcatttttttgctaatccaacgcacgttaatgtggttggcttgatagccacgttttcttcataaataatcataacttgaaattattattttaaaatatacgttggcttcatgattctctgtttttgggcttctttcttctgtatttgttcactgtctagataaaaccttattgtcagaattgtgatttgattgttggcacacaccgatcttaatttttaagtatagttgaacgagtatatgagaacatgcagtaattctagtttattaatttcttgattgttcgtggataaataaaccttaccttggatacacttcatttttgctaattgaaaacagt

SEQ ID NO: 113270 - DNA, 362 bp, Arabidopsis thaliana columbia
tctgctttgagaatttcttcttcacgcttagcttcaatcatcgctctctgctcttctgcttccttgtgaatgggagctattttgttcttcatctgctccacatactctgccttcttcttctccaattgctcctgttgttaaaaaaaaaattccacaattttgaaaaagctcggagctaaatcagaaatgcttaaaaatctctaactaaatattaacttcaaacatacctccattttcttgagctcagcttccacaactgctttcttgttgttctcccatgatccaattgaataaagcttcttcttagctctgtttcaaaaatatatttttcaagacctttatgataatatcttgggttcatt

SEQ ID NO: 113271 - DNA, 359 bp, Arabidopsis thaliana columbia
acggttatattatatgagtaacattttcagttatgtatttctaataaaaaaattaagaaaatattaaatccggggcgggtgatgtctatgtaccaccacatttttcttatgccacttacaacttttgtaatatttgaacataaaaaagcttgcgttgtggatagatagatgaaaattaatctattcaatcgattaattaacattgccaatattcaaccactagatcattactctggtacttgttagtagcttaatttatcattatcttgaacattttatatttactaatgtcactgttcactggtgcgcaattaattaatggtctagttttttttttctcaattaactaatgttcaact

SEQ ID NO: 113272 - DNA, 310 bp, Arabidopsis thaliana columbia
tccggggcgcccacgcgtccgcccaacactatatatgactattttcttttggccccaccagattctgcaccaggcactttgaaccatggtggcacacacgatcccgctaatagcacgaaaaccctaacaccctatgtatacattgatcggcctcgatgcaagatacacaactgatttattttttattgccatcataatcttctcaaattcatactgcttttaatccaaatacgaatctttatcaccataacatatctttttaattttcatattatttatccaatatttcgttcactcttactattttcat

SEQ ID NO: 113273 - DNA, 368 bp, Arabidopsis thaliana columbia
atcttggaagatcttgtttgcttagaggacaacaagagatgatacgaagccattgatctacacactttgagtgaaacttatgtgaacatggaagcttccttacttcttctttgtctttatactttgccaaacatatacaacactcctgcaaaaccaaatcaaaactcaaaatctaagtccttttcaatcataaacgagactaatagacaacattcgacatcagattcccttagtggatcaaaacagagctatcacagattaaaccttatggtccaagaaaacttgtggatttggcttgaattgagagtaaaaggattaggacttactggatcatcagttacagtagctgaatctgaatcagaatcaga

SEQ ID NO: 113274 - DNA, 369 bp, Arabidopsis thaliana columbia
cggacgcgtggggagatagagtttccttgcaaatggacatgaaatcgtgatcggtggtgcggtcaccgaggccaagatccggtgagtcatcgccgaactctttcaagatggctaatctcttgagatcaccaacaagaacaccaggctttttcacaaaaccagtagctttcatcgttttggggttaacttcaatctctgttcccaaaactttatcttctcccaaatagtctttgacgaatggctcaaccatcactatcggattcgcagtcaccactactttcctcttcttacatttatcaaacacctcaaaactatctttcctcacatccggcgcgtaaaacctaacatttgaaaacgaagattaaaaat

SEQ ID NO: 113275 - DNA, 372 bp, Arabidopsis thaliana columbia
caaaaaagagaaccctgtaagatttcttttccgcaaggtatcgaaattatgcatatttatttaaaggactgagagagggaacatataatcccaacataaatttctcttttcacaaccgaaagaatccatcttgcggaatttagtcaaaaggagcctgacatggtggagataaaggttcgatttttctctttttctttttgttctgtaatttcattggggttttggaggagattaatatgtaacaattttagggtttcgtattgatttagggcttacgtggggtttggttattgatcttgtttctttgtttgctcacgttactatatatgcttctgctgttttcgctttgccctttgattgatgaatcatatt

SEQ ID NO: 113276 - DNA, 152 bp, Arabidopsis thaliana columbia
  unsure (1)..(152): unsure at all n locations
aaaaacgaaaacgaagggnnccatcgaagaagaagcaagaccncncagggaagaagggggaannanacaggaagggaaacngnacgccgaagaaggnccagcggacnnnaagggaaacccaccacngaaggagaaaacaggaaacnggaaag

SEQ ID NO: 113277 - DNA, 249 bp, Arabidopsis thaliana columbia
aaaaaagggcacttttatatatttggaaaaaagggtctatttgggcgctgaattggatttttgcggtcttcacagcgaaatgaaaaaaaatggcaaaacctatattaagaattggttccgcgtaaaaatacacgtagtggttcacgtaaaaatgtacgtataataccaaaaggtgttattcatgatcaaaccatgtttcaacaactcccatatgttactcgtttacaaaatttaaccccggctcccata

SEQ ID NO: 113278 - DNA, 316 bp, Arabidopsis thaliana columbia
atcgttactctatctttttttttttttcgacctcactatcacctggggggggataatcacctagggagggacggcaccggttgattttagccacaagtatatgatctccttagcctttacttgaagcaaagatcaaggaacctcagaagcttcaagtccttgattccaaagatgtttccagaataaacacacatcccatatcgtatcttctgaaattatgggagggatcaacattctcaatggtgaagtctcaataatctattgtatgccttaaggacaacagtttgtaagcattggtaaagctcgaggccaaagc

SEQ ID NO: 113279 - DNA, 303 bp, Arabidopsis thaliana columbia
tgttaattagtatttaataatttctagcttctgacgtcaagggcacgaagattcaagcacgttcactcgtgttcccaaaatgttactctatcgaaatgtataacatcatttattaatacagactatgcaatagcataagcaaggcaagctagctatatgtactagtatcatattaggattttttaaaagtaaacactaaaccttcgtaggatattcaatgcgccactacatgttactattttatcattattactagtatttttttgttgcaatatgttacatttatcaaacccacttttaggg

SEQ ID NO: 113280 - DNA, 312 bp, Arabidopsis thaliana columbia
tgaaaacaacaagaaataatggttttttcttttcatattaatcataacactggggcgggcttatctccatagctggggtgcactgattatccttccgtgtggagatcgactgagttcgagccaccacatcaaggagaacaagaaggttctcttcttccttctggtgtggtctttttcaatgtatggtttgaatagattactaattatccataccattttattaagtggagttttagtaattgattccatgtaaaggatttgtttgtgatagttctgcctaagttcacataatatgctccggctcttttttcg

SEQ ID NO: 113281 - DNA, 189 bp, Arabidopsis thaliana columbia
accgggtcggcccactcgtccgcacgtgaccggctcgtgagattttcttttcctacggcgattcaattctacgagggtcaaaatagacttggttgggaccaacacaacaaaactttctatctgctaatcactaatgttaaatccgtcattgatgatcttgctcagcttccttcttgtaaccccccctat

SEQ ID NO: 113282 - DNA, 364 bp, Arabidopsis thaliana columbia
ttccgaagcactggtcttcaacacgctccagcattctttctgggacattgtgggtgagaatctgaccgagagagtccgtgagaagatgctgagcgctgtactcaagaatgagatggcttggtttgatcaagaggagaacgaaagtgcaagaatcgcagcaagattagctcttgatgctaataatgtgagatctgcgataggagatagaatatcggttattgtgcagaacacagcactgatgcttgttgcttgcactgccgggtttgttctacaatggagactcgcacttgtgcttgtcgcagtcttccccgtaagtgttgctgcaactgtcttacagaagatggtcatgactggtttctcggga

SEQ ID NO: 113283 - DNA, 328 bp, Arabidopsis thaliana columbia
  unsure (1)..(328): unsure at all n locations
ggggggacccagcgagcgcggacgcgagggcaaancaaaaccagcccagaagaaagaagaaaccggggggggaccaaaaaacaggggggggagaaanacaagacagccaanccgaaacgaaacgaaaaccccagcgcaacggggaagcccgcagcgacgaggaacaagaacncgggcggacaccaacacccgcaaaaaaccaaacgcggcaacacggaaaggggccagagaacgaaaaaccgcgggaagcgaaaacacagcgaaaagaccggggacgggccaaaaaaaacaagaacaancagcagacaaagcaagagggggaagggga

SEQ ID NO: 113284 - DNA, 272 bp, Arabidopsis thaliana columbia
gcgcatcgatcgaaacttgatttgaaatctgtgatctaatcacacagggcaagtctaaaaactgttgtgcaacaccaacggaagctctttaccctctcaacggctaatggatcctcgcctacacatcggtcgagaatatgttctcgttgctatcaccaggaatcttcccttgtatataagtctattagatctctcaaactcttgattcacataatttcactgaccagaacgtctgtttgttcaagcttgttccttttacgctctaaacttca

SEQ ID NO: 113285 - DNA, 257 bp, Arabidopsis thaliana columbia
ataaaaaatggcattaaccattttttttatcataacactgcttctccggatctgcatatctgtcgtggattggttaaccaaccgtgtggtgatcgacttgttcgagccaccacagcatggagaacaagaaggttcccgacgtcgtactggtggtggctcttgctagggaatggaggaagaatctacttatcatccataccccttttatgaagcgtattttctattgattgtttcctagttcaaagtgaaggtttttt

SEQ ID NO: 113286 - DNA, 304 bp, Arabidopsis thaliana columbia
ccacaacaagcgcgcaaaagaaaccggggggggcagccagacaaactactagtatttcatcacgagatgattctgatgacgatgatcttgaaggagacgcagataaaggagatcctactgatgagaaacgtgctaggaggaagctctcaaaccgagaatccgctaggcgctctaggagaagaaagcatgaacaaatgaatgaatttgatacacagggaggccaattaagagccgagcaatcaactttaattaatcgccttagggacatgaatcaaaaatatgatgcaactgctgttgacaacag

SEQ ID NO: 113287 - DNA, 364 bp, Arabidopsis thaliana columbia
acccacacgaccgcatggctgtattcacatgactttctttccaccttgaaatattgcgtgtgtggggctaatttcttaacgggtgggcagaacacggggaaagaactggtggattttatgccttcaaccggaatgaggcggctaagcaagaacggttgtttgatgaggctgaaaggaggcgagagatggcaaaaaattcgctagagagatacactcattactatgaacgctgggcaagcaatcaagtgtctaggcaaaaagctatgggggatcttgcagaaaatgcaatcatagaagcttgggaagcttattgacattcagtgcacaccataatctcagctcaagtttttcccattagctttgt

SEQ ID NO: 113288 - DNA, 388 bp, Arabidopsis thaliana columbia
  unsure (1)..(388): unsure at all n locations
ccacgcgtncgtaatgacctaccatataagttttgtttaaattaaataatgctgtcatggttggatcattaagagatgggtgggttgcttacacagtgcctgaaatcaagatacttaatgctaataaaataatatcgaatgtcacaagctttgcaaaggaagtgtgtgcttaaccggttgacccgtagaagcaaaggcacttacaccacatgtagtattaaacaatgacaacgaccaaatctgatattaacctacaaatgtaccgttttcagagagatgccctcaacaaataacagtaagttagattcttacataatataatttgacgaaaaacttctctcatcgatgctatactcaccttaaaattagcctgcagtacattgtactt

SEQ ID NO: 113289 - DNA, 225 bp, Arabidopsis thaliana columbia
cttcgactctttttatagtaaagattatagaaaaataagaaacaagatctgatttgtaatcggaagcagccaaggtgaaccggagataagttggtttgccacattgaaccaaaccagatatagcatttatcatcccaacacaaagaaaaaccttaccaagagcaaaactatataaataaaataatattggttcctaatttacaaagaattttgattacttcaatc

SEQ ID NO: 113290 - DNA, 302 bp, Arabidopsis thaliana columbia
gagcacgtgaaccatgcaatgtttgtttttctgaagctttttggtggggatctggttcctgatcctggggggtgggaaaatactgactggggcactgatccttacagttatggtgcctactcttatgttgttattggtgctcttggtgaagattatgatgtattgagaaggcctgttcataattgattgtttttttgctggtgtggcaacatgcaaagagcattctgacactgttagtggtgcaattgatgacttgagttcggaaatgttggcgtataattgatatacttaaaattggtaat

SEQ ID NO: 113291 - DNA, 349 bp, Arabidopsis thaliana columbia
tcgtggtgaaagatacatatattttatcaaaggtgtacctcaggagccatcgcattaaggagttccgagcagtgagtgagtgttaaaatcagcctcgttgagttttgtggcaactccaaaatcatcaagcttaacaaggccctgaagtataatatagtcaagtaatagcctagaagatcttgtgcatcccataatacaacagattttgaaacggaaaagcgtaccaaagacatgagaattactaataagatccacaaggtacagaaaaacacaccttcttggtttgcaaaatatttgcacccttgatatcacgatgtatgtcacctctgttatgaagatatactatacc

SEQ ID NO: 113292 - DNA, 367 bp, Arabidopsis thaliana columbia
gatcagtcatcttttttactttaccggagttgccttacctgcaaaacgtataaccaatccaagcgtggttagacgagaaaattccataaaatgatcattgtgggaaagattgttttgcttaggagactaaccgtttccttctcgggacgaaagaagagttttctctgtcttgttcccgcttttgccactcgagtttgagactcttgttttaggagaatgagaagtgatttttgcactattacctgaagatggtagagagtaacgtctactggctttctcagttgtccctaattgcctaggtgaagaagagccttgtagcctcagctttgctatagcggatttagtcgcctgcatatagctcggtatt

SEQ ID NO: 113293 - DNA, 368 bp, Arabidopsis thaliana columbia
gttttcgtgaaagagcaaagattgatactggaatcacatgtgggacgggataaagcaagacttaagggtaaggatcctgccttacaagatacttgtggaaaagcttctaagaattcctttagaagttcgtttccttcttcaaaagatggtttctccacaaagaagcatggattagtttcatccgtaccagatcattcgaggaaacgtaaggatattgatccatccataaagcataaaatggttccacaaaaattccagaagatgatggaagactcccgtgaagctggcaaaaacaagctgggagtaaaagaagcctgtgatgctggtaaaagcaagatttcactgggtgagaggttgtttagttatac

SEQ ID NO: 113294 - DNA, 377 bp, Arabidopsis thaliana columbia
actaactcttgaactggtgttttttcctccgctggaaactccaaagcgggctaaaggacctgtcggcgcgagcacgagcttaaggctcatcatgactagtccactacctcgcttgcgttggagatggaaaatcatccggctatgctcctggtacttgtaacgcaactacggtgtgcgtcttccaaaccctatgtattggacgctgatgctatctcctattcaaaagccctaaccgacgaaaacctaatacttccgaggcaggaagtgatacgctgattgagattacttaagcagccgatgactctttttggagaagatgatctatcacggctcgatcgactcaagtacactttgaatgaaggcttgttctgagttga

SEQ ID NO: 113295 - DNA, 331 bp, Arabidopsis thaliana columbia
  unsure (1)..(331): unsure at all n locations
cggaaggccgggggcgacccacgcgnnccgcaagagagaagaagacgctttaacgaaaagaccctaagaaagcggggagagggaacaacagagggggggancacacanagancggaacagcgaaaaaaaaaaacgggaaggccaaagaagaacgagaacaaaggcgncngcgacgccaagacnacgggcaacaccaagaacggaaccgccgcggcgagagccggnaacggcgagcaagggaaagaaggagacgaggccacaaagccagaagggggcaaggaagaggccgaagaggaagcncagaaaggaaaggggaaggaccaggaacgag

SEQ ID NO: 113296 - DNA, 367 bp, Arabidopsis thaliana columbia
atttaatgtgcatggggtgtttatattatataaacaacagtggtggtgggtaacctataaatttaagggtataatggtctgggtttggtcttacatctcgaaacatgaaagaacacagacaattacgttggcgtgggacacatcacataacaactgcagatcgcagacagattctctcttaagtatcaaaccattaaaccactcgtattagtctaattagtcagattagtttatcttcctagggacataattctattttatatttcagatagatcggattcatcgcaatgcatagtacaaatcttacattcactcggtcaaaattttcagatcttgtagcaatagattgtatgagcgtgtgttagta

SEQ ID NO: 113297 - DNA, 344 bp, Arabidopsis thaliana columbia
atcatcccaggatggtctctatggttgttaccaggccagggcggaccaggctccattgtccaacgagggtcaggaatcttctgtgctttagcgacgaggatattgatcctcactttaaactcctcatactgtctttgccaacatacgacataagaaaatgtgacattcactctttattctcgtgtatatgtctaatggataaaacaaccagaatctttttatgcaattatagtagtccaagggaccttcattgcccgtttctctttgtcaaaagagggtcggatcttgttcttcaagtaatctatttttctgggaaaaatagaacttaggagctcttggttcaa

SEQ ID NO: 113298 - DNA, 385 bp, Arabidopsis thaliana columbia
  unsure (1)..(385): unsure at all n locations
gggcgacccacgcgnncgaagacaangaccaccacagagggagccgcccaagcnaggaagggacaggaaagcnnacaaacaacgagggagacaaagcanncncaagaaaagangagnaanggaaaganaaaaggaagcagcgngaagaagaaccnccnagaaagaaacgaagcaacgcgaggcaaccaaccaaggaggcggagaaggagaaaccgacngacnncaaagcagaaacagcagcacagaaaacccnggagaacccgagcgagacgaaaccgacgacaaacagaaacgaaaaacgcaaggcagaaaacggggagaacnnccaaagaaccgcgcgcaacaaagagaagggccaagaaaaagaccacgaggcacgagagaa

SEQ ID NO: 113299 - DNA, 353 bp, Arabidopsis thaliana columbia
  unsure (1)..(353): unsure at all n locations
gccaaagacaccanccacnccngcggcnggaggagcaaagacacacggggcggccaaacacgcggggggagggaaagagcacacgcngagaacancccaaagaagccggcgaagacgaagaagccagagccgcgaccaacagagacgaaaggacacacaggggaaaaggccaagaagagcacgcaaccgcagaagaagcacagaaggcgccngaaaaccaagggaggccaaagcacgggcgggagacgcggacagaaacagcccaggagagaggggagagaggcgagagacccacaaacacaccacaaagcagcaacaacagaagaggaggagaagggggcgaagaaaagaag

SEQ ID NO: 113300 - DNA, 316 bp, Arabidopsis thaliana columbia
gtttattgtgtgaaccaaatatctttgaggaattcagcccttaaatactatcgacaatctgttatttgagagattgcatttaaggtaacttgcataatataagttaggatttgattaaacttgctaggcatatggatttggttaaaatgatcaaggcaataagttagagaatattgggagttcttgcgttttcaaaccttttccacgggttcggcttttttgttttgcttgagggcaagcaaaagctaagtctgggagagttgatatacctctatttttactacttgcatctatgatttacgtataggtgttagag

SEQ ID NO: 113301 - DNA, 297 bp, Arabidopsis thaliana columbia
agataaccccaaatgattctttcaatattagcccctgtgataggcaccggtctatacggtggaggcggggacggacccagctggatacatagacactcttaccagccttttccattctcttaattaccttaacggtggcttatatacactttcttggagatggagctctcaatctttcaccgcggttcaattttaacctcaatctgtttgctcagggttcaatatcaaccacagctcattttatgtgatcaaatctaaccggacattctctatcatattccctaccgactgtaatgt

SEQ ID NO: 113302 - DNA, 243 bp, Arabidopsis thaliana columbia
cttcttttaatccttcatttttttatcacacacaccaacgtgcggacaggcattaacacggttgttgggctaaaaacaactcaattattccacaacacatacattgtttataaagctatcttctttttctgatcataacccaataattatctcactctcaagatctattctacttattactttccacacaattgcacttatacttatctttttttactcttaattaatctcatcaaattgttt

SEQ ID NO: 113303 - DNA, 202 bp, Arabidopsis thaliana columbia
  unsure (1)..(202): unsure at all n locations
ccgccgcaccgagaanncggggggaggcgggacacngcgaggnngggagnnaaacnggggcggaagccaccaaaagagaaacggaggngngcgaaggnaggcncaagcnaagaaacngcncgngagcgnaanggaanaagccngccngacggagagaccgacnggncgaacagagacgaaagncggccatagngaaccggga

SEQ ID NO: 113304 - DNA, 291 bp, Arabidopsis thaliana columbia
  unsure (1)..(291): unsure at all n locations
ccccgaaccaaacaaaanncccncaaaaggaaaaacgaagaagccgaacgaggcgggggggggacagagagcaacncgaaaccaggaagcanacaanggggaggcggaaccaaacgcagcggggaaagacannggcnancgaagcaacacaacggaaggaanncagcanccaaaaccncgcacngncgaagagggnnnaagcgacanncggggacgnagagcggggcncaacaaggcgcacncaacagaaggacagaagggnnaccancagggggacccngagaaggaaaa

SEQ ID NO: 113305 - DNA, 298 bp, Arabidopsis thaliana columbia
atcacgtgacatatgcatgttttaatccaaaaacaaagcgtgtgttgggttaaactcacaatttctgtgttacctccaagagcttatcaagtcttttatatttaaaatgatggctacttcattagcaaaatgcacttatatctgatagcgataacagtcgtcaaacacttatttataaatattccacctctattaacaaaatactaaaagaaaacaaaagtcttcaagctcatcaactaaaataatccgacaatggatcatccctctgccaaaaaacaacacaacaattaatttcaca

SEQ ID NO: 113306 - DNA, 379 bp, Arabidopsis thaliana columbia
cttgtccctggcgatgaagcttaggcccataactaggcccaatatatatgatcacatatggtccaagataacttatcgttatgcgcagtaatttactgaaaaccaaagaccatatttttatgtaatgtccgtatagctaggacttttagagattgtgtctggctagaataattgcccatttcataattctgagaattgaaagaaatttggtatgctaagttttccaatgtaaatcattcaatgacagtagagagagcttctgtctttcgtcaaagggaaagccatcaaaaaagtcaagagtcaacaacttctaggccactccgacatcttaggtgacacgtgtgagtttggtaagaagatttaaaacggcttttacttg

SEQ ID NO: 113307 - DNA, 359 bp, Arabidopsis thaliana columbia
gtaaaagcatgtttaaactctttctcgacctcagcttggatattgcaggggattcttattctggtggggccggaaccagaagttgctccgggaatatatcactgagcgatctccatcgagctcatttcgtgatgaacttgaaattcaccaaagcggatttcttcttgaaaggggctacccataaaggacttgatgcctataacccgacacttgctaaaagcataccaccgtctgttggtgcctataaagccaacacttgatccttttactaaccaattttattatgggtttagttaataatatatcactcatcttatagctattaatgatattattggaggaattccactttctcttaa

SEQ ID NO: 113308 - DNA, 372 bp, Arabidopsis thaliana columbia
cggacgcgtgggccgcggggcacttcctctcgcggttccttgagctagaccgaggacgtttgcgtctgggacaaaagaacccacggctgtcgatgcacagtgggttccgtgtccaattttgtctagaggggacataacctcacctttctctgccgcgttaaacgatccgttgtacttactctcaagaccctttgagtagtacatagctccaatcaactttctgttacagctcgatgcgttgaacgcttctgctgaaacacattttcctttccaacgtgctgggattggtccaagaccgttgtcgttgaatgacttggaatctggccatattcctgagtccaggattccaacaattgcttcacttcccatatc

SEQ ID NO: 113309 - DNA, 308 bp, Arabidopsis thaliana columbia
cagagatttctaaacctctattgttttcaagatccaaccaactctgtgggggatcttaactagttgtgggggcgaagaatgggatacgcttgagacaactaagcctacgaggaggagctcttggactatgaagaagaagacaagaaggttccagattctggaaacaaagttaacggtgaagccgcgaaaaaagggtactgtgggaatacacagttctggatttagagacttacttttaaaaccggagcttcttagagatattgttgactctggatttgaacattcatctgaagtgcaacatgaatgta

SEQ ID NO: 113310 - DNA, 209 bp, Arabidopsis thaliana columbia
tcgcgtacacgtatgccgcggggctacttcctctcgcggttccttgagctaggccgaatacatttgtgtttgggacaaaaaaactcacggctgtcgatgcacagtgggtttcgtgttcaatttttgttagaggggacataaccttacctttttcttccttgttaaatcatctgattttcttatcatatagactattcgacttatttaaa

SEQ ID NO: 113311 - DNA, 436 bp, Arabidopsis thaliana columbia
  unsure (1)..(436): unsure at all n locations
aattcccgggtgcgatcccaacgccgtccnngccgaaaaccaattcgtatgtataattttttgttcttcacacannttggtttacggtgctttgtagtaattgttccctaaataatattgcgcctaaaaagccngnngtgccaagtggctttgaaccggtaacccccggnntttacagctatnctgatgaatcatacgttnntcgtttggttctccacgtcagaattttcttcgcttcttacantagcacattccaacgtgaattnctccggcgttttcacaacaggattttccgtcttaaaccgccggttataattcgactatatccggaaataacataagcagggctctgtttcagccggttaagggtactaaactgtataaactaaagtatggatctcgagttcaagttgttttacaggatacaaacattgtt

SEQ ID NO: 113312 - DNA, 347 bp, Arabidopsis thaliana columbia
gagccaaagtcggtaaaccttattaatttctgattgattgtcccttcaacagagaagcataattaggtggattcaaaagggtatattgatgtggaaaaagccaaactaatgttatgttacatagtgtatgcatggatcgaaaaggatatgggatggatcagtatatatttaattaaggaaaaagataacttaagcttatatatatgataattgtaaaaaagatatttcaccacttgtatttcatgattaccctgcagcgttgaaaatgtataatacactgtcaagtgtcaatgtcgcttgctattttaaacttttaacgttttctttttggtttttattttattctt

SEQ ID NO: 113313 - DNA, 256 bp, Arabidopsis thaliana columbia
aaccaccaccaaacgatcacacggcaacccctgaacaaaggcataaagaagatgcccacacacacaccatacatccaacacaaactttatcaaaaccactcaccctatataaaacagcaggtccacaaaatctcactctaaacaaaacaaactaaaggaaaacccaccaacccatcaccatgatcatcgaacccgacgggttttacctcactgaacacacccctcccacccagcagcatctcgagagtcaaaacac

SEQ ID NO: 113314 - DNA, 368 bp, Arabidopsis thaliana columbia
ccggggggacccacgcgtccgggcggtttcgtttctgaaattttatttgcccatttctcatatgccttgcttgacttcacttcttctgaaaaggaaatcacacttgataatcagcaactctcccaagtttacatagatttcagatcaggatcaccaaactggaataaaaaaattagaatgcatatttaggtggaatatgaaccatcaaacacacagctaaagggatatggtacattttacactcatcctctaactggagaaggcacaatatcaaattctattgcgttatcaaaattcatagatgtacaaatagaaggcaagctcatcttataacgtcaaggattccatagatgagaagataatcttgt

SEQ ID NO: 113315 - DNA, 280 bp, Arabidopsis thaliana columbia
  unsure (1)..(280): unsure at all n locations
gctacttcctttttctgagttttgaccaccaccaccatctatgaaatgttctacattaccagttatccggcaaatcaactacagctggagaagcagattcagggaagtctttgactcttgagaatatatttgggagtgccttcatgaatgaactgcagncgattggagaacctgtctctggaagagctatggtttctgatgctccaggggtcccgcttttatcagaaaggtcaatttgttaactgatccaaagaaaccaaatcagaccttgaggtcttcc

SEQ ID NO: 113316 - DNA, 355 bp, Arabidopsis thaliana columbia
caatcatcatacactaaaaattaaaggttacaaaaactttttgatcttgaatattgttgatagtgatgatttacctttcttgagtgaggaagtgaccaacggctaaaagcttatagccggcgatgttttcaacagctaagttgatgagagtagcgattaaaccagtgaaaagaccaacaagacaagctaacgtccatttcaagaacacgtattgaagtacttgtgcctttgatctttttctccaatcatgcttaaacagatcgttctcgtttattctgtcaatatttagattaaagattaaaagaagacccctgaattcaaaattatgcagagaagaagaagaagaagaacatac

SEQ ID NO: 113317 - DNA, 277 bp, Arabidopsis thaliana columbia
gtcacaactgatgtgagttctagcgatatcaaattctagatttttgcaaagatcatctatgatataatacagtggtgaatttgaaagatcagattcgcttgcttttaatctgttttagtgggaatctcaacagtttttatttatccaaaaaactgaaaaactgcagaagaaaaagaacaatctacacttttccgaatgtttataggatcatgaaagttttatgtttctctaaaaaaaaaaaaaacaagaaaaaaaatgaacaaaagtaaacaaaaag

SEQ ID NO: 113318 - DNA, 270 bp, Arabidopsis thaliana columbia
ccaaaatctaacagatcaaagcctcttgcccagcaaatccgacaatgggaacctcaacaaatcaaaaccatgcacaaaaccgcaaaactgaacatgacaccgaacaatccacaactctcacgcacgtgtatcggatcaagaaagtcttctgcaactctcggtgccacaaacccaaccaactcttgtccagaccacggaataagtataccgatgccgagcacacagataccatcattgcccaaccaggtgcagcccacaatccctaacatt

SEQ ID NO: 113319 - DNA, 257 bp, Arabidopsis thaliana columbia
gctttttcattctatttgccttttagggatatagaaaaataagaaggggcaatgattgaccagtcaaggacccatcacaagatgatttgcccataccgtaccccaaactcccacataaaggccacgcatatcgtatatgctgttatccttctcacagtctgcttataactccttgtcatttccaacttaactcatgctgaaacagagattatactcacgtgggctacttatactttccacatcaaacaatccttttt

SEQ ID NO: 113320 - DNA, 352 bp, Arabidopsis thaliana columbia
atctcaagccaccattttttcttcatcttcataaagagaaagagagagatcctcttgtttggcaagaacccaatttgagttctaagtcctgatttgcttagctcttttctttccttgatttcattctatataaagtcaacggaaagatatacatatatagttttcttccgattctagggttttcatatttcctctaaattttcatggtcaaagaagaaaatctaagaaacaatcgaaccagcaagagaaagaagacttcaatatcaacatctctctctccctctctctctctcttatattataaggtgagaccacaagaacttttgattttctttttccttcttcccttctt

SEQ ID NO: 113321 - DNA, 284 bp, Arabidopsis thaliana columbia
  unsure (1)..(284): unsure at all n locations
gagagattgttcaccttcatttttgttcctaaccngaaccaccnatggcgtcggctaacttctatggtttttggacacccacaccnctccatggatcgaccaacgctcctttgctcacacctatgcttcttcttctcctactcctacagtctacttcgcgatccgcgaccaaacttactccaacaagcttgttaaaaccgccaaaagcattgcatcccctgggagaggtatcttgacgatcgatgagtccaatgcaacctttgagaagaggatagcttttatcc

SEQ ID NO: 113322 - DNA, 345 bp, Arabidopsis thaliana columbia
aataaattatctttttctttttgtgggaccaaaaaaaacggtctcggtcactgtgaagataaaagaggaatccccccacgagcatacttaaaaaaccaccccggaatattttcattccatagtgaaccccaacacaaacaaatgcaactcttacccacccccactcgagttttaacgtttaacataacaacctcactttctcaagcagcattacaacttctctccgccgacaagcttttttacaacagagatattcttcctctagacctcctcttcgataaatcaaagattcagtccgaccccaatataatagaatgcgacccggatccatcttcttttactggt

SEQ ID NO: 113323 - DNA, 358 bp, Arabidopsis thaliana columbia
acgcgtatcacacactcactcatggagtatagtacagggacatgatcagatgcgacgcttatatggtggtaggtgtgccgaaaaaagagggaacctaaacccaaggctttcttgtccttgacccgggcgtgacgccgcttcatgtagctacctcctatgccgcgtagacttgtatgcgacctcttcaccggcaagctctgttgcgccatactctgctcctgctaaggatgaggggaaaaagacctatgattacggtggcaaaggtgcgatcgggcgtgtttgtcacgtcatcgatgccattgtcgatgtgagattccaggatcaggaaggattgcctgcgatcatgacatctctagag

SEQ ID NO: 113324 - DNA, 346 bp, Arabidopsis thaliana columbia
atgatcactactcatttgaagagaaaagttcatggacgggtagagatacaaccaattttggtgtcacttcgttgaaatcagatggaagtatagaagaagattatcatgaccttgaccttgacgttgttagcctttcttctgcctctcctcattccgttgaaacattcagaaatctgcagcaaggaattgcacatctcaagcaaagcgtggctcacttgactgtgtacggatacaggtccctgtctctggaagttccttccggaacctcgacttttgaaacatttgcaaagttgctggctacattatcttcactcaaggaggttcagtctggtctttcccttgggct

SEQ ID NO: 113325 - DNA, 349 bp, Arabidopsis thaliana columbia
ttagattctcaaaatctcagagtgagctcgttaggaaaaatgaaggcagtgatagggacagtggtgtcgaacaaaatgcagaagtcggtggtggtagccgtcgacagactcttccacaataatatctacaatcgatatgtcaagcgtacttccaagttcatggctcacgatgaaaaggactcctgtaacatcggcgatcgagtgaaattggatccttcaaggcctttgagcaagcataagcattggattgtttcagaaatcataaagaaagcccgcatttattctccacaagctgctgctgcggctctcaattcctcaacctccattgctgagcagtcccctgtttcgt

SEQ ID NO: 113326 - DNA, 356 bp, Arabidopsis thaliana columbia
gctgaataagctgttttgctttcgaagaaaagatgaaattgtgagtatgaagtaattaataataaagattctgatataatccattcttaaattaaataaattgcataaagatgcatttagatttgagaatttactcagtttgcagctttttcagtcaaaattcatttataccattaatgctaggacatgtgaggcacaataatttttccattaaattgtgaaagaaaaacaatggtctaatttgtcagattcctcaaaaggcatgttcttaatttcattgctcctttgaatatataagattcttgtaccattctctattttcttatattctactgccatttttgcaaaatgttagt

SEQ ID NO: 113327 - DNA, 359 bp, Arabidopsis thaliana columbia
cttaatgtggtctgtgatcattacatcaacaacagcaaggcaattagagaagctatgtgtttcatgatggacccgcagtccggaaagaaaatatgttatgttcagtttcctcagaggtttgatgggattgatagacacgatcgatactcaaatcgcaatgtggttttcttcgatatcaacatgaaaggtttagatggcatacaaggaccgatatatgtggggaccgggtgtgtcttcagaaggcaagcactttatggatttgatgcaccaaagaagaagcaaccaccaggcagaacctgcaactgttggccaaaatggtgctgtttgtgttgcggtatgagaaagaagaagacaggtaa

SEQ ID NO: 113328 - DNA, 310 bp, Arabidopsis thaliana columbia
attgacgagctttcaaatatgttcatttacagaagcgaggcaaacagagacactttgtacagaatggtgtacccgcgagaacataaggagttcagtgtgtctgaaagcacaagaaaacgcacgggagctgatgtaatcaccagatatctaatactgagtgatgtcatagcattactataccatgcatagttattgtgggctgcatatgaccctataccgggtgacctgacgatgttttagaaagccagcgctcaaacgagtttttgaccgagagacgacgcggccacccattaataccaggccgtgttga

SEQ ID NO: 113329 - DNA, 297 bp, Arabidopsis thaliana columbia
ccggggagaccacgcgtacgggtactgttcttatttcgaatgtataaaaaccaaaagcgacgcacagggcaacataggaaactgtggttgatttatcgacgtcgatcgttgctacttgaataccggaaacagagaagttccgtgtaagagagaaacgatcatgtagaatggattgagagatggggttcaagatcacaaaaagtgggtgaagggatactacgtataatattttcaaacgaaatcatggaactgggtgagccgttacatcgtcttcaaacaaactcaaagtcgtgaaag

SEQ ID NO: 113330 - DNA, 357 bp, Arabidopsis thaliana columbia
gtttaccaaaatgcccttggctccaggaaacttctctgcaatctcgacccaagcctcgtaggactctctcacgaatagacctggaggcaaaaccttcgtcggcacggagcagacgtagccaggaattggatgttctacgttgccggagcttaaatctagctcagaagtggttatgcgatgtctctcagggagatacttcatcatacttaaaaacccagcgttacacgttaggaagatgtaagaaggaaggttaagctcgtttgccacttcgatcattggaacacaaaaaaaatcgataaccaaaccgactacacgaaccgaaccggattctttacgtgaagaaactagagtggagag

SEQ ID NO: 113331 - DNA, 354 bp, Arabidopsis thaliana columbia
  unsure (1)..(354): unsure at all n locations
gggnganccacgcgnncggtttaccaatttgcttttgtctccaaaaacaccncactncaaggtcgtcgtaaacttataaggtctctgtcactaataaacctggangcaaaaccttcgtcggcacggagcacacgtagccaggaattggatgttctacgttgcctgagcttaaatctagctcagaagtggttatgcgatgtctctcagggagatacttaatcatacttaaaaacccagcgttacacgctaggaagatgtaagaaggaaggttaagctcgttagccactttcgatcattggaacacaaaaaaaacctattaccaaaccaacttcactaacccaaccgtattcttta

SEQ ID NO: 113332 - DNA, 354 bp, Arabidopsis thaliana columbia
aatttatctatgtgttgatggcagatgagcaacaatccctcacaggccgggggttgtgcactgatggtgttattttgcaactcttcaaggagatatggcgatttcagcaaaaactctcaaccaggttcgtattataaaatctctgacatcgaatctctctatctttcaaatcatcatgatcataacaagtctctttcttttctcaggaaaaactgagaagccagagctggtaggttcatcattacatgtccttgtatatgattagcgtgtcaatatttcattttctttcttttatgatcgactaataggatctgtgtactgatttaaacattacagactaggactcccagcaag

SEQ ID NO: 113333 - DNA, 317 bp, Arabidopsis thaliana columbia
  unsure (1)..(317): unsure at all n locations
gnnntgagtttcctcaatcatttcaactcaatgacatcattctctgctggttccatattcacatcaagatcttcttcagctntctcttcttcctccatcatgctttgatcaaccaaattgctacttctgggtgtcggttcttgaacatccagtatatcagttccgttggcaaagcctcaacaccaagcctctgtgagctgtttggattccagttttgcagtgattttgggtttctctctaataagttgctcaaatcccataatcacttatattgatagggaatatatcagtaagaaagatactgcatggtggtttat

SEQ ID NO: 113334 - DNA, 326 bp, Arabidopsis thaliana columbia
ccaggcgaacgacatcacaggttcatctaagtctgcttccatccaaaaggaaggcccgttggaaaataccggggttacgcacgaaacaacgtaaaccgccttctaataaactctcttatgatctatttttttcaactttgttagcctcttaactcaccaccacaagaacaagaaagattaagagaggatacggacaaacatgtgatccctcaccaaaaccactaccagattgtcgttccggagaaggcccttcaatggctgataaaaagaagggtgttgatgacaacaacaacagcaacatggatgatgagctttttgctgttctt

SEQ ID NO: 113335 - DNA, 316 bp, Arabidopsis thaliana columbia
agaaagaataaacgactaaatgttgcctatctgggcttgggtcatgcaataaaccttggaacaagagccggtgactactcctccgtttaccgcatcaaaacaagacctaattcatgcaacaaaacacgaccaatggaagggtcacatgaatatgaaaaaactgaaactcgtccactctccacagctcttatgattcatgataactcgaaaactcgaattgcctcttttcttgttacacaagattcaaaattctgccctataaaattacaaaagccggattgtggcctaccatagtcagcacagacgaccaacaatt

SEQ ID NO: 113336 - DNA, 346 bp, Arabidopsis thaliana columbia
gtaatacgaaaacatctttggtttcggagaaacgagaaaacaaaacgccaacatgtttcacagatttaggttgttccacatgaagaacggaggggaagcatcgggcttcaaaggactccactcagctttttcattgtgtgcaacaggatatattttatcagcctcgcgccttcaatcccacctacaacaaacgccaaacattcaatgcttccaaaataatcttcatatttcagataaagcgagagaaagaaaaaagaatccacaacgttcaactttttttaagacatataattgtaaaccatatgcacgctaactacacctgatacgtccatgacgattttgacag

SEQ ID NO: 113337 - DNA, 359 bp, Arabidopsis thaliana columbia
gatgccctggttgagtacatgtatgtgggtcatgaccaaagggcagacttgattctggcgtgcagaatccgagaaaggaaagaatctgtgactgttctactgtgcggtactagtggctgtggcaaatctacactctccgcacttctgggaagtaggcttgggattacaacggtggtctcaaccgactcaatccgtcacatgatgaggagtttcgttgatgaaaagcagaatcctttgctatgggcttcaacataccatgctggagagtaccttgaccctgtggcagttgctgagtcaaaagccagaagaagaagagccaaaaaaatggatagtattgaggacgaaaaagcgaaagcctc

SEQ ID NO: 113338 - DNA, 229 bp, Arabidopsis thaliana columbia
  unsure (1)..(229): unsure at all n locations
aacaaaaacatttccgttaatctcaccacacaccccnacgcaaggcncggggaaaagctaagtgttacaggcaacacagcgagacaggcaatattgattcctccaaaactaccacaccagtgcaacctatccaacacatatttggttctagaccaccgccaccatcaataggtacgccaaccaggccgctgacaggaacaacaaccaccccaagttctcattttttttt

SEQ ID NO: 113339 - DNA, 341 bp, Arabidopsis thaliana columbia
tgctaaatcctgtgtacatgatgtgatcactagaagtttttgatatgatgagacgatgtgggtgtgttgcaaccgttcatactttcaatggtttgattaatggtttagttgagaaacgtcaggtatgtttcacgaatctatgtcttgatgttttcctatagagattatctgattgaactaatctcttgtcaaattatttttgtagatggaaaaggcggttgagatattagacgagatgacattggcgggtgtaagtgcaaacgaacatacttacacaaagatcatgcaaggctatgcatcattcggtgataccggtaaagcctttgagtattttacaaggc

SEQ ID NO: 113340 - DNA, 386 bp, Arabidopsis thaliana columbia
gggtccgcacggcacgcgtccaggcggtcgatccggtcactttttaacgattacatgaggcatagctccttatttattgtaaagttaagcccttgtggaaccctagttaacattacacatgtcatcatctagttaccataaatctattctttgttcattgtacctcttttgcttgtgacaaccttcctcttttgcttgtgtaataggctaagggtattaaatttaatgtttatttttgtataacagaataattaaagcgttttttaatcaaaaaaattaaacacctaaagccgcatcaccagcgttgaccaacgttccggtcaatcgaattcggtattagggtttaaacccaaccgtgccccatttcttcaccgcgcttagcttat

SEQ ID NO: 113341 - DNA, 357 bp, Arabidopsis thaliana columbia
aggcgatgatgaaggatcagtttgcaaattacgtggtccagaaagtcttggagatcagtaaagatcagcaaagggagattctggtgcagaggatgaaaattcatctccaaagtttgcggaaatacacatacgggaaacacatagtagcccgattcgaacaactgtttggtgaaggtacttttctctaaaactaaaacttgagttgtcaatatgactctgctaaagaaatctgaacgttctaatatgttattgttacagagagtgaagtctcagaagagggaacagaaggttagacagaagattttcttttgggttgcagatttgtacaatgtttgacttagacaaatatgtatttga

SEQ ID NO: 113342 - DNA, 360 bp, Arabidopsis thaliana columbia
aataagctcatataaaaaccatatggtcacttcaagaaggaatattagactaaatgttacctctttggtcttaagtcttgccttaaacctggaaacaagatcctgtgtagtgacttgcttcttttccatcagaacagcgcggatttcatcttcagtcacaggcccagtcgcagctgaggatgatgatgcaggagctgaagctggttcagctttcacagcttttgttggtgtgttggatttggaaactgtgtttgctctctcttctttcaaagaagatttcggatcctgcttacaaagattacagaaacctgtttgttagaaatcaaatccagcacaaacgatcaactctttttcaaacat

SEQ ID NO: 113343 - DNA, 217 bp, Arabidopsis thaliana columbia
  unsure (1)..(217): unsure at all n locations
gagtaacgaatgtactgtagttcatggctgcagcacaagaacgccttgtcctcttgccacgtctacggtttctggtcattcaggancctatcatgcaccagacaactctgctagtaatacatttgctacctgagcaagaactatatattctactactgcactatatgccatatctgatgatgatgatcaacctgctgaaagaaattgaggttccaaa

SEQ ID NO: 113344 - DNA, 351 bp, Arabidopsis thaliana columbia
gtgattaacaaaaatgctatgattacgtatcaccttaatatagctcctgaactcttttaattaattctgcataatttactaaaatatatatttacaccaactagccatcggtatttaataacacttatattactcattaattaatccaaatataaactaaaaaaaatgaatttatcgtagtataagatttaatatgttctgatttcaattaattaaataaaacgatattatatttaacatatgcaataagagatgcaaatctttagaagattaaacacttaacattttgtgtaccgattaactttataactatacatgtttatataaccatgttacttttaaaaatatgaa

SEQ ID NO: 113345 - DNA, 350 bp, Arabidopsis thaliana columbia
cacagtgagatttattcaaaaggacgcagaagataaaaagacatcactcaattctaaaccatatttccgattgttcatcaactggctactggacttgtgttccctggatcctgggacggatggtgcaaactttcaggttctcacagcttttgccaacgccttccacgcattgcagcctcttaagattcctgctttcagttttgcatggctagaacttgtcagccacagaagcttcatgcccaaactacttacagtaaatggccagaagggttggccatatgttcagcgcctgctggtggacttgcttcagtttcttgagccatttttaagaaatgctgaactcggaggac

SEQ ID NO: 113346 - DNA, 327 bp, Arabidopsis thaliana columbia
  unsure (1)..(327): unsure at all n locations
accagaagaattatcatgtcattcgggtctctggcggncggnccaacagccgacgtggacattttgtgggtgttccagccaaaaaggaccgngacctccaatgacggcacataggaggtggcactgcaaggctgatggggtcgttaacggttatagagccacagctagtcgcgttcatactagtcatctcagcaagcggtctcggaccaatacctgacatgctttttccagcgtatgcgtctatctatataatcgccctctcacgactagcctgacgccaacactgcgttgacaccgcttccccccaaggctaccgagacagcaaac

SEQ ID NO: 113347 - DNA, 338 bp, Arabidopsis thaliana columbia
  unsure (1)..(338): unsure at all n locations
cttttcactgatctattcactcactcaaatcgcctcctccgcgaaatcgatcaacattttcgttttcgggacacaanattccataccgcatttctcttttctaggttcgccggcgctaaacattccccgttattgccgactccatcgcttactttatctacttccggcattcatcttaaaaccaaaccgaattctcagtttcactccaccatagcatcatcctcatcttcatatacattcgccggaactgatatcattgagattaaatcgctgcccacgaatcctattgaaggacaaaagactggaactagcggactcctgaagaggtgaaagttttc

SEQ ID NO: 113348 - DNA, 343 bp, Arabidopsis thaliana columbia
  unsure (1)..(343): unsure at all n locations
ccggtcccgaaggccggggacgccccacgccaccgctattcaccgatctatacactcacccaactccccaccancccgtaatcgtgcaactcttacggtgtcgtacacaacaaacnaccccncattactcttttctacgtccgcccccaccaaacatacgccggtattgccgactccatcgattactttatctactcccggcattcatcttaaaaccaaaccgaattctcagtttcactccaccatagcatcatcctcatcttcatctacagtcgccagaactgataccattgagattaaatcgctgcccacgaatcctattgaaggacaaaaaactggaact

SEQ ID NO: 113349 - DNA, 226 bp, Arabidopsis thaliana columbia
  unsure (1)..(226): unsure at all n locations
aacaagcctttctncttcaangtagtaaaatctttctnnctctcttctaatctatgctcacctctactcagtcgtgttctcttccatnaaggtttcaatcttacccaaccccgtttcgtttttttnttgctcttccggttgttgaattttgaaagatatcctaagaaccccggctgtgcggaggtaaaccacgctagaggtttgcttttaagccttctaccttgcg

SEQ ID NO: 113350 - DNA, 348 bp, Arabidopsis thaliana columbia
  unsure (1)..(348): unsure at all n locations
ccggggcgtgccacgcgtgcgaaaacagatgtgtcactggagattaaacaccaacacggattcacanactgtggctgggggaaacttttttgtggcggggaacannancacaatcagcaataacataagaccggaaagcacttgtaattaaagaccatagacgaatccaaaaatattgcacacatcattaacgctcaaccacaaaatgatatgaacaaacattacaaacacaaaccccaaaaaaaaaagcatccatcgaatataaacatatgagtcaagctcacctttatcagccctctccatcaaaacactatcacccaaaaaaaaaccaatgtgtaaaaattgcta

SEQ ID NO: 113351 - DNA, 364 bp, Arabidopsis thaliana columbia
  unsure (1)..(364): unsure at all n locations
gggggggcgatgcgtccgggacatancattccccgctcattttcatggatggaaggccatanancggaatggggtcaaggttcttggtgtgggttccnaaancctaccaggcatataagaagcagcaacaccgttggcattcgggacctatgcagcttttccgcttgtgtcttggttcaatcttgacctctaagatagcgatatggaagaaggcgaatctgatacttctcttctttcttcttaggaaactcatacttcctttctactccttcactttgttctgcataatccttccactcaccatgtttgttccagaagctgagctccctgtttgggtcatctgctacataccagttttcatgtc

SEQ ID NO: 113352 - DNA, 346 bp, Arabidopsis thaliana columbia
  unsure (1)..(346): unsure at all n locations
gcggggggctttaaacccaagcacaaaaaaagattaccttacattaccccaccaacanccctcacgcccagggacaaccataacgtatacgtacaccaaaacacaaccatcctcttctccaattactccaccctcatctcacaactaacactaacancacacttccttcattacaatacatactttaaaccaacacattcaaaaccataccccatccatactctcactcaaacatctcctctacaaccaactaccttaaaactctcattcaacaacacaaaaaaaattataacaattcatacaaaaacatacaaaaacacatactacttcaacctaaccccaaaaa

SEQ ID NO: 113353 - DNA, 353 bp, Arabidopsis thaliana columbia
gcgctgattcagatgacctgagcatacctcgccagagtacctccgggccatggtaacccattgtggtttaagtacaccaatgccaagccatccgcttatgcaatgactccaccgtcatttccatctaacataatcactgagacttgtgtcagcatgaaggcaaggtttatagcaagtcatgcaagtattccggcgtcgatactgatcttggaagcatcctctatccaaggagcgaccgtaacacttgcatgcagcaacacaaacagaggtgtgacaatggagacacaaacagagatacacaggtacttgttcatgctagccccaaaaaaactcaccacctacgctttgcacac

SEQ ID NO: 113354 - DNA, 330 bp, Arabidopsis thaliana columbia
  unsure (1)..(330): unsure at all n locations
gcaacggcaggaccattaaggttaaaggtttcggtcctcaacccanagggaacagtgccaatgtaatgctgcgtgtccccacacangccttgaactttgccttcaaagatcacttcaaaagacctttcaactgtaagaaggacagatattgttaccggaagtggaacgctggtaacttggcatctggaggagcagctggtgcctctccccttctgtatgtgtactccctcgactatgcccctacccatctagctaatgatgccaaggctgcaaagaaaggagaccctttaaaacagtttgatggtcttgatgatgtctacagaaagacac

SEQ ID NO: 113355 - DNA, 380 bp, Arabidopsis thaliana columbia
  unsure (1)..(380): unsure at all n locations
attcccgggtccgccgcacgcgctcacgccataacttttattttgtcattttctcttaaaccttcttcttctccttcgtttgagcagtaatttttgtggttggcttcttctnctctttcctctttcccctaattgatcaatcatgcttcttcatttctagttctctcttcctgactcatttccctcattagatcttcttctccactaaacccataattgaaagaagctctttttttgcttacattgaagttaaaaaatcatcacttgttttgtttttgaagaaacacacataaagtttgtctttttacttctcaaatttggttgttttcactcaatttcaatcttgctttctgattcagattctgggttttcttcagaat

SEQ ID NO: 113356 - DNA, 295 bp, Arabidopsis thaliana columbia
  unsure (1)..(295): unsure at all n locations
acaaacacacacaaatctctttagaaaaacgacaaacccnggggcagtgtcacattaatgtgtgtgttgggccttcaaaaaacaccacccatagcatacgaccacagcatcatccagatacaacagggaacaagcccgcacacggaccatgacaccacaagacccctagcacccgagaccacaagagaacacatcaacatccgcctaggcgatgcccacagcaacaaggcgtatgcaccgaaactaggaagaaagctaagaggaccaccggaaaaagggaacgacccaacaaaca

SEQ ID NO: 113357 - DNA, 348 bp, Arabidopsis thaliana columbia
  unsure (1)..(348): unsure at all n locations
ngattatgtgccaactattcctcatacaactgngaccccnccgaanatggtatcattttatgttttgggggtcacaaaggcatcaagagatatacttctactgttctacacatggaaacgaaacgctctggtaatattttaccatcttgtatatgttataaccagcctttggtccccaatatgaataggcgcctaaaacaaagttgtaagcaatataccctgagaaaagaaggaaaacagttgcaggtaatcaataaatcatacaagaacacagatgctttttaatacatgacaagggaaaatggttaccaagaatgtttgtaacataaaccttatctaccaaaagca

SEQ ID NO: 113358 - DNA, 349 bp, Arabidopsis thaliana columbia
  unsure (1)..(349): unsure at all n locations
gctgttgttctcaaatgaaaggtttgtgcaaccggngccggagggnctgtgggatctttggtgttttggctcaccctctctaaggattacttcgtccatggcactgtcagagaccctgataatgaaaagtatgctcatttgaagaagctcgagaaagctggtgacaaactcaagctcttcaaggctgatttgttggactacggctctcttcaatctgctattgcaggttgcagcggagtcttccatgtcgcttgcccggttccaccagcttcagtccctaatcctgaggtagaattgatcgcacctgctgtggatggcacgctgaatgtgcttaaggcatgcattgaag

SEQ ID NO: 113359 - DNA, 356 bp, Arabidopsis thaliana columbia
acgcaaaaaatcaatcttcttgaaacaaatatttttcttagaaaatcaaatgaaaaagaacagatggtgtgtctatatattaataaagataacaataaataaaatcatcaaacctaaattgtttcccacgaatcagtttcgagacattggcacgttaaattgtcgatctggtaatgaagtaggctttacatgtagtagactaaagtgttaattaggacctagaccctacagatttgggcataaaccgtcctttgttatgggacgtgttctacttggtatctctagaaccgcggtctttggcagatggatcagattatatctttttgacacttgtatttatatatgttatatgttat

SEQ ID NO: 113360 - DNA, 352 bp, Arabidopsis thaliana columbia
ctttctgcagattcttctatatatcaaaaagaacaaattgatgagcctgataagaaaagatggtagtgtcataaacaaaattcctttgaaatttacctacaaaatcctcagagtactccaagaggaaaaaaaaagcatcaaacgaagaaactaagaatcaaaaatgaaggaaactaagaagatgtttgtttgaatgatgggttgagagcgtatacaggtgatacggcaaacaaagagtgcaaaaatgtttgtttaaaccaaaattttcgttaatctgatggttacaatttgtttatctattactatcagaaatcaatcaaaaattagaattagtatatagaaattacgttat

SEQ ID NO: 113361 - DNA, 368 bp, Arabidopsis thaliana columbia
  unsure (1)..(368): unsure at all n locations
ggggcgggcgacgcgtacggagaaagagataaagagagacttatatattggcgcacagcgccccnggggtacaggagaactttttaatgttcctgttcctcacaancatcancnncctcctcatcccancgtcacgtgtcgctctccaaacctgttcagatcatctgtaattctcaacagtctcatgaaaacaataactccgccgtctcccgccgtcttgctctcactctcctcgtcagcgccgctgctgttggttccaaagtatctcctgctgatgccccctaccgtgaagctgcaaacgggtttgggaagccaaaaacgaacacaaacttcttgccatacaatggaaatgggttcaaaaggcaagt

SEQ ID NO: 113362 - DNA, 348 bp, Arabidopsis thaliana columbia
  unsure (1)..(348): unsure at all n locations
cccaacactatggcaactctatttctcacaatcctcctagccgcggngcgcttcctttttttgcgtatgttctctcaccgncgcagccgcagccacaacaaccgtcttccaccggggccaaacccatggcccatcatcggaaacctccctcacatgggccctaagcctcatcgaaccctttccgccatggttactacttacggccctatcctccacctccgactagggttcgtagacgtcgtggtcgccgcttctaaatccgtggccgagcagttcttgaaaatccacgacgccaatttcgctagccgaccaccaaactcaggagccaaacacatggcatataactat

SEQ ID NO: 113363 - DNA, 350 bp, Arabidopsis thaliana columbia
  unsure (1)..(350): unsure at all n locations
cacactactaataaaccatgaagcttcttatgctcgcctnnggggttcgattagctttggttattgtgttaggnnacnagtttgtttgtgaagagaacgagccattcacatgtaaccaaactaaacttttcaacagtggcaatttcgaaaaaggcttcatcttcggtgttgcatcttctgcttaccaggtggaaggcggtagaggccgtggacttaacgtttgggatagcttcactcaccgattcccagagaaaggtggagctgatttgggaaatggagacactacttgtgactcatatactctttggcagaaagatatagacgtgatggacgagctcaactctactggc

SEQ ID NO: 113364 - DNA, 329 bp, Arabidopsis thaliana columbia
  unsure (1)..(329): unsure at all n locations
aatacaatttcccaatttttaaacttccaacaccccaaanncacgaggcacggtcaattaaaacgttttcgcaccccacacncccnncccatncaaacctacaacacaaccancatcttcacaatcacccagcaaacgcaaacaaaatatttccgcctcgaaaaccaaaaccaaaccttgcaaaatcctgcaattgctcaaacaaaaaaaaacaaaaaaaaaaaaacaaaaaacaaaaaaaccaccaaaacaaaaaacccccccccccccagaggatccaagcttccacacacaatcaaaccaccataaaaacacccacaaaaaccccc

SEQ ID NO: 113365 - DNA, 362 bp, Arabidopsis thaliana columbia
  unsure (1)..(362): unsure at all n locations
gcaaagagtaagtagtgtagaaacaatgagtaaaattacctaaacaaagatgtcgagttgctgttattatgttgatgtaacnnnnctggtggaacaaaaatcacctgatcaaaaaccaaacacatgaaaatcagaacacaacacaaaaccaagtagaaaaaatgtcactatatctcaaactaattctctgacctaaaacatgcaatacaaccataaaaacactctggtttcagttaattaatccacaattaagaaatttgaaataaacccttaatcaaaaacaacaaatttttcagaacaaaaccaacacaatgaaaaacttgcctgaggagcttccataggataatgttgaggaaactcaa

SEQ ID NO: 113366 - DNA, 360 bp, Arabidopsis thaliana columbia
  unsure (1)..(360): unsure at all n locations
ccgacgcgtgtgtccaaatgataagaattagataattcataaatcatagtgatgtggaaatgtttatggttctggtctttngnnaacaacaatatggctttgaatttgattgattgtctctaattttgcagatattggaaagacgaaatggttcgatattttgaagtataggtttattcacatgaacaccctcggtgatgaaatcgagacttaccaaccaaaagcccttgtttattgattttcgcggtttggcccgcaagtattttttttcttttctggttagccgaataatattcagaaaacgaggaaaagcattgagatttttttgttttaactaactaaaatttggatgagaaagtg

SEQ ID NO: 113367 - DNA, 348 bp, Arabidopsis thaliana columbia
cggggttcccccgtgaaaggtatcaccgtacccacaaatatcaagctcggcatataatgacgtgtgttggtggcgtaatatgacacttaaattacatctcatgtcaatgaatattggaagtagttttttttttctttttcaacaatgtattgtttatttcttttcttttccctaaagtaaattatatttaatatatacccgttaacgatattaattagaattcaaaagaatcatttttgaaaaatattataaatgcatgatataaaggagtttagtacaaatatttcattcaaattatctattttaacatttgcactatgaaaaacaagctattgtatcattatattg

SEQ ID NO: 113368 - DNA, 427 bp, Arabidopsis thaliana columbia
  unsure (1)..(427): unsure at all n locations
ccgtccgcgcataacgccggtacttctacgtgtatcaaacggaaaggnctcatatgggcaaatggtggaactgtctttcgtggtattggtagtgtnncnnaccannagagatcnntccagcggaccagttaccctagtcgtgcccacaaagnggcttttcggtgcatgaaacaatgccatagtgcgaaccagttcganngtggatcgaattcaagaaacaaacgaannnaacgcacagtgtcaacaacaatctcgcgggcccgtaccctcaagtcatgagaaggtgttnngccgcttgagggttatanaaccaatgggtcccccagatctcnntcccgaagaagcnnntaaacgagtaaaagtnnttagcacgattgagaaccacannctgacccataagcagttccaaatgagtctatcggaaggg

SEQ ID NO: 113369 - DNA, 322 bp, Arabidopsis thaliana columbia
ggggttcccggggcgacccacccctcccattggatttttcgttatttaaatcgcgtatctcccccacctggggtgggttatcattccatgggacgggttaaaaaaaattcacttatccaattttaatctttcgtaccctattcattattacccaatcaaaggcgtatttactttactttttttacccatgagggattccctgtatatttcaacaaaaaaaaatttatttttttcagttaatgtgaatagcacaattttggcttgggaagtatattatttacccaacttactttattggagaaatttttcggataaatgattt

SEQ ID NO: 113370 - DNA, 337 bp, Arabidopsis thaliana columbia
  unsure (1)..(337): unsure at all n locations
ggggcgaccacgcttccgatcgaggtctgggaccttcatgcaccctatctccgctgctccnncttgggctttgtgcgttttttcaggtttccgcacgcacacncctngcccactttctcagaacgccggcaaactcacctatgttggtcacgcaacgggtctagagggaagagtcattacattatacgccgcaacgtccatggaggcaccaaggtttggagaaggtcaaggtcagggtcagagtcaagggttccgtgacatgcaccagaaagtagagcacctacggtgcggtgacaccattgcaacaccatctagtgtagataaatggttctacaac

SEQ ID NO: 113371 - DNA, 376 bp, Arabidopsis thaliana columbia
  unsure (1)..(376): unsure at all n locations
ttccgcggacgcctccgcccacgcgttcttgagaaagaatattattggtcgtagaatgttaaatcaaaatgcgttgaatgaaatgtctttcgatggctccnaatcgatagagccgaaatgaaacttacgtgattttttttcagttctgaattcatttcattcttatagcttccaggagaaaaacaaaattagtaaacacagaatagatttttttttctcttagaaactatattgatttttttgggctatttcattatgtcaacctacaaaatgaagagcctagtgaagggtcttaggtatttttctcaaatatttggtgagttttatatatatactatcttctccgaatgtagcctaataattttgtaaatttctc

SEQ ID NO: 113372 - DNA, 364 bp, Arabidopsis thaliana columbia
cgggtatttataacatctagtttaaaacctctaagacgtaaaatttccgttctcttcttagtctttggcatctgagattctgtcaggatagctagacccatatctctttcaacgttatgtaaattataatataagtttctaatttttatttttaaatgattattacttttgatccctcattgttttttaaaagtttttttacaccttttcattcaagattttattttaaagttgagttttagcatttaagtccaaacagaaagttttataatactagaaacttggatgataaatttgcaatacaatataaatataaactggattttggatcatgttatttgatataatttattcatcattagag

SEQ ID NO: 113373 - DNA, 297 bp, Arabidopsis thaliana columbia
  unsure (1)..(297): unsure at all n locations
gcacagctcgatgccgaacgaaggcgccccttcccccgccaccacgacgccgagcggttccagtgccttcaggaaaaacgccttgctggccgcgtagtcgctgacgccgaatttgacgtggtcaaacatgaattcccccgggatggttggacccgcccgcgccccgacgcgatgcanggatcaccgcgatgttgccacacgccgccgccgacggcaggcccccagccaaccggcaaaaaaaagcccgacacgcagtcgggccgccaagctgagaacacaagaagaatcccgaccaca

SEQ ID NO: 113374 - DNA, 381 bp, Arabidopsis thaliana columbia
  unsure (1)..(381): unsure at all n locations
tcggtggaatctccagtacatcaccttaaccccaaatattagataggaactggggtcaagggacagttgcacagtttacgacaacncgtattcaatgcccttacttgcgtgaaaagcagccgatgtcattctttttttgtcaacaacttatattattagaaaggctcatagagccaatggggaggactttgtttacataagcacccgatgtgatgtctaccattaacatttcgtgaaaatatttggaaaattaatttttaggcatggaatgtttgacgattgatgatctacagtaaaaatctaaatacaaaactttgataatttaataatcatttataaattaattaaatttcttcactcttgaatcatatcactgtaata

SEQ ID NO: 113375 - DNA, 384 bp, Arabidopsis thaliana columbia
ggcgttcacgcgtgcgagactaattgttgaagtgcattaaatcaaagtaccaaaggagggctgggggcacatgaaacttttgtggctgcagagaagattattaagaaggcgaggacatatgtgagctaagaagtaagacttatatgacatttagaagtttcatttgcattgtcctgcttttataccttccagtgtttctttaggattatgtttatcaatgtgtaggagtgtgtcttgtaacatcattcaagttgattatcaatgtagtgtgtaactctatctatatctttctttacatttttcttcttcactgcaaactatacacttctattcaacctccatcatcatcatcatcatcatcatcatcatcatcatcatcatcat

SEQ ID NO: 113376 - DNA, 385 bp, Arabidopsis thaliana columbia
tcggtaacttcatctccttggaactacaagggctcatcacactacattcgctgctaatatcgaaactttaaggctctaacggtttctgcccgcggctaagatctttgatctcaatgtttttcttcataattatatccattagattcttgttctctgccctaacattcccaatctgctccatcaaaagatgatacttcaacttccggctctaaacttcatctctcatcatcatatctcttttattcgcgtttcgtcttcctatctccatcttcttttcttcaccttcatctctcatgaaacttctttcgaaatagaagtcttaacctttggcattcagcttcaagctcaacaatcttattcacattcctaagttgttgtttatgcg

SEQ ID NO: 113377 - DNA, 201 bp, Arabidopsis thaliana columbia
  unsure (1)..(201): unsure at all n locations
ggggggacccacgcgggcgaaaaaaaaaattcttccaaccttaacggcccatcacactccataagccgctaaattcggaatttttgggcttttacagacaaagcccncagcaaacatctttgacctcaatgtttgtctacataaaaaactcacaaaccaatctaagttctactcccctaacatcaccacaatctgacccat

SEQ ID NO: 113378 - DNA, 378 bp, Arabidopsis thaliana columbia
tcgaaaaaaaagggttcgacacatatacattaactatcacgctatcacactcgtgaaccgcgccaatttctagtctttcgaacacagacccaacaagagccacctcgaacaactcaacgcgcaaccaccacaccaaatcaacaagaccgaaccaactctcacctaacgccaggaccaccaagcaccaaagctccaccgctcacgatggccactggaacgcccactcatccatccagaccggcaactacacaccacattctaaaacaccggcaaacacacagaagagggacacagacaaccacaaaagggaagagacattacaggacgcgccgagactgtcatggagccaccgaaattggaagacggcaaaggccaggg

SEQ ID NO: 113379 - DNA, 371 bp, Arabidopsis thaliana columbia
aaacaagaaagatcaaaaaaacaaatgggccacaaagcagggagcatcggggcaattttgggtctttgggaaccaaacaaaacatctgaagcagtaacagaggcaaagccacatacaatgaagaactcgaacaacgacacgtaacctaaaacccaaaacaccgactcgagaacaaatcaaactcactaacaaaacccacaaaaacaccgacggcccttgacacacaaacactaaccatgacagcgccaatgagaaatgcgatgcgtcactaacgctggattcgacacaaacagaacgcggacagaaagaacaccacaggagcttccaactaagaaactttaggtacatcgaagagatcaacgaagctctcg

SEQ ID NO: 113380 - DNA, 351 bp, Arabidopsis thaliana columbia
ggagagaggcttataaaaaaaaacaaaaaaaatgcaaaggctatgaacactggctttttgggtgtttgactcctaatggcggtgacactgaaccttttcccacggagaggcaaaaacggagtagagatgctcctatagtgaaaggctctatggaactttaccagaaagcatgccaaagtcgaaaacatatagaaaagagctcaagaaagtcttcaagagagatattggtttagccgcagccatccttcgatacatttccatgattgctttgttcagggatgtgaagcatcaggctgctagctggatcagccagtggaccaggagaacaatataatcccaaattgcactacg

SEQ ID NO: 113381 - DNA, 269 bp, Arabidopsis thaliana columbia
  unsure (1)..(269): unsure at all n locations
aaaaaaaggaggtccaaaattctagaaagccaccnaccggcncaaccgcagatttttgcgttttttcgacacacaaacccnncanaananangaaaaaaggctnccataatcctngntcaaaaagaaaccggaccatacaagggtaggcagtaaagaacaatacacaagcatgaaatattcaaccaaagttagcaattgacccaacataggaagagaataaccaaattatgaatcccagaaacaccacanttagccaaaccaaatgaaa

SEQ ID NO: 113382 - DNA, 374 bp, Arabidopsis thaliana columbia
  unsure (1)..(374): unsure at all n locations
gtaaggaaagagaaattcacctttctcttgtttcaagaacggaaaatgtgagtaatcttacttttttaggtattctncacattaatgagtctccagagagaacccgtcatggctttaaaagagctggtaatttggctaaacgactaagagggttgacatgggatgtgcgatgctgccgaacatagagtttggaagaagatttaaagtgttactacttttgtagctactcattgagacaagtttttgcgaaaatgcaaaggccaatgccagtaaccaaaaacaatatatacaactttgttgtgatatgaatatgggcgattttccagagccataaaatcagttgggggtatgaatatgggcgatttttttgttgt

SEQ ID NO: 113383 - DNA, 372 bp, Arabidopsis thaliana columbia
aaacaatataatctccacttgtttttgcatttgaataactccatttgtggatatgttcaggttgtgggaagagttatttagccaagttgttgcgtgacgtcgaggtagaaaatggtggtagtgctccacgaatccattctatggatgattacttcatgactgaagttgagaaggttaattaatcctcatagttctttagacgtttctaaaagaatggtttctttactttggaccagcaaaggactctaaaattgtgttgttttgtcaatgtaaaaggttgaggagagtgattcaacttctttaagctctggtagaagcaaaagacctattgtgaagacggtcatggaatactgctacgaacctgagatggaa

SEQ ID NO: 113384 - DNA, 377 bp, Arabidopsis thaliana columbia
cggacgcgtgggttcagatgcatctcctcgaaaacccgtagaaccggcagggagccaatcgtgttttatggtctgattcatatccttagcgttttcagaaacaaaatggtgggttggaagaggaatttgcagactgttattcgtcaagttggtagaagagtgaagaacagtcacatttctacagcaaattactcttcttctactcggaatttagaatcccctttctcacaaggttacttgcagagtctcctgagaccatcctactcctcagaccactgtatcatcatctacaacaactggggatctctacctcgagacaattgcaggcgagtgaagagcctgtatcatcacctttgtcatctccagctctgttgggt

SEQ ID NO: 113385 - DNA, 352 bp, Arabidopsis thaliana columbia
tttttaccaaaatctgcaaatgagaaatctcttcctttttccgaaaattccctaccaggttcaaatcacttgaagattttggtaaaaaaacaacaaacaaatttcaaacactgtctgaaacgtcgttttgaggacctgcaaacaacatgttctcaaatcaagaaacaaaccaaaatagcatgttcttaaatcaagaaacaaacccacgagaatattctcacaagattcacaacgtgatcacatggatcaatgatatataaattagataccatctacaagtagtacaaaacacaataaactatatataatagacgaaattagaaacataattacataaatggaatcaaaacgt

SEQ ID NO: 113386 - DNA, 268 bp, Arabidopsis thaliana columbia
  unsure (1)..(268): unsure at all n locations
aagggaaaaccnnnnatggcactnnccnnnatggagaaccggatatatcaaaaatgaaacttatctggagccagctcattgatctgggaaaaactnctgtggaaccaaagtttataacaagagattttaatgatatcattgaatcttcataaaaacaaggatgactagaaagaccgggggggggcggagtngatctcataatctttatgtcataatgcgattttttttatctacgccactctggaaatttctatcaaggagaggaaaa

SEQ ID NO: 113387 - DNA, 390 bp, Arabidopsis thaliana columbia
  unsure (1)..(390): unsure at all n locations
cacgcgtgcgacaagnaacnaattaacaacatttggcaaacaagctcatccaccccngcgcactctggcacttttttggattctcaccaacncacccgnctatcaaacgagcaacgagagcaacgaacatgacgccagaaacccaacacgcccaacacataaatgtcagaaggagtttcagcaagaacaacacccaagagctcgccagaaagagatacgcaagcaaatgtggacaaaaccgagaggtggtcctcacaacgacgacaagacccaaatggaagacgacaccgagaacccccaaaaccacagctactccagaagtgctacaaagagcttcctcaagaagagccagtgggcgttagccccaccaggagacaagatgaacaagcc

SEQ ID NO: 113388 - DNA, 389 bp, Arabidopsis thaliana columbia
  unsure (1)..(389): unsure at all n locations
cggggcgttccacgcgtccgaaaaaatctcacctttaaagcctaaacactctacacnctccggcnaaacgtagctttttagcgtttttgaccacccgaannccgctacatatactgcgatacctacaatctatcaagcttcagatgtctactctgtaagatttttcgaaaagatacaacctcgcatgtgcgtaaatcagccttgaatacaactgagattcacgtgaagctttggattggtttctttgttctctctgttcttgagaagggaacaacacaaacacggcggcggggctcggaaaatagattatggaacatggtttaccgtctattaaatcatggaagtcacttgtcaagagaagaaacaatgctcaagaagggggtaaatcg

SEQ ID NO: 113389 - DNA, 376 bp, Arabidopsis thaliana columbia
  unsure (1)..(376): unsure at all n locations
gcgggtgtatacaataaaagcagacttataaatacatcaaacatattncgaagagaatctactggtttttgaagaaatgagcaagtctatctaactaactccagaaaagtacaaaatttcagctaatgtaactttacacaagcattatgttggtctccatccacttgagatttgccttaaatattgtaaatcacggttaaccaaacttccctagctacatgtgcataatatagaagaatgtcagatagaaacgatagagatggattgtttcataccttaggagtgagctcattcatctcgagagcattaacaatggcaggaactctagcgctgcattctggatgtgattcctgcgagtaaaagattgcttaaatga

SEQ ID NO: 113390 - DNA, 369 bp, Arabidopsis thaliana columbia
  unsure (1)..(369): unsure at all n locations
gccaatgtctatatgtaggtgttttttttatagaataatgagcggncgtgaaatgttccgattttttgggtgacccaatactngntcaaaggaaagaagaaatatattagaccatggggaagagttgacccatagcctttatgtacgcatatgatatggggaccgatcaataagtgagagaggtaatataatagaagccgcttcatcattggaactcccatgtgacctcctctcaagttttgagcatttctttaatctttttataactagagtcacttttattaatttcttttgaatgttcttctctactgttgctatactattctctaattattcacaaatagttattattagtgttttcaatatata

SEQ ID NO: 113391 - DNA, 375 bp, Arabidopsis thaliana columbia
caaacatataaccattttaattttgttttccgcatgtaagtggatagggcaggaatggtttgtcttggagcatgcctatatttctgttttattatttgattgtctatgaaaatctttgtagaacgtgaactccatagaagagaagaaaacggtttaattaaactaaaccaagtttccatttggaagagtctcataaggcctattgcaaccagctattggaaagaattaaaatccatcttgtaatataataccatagtagtcattttttgtgttcttaaaattaaattagttatcaacccaatgaagcaatcgaagatgcaaccgactaggtctggacgtttggtagtttcttatgaaaagaaaggtaacaatgtc

SEQ ID NO: 113392 - DNA, 376 bp, Arabidopsis thaliana columbia
cacgaatgttctctcttgcttttgtgatttgtaaaattctagaaacgtggaaatgctgaaagttttttgtttctttctttcttttctctttgcgtattatttatatatctttgctattcactgattttataaattggaacttattgagtaagattccaaaactattaatcatagagattattgacacttcattatgtttttaatcatagacgtgtgggcaaaatgacagcaccttaaattatttattttgttacaaaatccataattaatcaactcatcttggttatttaattaagagcacattcattataatttttcttttgccagcactataaattttctttgggccaaaaacatttattaaattttgtaagat

SEQ ID NO: 113393 - DNA, 380 bp, Arabidopsis thaliana columbia
  unsure (1)..(380): unsure at all n locations
aaatcgacgtattggtaatgaacacaaggcaccattggaaccgcnnnaggcgcaacgcgaacattttagatttttacggtaatggcanncccaacactaacacgaagttagctgctcttggaaaccccaagaatttcacaatccacatcacagttagttggcctaactcacaactccctctccatcccggtctcaaggcattctacagaagcctttcaccgagacatttcgtgggtggggaatggaacaccggagggagctgcaataacacaaccccaatgtctatcgggaaagaagttttgcaagaggagtcaagcgactacagcgacaggaaacaaatccagatagaatgagaaataagctttggtctctcaagaccc

SEQ ID NO: 113394 - DNA, 397 bp, Arabidopsis thaliana columbia
  unsure (1)..(397): unsure at all n locations
cccgggcgcccacgcgttcgcttcactgttgttgattncttttgaatcttctgagctcgcttcacctacgggaagacggcaaggatcatgttttctagattccagatcctgaagaaggtgaaatcttatctgtgatccagtggaagattgaatcaagtaacagattcacttagttcacttgcgtattgcatgcccctgaagataacattttgaataatgttgatattgaattatcacctataagctctggttcttgttgcttgtattggttctgggtatctactagtgaagaaaccatggcttttggttctcctaggaataattctatattagctgcggctggatttcctcggaaagtgtctacagttgcaattgctattggtggtttggcatcatt

SEQ ID NO: 113395 - DNA, 191 bp, Arabidopsis thaliana columbia
  unsure (1)..(191): unsure at all n locations
acccaaaacacaaacnaacgaagaaagtaacgaaatcccaccgccgaagcaaaaacaactcaccatcagaactcaaatcacgagcgtcatacacgccactcactataacattgtggagaagaaacagaatctaacaacaccgataatcccggcgctcaatatctccgacggtttgcttggattcaccattg

SEQ ID NO: 113396 - DNA, 369 bp, Arabidopsis thaliana columbia
  unsure (1)..(369): unsure at all n locations
cagccgactgatcaatgtcacgtccaaagatctaacggacagaaaccgcagcttttttaggttttatgcacanctacactaacccacgcaatgaacacattggtggctaactccatctcagccctcccagtggctgcaccttcaggccactggaacggagccggaggttccatgatcatggaatcagacaaacaaactggagttgtaagaaaacactatatcgggattctcacgatgcttgacatacttgctcatatcgccggtgaagattccaatctctctgatcttgatcgcaagatgagttcacaggtgtcatccatcatcggtcattgcctcaaaggactcagtctctggacactgaatcctaat

SEQ ID NO: 113397 - DNA, 435 bp, Arabidopsis thaliana columbia
  unsure (1)..(435): unsure at all n locations
cccggggcagtatctccacgcgtgtcggagacaagggcgaggtagatataggtttgagagacgaattcccnnattcccatattcaggagcacaagagaaaatattctggatgtttgtggggacaaagnnnnnntatcttttcgntcgtttggaatttgggggagcgaagaaggaaacggtgtaaggatatgggtcagtgcgtgtcaactgagaggtgcttgctggacgtgaagctctcctcctccgcatcggcgaggaggcttccgtcgcagcactacctcagcggtagccttagctcttctggctacggcggagaaccgtcggatcaatctgatatcggcggtgcgaagatgaaagggcttttcaagtctaagccacgcactcctgctgaccttgttcgacaaacccgcgatctccttctcttctccgatcgat

SEQ ID NO: 113398 - DNA, 390 bp, Arabidopsis thaliana columbia
  unsure (1)..(390): unsure at all n locations
gacccgcgcggcctaaaaaagcacacaaaaaaaaagctaaaaaaaaacccattcacaaaancacgagcccaacgaaaaaaaccaaatttttggcgcacaaaaacnccancanccccaaananaacaccaacggcaggaagcacgaaagccggaaagcaaaccaccacacgtgtcaacgagaaaaacccaacacacaagaaaactccaaagaccgcaaaaccaagaggcaaccgcatcacaacaaccacaccagcaacctgaacaccacaaaccaagacgcaaaaactacagatcaatccaagaccaccgataaaaagcaaacaccgacgaaccagaaccacccacacaaaacccctgccactgtcctcaaaacccaaccaacaaaaacac

SEQ ID NO: 113399 - DNA, 408 bp, Arabidopsis thaliana columbia
  unsure (1)..(408): unsure at all n locations
cgaaccgcgcggaaacccagggcggtccgaaacgttcaatgcatgaagtttttaggaaaaaagattttaggaaaaatgggcangcggaggggttcgaactttttcgcgcttatgngcanaagaacttaagtcttcccccttaaccactcgggcaaacctgcttgttgaatatctgttaataaaccaagtacttgttattattctacaacccaaattcaagaaatttttgtccttcaccatcacttgattaagcttatttcaacagaaagtgaacgataaaagtgataaaccgagaagaaaatgatttatctacacaattttgtatgaatgtttttctagtcatcttcagatagtgttcacaccttttttacgtgtgaactcttgttgaataatagtagtcatgaacac

SEQ ID NO: 113400 - DNA, 374 bp, Arabidopsis thaliana columbia
  unsure (1)..(374): unsure at all n locations
acttttaccaaaaaagctttcaaaacttaactagacncncggganacacgcgcgatttaagaattttcagccaaccaacananctacaaaactggtgagaccagaggcaaagcccaagagaagactggacaagctatgggaaccatgagggacaaggctaaggagggcccggacaagacttctcaaacggcccaaacagcccaacagaaagcccatgagacaacccaatcagctaaagataagacatctcaaactgcccaaacggctcagcaaaaagcccatgaaaccgcccattcaacaaaagaaaagacatcntaaaccgcccaaaccggacagcaaaaagcccatgagacgacgcaagcagcaaaagaaaa

SEQ ID NO: 113401 - DNA, 372 bp, Arabidopsis thaliana columbia
cggaaatcatcaaagagaaggagattgatcaagaaagatcaacagtatagcaagttttcaggtgtttttgcttctgggatctctccattggaacctctgtgtgcgatgttataaggacgtgaagtctgaagttgaagcttgacagttttgggtcctttaacagggagagggtgcaatgtcctcccagcagcacacacagtaagtagagatagccatatcaagggtaagcatcctgtaagatcaccaataaccactttgtattgacgttaacagaaacagagccaaaaacagaaccaagactcaaactttttttagcttaacaggaaacaaatccagatagaatgagaaataagctttggtctctcaagaccc

SEQ ID NO: 113402 - DNA, 380 bp, Arabidopsis thaliana columbia
gtcgtattacaaatggacaaattacgattcaggttgggtcatgtgtcagagagtttaccggattttccgggttttcatggactttcacaaaaactggatcccgaaattaagaacccattaattcatgacgctgatttgtcacttgtaggacatatatccctttaacattaggaaattaaatatcatatatcaaatatctggttgatatatcatatatcactcacaaaatcacttgatacatgaaaagtgatattaattcatcaagtgaaaatgaatccctaataaacgttgcgatcaaaaaagaagaaaaaaaaaaacgttgcgatcagatggaggcttaaccaacagtcaaacccatctttcatctgtctttttttctt

SEQ ID NO: 113403 - DNA, 378 bp, Arabidopsis thaliana columbia
tcggaaagtttcaacttcaagcattacacattaccaaaaagagagatcacaaaggaagcatgtcttttattgggatttatcaacaacaacaaaaccaaaaacttaattagtgtttctctgcttttttagttcccccacaaaatcgaatccttctgttcggttaccaaatgggttccaactgattcgtccgttattattcttttcattttctacgtgtttttttttgtgttgaaaaatgatgaagagagagacgttaatagaagcaggaataatcggaggattggccggagctcaagtgatttacgccggaaactcggagctactgagtcagttgctgtctctcggaattgacccacttcttatcgttatcttatgcac

SEQ ID NO: 113404 - DNA, 383 bp, Arabidopsis thaliana columbia
  unsure (1)..(383): unsure at all n locations
tcgcaatttatggcaagacaacaaaaacctacatgtgattgaataatcaattgggtaaaacggagtgtttcaggtttatctcaacaacagnccggatgtaaacacatgaaactatgaaagcaagcaacgtggttatagagcaataacatttaagtgaacaaaagtaaaatatggaagcaacgaggattttgacctgtcctttttttcgtcgctttggttgaggtgcatactctgtcctgttcctttcaaagtcagagacacacaggctgttgatattctgaccactttctgaagatattccatcgtttcgtcgaggaggataattttcgagtattccgcgttgcagcttctttttctgcttggcttttcgtcgtttctcttcc

SEQ ID NO: 113405 - DNA, 376 bp, Arabidopsis thaliana columbia
ttacaccaagatttgaagataaccggattgagtgacaagcgttgcagggaacatttgtgggttttgaagaaaaggaacccaaatgaaaatggagagttcgaaactactgaagttacagttgctgactacttccgcgatacaaggcatattgatttgcaatattctgcggatctgccttgcatcaatgttgggaagccaaagcgacccacttacattcctctcgagctctgcgcgttggttccacttcagaggtacacaaaagcacttaccacgttccaaagatctgcccttggtgagaaatccagacagaaaccccaagagaggatgactgttctgtccaaagctctgaaagttagcaactatgatgcggaaccac

SEQ ID NO: 113406 - DNA, 284 bp, Arabidopsis thaliana columbia
  unsure (1)..(284): unsure at all n locations
aattannganatgcaaccttantatcttaaatttaacctgcaaatttgatctccatcgtccttaataaattctcaaaacacactgagaattttaacaacanncaccttgcatcaatgttgggaagccaaaacgacccacttacattcctctcgagctctgcgcgttggttccacttcagaggtacacaaaagcacttaccacgtgccaaagatctgcccttgttgagaaatccatacagaaaccccaagagaagatgactgttctgtccaaactctgaaagtta

SEQ ID NO: 113407 - DNA, 365 bp, Arabidopsis thaliana columbia
  unsure (1)..(365): unsure at all n locations
ttttcttatacattaaactgnaaggggcngatcgactatattcgagtgtttacgcgagnnacagaaattaggagatgcaacttagttcttaatttaactgcaaatttgattccatgtccttaataattctcaaaacacactggaattttaacaacagccataatctggttccacttctgctttctcttcacttgtaaaactcaaagtccgtgtctggcttcttaacatttgcgcggtagcccttctcgaaatccttaggtagtatcacatatctgttctttcgcaccgcatgcataccagcttcctggcaaattgctgctatcngcattgttcaacataaaatcaaaatagtgtgtcattaataa

SEQ ID NO: 113408 - DNA, 379 bp, Arabidopsis thaliana columbia
aatcatctctctctgcctagcaacaatcctagcctttcttctcctaagggcacttctgaattttttctgtgccaaagacaacctaccaccgtctccgtggcgagttccggtaattggaaacctccaccagctaagcctccaccctcaccgctcccttcgttctctcagccaccgctacgggccactcatgctccttcattttggccgtgtcccgatcctcgtagtctcttcatctgacgtagctcatgacgtcatgaaaacacacgaccttaaggttgcaaaccgcccgcgattaaaagtgattgaaacaatcctcaacggtgggagagaagtggttttttccccttacggagactattggaggcagattaagagtgta

SEQ ID NO: 113409 - DNA, 374 bp, Arabidopsis thaliana columbia
gttggtttgtcttatccttttttagaggaaacaacaacaacaagggccggtgatgagattttttgtttgtggatccactttgactaaactgtctctactgttagggtttctgatgggaggctcaaacctaatcagacaaaccactatgacgagaatggagacagagttttaacagtgtagcccatataaaacccatcaaaatcaaatgacagatatttctcattttctaacgagacattgtcagtgaaactcatgaaacggccaaaagatgcaagctttgtaaactgtaatgaaactaaagcgtcgaattagattacctcagtagaagaagagagtttctcgaccgattttctcaactgggtcaaggcaagttc

SEQ ID NO: 113410 - DNA, 391 bp, Arabidopsis thaliana columbia
acccacccgtgcaagcaacaatattgccacgatcttgattagatccacgattctgggtcgggcaaaagtttatgttttggggatcgccagaggatccattaggtttagaaatgacagtagtgagaccaccatctgctaaaagaggattcgtcggaccaccgacacgaacaggatcattatcaccggactcattagcgaaagtacgccactcagaagtttcatcgattgagtgagattcaagcacgagaccacactctgaacaaactgtatctccggcggaatggtcaaacacaacctccgtgtgcctcttacagtccgaacaaaacgcgtgactcatagcttctctttctcttctcacaagaaaacccgttgtgacttattggactttgat

SEQ ID NO: 113411 - DNA, 379 bp, Arabidopsis thaliana columbia
gcggtcaagaaaaatcttaggcagtgtcgtcttacaaaaaaaaaaagacaacgtcaatggcaaaatttttttggtttaccatcaatgcttttgtgaaactctttgctattattttgacctcaatccaccaaattctcaatggtcagtggatcaatgattctaaacattgaacactaaacatatctacgaaaacagaacaaataaataaatttcttcaaccttcatttctcacaagatagaataatggcatgagttcagctgttgttatgcttcaccattctttttgtatctgtgtcccttctggacattgtttcagctcacttgaagattaagccatctttacctcaaattccagatccgcaatagagccttgcaccgt

SEQ ID NO: 113412 - DNA, 203 bp, Arabidopsis thaliana columbia
  unsure (1)..(203): unsure at all n locations
tttaacatnccacaccccaactacgagaaccgcgctgggtttgttttgaactgtttggaggctcactatcgaaggatacattaaggatggaagcaggttcaggatgttcaaccctaggctgattacaatatccagaaagaatggctttggagctgatcttgttcggatcgatgcacactccatgtgttcgcctgatttctatt

SEQ ID NO: 113413 - DNA, 395 bp, Arabidopsis thaliana columbia
  unsure (1)..(395): unsure at all n locations
cggggcgttcacacacangcaaaaaactatactcacatttgctttgaaaaaacggaaactaaaagggagggagaaaaaatagtttgttggcgcccacaaaaaaaccncatatcaactgcctcgtgtgagcgaaatggcgatggaacgattagaataggattgaagaagaggaaactagaccggagcaacaggctagcttctcagctttttttgaaaaaccgagggtctcattggtctcccaaacactattttcgcctgaacgatgaaaatgcggatatggttccgctgaaaaactatggggatgctcaatactatggtgacattaccattggtactcctcctcagaagttcactgacatctttgatactggtagctccaatctctggataccatc

SEQ ID NO: 113414 - DNA, 360 bp, Arabidopsis thaliana columbia
  unsure (1)..(360): unsure at all n locations
cacgcaaccaaaaaatttgatcactttttttacccacaanaaacaaaaaggggggggaaaaaatatttttgcgtggcacaaaacacaanganncgagtatgagctaaagagtcttgaatggaatagaaaagagatagagaagaatctcctggaagcaataaaagaatatcgaatcatggaacaggacttagatgaactagaagatgaacatgatcaagccatttccaaaacagaaaagctagaggccgacgtacaaaaactggattagtagacatggggcataaccacatatacatatgttctaaacatttggattttggcagctacaagaactaaacgaggaaaatcctcaactgatgg

SEQ ID NO: 113415 - DNA, 244 bp, Arabidopsis thaliana columbia
aaaacctctcaaacttaccacaaacgacctccacaacaacctttcctatccccaacacaaccttataacaccaactttactctaaccaatcactattgcccggctgggtctctacatcgtaacccaacccaacccaccacaccccaccaactacacgtataaccttccaccaccacacatcaaagagagtggctataaagacatacatatcctctaccaaataagaaaacctaaaacttcatca

SEQ ID NO: 113416 - DNA, 376 bp, Arabidopsis thaliana columbia
  unsure (1)..(376): unsure at all n locations
attttgattgagctagatcttttaatgtataatttaacaaaaaagaaggggatattttgtattttctggttgagcagagnatttatgatttgaggtatgagctagagagtcttgaatggaatagaaaagagatagagaagaatctccgggaagcaataaaagaatatcgaatcatggaacaggacttagatgaactagaagatgaacatgatgaagccatttccaaaatagaaaagctagaggccgaggtacaaaaactggtttagtagacatgttgcataaccacatatacatatgttctaaacatttggattttggcagctacaagaactaaaggaggaaaatcttcaactgatggaagttaatggaaaagact

SEQ ID NO: 113417 - DNA, 379 bp, Arabidopsis thaliana columbia
gtgagaacaagctcagcaccaatggatctcatcgtcactctcctctccaagctagtgtacgaaggcatcgtcattataatcctgtaccctttcatagcagccatgaaagccaaactgattcccatgtttcctgaagtaggctctatcagtgttgtctgaaaattaagcatcaaattcagagggtaagaaactcttgattcaccattaatttgagaattaactaagagaaaagaaaaaagctatttacttttccagggatgattagttttttcttctctgcatctgcaatcatggctatagctggtctaaagacaggaaatggaacaaaatcaatacttgctactagtgcttttgaaggatttgaagactaagatttcac

SEQ ID NO: 113418 - DNA, 415 bp, Arabidopsis thaliana columbia
  unsure (1)..(415): unsure at all n locations
aaaannccggggggggccacgcgaccgngaancctaacaaaggctctactttttcttcagataactaccaaaaccccgttgcggtgaaacattttttgtgttcggggtatnnctccggnaagaaacgaaacgatcgcgatgacgacgacggtgacgccttggttgcaaagaaatcagcactggcggtgtgtgatgccgaccctgcaacggccatagcgaatatccgacatgagtttggggagcacgggggagtaaacatgtccatcgaagcctccgccaccttcaccgtcatggaaccggataccatgaggcggatgttcaccggagaactgggaccggacaacgacttctacgtatacagccgacacttcaaccccaccgtgctcaacctcagccgacagatggctgctctcga

SEQ ID NO: 113419 - DNA, 368 bp, Arabidopsis thaliana columbia
  unsure (1)..(368): unsure at all n locations
cgcaaatattttacgaaattttatactattaataatctaattccctaagtgtagatattttgctttttgtacatcatatattnntttgcctaaaattttatacgagaaattttatactattaagaatcttattgcctaaaattaaccacttctttttttggtgttctatttcatgcaccgatattaaaaatcgtaggaatatcgatggccaaaataaaataaaatggaagaggatctaaactttgtattttatactggtcctagtcctagaaaatcgaattattcagtgttttcattaaatgcatagttcaacatattatttggcatgatagattgtctgcaaatgacacatcacttttcctttctgc

SEQ ID NO: 113420 - DNA, 358 bp, Arabidopsis thaliana columbia
  unsure (1)..(358): unsure at all n locations
ccaacaaacccggggcgtcccacgcgtccgactagattcactacacaatgcattaaaaacccaccaaacccgncggacgcggacgaaaacatgtttgtgggctcaaacaacagcacactcaacagctacaatcgaacaaacctcagacttctccgccaaaccactcaccaacgctccatccgaaaaaacgcaatagcgctaaccaaaaacaacgaaaacccaaactcggaactctaaacaacaaacccaaaggctcatatacaaatggagaaccacaaccaataaagaaaaacaaccaatagaactccaacccacagtaccatgtatgccacaccacaaaatgaacaaaaaacatacc

SEQ ID NO: 113421 - DNA, 367 bp, Arabidopsis thaliana columbia
  unsure (1)..(367): unsure at all n locations
aaaaaatttaccttaatttgaatttcaaaaaaaaaaaaaaaangggcgggaaaaaaaatttttgtttggctgtatcaaactaaaggggaaataattgaacaaggaaaagtacaaaccaaataagaatacacattccaactaaaaagactaacaatggtagctcaagtggtgtactaagacgtacctcctcatctctgtgcatgaagttcataaaaccttcatggtgattgttgtggtgagcacatttgggagcattgactggaagctgcaaataattcggtccaaggcgatgtctctgagtgtcaccataagcaaagatcctacactggagcagcttgtcgtctgagtagtagattccaggaaccac

SEQ ID NO: 113422 - DNA, 282 bp, Arabidopsis thaliana columbia
tcaggttacctctgaaaaaatcgaccacaaccgggcacacgacccaaccaacgcttcgaatcaccaagccaatcaactaaagcaacgaactggcatcgaccagctacaacaagaggtccttcaagtacgcatgggtgtaggacaaacttaaggccgaacctgagcgtggtatcaccatcgatattgctctatggaagttcgagaccaccaagtactactgcacagccattgatgccccaggacatccagatttcatcaagaacatgatcactgatacctccc

SEQ ID NO: 113423 - DNA, 380 bp, Arabidopsis thaliana columbia
  unsure (1)..(380): unsure at all n locations
ggctangcacattttgtctaattaagcaggattttcacctgccacaacgggtcgaagtattttagatggttctacgtctnctgcagcatggaaacttcattactatgagtgggctatgcaaatttttgaacggtacaatataagtgaaggagcttgtcagtttgcctatgcagcccttgagcaagtagatgatgcctataatttcatagagatgactgaggaattcgatccaactaaagcagccacctacactagaggacgactgtgggcaaatgttttcaagttcaccttagatctcaatctcttgaatgatgcctactgtgctataatttcaaaccctgatgaggagattaagcgcatctgtttgaggcgcttcatat

SEQ ID NO: 113424 - DNA, 413 bp, Arabidopsis thaliana columbia
  unsure (1)..(413): unsure at all n locations
acctaaaaaacagggccggcgcactcaacccgagcataaaatgtaaatgtgattgaattcaaaactaacaaanaancacgggccggcaaaattttttttttttggggcaccaaatgcaaagcgcatatgggttcaaaaggttcatcacttagaatacaagctcacacgagcattcgatcaccaagacaaattacaggaattcacaaatctgtctttcattacacagtgtttttgatacacataaagctcataaagtacacatatttctatttttacattcattagttgaaagggataacaatatcgccaatgttgttgtgccatggatccgccaaatgagttgccaaattctacaatggtcctgtccccgggaaaaccgactgttgcacacagaatcctacaaacgccaacaa

SEQ ID NO: 113425 - DNA, 372 bp, Arabidopsis thaliana columbia
  unsure (1)..(372): unsure at all n locations
cttaagtgaaaggaatgccttataattcatacgggatttatttggctatgtattgttccattctatcttttaggtcctgcgtcacctcgatggttatgccacaatattcttaaagcttatatgcgatgtatagacttctgcaaccatgacatatttgtttactttatataaaaataaaataatataaaactataaaaaaccaaatttattttcttttagaaagataagggaatgcgtaattcgacaaaacaaggtcttcttttcacgaggtacgcctatcaatttgaatttctgaatcgaccatagaccaatcgcctttttttttatattggaagatngaatacacccacaattataagctgcatggtcctt

SEQ ID NO: 113426 - DNA, 406 bp, Arabidopsis thaliana columbia
cgaaaaacccggggcgtcccacgcgtgcgcggaaaccagacagaaaccgacttaacaacggctgcttaatcgggtccgggcaaaattttctgtgtttccttacaagagctgcaactcacatactcatccgggaaattaccatttcaccctcgagacctgctaccgctacatccgaggcaagtctcctggccggtaatcaaatctctcaacactgccccagatctcctccctactataatcggctccaattctgtaaaaaacaacgccgtggaaaacaaaggtgcttgctaatatgaaaacaaagcttgataaaagctcaataacaagtacggttccgaatactgcagctgcacactacacattaatgtcgataaggcacatagttggacgtgcatcggatatatat

SEQ ID NO: 113427 - DNA, 381 bp, Arabidopsis thaliana columbia
ataggcgtgacttgcacgttatttctccaaagcaaccaaattcttcctggtctgtgttcttcatttttgtttataaaagaccattctctaaaaactgactttgtaatcttgtatacctttctttcttttacttttgtttctattaaaaaatcaaaatcaaacttccccctattcatccaatcccttacaacatcatgcttacctcttttattaaaatatctaatgttccagaagaaaccagacattaagaatgttgtggaggtttacttgtcttcaagtagttaggatttattatcctagaattgtgcatgtttttgttgacaaaaattcgtgaccatcctttgaatacatgttcgattgattacatcctcagcgtgacaa

SEQ ID NO: 113428 - DNA, 376 bp, Arabidopsis thaliana columbia
accagaaatcatgaagttcatctttcgttatcttctccagtttctggctgcttctcctagctttcgcgtggaatacactcaccgcaaagtccttcgaatccaccatccctttaaatttacaaaacagtggattggtccatgatcattttcgtatgtatatatagatatttattgacttaccaacgcactcgccaaaatcgtctcgggcgagtaatccatttttagaaagcgattcgaatcgcttttcaacttttttccacatctgatcgcaatcgcaatcccaatcgcagacgcagctgtttcctctcgtggttttattgataaactgtaatccttttaacgctctttgcgcactcgacgttgatcgctgtagttt

SEQ ID NO: 113429 - DNA, 377 bp, Arabidopsis thaliana columbia
gtgagaaccgcataagtttcaccatctgactccaagagaataagcacaggtacagctggtccttgttcagatacaatacctggaacctaatgacgttttagcttacatatggcaagcaaaactaacatatacaatgaccacaacgagcgagatgatactagttttgaagatgattagataccttttgaccagtttccttgtcgaaaatatccgctttgaatttgagaaatccaattcttttgccaaacatatcaactccctaaaaatcataaactaatcaagaaagctccaagattctatatatgttctgatcactgatcataatcatcatcagataattcattaggatcaagagtatctcaatgtgcttttatata

SEQ ID NO: 113430 - DNA, 385 bp, Arabidopsis thaliana columbia
  unsure (1)..(385): unsure at all n locations
cgcgaccgtctatatccagactttgtttccgtttccataacgctcnaaaggncgccgggtggatcaccaaaggttttgggtttatactattcccggctcaacacatggcggaggaagatgttatcgctatccccgtgcagccatctgaccacaagcgcaagcttgagaatctcgaatcgcagatcctggagcagtaacacgcctgctcgattgataatgacggttctgtagatgatgacaaaaacacatcagattattgtgagccaaaacgaccgaagcttgacgatgaagctgctgatggtttagggattgggggaacggtagaaaacagtggtgatgttgaatccaaggaggagggaactgagaaacccattgctcagagaga

SEQ ID NO: 113431 - DNA, 206 bp, Arabidopsis thaliana columbia
atcgaggcaaatccaaattaagttgtcacaacaatgttgtctcttctttgttctgattcttctctattatcactcctctttctctttctcatcccttgtctctttatcacaagctatataggcttccctgtgttcttgctaaaactcatcggactcatcaaaatcaaagctgctcgagacaacgagaaacgtgatgagggaactta

SEQ ID NO: 113432 - DNA, 377 bp, Arabidopsis thaliana columbia
ctttgcatcagtcatgggagatgccacgaatctgagaagaatctcatacacaacttgaacatgatgctctgctggctccaaagaaggttcttcatcatccatatcatgtatttcaaggattttactctcgtgattcgcagaaggaaaagttctaaacagattaaccgctaccatcttcgttaactcttgcatcggaacatcgttaaacttaaaaccaactggtgccacataatcaacaagctcaagcaatgtctgcctcttaatctctttctccttaaggttcttagaccgatcacttaagtcaaaaaccacacagcacatactcaacttcccgataaagagattcggtttctccgatataagaacatctctaaagc

SEQ ID NO: 113433 - DNA, 200 bp, Arabidopsis thaliana columbia
  unsure (1)..(200): unsure at all n locations
cgaccctggacaaattccacatagattaaaattcgcccaattccangagctgcggggtggcattcaattttttgtgtccncaccaataccgactngtctcgccgtaattcttcttctgcttcatcttccccttctataagatcatcgcaccatctccgaccaaatcctcacgccgatcactccagaatcagtttccctta

SEQ ID NO: 113434 - DNA, 279 bp, Arabidopsis thaliana columbia
  unsure (1)..(279): unsure at all n locations
ccggaccgaaatnccgggggggaccaacgcgtccaatggcaagcttatccaacggaggaaaacgccgcgtcagttactggtacgagccaatgatcggtttcttctactacngcgttaaccagccaacgaaacctcaacgaatccgtgtcactcacaacctcatcctcagctataacctccaccgccacatggaaatcaaccgcccaaacctcgccgatgcttncgatttcgaaaaattccactcgccggagaatatcaacttcctcaaatgcgtcacgc

SEQ ID NO: 113435 - DNA, 403 bp, Arabidopsis thaliana columbia
  unsure (1)..(403): unsure at all n locations
aaaaacatnagaagaaacagcaggatccttgagaaactcgtccactcggataacctttgtgaaaaacttctgtttcgcattggctccacggagatcccgagaaaaccctaaggagcaatggcagatccgacgactacaacaaaagagagtcgattaaacagagaaggagataatagtgaagcgttaaaggaatagatagatagagataccatgtaattggacaagctacgtgaaaggccatcccatatatcctcaccccaacaaaaattattcctctcgcctccaaacggaaaaaaaaaaaaaaaaaaatcgagattttgatttttagagatcgcttctttctctttttttttttatatttaatataataatataagggaccggtaatgttaataactctatt

SEQ ID NO: 113436 - DNA, 397 bp, Arabidopsis thaliana columbia
  unsure (1)..(397): unsure at all n locations
gntccagaatacacagaacctgtggagccggaagttccagaagagccggagctgccctcaccttttgagcctgagattccagaagagcctgagattccagaagagcctgaggttcctggagaacccgaagttcctgaagagcccgaagaaccagaagagccagaagggtcaacatttgaatttccatcatggtttccgagctttcctattcccggtgttaatggcggtttgccaaagactgaaaagacaaaacctacatcaacagttgaagaggttaacgtttctaacaagaagccatagatcaatgggtaaagaacgtcaaatgattatataaactatatatgcaattatagttttggtttgtgtttggttaaagatgagagattacatatgtatt

SEQ ID NO: 113437 - DNA, 406 bp, Arabidopsis thaliana columbia
tctacttggaccaagtgtgttcttaattacaatctcaatttccttgcaagcttcatttcgtacaaaatgaatagcagtggctaatatgaaaaatattagacgactcatttgttcaaacttgaaatatttgttgtggtaacaaggacatcatcatgtagtatttatagtttctttgtgtgaaagatgttttttctttacttagcaaataatttgttaaaagtgtaagctaaatttagaggcaaacatgaatgaagaaattaaaaatttggtcaaaagagagtttagtgtcgaaatttatggtttaccaataagattaaaccaaatgaaagcagcaaacttattacaattgacatcgaaacttatcaacagtttcgataagtttattggaaacagtttcgaaagcaac

SEQ ID NO: 113438 - DNA, 398 bp, Arabidopsis thaliana columbia
taccgccccaggatccccggggcgacccacgcggccgctccgtaggaaaggggaagcaaataaattatcgtatcccactactttcggagctcatcgggctctataggtctcttagacatatcataacctaataaaatttatccttttctaaaaatggagctaaatagcattaatgatactttttatcgccattctacgattcactacctctcttatagaaaaactatagaaattgtccatatcatagagaaagtaaattacactgtcatctatctattatatgatacaccatcattaaactctattcttatggaacatatatcaccactcgttctgatccataaaatggtattcgtgatattcttacttacaaccgtggaactgtcatagaactagct

SEQ ID NO: 113439 - DNA, 393 bp, Arabidopsis thaliana columbia
cttattcttcatcatcgaccatacgattacagtcgtcttagtttaagatcttcgtaaagtgaataactgttcatccctcgattattctctatgataaactgcgtttaattctttcaaaaaaaaaatcatttcttgcccaagtttggatctttttggcatcgttaatctcaattctcaagacagttagattgctaggtgctttagcggcagtgaacgatgatcggtcataggatctcaagattggggtctactattgttaaacagctcgcaagagagggatatttagcaacatacgggacaaagaatctacaccggtcttatggccactacttgcagtctttgccagtggtaccaaggcaagctaggacttctcaggaagcctggtttttgaag

SEQ ID NO: 113440 - DNA, 408 bp, Arabidopsis thaliana columbia
  unsure (1)..(408): unsure at all n locations
tcggtttgttttgttagtggcaaactagtagtgttttctacatttttttttgtccttcagatgttaacattggtattattaggnnnnctctggcttttgattatacctggctatgttgattgtaatctgacgaaggttttaaaaaaaaaaataagcacgtaaattaaatgatattttatattttagattccagatatatgattatttgaatggaaataaacgacaaaaattagtggagcaatgttttcgtattatctgacgtcttcataatattttaatctaacaaaagttggaatttgaccgtttaatgtgtgcttttaaaattgagagattaatttggataagatatggctcttttctttttgtaagtggagatatttaactaattagaatgttacattagttttt

SEQ ID NO: 113441 - DNA, 264 bp, Arabidopsis thaliana columbia
tcgatcaaaccgatttgaaaccatttcgaagtacaaatggttgtacatgtgttatcactttttacataaccgaaaaaaattgagaaaagaaaaacaaaattcgatctgaatccaaacccctaaaccggaatgtccacccctaaccaaaacattgaagagaagtgcaaaaatgtgtgttctgttttgagttcttttgacatggcgtttcaatatctagtttggttgaaattattcagtttcttatatccaattttcgttataaaa

SEQ ID NO: 113442 - DNA, 395 bp, Arabidopsis thaliana columbia
cacgaagacgcttgagcaagactgaactaaagttttatgcaaatgggaagaaatctctgatatttttggcgatgatctcttcattcgcgtcattatttcaccggccagtaaaaccaccaaaccgggaaatcgaaccatctcgatgtcgtaccaagctcagtttctcggagactccaatcggctcttgcaggtatgatagtgttcaaatccaaacttaagggtctaaatttgaactcttttatcttttcggttttaacaattcaagcaataaacttttaaatttgtaaatttcaaccacaacaggtgatgcagaagagtttccctgagttaggactgacgaagaaggactgcacagaaatgagctggatcaaatcagtgatgtacattgcaggttt

SEQ ID NO: 113443 - DNA, 393 bp, Arabidopsis thaliana columbia
cccccggaaaatttgttcccctttttcgaaaaactaataattcgtaacttcatatccaacatgtttaggtatggaggcaacttatttctttcattctctcttttaaagagtacttgctaaaccctagcttttgttctatagagaatccaagaaccaatcactttaaaaagatgagcactcttgaagaatctttgagatctctatcgttggatttcctaaacctactaatcaacggtcaagctttctccgacgtgactttcagcgttgaaggtcgtttagtccacgctcaccgttgtatcctcgccgcacggagtcttttcttccgaaaattcttttgtgggacagactcaccacaacctgtcacaggtatagacccgacccgacatgggtccg

SEQ ID NO: 113444 - DNA, 423 bp, Arabidopsis thaliana columbia
  unsure (1)..(423): unsure at all n locations
ggagactcacgcgtgcgcaaaaacaaattatttccacttttcttaaaaatttcgtccatgaaacacgttcatctttgccgtttttgtcttttattcgnnnncactctctttcaacgcttaatttcatgtttcttcgattttccgatactgatcaaaatcgcagattcgttcttatctctgtatttcttagttttctgcgatctccgacccgtaactgtcgatctagacgacggagaaaccacagtccatttctggatctccggccaccgtagaatctctcggcagaatctcgtcatgctccatggatacggaggaaactccaaatggcaattcgttcatcaagtctcggatctctcgaaatcgtttaatctcttcatccccgatttggtcttcttcggaaaatcgtattcgaagaatagagat

SEQ ID NO: 113445 - DNA, 397 bp, Arabidopsis thaliana columbia
  unsure (1)..(397): unsure at all n locations
tctttgctctactaaagccaagcaactattagttggtatgtaaaanggagtagcattgactgtttgtcggtatatnanagatataccccttcataactccctttaaagccaacacgaaaaccgtgttcataagtcgttgattgacttccatctcttctttgtctaagtacagctactggaagattatcaagaatcctgtacaacaattcgcgttaaggtcaactatatctagaaaatatagtaaatctatatgacacagatacaaagaacaagcatgctataactactacttacatattagccctgtattcatcatcaatcttttccttgaaattcttggtggagtcagcattaagtttaacacggcaacctactttgcagggctgatcttccagca

SEQ ID NO: 113446 - DNA, 124 bp, Arabidopsis thaliana columbia
  unsure (1)..(124): unsure at all n locations
gcaaatagactattttcgaattgccatagaatcatattgtttttatcgggctaatattggttttttagaggtnancaacttatgcgatcacatatcatgtagcattagcattatttagtcaggt

SEQ ID NO: 113447 - DNA, 334 bp, Arabidopsis thaliana columbia
  unsure (1)..(334): unsure at all n locations
gcggtctataagaactttattgatcttaaataacgtttatgctttnncttacgcatatatgggacctttttgaacatattcggtcaaanaaatttgntttatatgaacacaattatgtatattgattgtccatttatgaagaaaagaataatcttatgcttcacaccgttgacaaaaaaagataaacgtatgtcattaaccctctctttttctggtacatgtcagagcaaaaaaaatttactaaaaagttattttgtttttccttggttgtctataaatctactgaaagctttaaatgccattttattattttcaagaatcggtctttttacac

SEQ ID NO: 113448 - DNA, 375 bp, Arabidopsis thaliana columbia
  unsure (1)..(375): unsure at all n locations
ggggcgacccacacctccnnaaaaatatatagatacaaacaacaatcacnaactaacgcccccaccgggtctaattgaaattattaagggtaaaaacccannnncaaaaaaatcacaaaaaccagggaacatgacccaaacaaatcacgaatagaaccaaaaaaattgtcgctagggaaccaaacaaaaacttaaaaaaactactgtacaaagactaaaaacatagattccacaaaatcataaatcaatagattacatatcttttttatttaattactaataaaaaaaatacgcattctaacgaaaaattacataaatcctttcaaataacaactactatatataaggtactcaaaccatctagatcctaaaatt

SEQ ID NO: 113449 - DNA, 412 bp, Arabidopsis thaliana columbia
  unsure (1)..(412): unsure at all n locations
ggcggccaagnaaacatacagcagntgtngnagaaaagagnaaggcaggcccagcccatanaagagatctatagtacgcataagttaaggattttcaatagtcaatgagcatgcatctaaaaagtgttagcatataatgcacatgattgaaagggaagaaagatagtttaatcaggatattgatggtaagcctctatcatatttcgttgaactgcttgccaatacatcaaaatccgcagacaccatcagcaccctttgggttgttaatatccctgcgacatatccccggggtgtttcttgccattgaacctgtacattttgagacaacaattagttctttatacaattgatggaaaaaactactttagaaatctaaaacatattctaagaatctctacgtaatacaaaagtt

SEQ ID NO: 113450 - DNA, 395 bp, Arabidopsis thaliana columbia
  unsure (1)..(395): unsure at all n locations
acaatgttactgcttttaactatgtcttagatatacgtggttgattctgtttgttattggtagtttctgtttanagnctttcactacaagaaatatctatattattaacgagagaaaagagctattatatgttatctatagcgttttcataaacgctatgttatgcccctgttatggtagaccccctacatacggtagctttttgtttgtatgctctggtagatgattctattataacactaatcaaatgctttaatataatttcttatagaacatgtttagtgctgctttatattgtttcacaacacttttattttgctattttgattaatataatttttctatttttaccctatttacagaatttatgaaattgaatttatataagaaaatta

SEQ ID NO: 113451 - DNA, 364 bp, Arabidopsis thaliana columbia
  unsure (1)..(364): unsure at all n locations
cggggcgacccacgcggcctttagngtgagtgtgcggatgtatgagttgataaagagacttgaataagtggtcnccatgtaattttcagatgtttacggtaaannnaataangttngaactaatgatccttgaataatggctggtggacttgcactgagagagtcgatgaccaatacatttgtcacattagtgatcgttctcattgtgccttagttgtgatatgcataattcgaaaggaaacaaaaataaatggcactctactggaacttacgattgtcagtcaagaactggaggtccattcagaacaatgaggtttgatgcagaacaagttaatggagccaactatggtattcaaattgctct

SEQ ID NO: 113452 - DNA, 188 bp, Arabidopsis thaliana columbia
  unsure (1)..(188): unsure at all n locations
cctccnctnccttcccaaccacccncaatgctaacaataacattactcccaccacaagcaactgcngaagagttaactgcatacaggtgtggcctccgattggaaagaagaagtntgagactctctcttaccttcctgaccttaccgattccgaattggctaaggaaattgactaccttaaccccaac

SEQ ID NO: 113453 - DNA, 367 bp, Arabidopsis thaliana columbia
  unsure (1)..(367): unsure at all n locations
tcttaatcggatttcaatcctgtctacataccaattttagcccccnnagagtttatgggacattttgggactncncaaaaactttcccatttatatcaaaactctcacatatnattctcaaacttaattttattatctaatcattttttcatctaaacttccataataaataccttcttaatccccatttttcctaattaaatcatattttntcttattcatcttccttctccacataatataacttttatccctatctcaaccaacaaatctcctttaattctccatctactcaacccctctcttcaacctcaantaatttcttcatccatatacttcttattaactacacctttttaattctcaa

SEQ ID NO: 113454 - DNA, 408 bp, Arabidopsis thaliana columbia
gtcgtttacgataaaagaagaatagcaaaaagacataagacttgttcaaaaggagatgagattggttggctgttggtgtttatagccacatataaaattaccttttttatgtgattttttgtgatcatttcaatagatatatataaacatgaaaaagaaaattacaaaagaagaaaagcagagactttttcaatgcgaatatattggtttttggagttcattggctttttggttaaaacctaaagtttgatgtacgtatatcaacattatcacctttgctttttacgttgaagtcggcactattttatctctttcggatttgaagtcggtactctttcttaactgttgggttttctttaaaaaaatggtacacaagtttataggctgcttggattttcttgtaaatag

SEQ ID NO: 113455 - DNA, 215 bp, Arabidopsis thaliana columbia
  unsure (1)..(215): unsure at all n locations
cggacgcgtgggcaacaatgaacatagtgagatggttgcaagtgtgaagagtaccaaagagaatgttacgcatanaangctgaatccaggaaaataaaacggngctntttcggagagaaacaacgctaaatcaaacaaaattagttatttgttaaaagctatagaaagttaatttttccccatatatgggctataatttttttttaaaatggggt

SEQ ID NO: 113456 - DNA, 410 bp, Arabidopsis thaliana columbia
ccgaaaattctcacaagtcgtctgcaaaacatatcaagagaatcagaccgacagtaaaagctacttggaggctacgttgaaagctaaagaatcttgcctggttggtgcagataaggtagaagtggaagacagtaagtccaccaacaaaccaaacggaaacaaagcagtagagaccaagaacacctaatattaagtcatcagcgagaacaacatagaattccccatggactttaagcatgctgacccatgagaagacgaaaacgtagatgcagaggagtgttgaacatgataagaaacagacgaagaatggatagttacgctgcaaaacaaaagcccgtagataacatatcaactcatagatcttactcagttctttgtctaggaagtgagaattaatagtaagacttacc

SEQ ID NO: 113457 - DNA, 387 bp, Arabidopsis thaliana columbia
tgttagctccctttggcatatcgcaaaagccatacatgaacttgagttctcttttggagttatatcaaaaatgagggcaaagggcaaagcatcagttcgtgttgcagacattctaaaccgcatgcaagtggaggaacctgtcaattcgaatgatgtgggaaggcctgaagtggatacactcattctattggatagagaggttgacatggttactcctatgtgttcccagttaacttatgagggactaatagacgagattttgcatatcagcaatggagctgtcgaggtcgactcatctgtgatgggtgctcagcaggagggaaaaaagatgaaagttccccttaattcaagtgataagttgttcaaggagacaagggatctcaactt

SEQ ID NO: 113458 - DNA, 440 bp, Arabidopsis thaliana columbia
gctccaaaaccgggccggacccacgcgtccgcatatgattacctgcaaagaggaaggagaggtctatctcgtctttggtggtaagcacacgcagggtttcagcacatgctggtacaacaggaaaaagaacaaaagctgctacgagaaaagatgtaagaggtagtggttcattcactaagagaacagtgaagaaggaagaagaatttggagatgatcatgtagagagcgcaagctcgcctgaaacacttaaaaagtttactcagaataaaagacagtcttcatatgcaaatcctaaccagtccctctctaatcgaagaaacaaggatgttgatgaaccatgggattccaaattacatctttggaaacctctaaattttcttgtggatgtggcaaacggaacaaaggacccaaaatctgagcttggaaacgcatcccacaat

SEQ ID NO: 113459 - DNA, 396 bp, Arabidopsis thaliana columbia
atcggtgaattctcttcttcggcgttataaacgctgtcatcgcctgagcggacttcacgtgttttattgttcttcttctgcttcgttgtaaccatcgacgcttcgcttgatcgagatttagttcgccggaaaacttcaccgaacaacaaatctgattaactaccagctcaatctctggtaagccaaactttagtttctcacatcgtttgctttttccgagtttttctcttgctcgatggtttgttcttcttaatgttgtgattcgtgaagttgtgaagatcgatgataaatcttcttcgtgtttgtttgcgccaaatgattaggatattattgaaatacgaaatctaggttttctatgtgttcatttctccttactgtttccgttttctgtgctca

SEQ ID NO: 113460 - DNA, 365 bp, Arabidopsis thaliana columbia
gttgaattcagtttttaaaggtgatggctagtaatgtatttgatcatccacttcaagaattagagggtgaagataatggtgtaaagagcgagaaagcgagtttattggaaacatctggttctgtagatactactcctgaggattctggtcatcgttcttctgatgggcataggggactagaccactgtgaaactgcacctgttggtctctatggagatatgcttatcaatgacagtgagattcagtactctcggtccttgacagagaaagggtctcctgcgattcataatcttaaattagatagattatcggagcaagaaaagcaaaaactcattgttgagctagtcagaatacaaaatgaccgg

SEQ ID NO: 113461 - DNA, 375 bp, Arabidopsis thaliana columbia
  unsure (1)..(375): unsure at all n locations
ccggccggaatccggggcgacccacctccgatcacctgctgtgaattataagaaagagacgttgacgnnngggtattgtggatgataggcgaaggcaggtccacgtatatattatttgcttgggaaggcataattctgcttaagttgtctccatggaaagaaaaaaaaatattcacttgaaaaacaaaagaaaaagaagattggcagaagtgaagacatattttgattggttcaattatcgctctctagtctcattgttctattcaactacacatataatactattgttcatttctgcctctaaaaagaagaaggacgaatcatgccgatgatagtactgatcaagatatgagtatcaccgttaagtagactaaa

SEQ ID NO: 113462 - DNA, 392 bp, Arabidopsis thaliana columbia
gaaagtatctctcttttttgtttcctccgaagtcagtgagagagagaagaagaaacgtttgagttctgatgagttctggaggaatcgtggctggaccaacaggagcagcatcagctccttcaagcggcggtggaaacgtggagtggcacgtcagaccaccgaaccctaaaaacccagtcgtcttcttcgacgtctctattggtggtatccctgctggtcgtatcaagatggagcttttcgctgacattgctcccaaaacagctgaaaacttcaggcagttctgtactggtgaactcagaaaggctgggaagcctcttggttacaaagagtgtcagtttcacagagtcatcaaagattttatgattcaaagtggtgactttctcaagaatgat

SEQ ID NO: 113463 - DNA, 390 bp, Arabidopsis thaliana columbia
cgtacaaagtagttgtacagtatacaacttattagatagtatggcgagacaataattagaaaaagattggactgcgtgaaaattaaaggaaaaaagattcatagccaaatcgtaagtaaataaaaattattacttcttatgatgaagcaaaatgtttgggatatgaaataatatgaacaaaagaaaaaaatcattaagttcacagttgaataagtggtgatggtctaacggttttttaaataaatgaaatatattttaaacacgatattatcaacgattgatattttattagttttaaaaatgaatacttaaaatcactagttaaattctatttttcttttaaatcttaaatcttataacaaaaatccgaaattgcttaacttttacata

SEQ ID NO: 113464 - DNA, 392 bp, Arabidopsis thaliana columbia
atgaaattcaataattgaaaagaggttcatgtaatgagccgagagaagaatataaaagcagtcaaataattttttcaaaaaactatttgtatattaaaaaggtacaaagtaaaaaataaatttaagaaggtgccatcattggctcctaaagaacaaactacaaagaatcaattcctcatgatttgatctctcacaatccgtctcctttatgtggatgcggaaaaacactctccacacgtttcatgtaaattttttaattaaatttctaaaaacaatagagatactattcgatttgttcttgaattattcatgaatacatatagtggcaaccttagacactagccacgtcaaccgtacatgttatatcatatatttttatattggtctatcta

SEQ ID NO: 113465 - DNA, 390 bp, Arabidopsis thaliana columbia
atcgagagacatttggagagcgaaagcgttcgctctatggttgcttagatgaaaaactgcgacccgtgtgacttctcctaacaagaaacgatttctcgatacgctaatagataactgggagtctacgtgcaagcaccattccctggatactatctaaatgatgttaggatacgggatacacttcgtcgattttactactcctgcgccaactttttatagtctctccttgtgagattcgtcggttagtggagagtctcttccgtgccgaccgtcaacctttacctgcatgctgtctctgtactacgcattgctctataatgacggtactatcctggtttccatcatctatattgactgcattagggagactctttaccttggcttttgctt

SEQ ID NO: 113466 - DNA, 392 bp, Arabidopsis thaliana columbia
tcattacctaaaaggcaaaaaatattaattttttaaatattattatttatatatttaaacttcataaaacattattaatatttgaatttataaaaagtttaatctatcaaaaataattaacattattatataatatatagaattaaaaaaatctcaaaaaaaatttcgtcatattttgtgattcgaaattttaagaatgaacatatattaaccaattgacgaaaaatgtgtgggttcaacgtcccgcaacgactaaaatattttgacaatgattcataaacatattataaataagatcaatattaataaaataaatagttttttttttggacgggtttggcaggacgggtttgacaggacgttacttagtaataatggtaaactataaaata

SEQ ID NO: 113467 - DNA, 390 bp, Arabidopsis thaliana columbia
attaacttcatcttttccctggagaaaagattctctaagccaagctaggcgactttctaagctggattgggacatctcctctggtaagtcaatggaaacgatcaaatcttttagtctgttgtattcctgggaaacatttgtgagctctttcctctcttctgcaagtgaccttactttttcaacgatatcaaaagagtgaccttcttcaggtgtatatatgtttgacaggatagtttcaatattttcaatgatagagttcctcaccgataacatttcctgatatgatgcaaccatagcatcggattttgctaactcgcctttgtcgagttcagattgatccaatgctgttgacatctcttgtagtttcgtcaaacactcttcaagttcttt

SEQ ID NO: 113468 - DNA, 345 bp, Arabidopsis thaliana columbia
aaatacttttacgaaaaaagcttttaaaacttatctagtttcgtttgatacacatttgaagaaagaaatggcatccaaccaacagagctacaaagctggtgagaccagaggcaaggcccaggagaagactggacaagctatgggaacgatgagggacaaggcttgaggaggccgggacaagacttctcaaaccggccaaacaggccaacaaaaaggccatgaaaacagccaatcaagttaaaaataaacatcttaaactggccaaaccggttaacaaaaaggccattgaaccggccaatcaagaaaagaaaaaacattttaaaatggccaaaccggacaagaaaa

SEQ ID NO: 113469 - DNA, 389 bp, Arabidopsis thaliana columbia
ctaagttcatcttgttggctatgagtgggaagccgcttcccatccatggagatggatctaatgtccggagttacttgtactgcgaagacgttgctgaggcttttgaggttgttcttcacaaaggagaaatcggtcatgtctacaatgtcggcacaaaaagagaaaggagagtgatcgatgtggctagagacatctgcaaacttttcgggaaagaccctgagtcaagcattcagtttgtggagaaccggccctttaatgatcaaaggtacttccttgatgatcagaagctgaagaaattggggtggcaagagcgaacaaattgggaagatggattgaagaagacaatggactggtacactcagaatcctgagtggtggggtgatgtttct

SEQ ID NO: 113470 - DNA, 391 bp, Arabidopsis thaliana columbia
ttttaccattcgaaggatcggatcatagacccctagtcaccaagttttgcaataccgtggaacaaagacgaagtcacttccggtacaataaccgtatgttttttcgggaaggtttcagggacacgctgataagaagttgggaggcaaatggcccacatctctctttggataccagattacgccaaaccagaaaacagatggctctatggaagcgtcagaaccaattaaatgcctcagtccgtatagctacacttaagcgagaactggatcacgcatataccaacggaacacactccacagaagaacttcatggaattatcactgacctgaaccaagcttatctcgatgaggagcatttttggaaaatcaagagtcgaaagaactggatgaa

SEQ ID NO: 113471 - DNA, 149 bp, Arabidopsis thaliana columbia
aattgcctttcattttacttccaaaaataaaaaacgataaaagaaataaaaggtgttcttctttctacatgtgagtcagattccttggatacttcaaaaatgtcggtttgcttgtgtttacatcttgtcgattctactagaaattctat

SEQ ID NO: 113472 - DNA, 345 bp, Arabidopsis thaliana columbia
aaaaagaataatcttatcctttgagaaaccccaaataaaccacctgctgggttcaaccatgacactggggcactctcattccatcatactaatcctcacaatgcggagtctggggctcaaaacggcgattctactactatccccgttactaatggatgatcagccaagcctgagcttttaagtgctattctatctgcgaacggtgttaacaggacgctgagtggacacattaatgaactttccagtggtgcggcaaagactacaaaccctggtaaacgtaaaagtgccagagatcctccgccttctgagtccattaataaccctaccgccgaagggggtactgat

SEQ ID NO: 113473 - DNA, 239 bp, Arabidopsis thaliana columbia
ataaatctgtaatatagggcatttatagccacaacttttattttctcatttctattttttttaaaacaaaacttatcttttcccattattagtagacttagacatcaatcgagaatgatatacagtatattagtaagaaaaatgatcatatcatcatattttcgttttagaatctgagtaatttcacaatatctacctagctatccaagtaccttaagttttgcatattatctaaaatc

SEQ ID NO: 113474 - DNA, 384 bp, Arabidopsis thaliana columbia
ggcaagaggaaccaaaggatcaagcttttgattcttacaacgcctctaaccagatgtcacgtggcaatgacttctaccagaattcttcagaacgacagagtcctaatatgggtatgtttgggacctataatggtctttcatcttgttatcgcaggggactagactacgtcacggaaagctccactttgccctcatcctataaacctacttctgttccaagatgtccggtttcagcaccacctggcttttcagttccaactccaagtcgacctcctcctccaggcttctcctcaaatgggagagaccatcagatgattgatggcttttcaggaaactctcgtttttctgattcaattgcgtacggtaatcactatcagcagtcac

SEQ ID NO: 113475 - DNA, 389 bp, Arabidopsis thaliana columbia
ttcgttttttcactttataatgaaaaagaactcatagactatatattggttaaatcttgaaatacattggactttctgcgtcactcagataaattgcagacaaaactaagatcagaaggaggtattgcagctttgttgggaatggtcagatgtggacatcctgatgttcttgcacaagttgctcgcgggatcgcaaactttgcgaaatgcgagtcaagagcatcaacacaaggtataaaaaaaaacttatttaacatatcgttatctaagaatgattgactaaatgcatcacttagcaggaactaaaagagggaaatcactattaatagaagacggtgcactctcctggattgtacaaaacgccaaaaccgaaactgcagccataagga

SEQ ID NO: 113476 - DNA, 387 bp, Arabidopsis thaliana columbia
gtcaaaaggaaatgacattggcaaatttttaatcagacaggacacctaaacttcaaagtgtttttaactattttgaaagtcttaagagttgcgacttctatgtaaatcaagactattgtataatgaaaaattgttcttgatttcttcttcgaattaaccaagcaatgattatagtaacaatttcatatgtattatattgtccatagtattaagctcaatttcctttggtatcgatcaactcatctgagattttccatttagttagacgaatattttcacggattggaatgatcacggtacactgggggattttacgtagtttttattgacacaattatgaatgatctcgccagttcatcggcaaaagctatggcaaaatcagtttgt

SEQ ID NO: 113477 - DNA, 392 bp, Arabidopsis thaliana columbia
ggattctgcgttgatagcttctagttctacagacaaaaatcatcttacagctggttacatacataatataattaatgcttttctgtttttgttcaatttaagaaaatctggagatgattcttttgggaagataatgtcatctaaatcacattacttaagacgcaggtgtgcctagctctgacaaaatgttgttcatatcctcaaaatgtggccaactcgtcttgcttctctcatcagccttgctctcctgcacaaaaatgtattacatcaaatcttggttgctaacttaagagcttttgatcttgtaatcatgaacttcaaatctacggctacagattcatatgttcagagacgaacctcgtatttctgaataagtgatgcccagagagatt

SEQ ID NO: 113478 - DNA, 383 bp, Arabidopsis thaliana columbia
ctcttcacagcatttatctgcattggatgtgttgttatcggaaatctggatcttatcacacctactgtgaccatgttttatcttttgtgctattcgggagtaaacttgtcttgtttcctgctcgatcttcttgatgctccaagttggcgtccacggtggaaatatcatcattggagcctttcctttgttggagcctcactttgcatagtgatcatgttcttgatatcttggtcattcactgtggttgccattgcacttgcaagtcttatatacaaatacgttggcctaaaaggaaaggctggggactggggggatggtttcaagagtgcatattttcagttggcccttcgtagtctcaggtcactcggagcgaatcaagtgca

SEQ ID NO: 113479 - DNA, 385 bp, Arabidopsis thaliana columbia
cggacgcacgggtaaagaggaagaaacatcggtcacgtctgatctattatgctctttctctttgacagtgtggatcctcttcaacggctacactgaccaacaaaggcccatcaagcgccagatacatcaactcaatgcgctcgaaccataccaaatcattaaaagcgagggcggtcgcatcagaatactgggaccaccatgcaccccagctccagtgctacgactatggctataagcgttgtcgtgattgtgcctaaacgctttctcttgaccactttctcgaacgccagcgaactcacgttcggtgactacggaaggagactacaaggaagagccattccgggatgcgccgagacactcatggagtcaccgggatttggagaag

SEQ ID NO: 113480 - DNA, 364 bp, Arabidopsis thaliana columbia
ggaattaccggggggacccacccacgcgttcaaaattttacctctttttctctttagctcgatttatctcctcgacgtggtgctcctcaactgtgggggaggcctatgtccccttcgctaggtgccttctccatcaagaagatgccgatgagacactcttctttcaagctcgatcctgtgcgagggcattgacgttctgtgacagacccaatctggtctccctttctcaaatgattcctaatactatctcccaacatatgctactccctatgctccctcctcatactgctcataatcagcgcttggatctacacgcgccttctcctccacaccaccgttctgatatagaaaacaaccgctacga

SEQ ID NO: 113481 - DNA, 390 bp, Arabidopsis thaliana columbia
gatttggtggtgagattggagagatagttgattgcagtgaaagtttggagtttttggatgcttcgtcgaatgagttaaccggtaggattcctactggtgttatgggttgcaaaagtctcaagcttttggatttggagtctaacaagctgaatggaagtatcccgggaagtattgggaagatggagagcctctcagtgatcagattagggaataattctatagatggggtgataccaagagatattggaagtttggagtttctacaggttttgaatctgcataatctcaatctcattggtgaagttccagaggatatatccaattgcagagtacttcttgaactagatgtttcagggaatgatttagaaggaaagatctctaagaagctat

SEQ ID NO: 113482 - DNA, 388 bp, Arabidopsis thaliana columbia
aagaaattccgttacgacaaacgtgtataccttggagcccttaaattcgtccgtcacgcagttttcaaggtgttggagaacatgcctatgccctgggagcaggtccgagatgtaaaagttttgtaccacatcaccggagctattacatttgtgaacgagataccatgggttgtggaacctatttacatggctcagtggggtactatgtggattatgatgcgaagggagaagagggatcgtcgtcatttcaagagaatgcggttcccaccttttgatgatgaggagcctccactagactatgcagacaacttgctggacgtggatcctctggagccaattcaattggagctagatgaggaagaagattctgctgtccacacttggtttt

SEQ ID NO: 113483 - DNA, 117 bp, Arabidopsis thaliana columbia
gttgaatacattacatgtttatagaatacaattgattttttacaaatataagttttcaatatctgacttttattaatacattaagtgactccatgcatgaatcttaattagctagaa

SEQ ID NO: 113484 - DNA, 117 bp, Arabidopsis thaliana columbia
gtataatacactacatattcataacacacaattgatagtttacaaggatatcttctcaatatgggagttctattaatacattaagtgactccatgcatgaatcttaattagctagaa

SEQ ID NO: 113485 - DNA, 395 bp, Arabidopsis thaliana columbia
cactttccatttgaagagattcaagaataatgggttatatatggagaagatctataagcatgtcaagatcccattagagatagacttgcagccatatatgaggaatatccaggaaaacgaagtttctacaaaataccatctttatgctctggtggaacattttgggtattcagtagcttatggacattactcctcctatgtgagatcagctcctaagatatggcatcactttgatgattcgaaggtcactagaatagatgaagatatggtgctatcacaggattcgtatattcttttttatgcacgagaaggaactcgctggttttctagtgtctatgaagagatgcagccattggttgaagcgagtttactaaattcgtccccaaagtctgtgc

SEQ ID NO: 113486 - DNA, 360 bp, Arabidopsis thaliana columbia
gtgaaattgatttggtgaaattaggtcagaggcgtttctcatggctcctcttactctctccgttgatgtgaagagctcttcagcgacctctcatggtaaattctctctgtctgtcttcattattgactctgaatttttttcgcgtattggttatgaaaagagatgtatttgataaatgctattgttttcgcagatgtttcgaagagggtaatgcagagtccacagctcaaaataaacaaaggcttttttgcatctgttaatacacaagaagataaaccctttgatttcttccgcactctctttggtttggggatattttggcttttgggtcatttgcaattattattttatgaatcccat

SEQ ID NO: 113487 - DNA, 364 bp, Arabidopsis thaliana columbia
gtcaatctcttaaaactataacctgcaaaaaaaaaagagattcatagggggtgaactaaacagagagagactgttagagctgcttcagagtttgcatcaagaaaccaactcccaccaaatatacaagaccaaatgttatcacacatttgcttaaagtttaaaacagagggtctgaaacaacaagaagctttaaatggtttgccgaaagcaattcgatcaagcattgcaaactatctcttcttcccaatcggtcagaacgggtacctatttcacggagtgtctcgcaacttactatttcagtgggaaaaacactcaattgtaaactgttcgtttggcaattccttcctgacatttggtccattac

SEQ ID NO: 113488 - DNA, 222 bp, Arabidopsis thaliana columbia
  unsure (1)..(222): unsure at all n locations
ccacccactcgttctttcattcaatacaatccatttttttaaaaaacaatagattccccacagatacaaaccaaaattataaaacctcnaaaaacacaccaacattctccattcaaaaatctcaactacctaaaaaaaaaaaaaaaaaaccacccctcctatattatccaaacttacacacacaaacatacaacaccatacctcttttatattcttacctaa

SEQ ID NO: 113489 - DNA, 405 bp, Arabidopsis thaliana columbia
  unsure (1)..(405): unsure at all n locations
gggggttaaacccatgcgtccggtttttttttctntggattttttctgcagtataagccctttcttgtcgcgccanaatgcttaatggggtgaaaacgcatcacaaacatgtaaaaacctgaaaagaactaccaaagactttagaaacctacgccggtttttggtctctggatttcttctggagcataaagtctcttttttcctccagaatgctcaataatttccaaatgcatcacaaacatgtaaaaacctgaaaagaactacaaaagactataaaaataacaaatagactctaaaacctatacctaaatcatagatacaagtggcaaaaatagaggtttatcaactctcccagacttagcttttgcttgccctcaaacaaaacaaaaaaacccaacccgcgga

SEQ ID NO: 113490 - DNA, 311 bp, Arabidopsis thaliana columbia
cccacgcgtccgaaaaaatctaaaatcaaaaaacaaaactgtcatgcaaaataaaatattgttataaatttgatgtatctgatttataatttatgcaaactcaagtcttgtcacaagtaattactttctacatgtacgagcatagttatttctttttcatttcacggtacacattttttttttcacggtacacatataaatcacatcattcaaatcacgcattaactaacgaattatatctaccggtacatagatttataagtacattaacatcttctatttcaccggtacgaagccgcaaacctggtgat

SEQ ID NO: 113491 - DNA, 376 bp, Arabidopsis thaliana columbia
gaaagttatggcgtgcaaccaacacagctacacagctgttgagaccagaggcaaggcccacgagatgactggtctagctatcggtacgatcagggtcttggctgaagagggccgtgacaagacttttataacggcccaaacaggcctacagatggcccatgagacagcccagccagctaatgatgtgacatgtgatactgcccaagcggctcacccaaatgcccattatacggcccagtcagcaaatgagaagacatctaaaactgcccaaactgcacagcaaatggcccatgtgacgtcgcaagccgcagaagaaaagacatctcaagcttgcgacaaagctcgcgtggccaatgacaaggccctgagctactta

SEQ ID NO: 113492 - DNA, 319 bp, Arabidopsis thaliana columbia
agcagactggttttattatatgtactctttagatcaaatatttccttcagatcattagtgatataaactagggaataattcaatagtttaatctttaagggacgttatacaaggagacaagtcaagtaccacatgatataaacatatctaatactaaataaaacatcccacgctatgcatgggcttgaaaactcatatttaaatatgtagcaattctcatatatttgatattgaacttccagtaatctgttattatcacatgatataaaaatatctaacatataacatgtgaaaataggtttaagggtttcttgagcta

SEQ ID NO: 113493 - DNA, 357 bp, Arabidopsis thaliana columbia
accgacggttgttctgatcatgagtctctgtttcatcggcttcgtcaccggtcttcacgtctttggaaaactctacctccacaaatccggatcccaagcttagatccggatcaggacctggatcgtttaatcggtgatcgctgtttttttttttttttttttagtatgtttccttgtgttttgtttcccttttttagtcttttcgatgagaaccatgtaaatcgctccgcgtggagtaagctccgtctcccttggatagtactggtgcatcatcaaatgctgccaaagttgatgggccatcatcagctggaggaaaggagaaaaactcattggaggagtcggctgcttcttcttctg

SEQ ID NO: 113494 - DNA, 313 bp, Arabidopsis thaliana columbia
ctttgatgtatctgagtaaagctttgtaaaaactaacataggattgaagaagacgacggacaaattatctaatggcgttagagatcactgtttgatcagtgactatgtgtctccttcagctactgctcctcctaaacaacctttcgcgatcggtgttgccggaggaaccgcctccgggaagacgacggttcgcaatatgatcatgtctcaggtacatgatcaacgtgctgtccttgttaaccaaaattcgttctaccactcgcttactcaggagaaattgcaccaaggtgcatgaatataatttcgatcatcc

SEQ ID NO: 113495 - DNA, 400 bp, Arabidopsis thaliana columbia
gttgctactacttggtatctattttcatatcataacttattttcactttgatactttttgaaaagaggagtttatgtttactgattccctgaaatgggagcatcacggcctctcttgaaatcgtcccatcctctgacccagggctgtccagccgctgcacgagtctctggcgctgcatgcttgttcagattcttcatgactttctcgtgtaacgccgagaacacctttaacatcacaacaaggattgttttaatcactgaagtaaacaaaagacgatatactgtttaaacgtagactcgattaagagattgtgattaccggatttgaactcactgcttccggaggctgttcctgttcagttagccatttccagagatcagggttttcctgcatagaacaa

SEQ ID NO: 113496 - DNA, 307 bp, Arabidopsis thaliana columbia
ggccggtccggactggggggaccgacccacgcgtacactttaagcttcttctatttgccttcgatgagggacctttgttcccactgcctccaaaactgttgggtgtgatctgcttcgctcggttacccatcaaaatcagacaagacccttctccaaatgcgataccaaatcttcatcctaaacctatgcctaaatgggttttggctgttaaaattttggtcttgggcgtcttgttacatgtttatgaatacagggatggtttgcctcagtttgttgtcttggctctctattgtctccatatttacct

SEQ ID NO: 113497 - DNA, 385 bp, Arabidopsis thaliana columbia
ctcaaagatgcctagtcgatttcctcctgttatcttctacactccaaaggaaattggtgggctgggaatgttgtcaatgggacatattttgatcccacaaagtgaccttcggtacagcaagcaaacagatgttggtgtaacccactttaggagtggaatgagccacgaggaagatcagcttataccaaatctttaccgttacatacagccgtgggaaagtgaatttattgattcacagcgggtgtgggcagaatatgctttgaagaggcaggaagcccaagcccaaaataggcgtcttacaactggaagattctgaaggattcttgggataggggaattccctcgtataaatacaactgttcaaaaggataggcacacttttgca

SEQ ID NO: 113498 - DNA, 171 bp, Arabidopsis thaliana columbia
gcgttcgaaaaaaacagaacacacacaaatacacattgttacatttgttttagcatttaacttgtttatgtcgaataataataattcttcgaccaccgcgtattaagaaacgacgacgtctcgtgaagtgtctatcacattggctactggtgaatctcctcaaaactcacc

SEQ ID NO: 113499 - DNA, 347 bp, Arabidopsis thaliana columbia
gggttggtactcttcaaaggcgaggaggttatctccatggcgggggaaggaccttctactgccttagaggcacgtgccaaggatagctctgcacaggctcttgctgggcctgtaatgagccgcgctgctgcacgtggagtgcctactgaaccgttcgccacagcacatcctgtgcatagcgggcctgttcgtagagcatgacagggccatctacagagatgatgcagcctcatatctctaaccctgctgttatgcggcctcctggacacatgctccagtcgtctccgacttccggtggaggtcctactacgacggggagaggcgaccctactccgagtgacagtatg

SEQ ID NO: 113500 - DNA, 396 bp, Arabidopsis thaliana columbia
gagagagggaaaaagcgaagaatacgcagattcaatccaatttagggttagagattctcttctaatttggaaacctagtagtcctggtcccagatcggacgaagacgacggagtaacgagaatgggcgcgaattcgataccgacggacgcaaccattgatctcgatgagcagatctcccagctcatgcagtgcaagcccctctccgagcaacaggttagatcattatgcgagaaagccaaggagatcttaatggatgaaagcaacgttcagcctgtgaaaagccctgtgacaatctgcggtgatattcatggacagttccatgatcttgcagaacttttccgtattgggggaatgtgccctgataccaattacctgtttatgggagattatgttga

SEQ ID NO: 113501 - DNA, 395 bp, Arabidopsis thaliana columbia
atcagatgccgccactactccatcagtgctgctactagctccaccaagaagagccactttacgtttgtcgaaccttgaaaggatcatccaaagccagataacagcaggttcgacaacagggacatatgcagggacagcacatgcagcatgtaattagccgaatctaacacacctgtactcacttacctaaagcattgcagcatccacctagttaacagtttgtcccttccagaaaaccatgcctggcccctcctactaaattcaaaacgaaaccatgtgagtgtatataccacaatgatggttgtggtcgctgatgtatgttaacactacgcatccatggtatgtgttccataaataaagtactttcaaatcgctgctgatgtgataagaactac

SEQ ID NO: 113502 - DNA, 334 bp, Arabidopsis thaliana columbia
aaaaaagaagacaagtcttgaaaaacaaatacaaaaatggtggctgaaaacttaatcgaatttgtgtgcgtgtccatcgatgaaacgaaagctgcagtgcatggtggcctcgtcgaacctcaaatcactgagtttacttcaatctttggccttcctccagtgacgtcagatgacaagaaaccttctgtcactgcctcagacttagcagtccctatcatcgattttgcaatgtcacgagaaaacattgtggagaaaatcaaagaagcttcagagaagtgggggatattccaggtgatccacccatggtgttccttcaagcgttcttgaagagatc

SEQ ID NO: 113503 - DNA, 285 bp, Arabidopsis thaliana columbia
  unsure (1)..(285): unsure at all n locations
cttgactctttctctccaccaccgtcgagctcagatctgacttctcatgtnccggataatcgtatacggacnatcatgaaaagatctcacatttcttctcctcgctcttgctctttctctcgcccagcgatctcactgttctttgtcatcctcttgttccttctgggtttaacactaacctcccgaaaaccatccggttcacccncaaaccgaatcctaaccgggaaacccagcatccccaagctcgcgtactttgtaacgggcacaaagggagatgcgaaacgg

SEQ ID NO: 113504 - DNA, 383 bp, Arabidopsis thaliana columbia
tatacattaaagaaaatagaacatcttgaaacctctaaataaatacaccgtgcttaaaaaaattctcgagatattcaattgattttttttttgtctagaatattaaataatcaatactccattagatgtcatttacccaaaaaaaaaaaaaaaaaactccattagatgttattattgtagattgtataaataaactctgatatataagtccaacaaaactccattagcagtagtgttggtaagctccccatattcttgggcttttgtttcagaagatttcatgttatccgtcggcttagtttctgggattatcttgttaatcgccacatttatataatttcatatataatctatcttttagtgcaaaaaaagttaaaaaaata

SEQ ID NO: 113505 - DNA, 390 bp, Arabidopsis thaliana columbia
  unsure (1)..(390): unsure at all n locations
aaagatgaagagtcactatacatacaccatttatgttgntgatctcttagtttgtctcttgatctcatgggcctctgcacaatccctcatacgacaatccactgatgatcgaaacacacctctacagcaggagaatggagcaagagcagtctcaatcctgggagaagcgcattacttggataaagatgacctagagatctcctcaagtgattacaaagtctcaccttcaaaccaagtgacgggtatgagaagtcgtcctccaatgtcttactctctcaaaatggagtctttcaacacgctccttcagtcaaatgaaacagagagatacgaatctcgtccttttccggttggtggatacaactggtcacttattgtgtatccgaacgggaa

SEQ ID NO: 113506 - DNA, 358 bp, Arabidopsis thaliana columbia
  unsure (1)..(358): unsure at all n locations
gagaagaagaaacatctccattctccgagagagagatctgagtcgtctgcggaaacaaacgacctagaatccgagagtgtagtanaacaacaaaaatggcgtggcaaaaggagaagatcgtcggaagctgcttcgccgtcggagctgccttcgccgtcagagcttccttcctccacctcttcctcaaaggcgagcttcccttatgcctatgcctcgtccccttcaggaaacgaaaaccagtccgcgtctacatggacggttgcttcgacatgatgcactacggccactgcaacgcgctccggcaggcgcgtgctctcggcgaccaattggtcgtcggcgtcgtcagcgacgaggagat

SEQ ID NO: 113507 - DNA, 400 bp, Arabidopsis thaliana columbia
gagacttttagaggatagtatggcggaaaagatgctagcgagagagatgaaggaaggggactcggtgagtgtggacgttgactcggaaggtaaagtgactgtgctaaatggtggaagtggcactcccacaacatccttggaggagcaggaagattctctccccgttgcttgaaataaaaggggaagtgtgtttcttctctcttcttttgcttttccccccctgaacgaattatggcaagagaagagtctcaatgagatacttgtagggggtttcgtaatatacattctatatatatgtaaccaatgtaatgtatagatgacattgtgtagcttctttgtcaatgcttttttaaggacctactttggtgccaatgtgtgtttattaatgggtttagaatta

SEQ ID NO: 113508 - DNA, 372 bp, Arabidopsis thaliana columbia
tagcttttgaagcctctgtttgtttatggttatatcctctctgttcttctcatttcgaaagactgaattttgaatgtgtttgagggtgtgttttatgtatggatggatttaagggtaaaagaacatctagaccgattatgccacggaaagcaagtggtcttgtgttacatgagaatatgaagaagaaagatgataagagtgttgtccctatctgcagtagaattggttgcagttccagggttagttccactaagggagatttgattgatcataaagcaaaagctactgtgtcttcgtttcgatctcctttgagtggaaaggaaaccgttggtagttcatctcgaagtatgagtggatttggtggtacaaaaa

SEQ ID NO: 113509 - DNA, 377 bp, Arabidopsis thaliana columbia
cccacgcgtgcggcgagagatgagtacggcgactgagataacggacagagacccaatggctactgtggcgtcctacgctccagtcacctttcaccgccgtgctcgcgttgacatggatgatagacttcctaaaccttatatgccaagagcactgcaagcacccgacagagagcatccgtatggaaccccgggccataagaattatggacttagtgttcttcagcaacatgtcgccttcttcgatttagatgataatggaattatctatccttgggagacctactccggactgcgaatgcttggtgtcaatatcattgtatcgcttatcgcagacgctgctatcaacttggcccttagctatgctactgttacgggat

SEQ ID NO: 113510 - DNA, 364 bp, Arabidopsis thaliana columbia
cctctctctaaaatcctctgccttctctctagaagtttctgctcttgagctcaccggttgggccggctccggtagtttcaacagagccggagccggtctttatttttatttctatcttagtttctcgggttagatcttctagtcttgttctcgttactctcgacggatagtttccagatcttcaatctgatcttttccggaagggatgagcggttcggttgatctatctaattgatctatctagtcgaagtgggttggatattagtatcctacagatctggttttgtcttataaccttatgtgtaggttaattgatttgcatgttgattttaagctgtctttggctcattctgggtctcgatct

SEQ ID NO: 113511 - DNA, 355 bp, Arabidopsis thaliana columbia
ttctgcttcggtgacagggttaccacaatattttaattgtgcaactatcctcaagatagtggaattgtaatctctaaccctttggaaatcttgaaacctcagggttttccactcttcaagagcgtgagggagattgatttccttttgattatcgaacctatctttcaaggcttgccatagtgcggctgggtcctcaacgtctccatagtcgtgagttagattctcatctaaatgcttcttcaggaagataatcgcttcggctatatgctcgggtggcgatttgttaccgacttctatcgtttcagttatcttttttattacaagataaggtttcacatttgtgacccatctgaca

SEQ ID NO: 113512 - DNA, 300 bp, Arabidopsis thaliana columbia
ttgtcatatcatttttagattttaacagggttgtaaaattttatagttatacatatatatatatagttacttaatttaaaatcaaattaaaatctaaaatctggttgaataggtgggaccggtcctgatctaatctggacataggctggttttcaaaaaattggtttttttttcttgaataaatttaatgttcatccaaaagaaagttataccgttaaaacttagcaagaaagtatagatagaaacacattgatttattgtggatcctttatcattaactttttcgtatctttaagacct

SEQ ID NO: 113513 - DNA, 345 bp, Arabidopsis thaliana columbia
cccacgcgtacggcaccaccgggtctcccggtttacgacgcaatgtcaggcggtccgtcactcgctccgggtccggcaccaggaccgtgcgggcctcgccaccatttcaacggagaggctcaagtgaaagatttgatccacactctgctccattacggtggatacaacgagatggcggacattctcgtgaacctcacttctctagccaccgagatgggtcggctcgtgtctgaaggctacattttaacggtcctagctgcgaacgacgacactatggctaagttgaccacagaccaattgagcgaacctggagctgcagagcaaataatgtattaccatatcata

SEQ ID NO: 113514 - DNA, 386 bp, Arabidopsis thaliana columbia
aattagagtaactctttgtttacgtcttaaagaaaaaagtctaccccaagaatgttctaaaattataatcgttggattcaatttgaactagctagagtacgaatgtttataaacttcattttctttagccttgaagtaatagaagtttctacaaacggacacgtagttattaatatgtgcaacaacttccatataagccaagagccatgatctcatgaattggattaaaagcaaagaaatgtctctctagctagctagataatgcaagcaacaaaactaatgtaactttaaaatatatttgtatactttttttgatgctacataattacaaaattacgaagtatgattctttcaacgtgtgggacgtatctatattacataccagt

SEQ ID NO: 113515 - DNA, 253 bp, Arabidopsis thaliana columbia
tattgacgtgacaaatcgggactcgacccagaaaaaatcaatgtaaacggaggttcaatgggcataggccatccttcatgcgctacatgagcgcactgtgttgatacattgttgcacgagatgaaacgccgtggtaaaaactggcggattgtagtaatgtcaatgtgcattgatactgagatgggttcagcatctgtatgtgacagaggtgatggatctaatgagcttcccaacgcatggatagtagaagcgc

SEQ ID NO: 113516 - DNA, 371 bp, Arabidopsis thaliana columbia
gccgccactcaccacaggtaccaccaggagacgcacagtttcctcgagccggagaggtacatcaacagctgggagccgcctaaagatcccagagacgctgagaggatgctcgcgcagcttaggagggactacgccaagaaagtgagtctgtatcgtaaagactaccttcacgagattgagatgcttagggtggagaagcagcgtaaggacgaggctaggctggtggctgagcgtgctgctaatgaagagaggcggcggttgaaagctgtggctgctaaggttagagctgaggagcggaaggtcttcgaggaagagttcaggagaaccctgatgaaagaaagagaggagaagctggagttctggagaaatga

SEQ ID NO: 113517 - DNA, 374 bp, Arabidopsis thaliana columbia
  unsure (1)..(374): unsure at all n locations
gggataattttggaaaaataaactcatcaatctactatataatttattatgtttaaatgtacttttattctaaattttagtataaataaatttcaattaatttcgttaatttggtttaattacacaaaattgtgatccacttctatccataaaacttctctattgaattataacaacaataggttctgcatttgaattgatgaatttgggttatattcgacttctatggcctacattttgttctttatgttctacatttttcaaaaccttgaatggatatggaacaaagttgtcatagctatactaacacactaggatttaacctgtggtacaccacggngcaaatattttatttatatatataataatataaa

SEQ ID NO: 113518 - DNA, 380 bp, Arabidopsis thaliana columbia
  unsure (1)..(380): unsure at all n locations
cttttcctaatcaacaagagcaaaatgacagatacagctggaacccatcacgatatcaccactcgagaccagtatcctatgatgggccgagaccgagaccagtatgcgataattggccgggaccagtaccaagggtacggccaagattactccaagtctaggcagattgctaaagctgccactgcagtcaccgctggtggatctctccttgttctctgcagtctcacccttgtgggaacggtcattgcattgattgttgccactccactgcttgttatctttagcccaatccttgtccctgctctcatgaccgtcgcactgctcatcaccggttntctctgctctggtgggtttggtattgcagctataactgtcttctc

SEQ ID NO: 113519 - DNA, 393 bp, Arabidopsis thaliana columbia
  unsure (1)..(393): unsure at all n locations
cccacgcgtccgcggacgcgtgggtagaaagagagagagagagaagaagctcaagagatggagggcaaggaagaagatgttagagtcggagccaacaaattccccgagagacaacccatcggaacatcggctcagagcgacaaagactacaaggagccgcctcctgcgccgttgttcgagcccggcgagcttgcgtcgtggtccttctggagagccggaatcgccgagttcatcgccacgtttctcttcctttacataactgtgttgaccgtcatgggtgtcaagaggtcaccgagcatgtgtgcttctgtcggaatccaagggatagcttgggctttcggtggtatgatcttcgctctcgtctactgtacggctggtatctncggtggacac

SEQ ID NO: 113520 - DNA, 225 bp, Arabidopsis thaliana columbia
  unsure (1)..(225): unsure at all n locations
cgacccacgcctccnatacatttaaaacccctacattctcttccaaaaaatcctaaggcaaaagtgcntttcctatgtatgaggcacaatatcancnacatcccctccaatgtacttactccacaaccataacatatgaaaacaaaaactataacctaaatacatactcatgcagacaaaaatctaacactccgaccaggtcccacctcaaataccataacacac

SEQ ID NO: 113521 - DNA, 337 bp, Arabidopsis thaliana columbia
  unsure (1)..(337): unsure at all n locations
aacaattcctccaaggctgaccttgactttggtttccttgcgactaaagcgaggtgctctactgtgacgtttcagacnagcaacccaaacacaagagtccacttgagagtttttcttatccgaaactggttcccaaacaaggtctttgagttcagaatcaatagtaacagtagacgagcttactccacttacggcttggtcaaagtaaagaatcagtggaaaagaaccagactcggaacagaaagtagtcaacttagtagtagaagaagaggcattgaagcagtcaggtccagatagaatgatgatggaaccatctgaaggccatgaggaaaagcga

SEQ ID NO: 113522 - DNA, 341 bp, Arabidopsis thaliana columbia
  unsure (1)..(341): unsure at all n locations
ggaagttaaatagtaccaagtaataataataatgcactaacttgtcacagtatcttacacaagatgagggtacccnncccaaccaactncatcaaaccaattctcaatcacaaaaaacaactccccaaacaaagacctcaatacccacattaacaccactagacataacattaagagccacctatcccctttagctacataaacacgacacttctggaaatacaaaacccgatcaactccataaatactccgacttaaacggcaaagaagatttcatattcatacctcctctagttagagcacccaccgtccgtcgaactaccaactaaaaatgaccaacc

SEQ ID NO: 113523 - DNA, 312 bp, Arabidopsis thaliana columbia
  unsure (1)..(312): unsure at all n locations
acgtttcccataacctcatggagcacaagccactaccaccacagtatctaggaaaatctccggctattccaacaaaccctnccntnctccttctcccacaaaccattcatagacgagccacatacacatagcagcccgcatctaaagcaagtaagaagagctaaggctctccacccagagagcatcactctcaaaaactgattccaaacgcagctgcgacgaaagaagcggccacgtctaccaacaccggacatgaactatagcttttcgaggctcttcacgaaagtctggaagaagagatggacagaaaac

SEQ ID NO: 113524 - DNA, 340 bp, Arabidopsis thaliana columbia
gcactttctgtggagcccacaggtacccggagagccacgactgcgagtgtgatttcaaaggagcggctagagaggctattgctaaagcgaatcctgtggtgaaagctgataaggtggagaagatatgattttgaagatggaatcgtgtttctcttttcgagtgtcttttggtgtttggttctttttctgtttctgttatatgattcgatttgctttaagtgtttttcttagggaaaaagtgtaagattctgcttttgtggtttcatgatttattgttctgtaataaaaagtttggtcttatcaaaaaggtttgaatcaaaaaaaagaaattaaatttaat

SEQ ID NO: 113525 - DNA, 384 bp, Arabidopsis thaliana columbia
  unsure (1)..(384): unsure at all n locations
ggatcgtggtgctgaggctacgcccagtggaaaaccttcatgatcattgattaagcctgattctgcagtaccaaatagtgttattcctgcaggggttcgacttcatcatagagctgtggtggttgctgcagaaacaggtggagccttaggtggaatggttagacagttatccattgatcaatttgaaaatgagggacgccgtgttagttatgggacacccgaaagtgcaacagcagctaggaaattattagatcgtcagatgtcaatcaatagtgttccgaaaaaggttgtagctcatcttttgaaagcctcggggtggaagcctncagttcgtcgccagtttttcttggatggcaatgaaatagctgatctttgcgacagtgc

SEQ ID NO: 113526 - DNA, 389 bp, Arabidopsis thaliana columbia
cttaatgctgcatatgattcgtggcaggtaagttatttatcttcttaatcgttagatttattaacaagattttgtgtttcacatattttgttattcgtgcagatccaagagagtctagctccaaaatctgcagatccaagtggaagttggaatgattgtagacttaactacgccaagtgtagtgcatctcagatccaattcttgcaaggtgaaacataagctaataatgatgttcgtgattttgaataaccaaactaactaatgtttttgaaatgtgtgttacaggttttaggacgcgtatggtgaatttggtaaaaggtttcgcgatgccaagtaagaacggtgtgttcctcaattcgtgcttcgctcattgccaaacagagagacat

SEQ ID NO: 113527 - DNA, 387 bp, Arabidopsis thaliana columbia
gagcaatcttgtgtcgtgaaagtgatgtagtcaaacaaattacggttgagcacgaacctgacaaagagagagatcttgtcaagagcaaaggcggctttgtctcccaaaagccaggtcccttcttttgtatcttttactaagaagaaaagagaaaatgatctatttcggacttccaaggcaaagccaataaacccatgttacttataatgattaggcaatgttccgagagtggatggacaactagcgatgacgcgtgcgtttggagacggaggccttaaagagcatataagtgtgatcccgaacatagagattgccgagatccacgatgacacaaagttcttgatcttggctagcgatggactctggaaagtttctacatatgaatgc

SEQ ID NO: 113528 - DNA, 386 bp, Arabidopsis thaliana columbia
cggacgcgtgggttttatctctttgatacatctcaattttgttcttttgccttctctttgatcttatctcttacgattgtgcagatctcaatctctatatccttggttgtgtcagattctcttagggtttattttctctcccaattttgtttgattccttgtccaaagtttcttcctttccttttgacttttttttgtggtacattgaatcagaggtgtaagagtaatagtttcataactcaaatccccaagtgtacaaattttcctcttttggttctgggtttggttgattccttgttagaaatgtaaatttagggcttttgtatctgaaaccgatcttcagacttgtgtaatcttcttgatcttcatgcaagattgataattct

SEQ ID NO: 113529 - DNA, 365 bp, Arabidopsis thaliana columbia
caccgtttcatacgaaactctttacgaggagtctctctttacttttctctctctctcaaagaaagaaagaaaagcctcttttaattttctccggccagagtgtgtgggatgcacaaggaaagagggaaaatgccggtttctagcaacagaaatagagtatcgccatacccgcttcgctcttgcaggaacaagaaacaaaaagaagtcgagacgtcttcgtcacctgttgagttagagagtgttagtgaatgggaggatgtgaggtgtgtgatttgtatggagcctcctcacaatgctgtcctcttgcaatgctcttctttctccaaaggatgtcgtgcttacatgtgtgatacaagcgctcgtca

SEQ ID NO: 113530 - DNA, 392 bp, Arabidopsis thaliana columbia
ctaagttaaagatggtgttcttttgcatgaattagatacggggtgcttggttctttgtgttttgcagaattttttgaatttgagctctttattggctttcttttgtgcttaagcggagagctatagacaaataaggttcacgaagaaaacgaatctgttgcaaatggaggaggcaaaaacaggtacggattcgtttttaatttttcatttaagaggcaacgttttgttatgtaagagatgctgttacatgtgcagaagtggagaagaaagtgtctatacttttaaagtttattcaaaacaaaaacaagatcccaaaggttacaaagaacgaacttgttgggattgttgaagatcttcataagcagtgtcagttactttactctgtgtttgat

SEQ ID NO: 113531 - DNA, 297 bp, Arabidopsis thaliana columbia
aatttaacccactattggccttcttttgtgcctaaacggcgaaccatttacaaataacggtcaccaaaaaaaccaaactgttgcaaatagaagaagcaaaaacagggacggattccacattaatttttcaattaaaaagcaacactctccggaattataaaaaaaccctttcccaatccataaagaagagaaaaaaagggtctttaccctaaaagtgaatcaaaaaaaaaaacaagatcccaaaggttacaaaaaacaaactgtggggagatttgaaaaaattttaaaaaaacaaag

SEQ ID NO: 113532 - DNA, 396 bp, Arabidopsis thaliana columbia
  unsure (1)..(396): unsure at all n locations
aacacttctaaagtacaccatgtatctctaccttcttgtgcggagtaaggaagcatcaagggctattctgtanaanataatcgatgattcatctctccgagtatatctgatggttctctagtcatcctctctaggtcctcaatcgcttctaaaaatccttctcctatctcctctgcttctccttcttcctcctcgcttgtgatgaattggtctagctccacggaacgtgatattcccatctcgcgaaatatttcagcataattatttagttctcagactgcatattatttccttttatttcttgctattttttgtttttaatttctagttatccatttgtaacttttctttttcattacatttatcttcccgcttctatttttttctaaatttttg

SEQ ID NO: 113533 - DNA, 274 bp, Arabidopsis thaliana columbia
ctctaatctaccgccaaatcaaatgcgcaaacggggacctaccgtgctttgaggatacaccccaacggctctaatcgcttgaaactcttcctttgcagagcctaggaagaaacgcgaggattttaacgcaaagcgaggtggagtcaagtttccgaggtttcagatgccgggaaaaaaaaaggaatttgtaatcactactcatgcaagtaccatggataaattctcacattctatacctttaacaaaaacctcttgcgggatagtgcgaagactt

SEQ ID NO: 113534 - DNA, 158 bp, Arabidopsis thaliana columbia
  unsure (1)..(158): unsure at all n locations
cgtcgaattaggaattttctaggtgtttcccgatattcttgcaggagatcgagggtgttaccacacagcctgcatctnctactctagggtgtatgagagcgaggnngattaatataatccccaaccattganntgggaatnnatggttnnncacctgg

SEQ ID NO: 113535 - DNA, 400 bp, Arabidopsis thaliana columbia
gcaaccttgaaaccctagaaaactcattctcaactacgactaaatcgatttcgcaaactttgacctacccttctttcacgataaacccagatcgcttaaattccttgaatttcttcttctgagagttttaggaaaaaatgtcgtctttgagcagagagttagttttcttaattctccagttcttagatgaggagaagttcaaggaatctgttcacaagctagagcaagaatctggcttcttctttaacattaagtactttgaagagaaagctcttgctggagagtgggatgaagtggagaagtatctttctggtttcactaaagtcgatgataatcgttactctatgaaaatcttctttgagattaggaagcaaaagtatctcgaagctctagatcgaaa

SEQ ID NO: 113536 - DNA, 269 bp, Arabidopsis thaliana columbia
ggctttgggcttgctatgtcgcatagcctcacgtcgtgtacgtgggctttagatttctggtacggcggtagactgatacaagatgggtacatcacggctaaagctttgttcgagacgtttatgatcttagttagtactggtcgagtcattgccgatgctggaagcatgaccacggatctagctaaaggttcggatgcggtagggtcagttctcgctgtgttggatcggtacacgtcgattgatccggaggatccagatggatatgaaac

SEQ ID NO: 113537 - DNA, 370 bp, Arabidopsis thaliana columbia
gcaatatgtggactgggctagaagccaaggccgtcctgtatcttctgaagacgacttcttcacagactctcttgttaaagatttctacaagaaccatatcaaggctgtgctgaacagattcaatactttcacaaaatttcaatacaaagatgacccaacaattatggcttgggagctcatgaatgagcctcgttgcccctcagatccaaccggaagaaccattcaggcttggattactgaaatggctgctcatgtgaaatcactagatagcaaccacctgcttgaagctggcctcgaaggtttctacggccagtcctcacctcaaagcaagactctgaacccaccatgccagtttggaacagatttcatc

SEQ ID NO: 113538 - DNA, 266 bp, Arabidopsis thaliana columbia
  unsure (1)..(266): unsure at all n locations
acaaaaccaaataccacaacaaacatccaccatccaancnaggaatcatgcggctaataccgttttttctatttacccaaannacncctccacatacattaaggaatatcctaaccaataaaaccatctccgaaaagactacaaacacaactacaaatactatccatagaatcaattataacaacacacacacacatattccccaaatatacaacgcacacaaaaaatcacgttccaactaccacatgatacaatgctaaaactgg

SEQ ID NO: 113539 - DNA, 361 bp, Arabidopsis thaliana columbia
  unsure (1)..(361): unsure at all n locations
cccacgcgtccgatcttacggtgttgataacgacgagaagcttgtaggagcagtctaagaggcgaaagatagattggacgagcggctgagaaacccgcgaagaaggtttggtttgtttaaacaagtgtatgatagcaaaccaagtcctaattcaccttaaaatgcaccgaatcagctgaagcattttgctttaattccttgataatgacgcatgatgatgcactattatctttctaacatgtggtatcacatgagcatataattgtgagattgccttttgtcggacaattattttatccttttagcgctaaccgacttttctcgactaggcgcattttagcaggggtttcaatntaaagat

SEQ ID NO: 113540 - DNA, 402 bp, Arabidopsis thaliana columbia
cggaaccggtgcggagacccaggcgtgacgccactcgtgcagctcatgctctgagatcactgacactgtttctaccgttgctaaaatcggggcagtattactaagttggggagcacattcattaggactgtgatcttcgatgattgacgaatacagagaagcattagagtcgagagagctaatttatagatagcagtcaccattattgcatatgtacttaagtcctgtactcaaacttacatgtattgatttaagtatgtatgagtacatttcgttgcacatataagaaacgatgtcgttttgtgctgttgcaaatttcttctccaccaagattagagaaccatacttattatatatcagttcaagaagactcagttttaaagcttacgactttatttttga

SEQ ID NO: 113541 - DNA, 247 bp, Arabidopsis thaliana columbia
  unsure (1)..(247): unsure at all n locations
tttggnngggatgaatganntgacgagngnncggtcannagcagannaaatgaagggagatnngaatgatnngagcttgagggaattaagaagtctnngagttagaagggagctagagcnnagatgaactctagcactgatgacannaaagaacgtcaaagcanatgatgagatacaagcaagcacggaaaaaactatattgcgggtttgacaggattgttgggtgccgaaactgatatcggggtca

SEQ ID NO: 113542 - DNA, 362 bp, Arabidopsis thaliana columbia
ggatccgagtcaatggctccgagaaccggctccacatccaccggatccgccatgtcagaaacctccaccgtattctggatcgaccctctcttccacctcctccgcacaatccccttctccttcctccggccgccgcgtctccgcctcaagctcccttccttcacactcccatctacgatggccgtcttctccctgatcctcctcacctacttcctcggcatctccggattcatctacgacgtgatcgtctagcctacaggcatcggatccacccaagacccagtcacgggagcgatccggcccctcgtgttcatgtcgggtcgggtcaacgggcagtacataatcgaggggctctcgtcggg

SEQ ID NO: 113543 - DNA, 398 bp, Arabidopsis thaliana columbia
cggaactgccggggagacccaggcgtgacgccactacatgcagctcatgctctcagatcactgacactgcttctaccttcagctaaaagtggggcggaactactacgttgggttacaacttcattaggactctgatcttcaataagtgacgaatacacagaaacatttccaccaacagagctcagttatatatcgtatggaccactttctgctataggatgaagaagtggccttaaacaaacaacgtgtgcgatcaatgcatttaagctcggatcctgtgctgatagtatgggaggattgatctatataggactcggaaataccttagagaatgtatgttgctcaaggtttcaagggtctcttgagccagaagcagtctattgaatctgcacaaccat

SEQ ID NO: 113544 - DNA, 366 bp, Arabidopsis thaliana columbia
ggaagccctaagaacagagaaaacagccgccagcctttcgttgctttctgcggtggtgggcgctcctcgccgctaccggagtgactcgtcctcctgtatttcgttttctcttcacctctctcatcatctcctctttgtctgttaacagatctagaaattttggggtttgaatctgttagatctacagatcttgagttgtttcccttttagatttctggtgcagatggtcatgttttgtggcagccttgttcgtttgcttcgtcttggcttgtgcttcatcttttatcccatctgtcgtatgttccttgtcagagaggttgaaaatctaaggcgttcttgttgggttttagtgtttgtcctcttggt

SEQ ID NO: 113545 - DNA, 396 bp, Arabidopsis thaliana columbia
cggaaccgccgcggaaacccaggcgtgacgcgcacgcatgcgctaagcccgaacaacagcacaaacatgcttcatcgctacagcaaaacatgcatacacaacagtgatacactttactgatacatgactaactccatctacttacctacttcctcccacagatcccctgtactatactggctttctgggctcacctgtccagacgagaactttattatcaagtcccgagctcaacgtgctggttctactcacggcatcgctctcgctgttacagatacttcttcaagaagacttaatattgaaggtgaaacacacagttacgactttggtgtaagagctggaatgtacctcaatgctactcatgaaaagaggaagaactggcgtatggatgactat

SEQ ID NO: 113546 - DNA, 347 bp, Arabidopsis thaliana columbia
gcataatgctcttgtgagcagagagcggggggctagcacgaacgaacaacaagaatctttcttcgtcgaaccttgtctttgtcttcatctcaatcggatctgtccgttgccgtcgattctccccgccgttttcagaggtcatggacgtttcagctagaaagtctcagaaagcaggccgtgagaagttgaggagggagaaactgaatgagcattttgttgaacttggaaatgtgctcgatccagacagacccaagaatgacaaagctactattctcactgatactcttcagttgctgaaagagctcacttcagaagtcaacaaactcaaatctgagtacaccgctttg

SEQ ID NO: 113547 - DNA, 364 bp, Arabidopsis thaliana columbia
ggaactccatctttatcgaggccctttgacattttccatcagataaacatgctatggcctggtttgctgggaaagaacaagtatgagtttgcgaaaacctattgtgaagtcgggcttgtcagaggtatacaggggaaaattttccaggatttttcaaagggtactcgcttactggagttgaacgtgctgctaaaccaaacagtgatgataagaagactgaagcagcatgttttaacacagttacccccaaaacgtagacaaattgtaaccatacagctaaagaagtctgatataactttagcaatgactattctcagtgatgctaataaaccaaatgcggctataacagatgtcacagagaaca

SEQ ID NO: 113548 - DNA, 355 bp, Arabidopsis thaliana columbia
atcgaaaacaacatctgcttctctctaaaatattatctctctaaatattctctctatctcgagcttcctgtttgatctccggtgatcgactccggtggcttctctaacaccggagtcggtcgatcctttcgcttcttcttgtttttcttcggtggtgtgatcgaagattcaaggatgcatgatgtttgctctggtcgggatttagtccttttgcagcaagagttactggatctttccgatcatccgtgtggtttacccactttatctcttgtctgcgattggctctaaatctttttgtcttgtccatcagatgatgttgaatcggctcacttcctgcttgcatgtctctggttcc

SEQ ID NO: 113549 - DNA, 410 bp, Arabidopsis thaliana columbia
taccgccgcggaaccgccggggcgacccacgcgtgcgaaatcattcaacttttcaattcctctcgctgagatcgagaaccgacccacctgttcctctgatcaccggcggtcaccgccgctacacagatgttcgcttgacgacctcttctcgccgcgatctttgcctcttcctgtaatcgccgtcttttgctcaacaacgagatctgttttttccacgagtaaaggtaaggaggatgtcgactccagcaaggaagaggttgatgagggatttcaagaggttgcagcaagacccacctgcgggtatcagcggtgctccacacgacaacaatatcatgctctggaatgctgttatattcgggcctgatgacaccccatgggatggaggtactttcaaactctcactgcagttc

SEQ ID NO: 113550 - DNA, 360 bp, Arabidopsis thaliana columbia
cttgtttccttccgactctctctctccctgaaagtttctgtctctctctgaaaatgaagctctctatgcgtttgatctcagctgttctcctcttgttcatgatattcgttgccacagggatgggtccagtcacagtggaggcacgcacgtgtgagtcgaaaagccataggttcaagggtccatgtgggagctcaacaaactgcggaaacgtgtgtcacaacgaaggttttggcggaggtaaatgcgcgggtttccgcgcgggtggttactgcaccagacatggtggatctatcgatcgattcttatacctcaaatctaccatatcacaggtgggggggggccctctatataaaatatccc

SEQ ID NO: 113551 - DNA, 367 bp, Arabidopsis thaliana columbia
gccgtgatatctctagatttgatgaggcttaaaagggcgcattgaatggtgccgaagaaagataatacgacggtacttgagtattgacaagggtatttgtcgttcactttggattgtattagcatccacgacccgaaacagctactacccgcgaagagaagcacgcatccgacgatccagttctcgggtttcaatgcggggttatggttcgtcaatagatgggattctagtttgtgaaattttgtcaagggaacacctttgtacattgttagtaataaggctcctccaatgcatatcaaagtgcccatcaccatccccatacctgcttttgctttcatgtttagcttctctaccctacgcccaaaac

SEQ ID NO: 113552 - DNA, 409 bp, Arabidopsis thaliana columbia
gcggtaccgtgccggtaccgctgcggagtcccaggctgcgacgccactcgttcattttccatggacggaccttgacctctctgcttcccttcgtgcattttctctctctcactatcctctctctttctagtgtttgtttgatcctctgcgtactctgttcttcttctctcttcagataaaacaagtcctgcaaaattaagacctgatgtcttatcgattgctaagtgtggataaggaggaactggttacatcaccttgtttgaaagaacgtaactacttgggtctctctgattgttcctctgttgatagctcaactattcccaatgttgttgggaagagcaatctcaatttcaaagctactgaactgaggctaggtcttcctgagtctcaatctcctgagagagagact

SEQ ID NO: 113553 - DNA, 367 bp, Arabidopsis thaliana columbia
cggacgcgtgggccttccctccttctctccttctcatatgcgacaaaaaagagcatctcacagactcactcttcaagtctctccctctctccgatcatcaatggcggcgactatggcgacatcaaccagatgcatgtccctgaacccatctcctcctaaacccctaaaccaaaccaaacccatctcctcctcaaaacacttcatcaccctcccaactccaccaaaacccaccgtctctctcgccgtcacaagcaccgccctagccggagccgtcttctccggcctcagctactccgaacccgctctcgccgctcaccagatctaccagctcgccgccggcgccgtgtcggaaggccgcgacaaccgc

SEQ ID NO: 113554 - DNA, 368 bp, Arabidopsis thaliana columbia
catctctaggccttcgagaactcagcagcttaagaatcctaaactgaggacgaagccttctgttgatgatcttgatggtgatgatgagaagctagatgcaggaaacgggaaagatgaagaagaaggtgagaggcggtcgtccaagaagagcaagagaaagcagaggtcgaaatctgagtctggcagtgacagtgaagcttctgtgtttgaaacagatagtagtgacggctctgaatcgtctggagagagtgattcggagtacagttcatcgtctgagtcggaggaggaaaggaggaggaggaggagaaggaataagaggaagagcaagaagaagccaaagcagaggaaggaaaggcggagaagaaaat

SEQ ID NO: 113555 - DNA, 380 bp, Arabidopsis thaliana columbia
gaaccggcccggaatcccaggcgcgcgccgacccgtggggaaacgtcaatgaacctggacacacaacaacatagtgtgaatgtgatgctcagacaactatttttgatcatatcctctcttatccctttctcttcttattccccacgaacctccccgataccacccacctcgatccgctctcaaaccagagctacaatgtccacaactccgatccagaacgagtcgactcagcagactcagagacccgtccaggtggcgcaacgcttagagaagttcaagactacaatcttcactcaaatgagcatattgggcaacaaaccacggagctatcaacctaggtcaaggcttccccaacttcgacggcccttgtttcatcaaag

SEQ ID NO: 113556 - DNA, 207 bp, Arabidopsis thaliana columbia
aacgaaaacctttttttttttttctcacaaaatctacacggtactatatgggcaaacctgggggtattggcatcttacaaacacacttacatggataacagtggtctcgctctggaacttatacgtgcatcatatgaggatgtaaacatcgagaagatcctagattcatatataagaaaacttaaccactcatttaatgtactttgg

SEQ ID NO: 113557 - DNA, 259 bp, Arabidopsis thaliana columbia
cccacgcgtccgcgccttcgaaatcgcccttggagagaaacggcgctaaggtttcgtaaagttgtgaaaaagtgaaaaaatattttttatatgtccggtaaatggtccggaaaggttaaaacgtacattggtaaaatcaaaggttcggtacgatgtggatgactgaaatataagtcgtctggataaaattattcaccaaacgactgaaatataaatcgtccacaccctaaatataacccctaaacttaattatctaatt

SEQ ID NO: 113558 - DNA, 307 bp, Arabidopsis thaliana columbia
  unsure (1)..(307): unsure at all n locations
gggaagacccgggcggtcccacgaatgcgaccaaacatacaagcctaaaatacaaaggccacacctcagggncactgggagattctaggtttttttggtgccaaaaaaacctactaaacggccgcccaaaggacccaaaagctaaacacatacatcggtaaaatcaaacgtccggagcgaagcaggcacactaagggctgttcaactggctcaaccaacagaaccttataactacaggcataaggctgacatatgcacacgcgcctcagatactccgcaaaggcggttcaaaagagcgaaacacata

SEQ ID NO: 113559 - DNA, 380 bp, Arabidopsis thaliana columbia
tatcctctaacattttcgtcttcctcatgaccgtatccgctgtgactccagcagtgcccacctaaaaacattatggtctttttatcagtttcagcttcaaaactaaaacctataaggttgcagattttttttacccttgtatagaaatcaggtggagaatatctatcaaagtgtgtgtgaggaaaatcgtagtaccagccttctcccatgtagatagttacctataaagatatgtataagtagtaaagtcaaaaatattataagttcatgaggttttacacaaaggatatatatctgacccttagtgttgtctttacaggtaatgtagcttccggatcaaacacagggtcagacttcaacagaatatctggtttcttgat

SEQ ID NO: 113560 - DNA, 125 bp, Arabidopsis thaliana columbia
  unsure (1)..(125): unsure at all n locations
ccgtccggcatcacctatgacacatcaacccatgtaacatacgcattctgttgtgatgcttttagtgcagtctaaaccacatgtcataagctccaccatctcttcatggattcactangccacag

SEQ ID NO: 113561 - DNA, 366 bp, Arabidopsis thaliana columbia
acgacatgagaaagatcccaacactacttatcggttggtgattgtatcggtattactaggaggtttaaacatggaagggaaaagattggatcttaaatttcatcactctacatcatcacaatctgtggaatctgctgcattggatttggataaaaatggttataatcatattaaattggcgtctagattagcactgcagccgagctcatgaggcggacaacaatctgagactcgggcttctactgctgcttactagtcttggcctactcaaagcatattgaatgactcagcagaagacagagcaaactattttgcaaatcttaagaagagcgtgaagactgcaacgcttgatgatgtacctactgg

SEQ ID NO: 113562 - DNA, 357 bp, Arabidopsis thaliana columbia
caacactaacggaatcgttatcgttaccgaaatcgccaccgctacttccgccgttgacgccgtcagacgatgaataacggagaatcgagcataatcgagtactgagtccatcggatagaagagttctgtgattgtaaataacagaagtaggagccgacagtaacgggatactgcgacggaggagaagagggaagcgggcgtgaaagagagcggcaacggccatgatcgccatggcagaagaaccaccgcgacgggattggtttcgaggtgatgacgtatcgttggcccagcccagcccagcccattagaaactatccatacactgggcttggcccatttaagtgacttcattttttc

SEQ ID NO: 113563 - DNA, 364 bp, Arabidopsis thaliana columbia
tgaaagccggaagctgttaacagtaaaccttctagggctcatcgtcgttgttacctgaatctgcaaagatgttctctgctcagaacaagatccacaaggataagggtgtggcaccaactgagtttgaggagcgagtcgctcaggctttctttgatttggaaaacaccaaccaggagctgaaaagtgacttgaaagatctctacattaaccaagctgtttcaatggatattgctggcaaccgcaaggctgttgtgatctacgttccgttcagacttaggaaagcattccgcaagattcattcccgtcttgtcagagagctcgagaagaagttcagtggtaacgatgttatctttgttgccaccag

SEQ ID NO: 113564 - DNA, 369 bp, Arabidopsis thaliana columbia
ctactcccatcatctcctccagcttcttcttcttcgtctctgaaactagtttgattcagccatggctaatgcggcgtcaggtatggcagtccatgatgactgcaagctcaagtttctcgaactcaaggctaaaaggactttccgtttcatcgtttacaagatcgaggagcagcagaaacaagtggttgttgagaagctcggcgagcctggtcaatcccatgatgactttgcagcttctcttcctgctgatgaatgccgttacgccgttttcgatttcgatttcgtcactgctgagagttgccagaagagcaagatctttttcgtcgcatggtctccggacacagccagagtgagaagcaagatgatcta

SEQ ID NO: 113565 - DNA, 366 bp, Arabidopsis thaliana columbia
aaatagacctcgtcgtccgtcactgatctcccaactcatctctgcctggtcttctcggcgagacttttgggatcaatcatggatgaagagtacgaggttattgttctcggcaccggtctcaaggagtgtatcctcagcggtctcctctccgtcgatggcgtcaaggtgcttcacatggacaggaatgattactatggtggagaatctacatctcttaacctcaaccagctttggaagaagttcacgggagaagacaaggctcctgaacatttaggtgctagcagggactacaacgttgacatgatgcctaagtttatgatgggaaatggcaagcttgtgcgtacccttattcacacagacgttaca

SEQ ID NO: 113566 - DNA, 365 bp, Arabidopsis thaliana columbia
tttcaaaaaaacttaaactatctttttcatctaagaaaaaccgatacctctggtaattaaagttttttggtcactattcaattttccttctcaaacaaatttattagacattaatcaaaaatatataatggctgaatctaattcaaattataaaaactttttttctttacttagaattcctcactctcaaaaattgattccaaatgctctttctacaaatgattccgctacttctgcaatcactttacataaactattgcttttaaaatctattcactaacgtttactacaacatatacacaataccccacattattattggaaatgtcaagcttttgcgtacccttattcacacagacattaca

SEQ ID NO: 113567 - DNA, 366 bp, Arabidopsis thaliana columbia
cgtggctggatgcgaggaggcgaaacaggagatcatggagtttgtgcattttctcaaaaaccctaaaaagtacgaagacttgggcgccaagatacctaaaggcgctcttttagtcggtcctcccggaacggggaagactctcttagccaaagctacagccggagagtcaggcgtcccgtttctctccatctcaggctcagacttcatggagatgttcgttggtgttggaccttcgagggtgaggaacttgttccaagaagctagacaggccgcgccgagcattatctttatagacgagatcgacgccattggtcgagcgagaggacgcgggggggtaggtgggaacgatgagagggagagcacttt

SEQ ID NO: 113568 - DNA, 361 bp, Arabidopsis thaliana columbia
ggttaatttgggaatttagggtttttttttcttgaagatgacgactgcggctagaccaacgtgggctccggcgaagggaggcaacgagcagggcggtgcccggatcttcggcgcttctcagaagtattcgtctcgcgatgtcgccgctcacacgactctaaagccaaggagagaagggcaacacacgcaagaggaagtggagaagaagaatcttcgtgatgagcttgaagagcgtgagaggaggcacttctcttccaaagacaaatcctacagtgatgatagagaccgcaggagagggaatcagctgttactcgaaggctcgaagagggaccctgaagatcggattgttcctcgcagtgtc

SEQ ID NO: 113569 - DNA, 345 bp, Arabidopsis thaliana columbia
gccaccacaatcacaaaactctgagtcaacaagttcgattgtgcagcttatttcacctgcctcctcaacagtacaatcatttgattcactggtgaaagacactcatcttgggtcaagatgctacaacattttcgatctgagtattgatcactgtctggattgaatgaggaaacacagcagagactgagtgaagttaggggaagaagaataccctagattactcaacaaaaaagtaaataaaaggccctgaatgatggacactcgtaatggagctggaagccacaactttcagactctgattttgatcactgtctggatagggcagggttgatgtcaactctgatt

SEQ ID NO: 113570 - DNA, 373 bp, Arabidopsis thaliana columbia
cccacgcgtccgaataaacatacacacacatatagttgttcaaaaaaaaaaaaacatacacacatagcaaatggcgaacaagctcttcctagtctccgcaactctcgccttcttcttcttactcaccaacgcctccatctaccgcacggtcgtcgagttcgacgaagatagccaaataggcccatttggcccacaacaatgtcagaaggagtttgaacaaacacaacatctaagagcatgccagcaatggatccacatgcaagcaacgcaacccccttctggtccccgggccctcgagtttgaagacgacattgagaaccctcagggcccacagctgaaagtaacgctattccagcaatgctgcaatgagctt

SEQ ID NO: 113571 - DNA, 369 bp, Arabidopsis thaliana columbia
tccttattgtcattctgccagacaataatggatcattatatggtgatctgaagcgcatctgtgagaccgaactcggcattgtgtctcagtgctgcctgactaagcatgtctttaagatgagcaagcagtatatggccaatgtggctttgaaaattaatgtcaaagttggaggaaggaatacagtgcttgttgatgccttgtcaaggcgaattcctctggtcagtgatcgccctaccataatctttggtgctgatgtaacccatcctcatcctggagaggattcaagcccgtctattgctgctgttgtcgcatcccaggactggcctgaagttaccaagtatgctggactggtgtgtgctcaggcgcata

SEQ ID NO: 113572 - DNA, 360 bp, Arabidopsis thaliana columbia
aagcaaagcatctctctcattttcccacctgattcgtcaactgcctcttgctttgtctgtattacatacacaaagactgtgatctcgatctctgtatatcccatcaatggcggttcacaccgtgaaatattggctaacggagcatcctaacatcgttaacttccgttggagtccaactcaatcatacgcctccacgtggtttttcctcttcgccgccgtttcatcatacgtcatcgccgccgtctctctccacatcctcctcgcagtcacccgacgccgacgcggcctctccctcggccctatccccgctctgcacagcttagccatggctctgatctccgccgtcatattcgtcgggat

SEQ ID NO: 113573 - DNA, 235 bp, Arabidopsis thaliana columbia
aaccacaaatacaaaaattttactacccaattccacaactgcctcttgctcacctggctatatacactattattgttatctccacctctgaaaaacacacaaattgcgtcaaacacctacaacaatttccatctcgggcatcacaactatcttaacttaacgaggaaacacaccatacactacgcctacacacggtaataacaattccccaccttactaccctacttactggacc

SEQ ID NO: 113574 - DNA, 374 bp, Arabidopsis thaliana columbia
aaacggtatgcactcgctcatactctatcaaataggacattatatatattatatatatatatatatattgatatgcttacagagtttacagtaacaattgtgaggtcagttattgtaatgttccttttttaccaagaattggatacatttctatttattacaaggagaatgtatataaacaaagttttgaaactgagggagtcgctaagatcttacggttaaacgtgatataacctctaacatgttcttatctcggcgatggtttaggcattccttttagttgttttatagagtttgtggtttatttattgggtttggcgagaatatgaagaaaactcggaagaaagcatggttaactgtaagcaataaactag

SEQ ID NO: 113575 - DNA, 399 bp, Arabidopsis thaliana columbia
ggggcgacccaggcgtccgaaacaaggttaaacacatacacaaatggcgaacacgctcttcctcgtctgggcaactcgggcctttttcttccttctgaccaatgcctccgcctacaggacggtcgcggcagtcgacttatattatttactaaccacacagccggcccatttaggattgcaaagtgtatgaaggagtatcagcaagcacaacacctaagacctcgccaacaatggctgcagcatcaaccaacgcactccggtagtggtcctagcttggccctcgccggtgagtttgattttgaagactacatggagaacccccagggctcacagcagacgccgacactactccagcagtgctgcaacgagctccaccaggaagagccactttgcgtttgt

SEQ ID NO: 113576 - DNA, 419 bp, Arabidopsis thaliana columbia
ggacgcctgcggtaccgctgcggcgacccacgcgtgcgcacgcgttcaacactgagagccatgctgcgcgacttgactggttcttttttcaggcttctgtaatctatctgtgtgaccgcacttaatatcccgactcacagctgtctgactaagcatgtctttaagattcaatcatgaaccttcttctcttctagaccccacaaagttgcccccttttatttgatcggcgacggagaagcctaagtctgatcccggaatgtctgtctccgagctcaaagaacgccacgccgtcgctacggagaccgttaataacctccgtgaccagcttagacagagacgcctccagctcctcgataccgatgtggcgaggtattcagcggcgcaaggacgtactcgggtgagcttcggagcaacggatc

SEQ ID NO: 113577 - DNA, 361 bp, Arabidopsis thaliana columbia
  unsure (1)..(361): unsure at all n locations
gtttaaagaccttaaagagttgtaatggtttatgtctgtggagaatcctgaagggttatgaagtgagagagagataaatagaaagaaaagaaaaaaagagaagagagaggttagagacatggtgggctcaggaggagatagaagcaaagatgctgtagggatgatggcacttcacgaagcacttaggagcgtatgtcttaactcagactggatttactctgttttctggaccattcgtccccgaccgagggtccgtggtggtaatggatgcaagattggtgatgaaagtggcagcttgatgttgatgtgggaagatgggttttgtggaggaggnggagaatgaagatctttgtctggaacc

SEQ ID NO: 113578 - DNA, 373 bp, Arabidopsis thaliana columbia
cggacgcgtgggttgcagtgtttcatcgagtcaaagtacagagacggtggacagacaaccgaatccgaggtagcgggtttgctcatcgctgctctctttgcaggacagcagacgagctctatcacttccacgtggaccggtgcttatctgatgaaatacaaagagtactcgtccgctgccttggatgagcagaagaagctgattgagaaacatggagacaagattgatcacgacatcatatcctcggagatgaatgttctctaccgttgcattaaggaagcgttgaggcttcaccctccgttgatcatgctaatgagagcctcccacagtgatttcaacgtaacaaccagggatgggaaaacgtatgacatcc

SEQ ID NO: 113579 - DNA, 299 bp, Arabidopsis thaliana columbia
ttccgggggggcccacgcctccgattaaaccgtactttctcggtttcttaaaattccaaccatggccaaaaaccctttctttgggaggggagaatattcgcccctggggtccctaaaaccgagggcgtttggaaaccaaaaccaccttgcccacccggccaaaaaccttgtatgggattcaacccaccatttttttagcttaaattaccacccttccaccaggcttcggggtaagggggcgttgttacctgggggggactttgggattggtcaagtcggggaatcctgttttgcttccg

SEQ ID NO: 113580 - DNA, 376 bp, Arabidopsis thaliana columbia
cagcaaacaaaacaaagatttattgaaacctgtggcgatataacaataagtaaatcatccaagctaaagtagaaactaacctgaattgctgcgtaattgaagtgaccaagatcagcaaacatggcctcagcacctaaaacaaagactcaacgagttagattactgacattatttatggcgacattaacaatatcgatttcttatatatctcaccagttatgcacaacaagatcccgcctagagacatccatccgcttactctcgtctttctcaagaacatgaacatgtatgtaggagaaagagctttgtatatatgaggattccactgtattatattgtacaagccaataccacttatacagagcagccaagtgag

SEQ ID NO: 113581 - DNA, 361 bp, Arabidopsis thaliana columbia
ccggaaccgccgcggcgacccaggcgtgcggataaaatggagcatagtaccatgctgctcatagacaccatagtaccatattccaacacggaaggagtaatagctgtggaagtcaaaaatatgagtcgtaatggaagagacccaaaggtggaagaacatgaagatagtatactgcttgagctacattatgcaaatgaagaatttcaagagtgaaatcaaggactacaaagacttatgggagttgtatcaattgtagccacaatagaagaagttgatgtcaaaaggaagttgtttagtactaccacaatacaagagaagacgttgacgtcaagaagaagaagtctagtactaccagagtaaa

SEQ ID NO: 113582 - DNA, 363 bp, Arabidopsis thaliana columbia
  unsure (1)..(363): unsure at all n locations
atacgttcaaaacaaaatatcgatgcatcagcacctncnaccattgtgcatacgcgaaatatttcgggctaaacaaccccccacacttcatttcacagtcatatacgggttcagaaagaagaacgcagctcccaaaaagagtaccaaaaagactgtgactacggacccgcctctttggcacccagtccccacctctccacaccggcttgatggttcctcggttggagattacggaaaacatcccttcggtttaagcaaaccggccgagtatctccaatacgaaatctattcactataccacaacctggctgagaacttagccggagacgtgatcggaacccccacggaagctgccgacgccaa

SEQ ID NO: 113583 - DNA, 362 bp, Arabidopsis thaliana columbia
caattgattcaaaaatagaactactatgatatatggaaacagtgtaatcaaaataaatagtggtactactaagaataggaatagcatgttatatggaattaacattaaatagagtcatcatttgattgtcttttttactaagtcataatttgactgtttctttgcatttaacatgttaaagtagtgtattacattcagaagaaatatgtacatgtgttttgttttaattccttgaatatgatttgcaaaagtgtgaaacaaaaacaatagttatcacttgcaaatgatatatatttgattaacatacatgtaaatgctaaggtggacgcagggtgagggagtgttaaaccgtttgaaattat

SEQ ID NO: 113584 - DNA, 364 bp, Arabidopsis thaliana columbia
cccacgcgtccggaaggagcttctgcgtttaaagcataaccctttcgagacatggcggaagagcaacagaagacgtcttcttcttcttcttccttacagcaaccttctcctgacaagaaacccgaagatgctgagatcaagcctcaggatccaaatcatggcgattctccaaagtatccgtttatttatccgggtcttgttccccggtcgaaccctggacagtgcgatgaacaaatgaaccgtggagctggcatttatgcggctcctgttcatcagtttggaggatatgtcgctggtcttccctcgaactatctcatccctctcacttacaatgttcccacgactagaccaagcaatgagactg

SEQ ID NO: 113585 - DNA, 210 bp, Arabidopsis thaliana columbia
aaatgctcgtgtgaagatttggattatggatggacatagttggatatattttacgtttaaaatgtgaagtattacattattttttctatggtatgaggtttacttgtattatattataattgtatgtacaggagataacatatatattatatagtatgtatccaaagaatacaagtttcctgaactgatctgaaacgacccagttttcag

SEQ ID NO: 113586 - DNA, 255 bp, Arabidopsis thaliana columbia
atcagaaaaatgcatcgagtcttatctatattttaatattataggacactctccatccatcactatgggtgacatggcgcccaacctaccaacgggtaccacacatgaccagctcaaagctcatgaacccttccacaatattaggagcgaggctttcgtaatgcgggctattacaaacatgcatgcaacatgcagcgttgcgctattgcctaaatacgctcatgaattcaacctgagaggcttgaatctcctact

SEQ ID NO: 113587 - DNA, 359 bp, Arabidopsis thaliana columbia
agcctctctgctcgttttgcgtttccgagcaacaatgtcggtaactttgcacacgaacctgggtgacatcaagtgcgaaatcttctgtgacgaggttcccaagagtgctgagaactttttggcgttgtgtgctagtggctactacgatggtactatctttcatagaaatatcaaagggttcatgattcaaggaggagaccccaaggggaccggaaaaggaggaactagcatctggggcaagaaattcaatgatgagatccgagactcccttaagcacaatgcaagagggatgctgtcaatggcaaacagcggtccaaacaccaacggaagccagttcttcataacctatgcaaaacaac

SEQ ID NO: 113588 - DNA, 368 bp, Arabidopsis thaliana columbia
  unsure (1)..(368): unsure at all n locations
cggacgcgtgggcggacgcgtgggaagaaatttgccgagggttccaatcgcaatcttagagacaatgtcgacggtcggagaacttgcttgcagctacgctgttatgatccttgaggacgagggcatttccatcacttctgacaagattgcgactttggtcaaagccgctggtgtcgagattgagtcatactggccaatgctattcgccaagatggccgagaagcgtaacgttaccgacctcatcatgaatgtcngtgctggtggagggtgaggtggtgcacctgttgctgctgccgcccccgctgctggtggaggagccgcagctgctgcccctgccaaggaggagaagaaagacgagccagcagaag

SEQ ID NO: 113589 - DNA, 173 bp, Arabidopsis thaliana columbia
gacttagagcttccaggcccggtcaccttaatttcgaaattccccaggaatcacaaaaagtgggactcacagtcattgggcatggaaaaaattgtacctagtcaacaatgaagcaactcttacatatggaccagggttgttggagaacataaccaagagtggatttatgtttt

SEQ ID NO: 113590 - DNA, 375 bp, Arabidopsis thaliana columbia
atcagaaaaatgccgattgaagaatcaaagcaaaaaaaaaaaaaaaaatgttttaaagagatcgtggggaaaaacaaatgagtacaatgatttggaagtcgtagatttggctttcaaccaaccaaaatacttgtatgtatttttaataggttgttatttagatagtgagtagactacgcggtttgaaaaaaacctactttgaacttacgacttgtaaaaaaaagtgtagttcatcattatgtaatagttcaacttatgacttttccaatttatcaaagaagtttatcataaacgttttctcttttagatgttaacacattgtctccttaaatactttgcttttgacattagatacgcaataaatagcaacacttt

SEQ ID NO: 113591 - DNA, 360 bp, Arabidopsis thaliana columbia
cccacgcgtccgctacttctccggccgaaactatgtctcagtctatccaattctcaactccttcacgcactcctcaccttctccacctccctaactcacgcttccaccgtcctctcacttccttatccttccgccaattccctctcaagtacacctcaatcagagcctcctcctctccagatctcggctcctcctcatcctcccaggtccttcactctcctaacggcactggcgctgccaaaccggaagagcgatccgtcgtagccaccgcggtttccacggatacggcagcgatagacgtcgataccgtgacggaagcggagctgaaggagaatggattcaagagcacgaggaggacga

SEQ ID NO: 113592 - DNA, 362 bp, Arabidopsis thaliana columbia
gggagatagatggagagaggagagagagcacgcctgtaatagggcgcccaaaaaggattacagtcccatttactgtatcttaaagcccaaaggcctttttccatctcgatgcttattattatcttgttttcgtgaaacgctgcgtttaacaaaagggtatgaaacgctgcgtttcatttatgtgaaagtgaattcttagtagtatgtgtcttgttgtgcgaatttgataatctggtttggtttggttcagtaatatggagagaagtgttcatatcatctagaaatttccaaacaccagtcagtttacctttagactttagtgattctgtttaaatcatgaacctaccttaaaactacaaact

SEQ ID NO: 113593 - DNA, 384 bp, Arabidopsis thaliana columbia
cgaagatgcgtgagattcttcatattcaaggaggtcaatgcggaaaccaaatcggttccaagttttgggaagtggttaatctcgagcacgggattgatcagacgggacggtatgtaggagattccgagttacagcttgagagggttaatgtatactacaacgaggcgagttgtggaaggtacgttcctcgcgctgttctcatggatttggagcctggaaccatggacagtgtcagatctggtccgtacggtcagatctttcgaccggataacttcgtctttggtcagtccggtgctgggaataactgggctaaaggtcactacactgaaggtgctgagcttattgattcggtccttgatgttgttcgcaaagaggctgagaact

SEQ ID NO: 113594 - DNA, 378 bp, Arabidopsis thaliana columbia
cccacgcgtccgtgaaaatgaaccaagtaactcgtgtttcatgtgttatcataagggcaattttcctaggcctcttaaagttttaataaattaagggcaatatttatatactttcagatttttttttttaatagttaaatagaattcaacaggacccggcttaatgtgtaacgggcctcattgtgtaatccaaggtaatcaacgtagttgcatgactatccaaaattaaagtaatgcttcatgtgttctacgttaaaggcctcgtaaaacttaataaatttagggccacatttctatataaattagatttcttcagttaattaatttccttttacttcttaatcactatattagattgcatcattaaatctttggtta

SEQ ID NO: 113595 - DNA, 287 bp, Arabidopsis thaliana columbia
ttttcgtttaacagtttttttttcttcttgttaaaagtacaacataacaggagagcccaaagaaattgaaatctcaaacccaaattacaacgccttttattgtatcaaatgaaacatgtaactaaaggtcgcacatatgcagattaacctcccattaccaaatagatcatgaaactaacaaacttctcaacatcgaccttgttctacccattgctcttgagctttttcttgactgtggaaaaactccaccatctgactacaaatgtcccgcttaatctatgtagaac

SEQ ID NO: 113596 - DNA, 384 bp, Arabidopsis thaliana columbia
  unsure (1)..(384): unsure at all n locations
taatgattgctgtaataattaataatgaacaggggaccttcccacacggtggccattggtctttccttgaactttaacctccaacatttccgtttttacaccaatcctgctgaacaaaaatggatggttaaagatttgttgttggtgccagttcatgcaactgaatcgatcatttacttgtgcaattcgaaattctcgctgccttgtgacattttgagaaactgctatgaagcttttgctttgtattcgtttggaagctacttggaggcatgtctaggtggtgaaagaagagttgttgaattaccttgaaaatgaatcacagaaacccttgttagaagaaagagcaaatgagagtnaaaagaagaagaagaagaattcattttg

SEQ ID NO: 113597 - DNA, 285 bp, Arabidopsis thaliana columbia
tttgctgctggttcccggcaccaatcgttctctccttccacgacaaggcctgacgctcacacaacacagggcgagatgtgcgacatctgcaattcacacgcgagacgatacacagccacgagggcgaggttgacggttctttgagccaagcatctttcaagactccaagggactgggactccccgctctgatcaagggccagcactgaagaaactcttacacctgctgcatgcacgatcggtgcatctctctccaacgatcaatcggactcttacggactctctg

SEQ ID NO: 113598 - DNA, 368 bp, Arabidopsis thaliana columbia
  unsure (1)..(368): unsure at all n locations
ggnngagaggaanncactacacacacacacaaaaaaaaannngagggcctcccccaaaaacaaaagggggaganaacgagcaanngnnnnnnnncagaaaagagccngaatnnnaacattttttttttgcaatctccccctaatctgttgtcccttgcttcnttttcttctgttaatcatctgtctttcaaaaagaaagaaaaaagaaaaattcgatttctgggtttgtttttgtcatacagaaaaaaatcaagcttatgaatttgtgtttaatttttttgttttaatttgaaaggcaggtattttcagaacgagatcggtttttcaaatttcttctgattttacctctttttttcttcttaaatttt

SEQ ID NO: 113599 - DNA, 382 bp, Arabidopsis thaliana columbia
attaagacaagccattttataacttgtgaccagtccctgtttatgtgggtttcaatctttaacctcaagtcttctggattgaatcatttttttataagaaccaaggcttttcgatatttctggtgtaggaccttttctcttgcttcgttgtctgacaataactcaagattccatactaattctggtaagctaccttactctggatcacggtactatgtttccgatgcaagagttagctcaagtaagcattttggtgaagattttgtttcgattctgaagaatattgatgtcccaagggattgtgttgagactattagaaatgtgcttgtgaaacacagttggatacagaaatatgagagtgggtttagtactgagcttgatc

SEQ ID NO: 113600 - DNA, 387 bp, Arabidopsis thaliana columbia
aaaacaacatggctgcctcttccacgaaggcatagatgttgccttcggatcatcaacataccgtgtctaccccgactcatacgctctttatcctactactcatctctaatttctcactactactactaccacacgtgacggcggctcctatctcctacgtcaaccaacccgaactcgctcttctcattcccttcggctaacagtatccgacaccgccaactctacatcttcttattatacaggaggcgagactatcgagaatgtgctgattataggctccagtcccgacggttatacggcggcgatatatgcaactctgcgccaattagaagccatgggattctgaagggtatcagatgggcggagttgccggtagacaatggatga

SEQ ID NO: 113601 - DNA, 374 bp, Arabidopsis thaliana columbia
cgaagatgcgtgatattttttatattaaaggaggtcaatgcgcaagccaaatatcttccaagggtggggaagtggataatttctagcacggtattgatcagacgggacagtttgtagtacaactcctgttacagcttgagagggttaatgtatactacaaccaggacgagttgtggaaggtacgttccttgctctggtttcatagattaggagcctgaatccatggacagtgtcatatttggtccggacggacagatctttcgaccgtataacttggcatctggtcagcacggtgctcggtataactgtgttcaatgttactacactgaaggtgctgagcttattgattgtgtccttgatgttgttttcaaaga

SEQ ID NO: 113602 - DNA, 389 bp, Arabidopsis thaliana columbia
tacacgaagagtttacaccgttgatctttgaaggcatttcgtacagttaatatcggacggttgataattgggatgctgtctgtcacatcgtaaggcgtgtcatacacaccaatttcattttatttttaattaatacatcctaaattactgaattcttatcaagaaaattgattcgatttgttcaaaatatatatgataatgagatatagcaaatgagatcacgagtaaatttatgtagattgaattagttgatattttatggaatcatccgatgataaaattgagtatctccgtatatttagcttacgaaaatataccattcaattctccctctctcatatttattttgttcctttttcgattaaacatgagctaaaaatggtgacaca

SEQ ID NO: 113603 - DNA, 309 bp, Arabidopsis thaliana columbia
aactttttctccaagaccctctacaactttcttgatggcggtaggaatctttggattgatcccaagctcatcaccagacgagctaaggaagattcttcaagcgctttcgacgaaatggggagacgtagttgaggattttgagagtcttgaagtgaagccaatgaaaggagcgatgactaacgaagtgttcatggttagttggcctagaaaagaaacgaatcttcgatgtagggagcttcttggtccggtttatggtgaaggtgttgagcttttcttcaatagagacgatgagattcgtacttttgagta

SEQ ID NO: 113604 - DNA, 352 bp, Arabidopsis thaliana columbia
  unsure (1)..(352): unsure at all n locations
gaccgacccatccgaacacgcnctgcaagaccctatacaactttctcgatggcggaaagaatggggggattgatccgaggctgatgacaatacnacctaattaagattgattaagcgcttttgacaaaaaggggagacgtagttgaggattttgagagtcttgaagtgaagccaatgaaaggagcaatgactaacgaagtgttcatggttagatggcctagaaaagaaactaatcttcgacgtagaagagcacttgttggtaaaaacaatcaaggtgccaaccttgtcttcacaaaaatatatcagagttgaacctttcaagcttttgttcaaaatggtcaccgacctacac

SEQ ID NO: 113605 - DNA, 389 bp, Arabidopsis thaliana columbia
  unsure (1)..(389): unsure at all n locations
gtgattttaagagtgtggtgcataaaagatgttgagagtttgattacccagataatttaggtgaaccgaacaagagaccttctttgctcaaagaggaagcttttattgcttcatcaaaccggtccccaacaaattgtttcttctggttggaaatgtttggcactgagctttgataactaggctatgtcacagaacaatataatttgaatttgactgtaaactgaggagaaggagattacccaaatcacaagaaaggaaaagaataaaacctcatcatcgcttgatgatccactatccataggtccaggaagttcatcatcagtatcactatcttggaagttagatgaatttcccttatgagtaaatntccgactttttgcttcatgtct

SEQ ID NO: 113606 - DNA, 390 bp, Arabidopsis thaliana columbia
cttctcccaaatacgagctcggtctccaagagaaaatgggaagagtctaagtttgaatgcatcttccgagatcccattgattttcaccgtgctacacaacatatcaaattggtctagatgatccaaagggtcctccattgataaacaatgaaacttagagctttgaaccatgttgatgaggcttgatttaatctcaaagttgttgttctcaaccggaggagcttgaataccgtttctatttccgcggatgtttggctcatcaaaggctccaattggttgatgagctcttggttgatgttgtggcatatgaccacccccattagcttggccatttccattatggcccccaacttcgggttcattcatgacgcctaaccgagcaaggtgttc

SEQ ID NO: 113607 - DNA, 263 bp, Arabidopsis thaliana columbia
cttatacaaaaaacgagccctttcttcaataaaaaacgctaagaacctgagcgagaacacaaatgacgaggggccatagattaccacccaacccacaacatatcaaactgacctacaccaaccactaataaatgcatagatcaacaataaaacataactcatcaaaccattgaacatatgcttgatttaaaatcaatgcagaagttcaaaacactctgaactaacaacccattgctatactcgaagaccattaaataacttaa

SEQ ID NO: 113608 - DNA, 367 bp, Arabidopsis thaliana columbia
cacaaatcgcagtgcaaatgacagtgatctaatcattcacatgacgacatggtaagaaaagatcgagtgtgaaacatcaagtgcagctactgatatggtaagcagaaggaatctaatgtcaaaggacatttactaatcttggatccaagaacacaacatagccacagacattattaatgtcaaggggcataatttagtactcaatcatttcttaatttcaacaatcaacagaacaaaagttcaagatattttaatacaagtgtaataaactataacagaaatcagcaaagactttctgtaaaaaccatgcaggacataatcattgtaattcttcacacaaaatctaggctatcagtaagaatctatc

SEQ ID NO: 113609 - DNA, 393 bp, Arabidopsis thaliana columbia
ggaggtttcatatgtttctcttcttccattgagatcattcccacatgcgttggatcatccatcatcatcttggcgaccaaatagccagcgattgaccatgtctgagatttcctagcctgttttccgatgaatcttccagactttccgtcgtagtactccggccatccatccttcaacagtcgtgcctccgccaactctatagcccgtcgtgctatttgtggccgtccagtctttatgcttgccgccgttagtaaccatagaagcactacattttgcatcagccacatgagtcaacaatattgattgaatgattatatttccaaacaaaaaacaaaattaatcaaatgtggcgttagaaatagaaaatagggttgaatgaaagtatttacgtgg

SEQ ID NO: 113610 - DNA, 396 bp, Arabidopsis thaliana columbia
cttccggtagaaaaagaaccatcaaaagtcccaccaccaaaatcaaagatcaacacgttgttgattccaacacttggtggcttcttggcaagaccataagcaatagcagcagccgtcggctcattgatgatacccaaaacattcaaaccagcaatcacaccaacgtcctttgtagcctgacgttgagaatcattgaagtatgcaagaacagggaccacagcgttcttgatcgaagaacccaagtaagcttcagcgatctcacgcatcttaatgagaaccattgaagagatttcttccgcagcgaattgtttctcttctcctttgtagtttacgaaaatcattggtttgtctgcttgtccaggggttaccttgaagggccaaaacttcatgtcgctt

SEQ ID NO: 113611 - DNA, 382 bp, Arabidopsis thaliana columbia
cggacgcgtggggtactttcgaattcgcttcttgatcaatcacagtgtatcttggagggtatgatgaggaggagaaagcagcgagggcatatgatttagcggctctgaagtattggggtcctaccactcacttaaatttccctttgagtaattacgaaaaggagatcgaggaactcaataacatgaatcggcaagaatttgttgccatgttgaggaggaatagcagcgggttttcgaggggagcttccgtgtatagaggagttacaaggcatcatcaacatggaaggtgggcagccagaattggaaagagtgctggaaacaaggacttgtaccttggaacatttagcacgcaagaagaagcagcggaggcgtacgatatcgc

SEQ ID NO: 113612 - DNA, 386 bp, Arabidopsis thaliana columbia
cacagcattgttgttaactgcatcaaccagccaggttgaatctgtccctctcttctctccggttgggcatccatacgagcaactaccgcaataatgtttctctgttgaattccttggcactattgtcacatccaaaccaagcttctcgcaacctttccgcagaatctggttctgaaacccttctctgatgattttctcagtgacacctaacctcttgcagacaatacccatcgccgccttatatttctcactagaatatattgaaatccctcgatgtactgaccattcttcgatgatagcatcaggtgtttttaaggacgctgcccagtttaccacagagccaccaccgactgttgatcctgccatgaaccggaacctgccatcat

SEQ ID NO: 113613 - DNA, 415 bp, Arabidopsis thaliana columbia
  unsure (1)..(415): unsure at all n locations
cggcccggaataccgggggggcccaagcctcccaggagatatatcaaaagaacaggngaaaggatatggnnggaaaacaataaacagaggcaagggtatttcggggtatagtcacagtgttctgcgcaatactgatccaagatatgtatgccaaagagaatttgccttgaagcatctacctgacgacccccttttccagctggtgtgaaagctttatgaagttgtgcctcctgttctcactgagcttggaaaggtgaagaacccgtggccaaatgttgatgctcacagtggggtcttgctgaaccactatggtctaaccgaagcaaggtactacaccgtgctctttggtgtttcaaggagtcttggcatctgctctcagcttatatgggaccgagctcttggacttgcacttgag

SEQ ID NO: 113614 - DNA, 194 bp, Arabidopsis thaliana columbia
cagccctgatcataggcttggtcgtgggtactgctctacttgctcttgtttgcgtaatgtttcattttatgttgagaaagcaacatgatgaagagaagtcggatgtgactggagaaaagagtattgttcaaaaaactgaaccttcttcttccaatatgattgcagcaaagaacagtgtacagggaaaatgaatc

SEQ ID NO: 113615 - DNA, 391 bp, Arabidopsis thaliana columbia
tttctttcttctctttctctcgctatcttggctcatcaacgatctcttgcatggggatttctacagagacgcagcaaattgcggcttcagaggctgcacaaaagagatggactacaagcgatttcgatatcggaaagccacttggtagaggaaagtttggccatgtttatctagcaagagagaaacggagcgatcacattgtggctttaaaggttctttttaaggctcagcttcaacaatctcaagttgaacaccagttacgaagggaagtagagattcaatctcatcttcggcatcccaatattctgcggctctacggttacttctatgatcagaaaagagtttatttgattttggagtatgctgtaaggggtgagctttataaagagct

SEQ ID NO: 113616 - DNA, 386 bp, Arabidopsis thaliana columbia
accagatcgataatcaacagaaaaaacaatatattctccttcattcactcaaggaggttattgtgagacagtctgttgataaagcggatttccagaattccagcgttgagaaaatacttgctttactgttcaaccactgtgaaagcgaggaagaaggtgtaaggaatgttgttgctgaatgcttgggaaaaatggctttgatagagcctgagaaacttgttccagcacttcaggtcaggacaacgagcccagctgcttttacccgtgcaactgttgttactgctgtgaaatattcagtagtggaacgacctgagaaattagacgaaatcatcttccctcagatttcttctttcctcatgctaatcaaagatggtgaccgtcatgtt

SEQ ID NO: 113617 - DNA, 347 bp, Arabidopsis thaliana columbia
  unsure (1)..(347): unsure at all n locations
ggccctgnagatctaatggatgctttatactggactattcgcagagctttttttttttttttatgtgcaaattcggagatcttctatgtcacctaaatgtttctatgagttaattagccataaaacaataactctctataaacaatcccaaacaattttaggattttttctttcatatgtaacatgctaatattttttaatgtggacgtgctaaaaattcatttaattgtgaagatcctgaaattttactgaacgaattatctctcatactaaccggaaaaattctattgcggagctcaattgtttgtgaaagtttagctgtcattctgctttaaagtcaaaagtaa

SEQ ID NO: 113618 - DNA, 385 bp, Arabidopsis thaliana columbia
ctctattcaagtcaatggagaacttgcagactattttaacagttaaagaggtctccgacagggattctctctcagcccatacttattcgtcatttgcatgaatgttctctcgcgcaagctagacatggctgcaaatgaaaaacagattggctatcagccgaactacaaaagcatgaaactcacacatttatgttttgcagatgacttgatggtatttgtagaaggcaagaagaagtccatagaaggagcctagcggtcttcgaggagtttgcatttcactcgggcttgaagataagtcttgagaaatccactatctacatggtcggagtagacacacatataaaagaagatatccttgctcaattcccgtttgaacagggatctc

SEQ ID NO: 113619 - DNA, 388 bp, Arabidopsis thaliana columbia
aaaacaacaacagaaacaacatcaggcagagaccaacaacaacaacatcgatataaatcagtatattaagagccatgaaaaccaaaccacaaagcgaaaccttccgaaagaaaacctactagcaagttgcagcagctaatccacacttctccgggagtttctcagcgaggtcaaagctcgatatcacggacattgatactgtctttatgcttacagaggcactggaaatcggccttggacagggcattgcagcaagggcccaagggatcaattccggtggtcattgggttcctagcctacacatagggcttgcaagagttcagacaagtagaagtcataccgcagaagatctgtccggttgctgccgtgagtgtaaaggcaagaacca

SEQ ID NO: 113620 - DNA, 399 bp, Arabidopsis thaliana columbia
tctatgtgtaatcgtcaggttagctaaacgtgagacgagattacatgaatacgggctattgaatttgtaatgagtttataaatctgttataaaccggtacaaattccttcaatcaagacacaaaacataccccaacagacaagcaaaggagaagaagaagaagaagaagaagaagaagaagaagaagaagaagaagaagaagaagaagaagaagacagagagagagaggaaagagcttttgcattcgtacctgggacataaatgattaaaccagacagcttcagagagaaaaatccttttaaagaaacattgttccacttcagacctgcaaaaattttaattactcaagcagataaaagcataattttgtgttatatatccttcataatcaatgttatt

SEQ ID NO: 113621 - DNA, 385 bp, Arabidopsis thaliana columbia
gaaacccctaagatttttatttatttttttctcaatttcttcaacgatgaatgtattgaaatgtctagcgatcatttccgttctcggaatattcttcatacctcgttattctgaatccgctatatcttgcagtgttgtgttacaggatttgcagccatgtgtgagctacttgaccagcggaagtggaaaccctccggagacttgttgcgacggagttaagagtttagcggcggcaaccaccacatctgccgataagaaggcagcttgtcaatgcatcaagtcagtggctaatagtgttaccgtgaagcctgaattggctcaagcccttgctagcaattgtggtgcgagcttgcccgttgatgcttctcctactgtcgactgcact

SEQ ID NO: 113622 - DNA, 209 bp, Arabidopsis thaliana columbia
ctaaaatattaagccacaaaatttaagcgtttggtaaaatgatattgaagtttcaataggaatctatcaattaaaatctgtaaccattgaacaaacttatatttaaaaatttgccagtggcaactataaatctatcatcattggattcaaatataaaagattgtcattaaacgtcatatttttgttattattaaacaaatatatcacct

SEQ ID NO: 113623 - DNA, 354 bp, Arabidopsis thaliana columbia
taatgattgctgtaataattaataatgaacatcttctttcccaacaagatttctgttaattatatttatatcaccaattagtaagataaaaagattttgattgtgactctttcactgccacaattagttaaacatttatggtttcttcttcttcttgtttttgtactttgaatttacttttgaagtatcgtaaaaatatggagaatgtgaaagaagagactacttaattttagctgaaattgtgaaaatataatggctcatcaaaatcttctggattgttgtactgaatagcgagcgaagtcaaaaaattttcttccaacacaaccacattatttctgcaataaagaacccaat

SEQ ID NO: 113624 - DNA, 368 bp, Arabidopsis thaliana columbia
gagagagaagagaagagagcatgtatgtttggttttataatctctctactcataccaaagatttgtctcagacccaccacttggacagagagaacccaagctcctttctctctttttctcgatctactccttcttaatctccttttttgaaacttgaagccactttcaacatcatccttaaacttttgttcccttattcacaatctcctgccacctctcatttctctagttgagttgttatctgcgtttttaagcactcgaatactgcatgcaaattccctgattgtttgctacatatatgggttctattagaggaaacattgaagagcctatatctcagtcattaacgaggcagaactctctctata

SEQ ID NO: 113625 - DNA, 370 bp, Arabidopsis thaliana columbia
agaaaatgtttatttaacattttagaattaccaagtgcatggttatatatattaaacaaattattgatctaagaatattgatatttgagagagttttgaggataataattcatatgatttttctctattaattgacgaatctatggttataaacaagtacaatattaatactcaagatgagtataacaacaccggattttaattatatatgctttaattatatttaggattgaaaatatgactatgttagaagaaccatgctgcttatcgtacgtggcttggtgtatagaggtttccagttcaagaaccttattcaaaccaaagcctttggagtgttcttcaacatcatggtatcttccaacttcaatct

SEQ ID NO: 113626 - DNA, 373 bp, Arabidopsis thaliana columbia
gcggtggtgaccattcatgggttgtttaagaagcttagtaagaaggaaacaagtcgactcttcaaatggcaaagcagagactcatcatcatcaccaacagcttgcaaaagcgttgacctttcctcacttgattgccattggtgttggatcaacaattggagcaggggtttatattcttgtgggaacagtagctagagagcattcaggacctgctcttgctttatccttccttatagctggaatttctgctgccctttctgcgttttgttatgccgaactatctagtcgttttccctctgctgggagtgcctatcattattcttacatttgcattggtgaaggtgttgcgtggttgattggctgggcgctgatt

SEQ ID NO: 113627 - DNA, 397 bp, Arabidopsis thaliana columbia
ccggagctccaccccatcgcggaaacacacaatcaacacagaccaaaggtgcttattaacccaagcaaaaactccacgctcctcaactgagatcaatctcaatcatcacctcttttaaccaagcaggcattcttctaaacagagaagacaaaacacaatctatttctcgtcaaccacttgagaaacagcctcttctcttcttttgaacatgaatttcaaaccagatcaagcttcaagagtagacaacaaaaacaacaacttcctctcttatcgagaaaaccaaaattataagaaatgctttgtatctagccagagcttcttgcagaaagacgtcatcattatctacatgagctcttgaaacctgcaacaaagacacacaaacaaattcgattacaac

SEQ ID NO: 113628 - DNA, 373 bp, Arabidopsis thaliana columbia
ctttgggataagatttttggataggtcacttggcgtgttaaatgaacagtacaacttcactctctaatgtcctccccaacccaagaaagaaaaggaccatttgttcctatccttagtttctaaataaaactataaaacatatagatagaattggagataatttgctaacaaaacagtttgaagaattatttggacttttgtttactatatatactttgtttatcggatgtggacaagataacgtcttggtaagtgcatggtaactatatatgcaaaaaagggtcaaaccaactcaattaactttctttgaatttgaaaacgcgtgaatgagaaacgtaaaatgtcggttaaaatgatattgacatctacttaa

SEQ ID NO: 113629 - DNA, 324 bp, Arabidopsis thaliana columbia
cccagatcttctctgtctctgtcccgcggagtccccgagagattgatcaccatacttttgtaccttgcttgcactacctaaggactaagatagcttaaataagcctaacaccccttattttatatggattggtgaaagatcaacatttgaaacatgtggttttttttttgcggcaacagtagcttgagagcataaacgacctgctgttgatttatccttgcttatagaaagaatttcagatgccctttctgcgttgtgatatgccgaactatctagtcgttttccctctgctgggagtgccaatgattattcttacatttgcat

SEQ ID NO: 113630 - DNA, 368 bp, Arabidopsis thaliana columbia
aattaaaagtgtttgactacattttaattaaagactgagaaacaaattaacaaaaaaagaaaacttatggtacgattaagaacctgaaaaacttttagaatctcatacatattgtttatgattaacatacatctatatttatgatatgaatatgcattatacaaaaacatattaaatttataaactacttttaatcttgttgttctcctttttcaccattattcatacatctttattcatctcttcgttaatccaatccatgcattcacgataatcatcaaagttatcgtctatcttcatatcatcactttgattcacagattctatattatgatattcgcatgactccatcatattattttcctcag

SEQ ID NO: 113631 - DNA, 369 bp, Arabidopsis thaliana columbia
gaaaagaagtgacgaagaaagaatgagaagacgaagaaagagaaaacaagatccgattcaaaatatggaaacttgaatatcttcttcttcttcttccttctcctttctcatctctcactttgagggtgaatttggattttgtagaaaatggattcgaaggagatggttgtggaagaaatcatgagaattcatagatctctaccattgagaccagatatcgaagatgtagagacggcaacttctctgatacaaaacgttgaaaaagaagatcggaatcgtttagaagccattgataaacttgttaaaacctcttcttctgaggttcctttagagcttttcaatgtgttgaaggagatgaagaaaagtctt

SEQ ID NO: 113632 - DNA, 388 bp, Arabidopsis thaliana columbia
  unsure (1)..(388): unsure at all n locations
ccggggcgttccacgcgggcgctaaaccactatctttctcacactataacccagctaaaggcaagggcttggcgtttttaaagtttgcgggaccccaacaacnnccgagaaagacgaaaactttcctcctatctagacaagcgatccaccgcatttcactattatcttcaaaaaccccaactttctgcagaaactacaccgccattacatccaccatatctcactctgatcgtcatctaagaaactactacaaacaaaccccattccaaaacgtctaaatccctaaacccattccatgattcaaacaatatttccactttactcgcgacacccgactcagtgaatccactgccgccattgacgactcaaatgaccaacaggaagatga

SEQ ID NO: 113633 - DNA, 376 bp, Arabidopsis thaliana columbia
ctagatgccatcacaagtcgtagtcaaaactccaaaacactgaatacagacacgaaaaaacaacaatcaataaatagtgataaacctcaagcataaagcatttcccatttctaaacatctgaagaaatgactaactgaaaaatgaaggaaatgaccaaaatttactaatcaaaccaattatagaaacctttgttacgtcagctctaacaacaacactaaaaaccatgaaaagtaagcagtttatattaaggttgtttctagctttccatgaaattaaaattgccaaaaaagtgaatttgaccaataaacactaagctaaaagcctaaacttacgcagtaggaccctcgctttcctcacagttcatgccgaagccgc

SEQ ID NO: 113634 - DNA, 373 bp, Arabidopsis thaliana columbia
tgcttcttcgctagcttatctgaaatcaggaagaatctgctgtttttcacttcaagttcaaatcaagtgttaaattctacgaatttttgactttttcatcagtgtttgtcaattgttcgatctatgttgtgcttcttgcctcttgatgtgtcaaaattgaagtcaaaatcgttctacaaagttgtgaggagctacttagcttctcttccttgtgatgttaacaatgttagagatgatgataatattatccaatttctgtgttaagttgtgatctttgttttagaaaatgtgtttttgaagagatgtgcatcttctcagtgttttgttatgtgtattgatatgataacaggcaaacgcggcatcgggaatggct

SEQ ID NO: 113635 - DNA, 377 bp, Arabidopsis thaliana columbia
  unsure (1)..(377): unsure at all n locations
gncgnacncgcttaaaaccgtttttttttaaaaaaaccgaaactatagcgggggttattcacgttttggggactctnaccctcatcatactcctagccaacgcatccatataccgcacagggattgagtaccaggaagatgatgacgtgcgcaacccacaacaaggtaattgccatatggagtttatgaaccatcaacaactaacatgctgcaagcaatggatcctaaagacatcttaacatggaagaatcgaataccaagcttattacttagagctcactcttgatgtctatcttgaagacgatgagaacccaatttgtcctcaacatcagtcatctcttaaaatgtaataaaattaattaatgcaatttgacaaa

SEQ ID NO: 113636 - DNA, 371 bp, Arabidopsis thaliana columbia
gaactgggtttatgtgagatgggggaaaaaggtgcactgaagtggagcgatgaagatgcacaactttttcatgaggttgtttattccaatcctgtaacattggggcagaatttttggaggcacttggaagctgcattttgttcccgaactcagaaagagattgttagcttctactttaacgtatttgtcctcagaaggagagccatccagaacagagcttttatattggacattgatagtgatgatgatgaatggcatggatgttatggaggctcttctggtactcgttatgtagaagaagatgaagaagactctgcaatcgagtctcctcttcatcaagggactaagaaagtgtatccactccatcatga

SEQ ID NO: 113637 - DNA, 369 bp, Arabidopsis thaliana columbia
gcagcgttaaaagtctttttgttcaaacactcttcagaccacttgaggtttgcttattgttttgtgaaatgaacgaagcaattatgtaaactccctcattactcttttgaataataataataataataataataaaaagatattgattcctcggttatctacctcttaaaagacctaaacagcaaaatacgataggttgggtgtgtgaccaaaaaaggaaaagacgaacgaagaagtaagaaaggaatattaaaaaaagaaggaaaaattaaagaaatggcctttgagagaattgaagtggcccaatgagggatggagcagtcaagtgtggggtctctctcacctctccacgtttttcgtctcttcgct

SEQ ID NO: 113638 - DNA, 371 bp, Arabidopsis thaliana columbia
gctgatctctttgggctgtcttcgttctctatgtctcaatctctctttatcacttacacaatctttctctgtctctcttggttatctccatattaaggtaagaagatacgatctaaactctggcttgttcttgtttctagattttttgtgcgatctacttgcatgcgggaggagacctttagcctttaatcattcattatattttaagagatgggtagtatcgaaaaaagcttaatctattagttaacgcgtggttaagtgagattagcaatgtaacctagttgttaataggctggtccttaatttttctcgagtcatgtatatattatatcgtttctttttccactctgtctctctcgaggcgttttaat

SEQ ID NO: 113639 - DNA, 363 bp, Arabidopsis thaliana columbia
gctgatctcattgggctgtctttttactctatgcctcaatctctgggtggcacttacacaattttgcggtgcctctcttgcctatctccatattaaggtaagaagatacgatctaaactctggcttgttcttgtttatagattttttgtgcgaactactagcatgcgtcaggagacctttagcctttaatcattcataatattttaagagaaaattagtatcgaaaaaagctaaatctattatttaacgcatggttaattgagattagcagtgtaacctagttgttaataggctggtccttaaataatttcaagtcatgtatatattatatcgaaactattaccaactagactatctcgaggc

SEQ ID NO: 113640 - DNA, 366 bp, Arabidopsis thaliana columbia
cttttggagtatgagaagcatttaaggcaaaatggtgagcttaaccttcctggttcagcttctcttccgtcttcaggcattgaaaaggaggttagaattcctatgaaattgtgtaattcttatgcttttgggtaggtgaacactttgagaggaggtcaatttaagagtaggtaaaccatgttgttaaattagataaagtgaaagctctgcagttctttataaaatcattttatacagatggaaatttcgggcatgagtaatatcagcttaacatgttgaatactactctctgcaatctgattgaataaagctgtaccgttttgtgttatatgggaaacataagaaataatatgtacacaacacaga

SEQ ID NO: 113641 - DNA, 351 bp, Arabidopsis thaliana columbia
gagtatgataagcatttttttcaaaatggtgagcttaacccccctgtttcatcttcaatttcgtgtgcacgcaacaaaaaggaccatagaattcctatgaaattgtgtaattcttatgcttttgggtaggtgaacactttgataggaggtcaattcaagagtaagtaaaccatgttgttaaattagataaagtgaaagctctgcatttctttataaaatcattttatacagatggaaatttcggtcatgagtaatatcagcttaacatgttgaatactactctctgcaatctgattgaataaagctgtaccattttgtgttatatgggaaacataataaataatatgtaca

SEQ ID NO: 113642 - DNA, 376 bp, Arabidopsis thaliana columbia
ggaattttcgttcacatgaatattttcacattttttagctgatacattaatatatatcagacagaaaataattggacatactagtttaatgcaatataaatagtaattaatgttatccacacggacatgtataaagttcgaggatatttttgtttaaaataaaaacggaattcttatgaaaggtattgtggatagttgttacattctatataaatcaaatatctacttgtataatttatgtaaataataagtattttgtaaattgtgagtagttgatgaacctctgtcatggttttagctggtaaaggagaattaatttgtattttattgtagttggtaacagacagttaagagcattaggtcagtatctacgttt

SEQ ID NO: 113643 - DNA, 373 bp, Arabidopsis thaliana columbia
acctattaatgcgaaagcgccgtggagagcaacaaaagcccatagaccacctaattgacaccaacgagtaaaatctccttgtgcttcaggaccccacagtaacaacaaagaatgcgctaaactattagcaggagtagaaactgcagcggttaaaaaattgcaaccttctaaataggaactggccaatccatgagtataccatgaagttacaaaggttgtacctgtgaaccaaccccctaaagcgaaataggcacaaggaaagagcaatagaccagaccaacctacaaaaacgaagcggtccctccgtaaccagtcatccataatatcaaataaatctttttcgtccttggtaaatttaccaagggctatagtc

SEQ ID NO: 113644 - DNA, 371 bp, Arabidopsis thaliana columbia
cggacgcgtgggttcgttttctagtgttatgtttgaaagactatccaagaatggtagagagtttgaagaggaaacacgggaccatgtaaacgagtatgctgatgcagggctgagaactttgatacttgcttatcgtgaacttgatgagaaagaatacaaagtattcaatgaaagaatcagtgaagccaagagttcggttagtgctgatcgagaatcgctgatagaggaagtcaccgagaaaattgaaaaagacttgattcttcttggagctactgctgttgaggataaactccaaaatggagtaagcaaacactgatgatagtcatataatcaatttatagttggtggattgaaatgtcttatcttctctc

SEQ ID NO: 113645 - DNA, 377 bp, Arabidopsis thaliana columbia
gcaggtgagagagagaaacaatggctaagctacttcttcttcacgcgcctcatgtaatacctaggtttagcagcagtagtagtagatcactggtctccgcagcggctttatacagaagacctctcctcgtgaatccccaattttcccatatcggacctcgtcttcattctccgtacaatcggagattctcggctcgagccttcgacgattcacctgcttcctcggcggagatggagaaagagaaacaggaacagctgctggatggagtttctgggaaaaaagatgaggactatccgaccggagaaatggagtatgagaataggaacgcgtggcagatttttgttgtgaagtttcggatgttatttgcttatccatgg

SEQ ID NO: 113646 - DNA, 369 bp, Arabidopsis thaliana columbia
caagctttggtagaagcaaaaacactcaaagttagaatctttacacaaccacagagctcaaaaatccccaaatcaagaagaagacaaaaatgagcagaattcaaatggaagatacagaaccaaaagagctctgaaggatttgttataccttatgatgaggcaagcaagtgatgtgatactcgtgcataacccaaggagttctaactccatgaggactcttaccttcatggtacacaagcgtcttcttaatccctatcacaacaccatttcctcttttatccctaattttccgatcaacaccagtaggtttccaaaacccagaacctgtcgtcctcttcattttcatctgattcgggttcgtgtactcaa

SEQ ID NO: 113647 - DNA, 405 bp, Arabidopsis thaliana columbia
ccgggtgcgtctccacgcgttcggaaagcaaaaatattatgacttgttttttatatccactctacgcggacccgggggttctattattaaagataatgcgaaaccacaaacccaacttggaagtctttcgttcatgacataaattgtggatcataatcgcgcatacgcatcatgaacgtaatgcgaatattctaatatacgcattagcgaggaacgtttccacataactcgttgcatatttcaatgcaacgccaagaaacatgttacttaagaatataacaagaggatgtatgagctatgtgagtaaaacttaacatttttgctatcttgggaaactttactaaccttatttaaatcaaaagagataaattatcgggttacatactaacatgagattgtatcatg

SEQ ID NO: 113648 - DNA, 188 bp, Arabidopsis thaliana columbia
atcatcatgtgaaagaaggcctaatcaagtgtttaatacaaaaatatgacaagttctttctcaaggtaactcaatggtcaaggggattcaaaccataatcaatcaaaaaatgatttaataaaccctaacggacctaatcacacccaattaacacctgcagattttggactcaaaaaacttcaattaaa

SEQ ID NO: 113649 - DNA, 376 bp, Arabidopsis thaliana columbia
gtgtgactcgggactcgcgactcaaccgaaccttacccaatactcaaccacacaacaatgggcgcaagctccgtcgtctccggcagaaccaaacgtacgcgatacttctttatgtctatggtcaccggaatttctcgattgcgaatcgattggtttcgaagacggagattacgatttcacagcaaatctaccagacgattgcctcgctcatatctttcaatttctcagcgccggagatcggaaacgatgctctctcgtatccaaacggtggttattagtcgacggtcaaaatcgtcaccggatatcacttgacgctaaatctgagattctccctttcttaccatgtatcttcaatcgattcgattccgtaacaaag

SEQ ID NO: 113650 - DNA, 371 bp, Arabidopsis thaliana columbia
gatagattttagtggattctaaagatattttaatgatttatatatggttttatttcataattcgactagttaatagagaaaataaaattacatgaatgatctttacatagagctgcagcgagatagtgatgcccgtgggatatgacaaacaagatacaatgttcccaacggcaccatttaacatgaccagttacattgatggatgtaagtcttatcatggtgtcactcctagaccacattggatcacaacttatttcggcattcaggtatatatgattaatcaaatatcgttcagaaacacttttaaattaaatcttcatagttccttgtatttactgtctctagttttaatcataactagattatatgac

SEQ ID NO: 113651 - DNA, 339 bp, Arabidopsis thaliana columbia
ggacgatagcagacgagttgcagcggagttgtttccatcgcttagttcgcaacttaagaggaaaaaggatcatggtcgagctgaagcactgctcattgcggcgtatggtgaagcccttaaaacagagaaattgttgatccagccaaaggaattactctctcaagttaactacttagaaaaccagttagtggaggttaaatagtgttttagtttcttggctctcaactcattaatcaaacaattacaatttggagtctattcctaactctactaaatgtatttttgctaaaccagttggtaaatctttttttttaccagttagtaaatccttaatcaaaa

SEQ ID NO: 113652 - DNA, 370 bp, Arabidopsis thaliana columbia
gaggagcaatggatcctgagccagggaggtgtaagagaactgacggcaagaaatggagatgttcaagggatgttgtagcgggccacaagtattgtgaccgccacattcaccgtggaagaaaccgttcaagaaagcctgtggaaaccgccacaaccaccatcacaacgacagccacaacaaccgcatcttcttttgtcttaggtgaggagcttggtcatggaccaaacaacaaccacttcttctcctctggttcatctcaacctctccaccttagtcatcaacaaagttgttcttcagagatgaaacaagaaagcaacaacaacaagaggccatatgaagctaacagtggattcagcaatggaagatcaga

SEQ ID NO: 113653 - DNA, 373 bp, Arabidopsis thaliana columbia
ctactattaaaataaagacatgaatcatatatgagtatattttcttatcgcatttcagaaagtttttttgggtatgaacataaattttaagaaagattttcaaataaatttaaaattataaaaaaattctaattaaataaacgggatattaaatttttcatttcatactctcaaaaaccataaccgccaagagaaggcaaattgttggagggtgaaatttcagtttacctgaccagtaaatcaagtggtaaaacatgagtaagcaacattactttttgccctgatgcttaatttccaaaatccttggtaccttggtccatatagacctccctcatgcaatacttcttggagttctcgtcgatagctcaatata

SEQ ID NO: 113654 - DNA, 154 bp, Arabidopsis thaliana columbia
gtggactgtatgttggtgtcgtaggcttatgaactggaggtggcttgataggtggactgtaagtgggtgtcggaggcttatgcactggaggttgcttgatacgtggactgtaagttggtgtccaagagctcatgcaatggtgaaggctcgatag

SEQ ID NO: 113655 - DNA, 378 bp, Arabidopsis thaliana columbia
cattaacatataagaaaaaataaaagaggggagaactcttggatactgatgcgggtaatactaaacaatcatattctacacacaagcaaaatccatcaacttgtaacatgaaatagtaataataaggaacctgtatctctgaaagtatgcaaccatgtatcgccatgacggtgaaagcacaatgccttactgcaccactaagtttgacatagtttttccagggatggttaaacgttctgtaaggtccatgtggaggctcccatatggcaaaatcgagctgcgaaaaaagaggaatttcttaaatctcaatgctattaacatgcaaattctttagttgtctcaacttcaaacatatgtaccagagattcttcctgattt

SEQ ID NO: 113656 - DNA, 522 bp, Arabidopsis thaliana columbia
  unsure (1)..(522): unsure at all n locations
gcgacgccaccgcgcatccgagaaaaatgtganngaaatagtgactggtgtatgagagnanngagagatacccggtaaaccgaagcgaaagctaaagtagaggtcagcgagtannaatctggnngaattgtcnnnttcaagcccttccannaatttnncagttaaaggggtgctcaancctttgcnnagaattttctcttctttaaaggtgtcagacctcttgggnngtaaaggggtgtnncaactttngnngcgatggngnntcttgacccggaaacccaatggnntggagnngggtttgnnngttaaacgnnngtggtggagggggagaaagggatagtagaaccgtaggannaggttcattgtngggaagganatcnnaagaagaaatggttctttcccaaagtttannagccttatgcntnntgaaaggtgattngnngtttagtangtaaacccaaccccacatcnnncacaaagatcnnttcagaaatgttacaagannatcagcccccagatttc

SEQ ID NO: 113657 - DNA, 388 bp, Arabidopsis thaliana columbia
gaagcttgtccttcatagaaaggggttttgagtacctttctgttttcttctcgtctgggaaaaggtacattgcgacattcaatagagttgggcttctgccagacacatcatttagaatgtggcatgtaggaagcagttcgaccttgagtaacgcaggcattgcctttgaacgtctgagggccttcctcctgatattggatgccggtttagaccaaaactcgcagtcaaactcaggcggcgaggcagaatccataatgcgtccgctggttcagtagttaaaaggaaaatttcatcatataacttgtgaaggtcaaaagatcaaaggaatcaaaaaaggagaaaagtgcaatattggcatcagtgaatcttattatggtcatgctctcga

SEQ ID NO: 113658 - DNA, 109 bp, Arabidopsis thaliana columbia
gcccaaattattacataccccataaaagccccgaggtaaaaaaggatattccgttgttccaacttaccattacggcttcccccgtacaacacctcctcctccttagttt

SEQ ID NO: 113659 - DNA, 380 bp, Arabidopsis thaliana columbia
gttttacgataaaacatggacttccaataattgagtaatcaaattcataaaacaaaatatagaacaattgttcatttaaaaacatttagagtaaattttcttaagatacctatttgaagtgtaagagtttttttatataagaattgaagattgtcatccaaactcatggatcatatgtcattgacgattttagtttttgcatctacggatttttttttcaactttattgttgataaaaccttatattttttggagtatctgacaaaaaaaaatattgagtgatttggatatcttatccatcaaaagaaaataagttagaaacgttggttttgaaaactaaaattttgtgaaaaaaacaaaaatttgttttaagactattt

SEQ ID NO: 113660 - DNA, 219 bp, Arabidopsis thaliana columbia
aaaaaagcgcgttggtgacaaaaaaaaacgtagttatacactcgaatcagcaagggaaacaaacatgtatggatcgcatggaaacttgtgggtccctctttcttttaaaaaatctcgtattaattaaataaatggaaaaaaaaacatgatgggagtttgtttaggcaggggagattcttcttcattctcatcattatttctctattaatttcaccccaa

SEQ ID NO: 113661 - DNA, 298 bp, Arabidopsis thaliana columbia
  unsure (1)..(298): unsure at all n locations
gtccaatgggagcaagaatttttaggagcatttggaacatttcgaatgtgagcggtagagccgttttgaagtaatgtacgatcaataatgtattaatcaatattcgattgattgatctgaggttattgataaaaaagatttgtctaagacacttcgtttctttttgcctaagatactatataatctttttgaccaagctactacatttattggccaagtaacttctctatttgactaactcacttactttattctatgtgagtntcgagaatatccctattcataggtctgagatcca

SEQ ID NO: 113662 - DNA, 380 bp, Arabidopsis thaliana columbia
gttcccgtgggtttacagggagccaggcataatgctcatcagtgctacgggttatcatcttcgggtcgtcaccattactacttgaatagaccacctcctcctcctccatcctctctccaactttctccttctctcggtctccgaaacatcgataccaaaaacgaaaaaggattttgctttttgacaatgggaacaacaccatgcaatgataccaaatctaaaaagtcccatattgtattgttcggcaagcttatactacccgaggaacagctatcagaaaaaggctcaacggataccgcaaacatagagaaaacgcagatttcatcaggcgggtcgaaccaaaacggcgttgcgggaagggagttatcttcgtcagatga

SEQ ID NO: 113663 - DNA, 376 bp, Arabidopsis thaliana columbia
gtttgaattcatttcaacatatctttgttttttcgttaaagctagctcagactgcggtgaaagacaaagaagatcataaggataaagtggttgcgacgaaatgaaagaaggatgtgataacatggcaagcctttagcttaggcagtcccatgtcaaagaaggtagatgagaaacataccttgggttcctcttcttttccttattgacatgagattgccaagctataaggcttgtgttaatactttttcatattctcttgtgcaatctgaaagttttatcttcatccatatcatcatctttgtctttcaccaccacagggcaggctgagtttgtgataaccaagacaaagttccaaaagagtgactgagagcttaca

SEQ ID NO: 113664 - DNA, 141 bp, Arabidopsis thaliana columbia
ctcaaaggcaaatgcaatcaaatcacctgcaatcaaatctcacagatcaaaaatcgaaattttcccaaaaaagaaacattaccatttctagtgaatctatacattaagcgaattttgcttttttgtcggcgaaaattcaag

SEQ ID NO: 113665 - DNA, 166 bp, Arabidopsis thaliana columbia
cggacgcgtgggggattatgcgtcatcatcagtgtttagtatacatcggcctgcgaatttaattaactaatgcagctttgttgactatctaagtgtattataaattctaaaacaatcgaatcaaagagtttgaggataactacgaggacaacatattttttacttt

SEQ ID NO: 113666 - DNA, 380 bp, Arabidopsis thaliana columbia
cggacgcgtgggtggaatcggaggagaaagacaaatacttcgcaactccttatgcccgagtcatggcgagaagatgcttctttttcgagaaaacgttgcgcaacggttcaaacctactactacttggaccccgtcgagaacaattcaactggaaacatcagtttctccgttggtcagaacaagaagacgaggagagaccagtttcttcggtttgattatcctcagcttgtcttttacatcagcaaggaagcgtgatcatctcaggtcaaaggtgagctactttataacggaagaagaatcgtcattaacctggagatattccgaaaatggacttagcgtctaagaagaacacagctaatgtcggctccaaggagatagac

SEQ ID NO: 113667 - DNA, 382 bp, Arabidopsis thaliana columbia
cggacgcgtgggcggacgcgtgggcggacgcgtgggcggacgcgtgggcggacgcgtgggtaaattttgaatttctcttctttgaaatccaaatgatctggggagaaaattatgggtaacttaaatgaaaattgtcatatcattagcataaaatgtagttgtatacttaataattttcatattgactagtttttttcccccaataaaatcttagtattacatttatttcctagtatggaaagtaactttaaatgaaaatttgaaagacaaaaaaaaaaaaagaaacgaagaaaaaaaggaaacagaaacttactgatgaaatgcaaaagcgtttctgtaaacggctcctcgaggaacaaaggtttcttctttgtccgataca

SEQ ID NO: 113668 - DNA, 276 bp, Arabidopsis thaliana columbia
ctcaaatattaacaaattttttttttctatcaactcaaaaatacgggcggtaaaaaactcagccgggcgctaacccataactactacaccaatacactcccaaacaaaacaacctccattctcgtcaaaccaacagcctcaaaccctcttaaccaactaatatcaaaacacctacgaaccgatctattgtaccacataatttactaaatatcacccatcctaaaataaagatcttcttataaactacattcaccaatatctttttttattacacac

SEQ ID NO: 113669 - DNA, 381 bp, Arabidopsis thaliana columbia
cggacgcgtgggtgccattccttgcaagaagtggatctctctgattgtgaatgattgtctaacagtgtttgcaaaatatttagtgatgatggtggatgcccaatgctgaagtcattgattcttgacaactgtgagagtttaacagcagtgcggttctgcaattcatcgctagcaagtctttcccttgttggctgtcgtgctgttacttctcttgagttgaagtgccctcgcatagagcagatctgtttggatggatgtgatcatcttgaaactgcattcttccaacctgtcgctctgcggtctctaaatttaggaatatgcccaaaattgagtgtgctcaatatcgaagcaccttatatggtgtcccttgaattgaaaggt

SEQ ID NO: 113670 - DNA, 365 bp, Arabidopsis thaliana columbia
cagcagtatcatgtcaagtcttattccactggttgttgttatggatatgttttgtgcaaccaatttgtcttgcactttaccttggaaacgctcttatacggattggaccaaaactactatacatcaactacgaagaaattaatttttgaaatctctgaattaggtactttcaatgagaatattatcttaccaacatattactgccacataatgtgcacacatataaagatgttattcatagatatgttcttacttcttacacacaataaggaacaaaaacgagggggcttttgcgaaaatggacatattttggcccataaactaggaaaaagacatttttgagttaagcttatgaaaataagcac

SEQ ID NO: 113671 - DNA, 381 bp, Arabidopsis thaliana columbia
gtctgaagagagagtaagaaatctgatggggaagagaaaagagcgtcggtacgccgccatgaatagcaccggccgtcgtgtcaagcttgatctctttgcggaaccctctggagatttgggtggctcagatgtgcgtgatggagttgagcgggaacaaacagagcttaatgagctacccaattcaccttcttcttcaggtcagaaaacagaaaatcctttgcttttacttgggcagtatagtgatgatgaggtggaagaagattcggataagaaggcagatgatacctctgcagatagttccttagccaataaaaatgagcaggttaatggattaattcaaggaggacacaaagatacgaatatcaaatcaggtgcagtcac

SEQ ID NO: 113672 - DNA, 132 bp, Arabidopsis thaliana columbia
cacagaacttacctgcgggagatccaaagaacattgatatcagtggtgcacgttaccgagcagtggttactcaacccgagtaacaaaccgaacccattacacggccgtcgtggttttgcatttgagatggta

SEQ ID NO: 113673 - DNA, 382 bp, Arabidopsis thaliana columbia
cggacgcgtgggcttttcatttcatttggatagtcaccgaatataaaagaagtgttggatcaagactgtcagttttctcaaaggaagaatcagaacaagttaaaggctcatctgatttcataggaatcattcactatcttgcagcttcggtcacaagcatcaagatcaaaccttctatttcaggaaacccggatttttattcagacatgggtgtatctatgacattccttgggaatttttcagctttcgagtatgctgttgctccatgggctatggaaagtgtccttgagtatataaagcaaagctatggcaatcctcctatctacattcttgaaaatggtacaccgatgaagcaagatttgcagctgcaacaaaaggacac

SEQ ID NO: 113674 - DNA, 407 bp, Arabidopsis thaliana columbia
  unsure (1)..(407): unsure at all n locations
gaatnccgggggggggcgaaacctacggtcacaccaccactcaaggttttgtttttcacgttgacacacactcccggcaggttaaagcgcactgcttggggccagcatgaagcaggcatcaaattccttcatcctcagagtggcccttcttccactcaagtgctagccgtgtttgtcggtgtaccgattacgctcgacactgctgactataaccggtttgacataatcgcagaccctgatatgactaatgctagcattcaccgcgtttataatctttagtccggttattggaccaacatcctatgtcatcggtctagctataactggattcctggcttcaagggccataagtcttaccagactatcatccatgtcgtgggtactcaactacatccgccgggccgggc

SEQ ID NO: 113675 - DNA, 382 bp, Arabidopsis thaliana columbia
ggaaccttatcctccttaaaagtcatttcatcctccagaactcgcttcaagcgagaagcacgtggacgcatgcctggtgtttctggaccaggaacatcgccatctactcctatatcttctactgatctaagttcagctctcccactgaaactaaaagcatggtttctttcttgagttttaccattattggaacgaaattgaggaataacatcattagccttcatacatagagatgaatcattcagcggaacaacatcttctcggctcctgaaaatttgtaaacaacgatccaatgcagtaatcagaatctctccaacgaatacaacaaattacacgaatcttcttcttccagctaaagataacaaaattaagagaatcgaag

SEQ ID NO: 113676 - DNA, 368 bp, Arabidopsis thaliana columbia
gttcaattccacatctaaatcttcctctctgttttcttcttgtgaacgagtttttaatcggtaattttgattgggatcattggaatttatagagcagaacaatagaagaatagttcttgcgttgcagagtggtttgaagagtgaggtgacatgggcattgaacacacttacgttgctttccttcaaggaaaaagaagatattcgaagagatgtcatgcctcttgctaagatagctggcttgcttgatgcccttctcttaattgtgagtttatttaattgtttaggtgttgggattgtgttttcctctctgttctttgaaccaacatgatgctaaaactttggcagatagatgattggcgtgacatagc

SEQ ID NO: 113677 - DNA, 526 bp, Arabidopsis thaliana columbia
  unsure (1)..(526): unsure at all n locations
cacgccgtcnncgggccannttcttctatcanncggggcattgtggtngncctcgagcccctgatganntaattcgtcgatggatggtgagagtgggtgtgtctgcgcagtaggannagttttcttgaacccaaaannntattggcngnnctccacncnncagttatngnnaagaagcnntgtcagnntgattcaacgccagnnccctgtattatttagtgaaangnnggatggtngnngggagaacccncnnacaagtnntaccgctttccagngnnagctgctnnntctcctccnnntcccccacaangnnttgctgcttccangnnaggctgnncttctccnnntccaacnntggaacncananncacagcncaannntacaacnntgctanncttttgtnntaatgannatcacctntnnctcagaaaaggtttgagaccttntnncgatganattnntgatcccacgcccagtgcgtnntttcaagctggcccttccagcatttatgcatctacaagatgg

SEQ ID NO: 113678 - DNA, 336 bp, Arabidopsis thaliana columbia
  unsure (1)..(336): unsure at all n locations
gggcgtcccacacgtccgnaaaaaaacattaaccctcttttttcccgacacagcacccaaaaggcgtggctcacaaaagtttttttgtaaccaacacaaccaacacaatacctcccactacccacgctagcactccaagtactcaccctcaaccaacgctacctaaacctccacaacacaatcaatgtaacatgtaatacatctactcatcaaccctcataaatcacataaaaactccctctctcacagacctaaatcttaaaaaacaacacaacctatatacacacaagaaccacgataactacaaaccataacccaaccatgatctaccactaa

SEQ ID NO: 113679 - DNA, 378 bp, Arabidopsis thaliana columbia
aattagtaaagagataagagtgttttgaatcttgaatatcaaattattattaacaagaaactgacaaaaagatgagacagtgttcattgagaagatctctgttgttttatctttttttttacatttcttggaaattggcaaaaccagtgtgatgaaactgtgaaatcttatctcgaacccaatcattgttctatgtttttctttaatctctaaaagtgaaaaagtgaatgcatgaaacgttcagatacattcattatattatacatttatacatatggacatggtgtacgtatgtacacgggtgcttgtttgatcacgggctcactgactataaaaatcatgttttttgggacatatagattcgcttacatcaactgt

SEQ ID NO: 113680 - DNA, 378 bp, Arabidopsis thaliana columbia
gttttggattcaggagtgctcctccattgtcttcatcaattaaacccgtgagaggtaataacaatggtggttcaagttcagacatggacattgcttctgattcagatgaagagatattcgagaggcaacactctcctcaagattatagaattcatcttggtttgcctcacgtcgcagctcaaaatggacttggacgtaatggtgctaaggtctttggtgctgctgatgatttatctgactcagctactagcactgaagtttcatatgaagcagaagcttgtggtgtgcggaacaatatatcttcacataatgaatttgaaagacgaaatgttgaggctggaacttcaggaaggactctgaacgggacaagcacttcaa

SEQ ID NO: 113681 - DNA, 383 bp, Arabidopsis thaliana columbia
ctctctctcgtccactcacctattgtgtatctcatcatcaccatggacaagacatttttctctagcaacgaagggaaaccaattacatgcaaagcagcaatatgtagaaaagcaggagaagcattggtgattgaagacatccacgtggatccaccccaagcttatgaagttaggattaagattttatgtacttctctatgtcacactgatcttactttctggaaactaagctttggaccaatttcaaggtttcctaggattcttggacacgaagcagtcggtgtggtcgagagcattggtgaaaacgtggacggatttaaacaaggtgacgtcgttttgccagtttttcatccttattgtgaagaatgcaaagactgcaaatc

SEQ ID NO: 113682 - DNA, 382 bp, Arabidopsis thaliana columbia
aggaaagaaaaacaaatatcgtatgttattatagtttatatataatcaacttgcaataaaggaaaaatttgaaaagcgtgactagatatgcacttggagactgacttacatagtagatacgataatcgaatatctagatatctggatggtactcatattatttgtttattacgtatgatcaaagatttattaatatgtatcatcttctacttggcttaattattaactagtttagtattcgtctctaatcttcaaaacaatcaacataaatatctaaactatattggtcatataaaatctaatactttactatccacttgtaatgtttgttttgttcagagttggagacccacataaattgatttccctatccgtattgtaa

SEQ ID NO: 113683 - DNA, 236 bp, Arabidopsis thaliana columbia
  unsure (1)..(236): unsure at all n locations
aaataacacacaacccttttttatctatattcaacaccacncacggccggaaaacaaatattttggcatgcaaaccaacaaacaacaatcatctaccataacccaacacaccataaacaaacatcacaaaaaacatacactctatccaccccaaccttataaataaaacaccaaaaataaccgtactcttataagccacacttatcccactctctacaaactaaacatagcaccaa

SEQ ID NO: 113684 - DNA, 378 bp, Arabidopsis thaliana columbia
caagctatggcggagaaggtagtgatgatgaaattgaaagtggatctagactgttccaaatgctacaaaaaggtcaagaaagctctccgcaaattccctcaaataacagacgaattgtttgatgagaagtccaacacgatcatcatcaaagtagtttgttacgatcctgagaggctaatgaacaaactttgctacaaaggagacggttctatcaagtccatcgtgatccttgagccacccaaaccgcctcaaccccagcctcaaccacctcagaagcctactgccccagccccagccccagcccaagcccaagccccagctcttgttcggccggctccggttcctgttcttgtttcgtcttccgctcctcaaccgatg

SEQ ID NO: 113685 - DNA, 381 bp, Arabidopsis thaliana columbia
ctttaagattgacattgcctacttaagctctaaaaccgacatcgagtttgggtcaatgaaatgggtacaatatgggtttacaaagtcgtgtggacatttcaggatacgaaactctgacatagttgaccatgttaacatcttttcgcatcttttgaaaggcaagaagacagggagaggtggttgtgttcgaatcttccccacagctggggagatttgggctgtctacaagaactggtcactgaactgggacggatcaacaccggacgaagtgaggcaccaatatgaaatggtcgagattcttgatgagtatactgaacagtatggtgtgtgcgttacccctcttgttaaattagagggctacaaaaccgtgtatcacaggag

SEQ ID NO: 113686 - DNA, 384 bp, Arabidopsis thaliana columbia
atttaaattactacggtttgaagctcaaaggagtggctgatgcagcaaaaaatgaccatgttgtccttgaagaaaatcgaagactgtacaatgaagtgcaagaattgaaaggaaatatcagagtctattgccggattagaccatttcttccagggcaaaacagtagacaaacaactatagaatacattggtgagactggtgaattggtggttgcgaatccctttaagcaagggaaagatacgcatcggttatttaagttcaacaaagttttcgatcaagcagcaacacaagaggaggttttcttagatactcggccattaattcgatccattcttgatggctataatgtttgtatatttgcctatggtcagactggttctggaa

SEQ ID NO: 113687 - DNA, 383 bp, Arabidopsis thaliana columbia
gtccatctctgatcttccacgtcagaatcttcacattcttcggatgaatcagtggttacaactgattcacagctttcatcactagacttaaacttagtgggagtgttggactccaattgcttcgcggaaactatatcacctttaatgatgagtttcagctgagaaacagctctttcaaccttaaattgaaaagaagaaaaaggagcatgaagcacattagaattagtaagtgcagaatgagacgcaacaaaatgaaattaatctcatgtatatcttacatcttccggttttgccataaagtgatgacagaagaaacaggccctctgcaagaaattgaaaagaagattgaagagcaaaggatggtaaataggaaagacaagctc

SEQ ID NO: 113688 - DNA, 333 bp, Arabidopsis thaliana columbia
caccaatctctttttgacgcatattttttccacaatgcttcacacaaggggggggttgtagctgttttgtagggcataaaacaacactctacccaaattccctcaaataacagacgaattgtttgatgagaagtccaacacgatcatcatcaaagtagtttgttacgatcctgagaggctaatgaacaaactttgctacaaaagaaacggttctatcaagtccatcgtgatccttgagccacccaaaccgtctcaaccccagacttaaccaccttaaaagacctactgccccagcctcagccccagcccaagcccaagccccagctttttgtt

SEQ ID NO: 113689 - DNA, 380 bp, Arabidopsis thaliana columbia
cttaattctgcttttattaccagagaaagcaagaatatataagaatcagaaattgggtgaagaagaatggtcttgattactaagatgtctctctctttctacatcattcatcttctcattttctccttgatttccacttgtgttgtctccaaccgtacgtattggctatctatctctttcttagtgtatttacattatgtatttgtacaactcgttcttgaataaatatttacatatgtaatacgtgttttgagattacaagatggtttcaccggaaaaaaaggattacaagatgatcggtttgtaaatatatgtataataacatttattcaggtctttggtaattacttttaagctcataatattggaatttacaatgt

SEQ ID NO: 113690 - DNA, 380 bp, Arabidopsis thaliana columbia
tataaaagacacattttggccatcaacaactgtagtctttagtgcttctgcaagttctttgcttccagcaagcaagcggctgtatcaacaacatgtacaagtaagacaaaaagaaacagaacaaggattttttctctgttcataaagataaacacaaagggtaccttcctaaacaactgatcccaaatcgggtcggttcttcagatgtgaacaagattatctccagagacctcttcggtttaaaccccgaccttaagaaaacaaaagaaatatccaccaaaaaccatcaggaaacacaatcttagactttactttccattatccaaagatccttcataccttttcaaaacattgatagcttcaatcgcacctaaaacacc

SEQ ID NO: 113691 - DNA, 250 bp, Arabidopsis thaliana columbia
gaaactgctgcagctatggcttcagcgtctttggtgtttaaggatagtgatcctacatattcagcaacgctctttaaacatgcgcaaacacatgttttatttttcacatactctaagagggtcttacacagttaacacacccctgggtgacaaaatttacacatttcgcctggatatggagatgacctcctatggccagttagtgggttgtatcatccaccagaggaaaaacctcccctggattatgttt

SEQ ID NO: 113692 - DNA, 287 bp, Arabidopsis thaliana columbia
  unsure (1)..(287): unsure at all n locations
catccataaaatataatttacttatatcagaaacaaacacaaacggggagtttctttttactaagtgtttgccccacancnncaaaanaaagaaacctacctatcctacagacgacaaccaacacaccaagaatgcaatcaaaacaaaactatcacacaagcttcacgcacacgcaagcttcataaccaaacctacccactaaatgatgtgactactttggatcacacaaaaacatcgaaccctactccaaatgctacataaacataatctctcaagaaactcaaac

SEQ ID NO: 113693 - DNA, 361 bp, Arabidopsis thaliana columbia
  unsure (1)..(361): unsure at all n locations
attattttcactgagctcatattttttttgagacaacaaacncgggctagttctcttaaaagtttttggcccccncactccnncgatcgatttttctatggaccaacacaccaatgttaactgatatcccggcgccgaataccgtaagaaagaagaaaggtttgatccgagttcacaaccaccattcaagatcgaacatataatggccgcgattcctaaacactcgttgattaagagtcctttgagatcaatgagatacttctccagagacattatcgcctataccacctaataccatccctgccaaataaaaataacatctagttcctataacctctttataggaccacccaaagaacac

SEQ ID NO: 113694 - DNA, 399 bp, Arabidopsis thaliana columbia
cataaagcaaagttatttttcaagaaaatgcttacggtgaaataaatggcggagaaacaagcaatagtccaatatcttccccagtaagcatcagctattaaagctccaataagaggagtgatgtaacatgttccttgccatgtcatgacgtgtctagcagcagaaacattagtctcatgcaattcatttgtgaagtacgtgatgagattcttggcaattccataataagccaaccgttcgcagcattcgtttgcttcaccaaccaaagcatagatatcagtttttggagattaaagacagaacatgagagaatacaacaagtacattacaagtgaaataaaacaaagtgtttaccaaaaatgaatggacaagctttccagtttcctgttgtctgcttca

SEQ ID NO: 113695 - DNA, 353 bp, Arabidopsis thaliana columbia
ttttcgtaattaatgagctatatttaattatgtttgcaccgttttttttcttgggttgtgatgttactttgcatcgatgtgagaattcaatgaggttcgttaaaccgaaaaaagaattcaatgagtccgtatatttcggcttagagaatacgaaaggacaaaccaatgaatatgttctttagagaagaaagaatattagtcggttatagatatcgatggctttagatagttgtgacgtgcagcgagatacttgccctgattaattatcttcatattttttgagtttgtagtagaacagaattataattttccatgagagtataattgaacattatatttgagcttttagtaat

SEQ ID NO: 113696 - DNA, 381 bp, Arabidopsis thaliana columbia
ggctagcttccttaaacaaatgtgaatggatgtgataaataatgaaatgttatatttttccttttgcactggatacgattttcttctcactgccttttatttcatatacacttcactccaaaatacaaatgatattcattgtctgaaaccagattgaatattaagcagatttgatcgaaataagccaatcaaacaaaccaacattaggctctcttcttttcttgatttttaacctttggttcgaatccttgaccagcttcttccatagatctcccacagtccatcctttggatacaactagttccgttacctgtcccaaagaaccatattaatcagaacagagcatttgctcttgtttgtaatttgatgtagtgataagag

SEQ ID NO: 113697 - DNA, 377 bp, Arabidopsis thaliana columbia
  unsure (1)..(377): unsure at all n locations
tccgtccgataataacacaaaaatcaataagatattgaatgcnnncacaaagtttgcgtggtgccttgctcgtagattatgcgtgtgttgtgtgccccattagtcaccgcaaggggcatgnntcgaagtaagtgtctataaagagaccaaattatggcaccctcttcttccaataaactactatccaatagagcattggtagctttcagctttctgctgtctggtatttatcattccacgcagtagatgaatgtctatangctctcgctttactggtttcaaccacatcccaaaaggtccagtacgcctaattggataccgaaatgtgtgctacacatagtatccatctggacaaagtcaattgcaaaagaggtcgc

SEQ ID NO: 113698 - DNA, 150 bp, Arabidopsis thaliana columbia
tgcacatatatataaatatagaaattggggaaaaagtgaaatgcagtttgcctaaattgaggttaagagtaagcacatggggttagtcattgcttgtattaagcagcttgccaaattcaggggataattaccatccaacctctctatctg

SEQ ID NO: 113699 - DNA, 381 bp, Arabidopsis thaliana columbia
gaacattctcttcagttttttctgtcctctctaaaaaacctaatctctagactcgtcattgatgagctctgaccccaatctcaccactttcccctcactttctcggcaaaagttcagtgatttgctctgtttcctgggaggttttctctgttttttaaccaagatttcaagattcggttttgacggagcataaatggagagaacaagatcgaaaccggttcggaatctacccgagacaatccattcttttgctcggtttgaaatctcatatgaattctgattgggttaaatctgtatgcaacatcgccaagaatacttcttcaacgtcaaagaaagaagaagacgactctgtttctgtcgatttacagagcattagagatc

SEQ ID NO: 113700 - DNA, 358 bp, Arabidopsis thaliana columbia
gaaacaaatagatttatcttcgtgattaacgagagagaataatcgcatccatcaatcgtattttacgactttcgattgtgatagtttaatttatttcaatgtatgcagaaacatatcaactactgaattatatatattaattaaccattttgtagtcagaattaaccgggattaaatcacccaatcctaaatttgattttgacctaactaatgaaaatttagtagtaaaaaactattattttgattttacattttaactttgatagttttttctaattttttttaactagaaacctaattttttttcgtcaactagaaaactattctatctggatattagtttataatttcacagaca

SEQ ID NO: 113701 - DNA, 179 bp, Arabidopsis thaliana columbia
  unsure (1)..(179): unsure at all n locations
ttcttttacattcaaacaaccnatgggacagttcaaaatctattgcgtcagataatcaaacatcaacatattattcattattcacgacctatctgaatattacaacaccactttacacttgatctacaactatatttctataaactctcactctacatacattctctacaacttatact

SEQ ID NO: 113702 - DNA, 338 bp, Arabidopsis thaliana columbia
catcggacggtggcaaatcctccgatccaaactcttcacactagggtcatctctctcttccttgggcgaatcacctcactggtcacaaaatcctctcctccacactctcctcccttctctcctctcaaatctccaacgcctctcttcactctccgaccaatgctcctccgcttcattctccggtggtaaacttctcatgcaaagcgacctcgacatagcttcctcttccctctctactcacataagtgaccttgacctcctcctcagatccggtgtgctccaccaacaaaacaccatctttttatcactcccaccacccacatcagataaaaatgaca

SEQ ID NO: 113703 - DNA, 392 bp, Arabidopsis thaliana columbia
  unsure (1)..(392): unsure at all n locations
ggcaaccatgtgatttctcctgttcttattccgcaattgttactanaatagagttgtctaatttggtgagctgaaccatttatgcagaaggctcttgtttgcttgttatatacatacatgataatgtgtagatgaacaaatgtagtttctaaaacaaatcctattatagaagagaggacacaacttcttttgaattggaacgtgtcattgttttatacttcaatgctgggtttctccatattgatacacttgttaagccatccatctcgcagcttcataaaaaagaatctctggtcgaaccttcttttctccacagaacctgaccacactcttccagttaccaatatcctatggcatcacaacacatagatcaacaatgtcaggcctatcta

SEQ ID NO: 113704 - DNA, 382 bp, Arabidopsis thaliana columbia
gcattttattatataatatattttcattaattataattactcaaaaaatgggaaattttaggttctttatgaatatatacttaattaaaaaataaaatattgtagttaattaaacatttaaaatatttaacagaataaacgtttagaatatttataatatgtaaaatctataaaatttatataattgtttgaaaaaaacttttaaattcatttgaattatattttttttaataaaagtattatttaaacaaaaaacaaaaaaataatttttaatttgaccgaacgggataagatcgtatgacgggttcataatatctataatatatgaacttttatacaattcaataaccatttgaactaaaaacaattaaattgatttaaa

SEQ ID NO: 113705 - DNA, 118 bp, Arabidopsis thaliana columbia
gtcttgaaaccgtgaaggaatctgtatcttttgtatgttacccattttagtgtcggtaaaaatcaatttggaggcaaaacgcccagagattttcccgggagagtgttttacatccatc

SEQ ID NO: 113706 - DNA, 209 bp, Arabidopsis thaliana columbia
agtggttaaacccatcacattctttttaccaacatccacacacccacgggtgcaatttccggttcttttgaaaccacatcctacagcttccaatatatcttctacaccacaaacttaatcttcaatctcaccgtccttgaacttaatataagactctgaaccaagcgcttaaccattgttatgaactcatctctgcagaatcctaatcc

SEQ ID NO: 113707 - DNA, 216 bp, Arabidopsis thaliana columbia
gactcttactattcctcctttttcccctctttttcttcttcttacactctctcaacaacaacaagttattattaaaaatttttgacaacaacaacaacatctaaataatctttcaaatattcactcccaaattatacacacttaatcctactaacaatcattaatccatcccaaattcaataacactcacttatccattcaaatatttaacaaaaa

SEQ ID NO: 113708 - DNA, 346 bp, Arabidopsis thaliana columbia
gtttattttcatgactttatatttcagcccttaccttaaacccagcggagtctgcggtttttggcagcgaccacgataatgacaaattcaataccacaaaatgaaagaaggacatgataacatctcaagcctttaccttaggctgtcccatgccaaacaacgtatatgagaaacataccttgtgttcctcttcttctccttatcgacatgagactgccaagctataaagcttccgtcaatactttttcatatactataatgcaatccgaaaggcatatctacatccatatcacaatctcttgctttcaccaccacaggacacgctcactttgagataaccaacaca

SEQ ID NO: 113709 - DNA, 381 bp, Arabidopsis thaliana columbia
  unsure (1)..(381): unsure at all n locations
gtcactcaagatcaaatcttattttattttatacacgctcaatnacagggggctgtgtantgttgttcggttgtgaagccatcactactatcacagggaaatcctaggcaaagaaacgtaactttgtcgagactattgagctccatatcggtctcaaaaactatgaccctcaaaaggacaagcgtttcagtggatctgtcaagttaccacatatcccccgtcctaaaatgaatatctgcatgctctgagatgcccagcatattcaacaagctgagaaaatggggttggaaaacattaatgttgagtctctaaaaaagcttaacatgaacaagaaactcgtcaagaatctttcaaaaaaataccatgctttcttggcctatt

SEQ ID NO: 113710 - DNA, 389 bp, Arabidopsis thaliana columbia
gatgagttctcgcgcatcactatccaatttgaagcaattacggaagctaaaatattccctatcaatgccccaatctgtgtcgaagtcatcttcatgatacgactcatcccagaaacgtaagtcccaatttacctggaagtatgcatcatcatacaacgcatcccagaaacgttcacatgtatattcaatgttttcagataatggtacacaagaaacgtgatcttccattgtcgctaccacagttgcatcactcaacgccttgatgacacctctacagtctgtaaagtcggcgaccattagatttgtcagtctgaaaatgtttggggagatgtttttcaacctctggcaacaatacatcattagttcagtgagcctcgtgaaattctcaa

SEQ ID NO: 113711 - DNA, 346 bp, Arabidopsis thaliana columbia
  unsure (1)..(346): unsure at all n locations
cggactcatacgcggttctcgttttcgcaccccnaancanacgcgtgggcgtacaaattttttagttcccacaaccaccncttanaaacccaaatgatcaggcgagaaaataatgaggcacttaaacgaaaaaagtcacatcattagcataaaaggcagatgcatactgaacaatagacataatgactaggtattatcccccaataaaaacttagaactacattaattccctaggatggaaagcaactttaaatgaaaatgtgaaagacagagaagaaacaccaaacgaccaaaaaaaggaaacataaacctactggtgaaaagcaaaaacctctctataaacaac

SEQ ID NO: 113712 - DNA, 386 bp, Arabidopsis thaliana columbia
aaaccttataataattgaattctccagcccacaccttcactttatcttcgctttttctattttttaattccctaattattaaccatagtttaactttctatatcatagtttaatctcttgctgcataattaaacgtcaatattgtttatctccactatgtaactagtcatttttttacacataagagccatacaagagagctcgtaattagtttttactaactataccacccattatcaccacatgtgttatactctttccatttcataatgaaaaactattttggacttttaggcatatatattggtattaaaatctatgtttgacgacaagaaaatagtatcagttttttaagtaattcactagtagtatatcttacatataaa

SEQ ID NO: 113713 - DNA, 102 bp, Arabidopsis thaliana columbia
gctcaagcaatgtctgcccgttaatatccctttccttaacggtcttcggtggatccgagaaatcggaaacaacacaacacaagctgagttttctcacaaaca

SEQ ID NO: 113714 - DNA, 383 bp, Arabidopsis thaliana columbia
ggtccggctccatatatgaataatgatgtgatggcggaggaggtgggggatgagaagatggatatgggctatgctggaagttagaaccctccccacgtggcatgctttttgacaaagatactcgggaactataagatggttcaggacttccgtaatgcattgggggattcatccttggaggaccggcatgatagtcgccctggaatattaaccacaaattaagttattaactatgtctgaatcctcactttgttaactgcaaaagattctaaaagaagaaaaaggacgcacctgcatgctgggatttctgcggtagtcaaagccatttgagtaggaattagacattgccaactgagcattctgcgaagggcgagctggtggag

SEQ ID NO: 113715 - DNA, 288 bp, Arabidopsis thaliana columbia
  unsure (1)..(288): unsure at all n locations
ccgggcatttccaatcttgcttctccacatacactattttacctatctatctcccctttcaacaggaggggcatnatagcatatggttcgggcccnancacaccatcaccttcaatttctgtatcatctaattatccattgaatccactgctttacaatgaatcatctttaactttctctccatacaccttttcaaactctcttccaaacttttataaagtctacaaaaccaaccactctttgttcatgtcatataatatcatttatttttcattttaattttactac

SEQ ID NO: 113716 - DNA, 367 bp, Arabidopsis thaliana columbia
gtcgttgcataattatgtccatgagtctatccatcaaaataccttcggaatcatctttttattttatatatatactgcgacaacaataattatatgttttgtactgtcttttctggtcaataaaaaaaactaaaaatttggtcgaatttaatggacttccatgaccaactcttcatttcccttaaggataaattgagaagaaaattatatactggaatttgaaaaagctttatataattgtaacgtatttttataattgcacgacaaatctcttttcttgattttttgtatgaaactacaaagaccaatttttctaacaactaagattcagttattatttttggtcacataaataaatgagacgatt

SEQ ID NO: 113717 - DNA, 383 bp, Arabidopsis thaliana columbia
tgtttcttcttccattttctgtttctattggaaacttctctctccaattgggtggtcttcacttctgtgatcggttagctttgacaaaaccgtagtaaaggatcaaaagttatcatctttggtccatgttgtgaatcgtgctctgcttgggtcgtgactcccaaatccggatttgaaaccagcatatctgagcttaattcgagcatagatagcttagcaatggagcagtcagaagagggtcaacagcaacagcaacagggagtgatggattatgtacctcctcatgcttatcagagtgggccagtaaatgcagcttcccatatggcattccaacaagctcaccacttccaccaccaccatcagcagcaacaacagcagcagct

SEQ ID NO: 113718 - DNA, 373 bp, Arabidopsis thaliana columbia
  unsure (1)..(373): unsure at all n locations
gcttctttttatgagatcgcttctcgctctcgagatcttctatgcgaggatgtgcttcctccagttctgcttcaagggaagaaaccaatgacacagcattcacttgctgatcaatacgcttcatgttgctatatatttggtgtacttcctccattgtatccaagcagacaggatcccattttgtcgccccctccattgctgagtggggaaatggcattgaaggttcgagctgacaagaaagcaatagaagacttgaggtcaagaaaccataaaaaattgattacaaaacatangatcaacaacaagaaagaccttcaaggactaggacaagaatatctcagtcaagagttatattgagaattacagctttgat

SEQ ID NO: 113719 - DNA, 383 bp, Arabidopsis thaliana columbia
catttcccggttggatcgaagggttaagaaccatagacagtgtgattgttgcatatggcaaatgttggcttaaatgttttcttgcagatccaaactcagtccttgatcttatacctgtggacatggtcgcaaacgcaatggtcacggctgcggcaatacacacagggaagctaggttcccagaccgtgtaccatgtcggatcatcttgtaaaaacccgatcacattcgaacagattcatgatctcgcggctcgctacttcaccaaaaaccctcttgttggacgtgatggttcacctatactagtctccaaaagaactatcttgtccacaatggctcagttcagtttctacatgaccattcgttacaagctacctttgcagatg

SEQ ID NO: 113720 - DNA, 364 bp, Arabidopsis thaliana columbia
ggttaggccaagggaagaatgcagttcttttgggttatttcaaattctatttctgttactttggttcttttgtaataaaaaagcttttaggtaaatatgtcacggaggtctttaaacttatagtaggacacttactagtgttggaaaagcatcgattgcctggataaccgttcgcatgaagagtaaaggcagaggagttcgatcaacctgaaaccaaaaagtatcacagatctcaatatctaactaaataggaagttcttttccatgatatttgacataccatctgaccgagggcctttgctaagacttgctgcgtgaaaacagtgcgttgttcaaagcaagctgagcatgcatctgttatctg

SEQ ID NO: 113721 - DNA, 387 bp, Arabidopsis thaliana columbia
acgttaaggagtgaacttacacataggagagagaatggatgagattctgcaagtcatcgggggagaaaccaatctcatcaagtaatacatggtaatgagccggtcttgaagttccctgagagatcatagagggaaacattatatagcgttgattttaataaaggtgcgaggagtgaagctaaacttttgtctacacttactatttttcctgcatgagcacacatgtaaaaatcgtagtttgtcgggtgtacgatcttggtgtccacgacagttcctgacaaacgacattgttttttttatgatgaaatagttacggaaagaaatggaatcctagtgacgggtgaagaataaaaagtattttttacctgcaggaacattttcaggacc

SEQ ID NO: 113722 - DNA, 365 bp, Arabidopsis thaliana columbia
attcaattccacatctttttttttctctctgttttcttctccggagcgagtttttaatcgttggtttggagttgccatcattctaatttataaaccataacaatagaacaataattcttcctttacagagtagtttgaacagttagtttacataatcatccaacacacttaccttactttccttcaacgaaaaataatatattccaatatataccattcctctttctaatatatctcgcttgctccattcccttctcttaatcatgactctattaaaatatttatgtgttttcattacattttcctttctgatcttttaaccaacttttttcctaaaactttttccaaaattatttattatcttt

SEQ ID NO: 113723 - DNA, 283 bp, Arabidopsis thaliana columbia
  unsure (1)..(283): unsure at all n locations
tggatcatcgcctggatcaccttctacagacaacaaggccaaaaatgaggaattcagttctcgctgtaggctcantanaatcagaaaaaaactaaagtttccggtgggaaaaaatccatccattgctcaacatgcctttgttcctaatcctaatccaattccttttcctcttaccttaatcaaaacctgttgtttggaaaaaaaaataaaaaccaatcccgggtcgattggaaaattcttgcctgccattccttaaaaagttaaggctattaaaaagattcct

SEQ ID NO: 113724 - DNA, 289 bp, Arabidopsis thaliana columbia
cgaggctaaatttaccttttttttacactcaaatctaacaaacatgacagttttatataactttgctggacaaccaaccacattcataactgatttctgtaaaaaactccttcatcaaatggagcttgaatacattctcctaacaccatcctaaaattttaaagcaactaataagaaattaaacaatactctatatcacactgatcttactcaaagcaaactacacattataccaaaattactacttcctattaatattgaacaataaattgttaatgcaagttaatag

SEQ ID NO: 113725 - DNA, 345 bp, Arabidopsis thaliana columbia
cgaggctagatttaccttttggtgacattctctttgagcttgttgatgactctgtcgtactttatctcttttagactgttgaatttcacaaaaacttgacttagaatcactcatccaactgttgaagatctaggaattatacttgttctatcttacctctaagtccttgagcgctgataacatttcgtgcttattattctcgttgatatcctcaaacctgattgatagaattggttacgatataaacaagttgggtgtaaaatggctttaacaattaagaattctactctatgcaacacagcttcttcgggccaggacctaatttaaagaacactcactttagag

SEQ ID NO: 113726 - DNA, 362 bp, Arabidopsis thaliana columbia
gccgcatcctctctctctggtcggagaaatctccagatttggtcatttctccaatcttctcgggaccctaatttaaccaaacctctcctccttcagattcatcttcctcctaatctccctaaaagctcaaacctttctctcaatcaattctaaacaatggcaacagaagcaacaaccaaattcccagaatccgatctccgtccaatcccacaaccaccggattttcatccagcaatcatcgttccagctcaaaacacaactcttaaattctggcaactaatggtcgccggttcaatcgctggctcagtcgaacacatggctatgtttccagtagatacagtcaaaacccatatgcaagctct

SEQ ID NO: 113727 - DNA, 119 bp, Arabidopsis thaliana columbia
cttcactctacagagattgcttttttggtgtagacaccaacatagactggcaggtctcaagagtggtggtgaaactgaaactcgtccctggaaactacttctaaaccatcactgtctac

SEQ ID NO: 113728 - DNA, 277 bp, Arabidopsis thaliana columbia
  unsure (1)..(277): unsure at all n locations
cccggtcgacccatcgtacgtttaatatcccattgcctatttaatttctaaaaccaacatcaanctggggcgggtgaattctattcggtttgggtacccaaancctctcgnacattccaacccacgaaactctaatcataattaaccatgttaacatctaatcacatcttttcaaaagcaataatacacccatagatgttcttgttacaaaatttcctcacatcttaagagataaatgctcattacaataactcttcactaaacttatacaattcaa

SEQ ID NO: 113729 - DNA, 376 bp, Arabidopsis thaliana columbia
ctcaaacacgcttttactaccttagaattctagaatatataataatcagaaattgggtgaagaacaatggtctcgactactaatatgtctctctctttctacatcattcatcctctcattttctccttgatttccacttgtgtcgccttcaaccgaacattttgtctatcaatctctttcactagtgtatctacattatgtattagcacaacctcgttcttgaataaatatccacatatctaatacatttttggagattacaagatgggtttccctaatatatactgattacaatgcttatcaccctcgtacaatataattaataaccacatttttttctaacctccggtaattactcataagctcataatattcc

SEQ ID NO: 113730 - DNA, 373 bp, Arabidopsis thaliana columbia
aattgatacaactgccgttctctttgatcgtccttcaggacaaatcttatcaacgctgactggtcactcaaagaaagttacaagcattaagttcgttggtgacactgatcttgtgttaactgcttcatccgacaagacagtccgcatctggggatgttccgaggatgggaactatacctctagacatacactgaaagatcattctgccgaggtgcgagctgtaactgtccacgcaacgaataaatactttgtgtcagcatcacttgacagtacatggtgcttctatgatctgtcctccggtttatgccttgctcaggtgacagatgcttccgaaaacgacgtgaattacacggctgctgcttttcatcctgat

SEQ ID NO: 113731 - DNA, 374 bp, Arabidopsis thaliana columbia
atccatctggtgggttctttctgttctttgccaatgctctcatctgtgcaaaacaaccattttttggttgatcagaaattgaatacacttgagcttagttacattatgtcccaattggtttgagaagtgtttatttaccttagtgccagaaatgaacaagaagtcctgagcccttgagggatcaaagaaagccatctttccttgtgtcttatcgtacgcagcaacctacaccaattgaaaccagaaatcagaactcaaaaagcctaaatctttgaaggaagataccaagtttgagtattatgcggtttctatgaatataccctgaaaggaagaatgttgagtcgttcgagtccaggagccatgcttagaacttt

SEQ ID NO: 113732 - DNA, 382 bp, Arabidopsis thaliana columbia
aatcaatcggaattaaaacttgaaatcaaaccagcaaatacatttattaacctttccagtttccagagaagtagtagtaaaattctgaaattgatgcggtggggcatccattaaggcgtgttaaagttggttcaccagctttgtaacatacataacacatccatcgctatcaaaggaagatttgatcggacgaggaagctgagaaaaaaacaaaaacgacaagagattcattcaaacttgcacgccaacgccggattattcccggtgtatacgtattttatacggttctatttaggaagaagaagaagaagaagaagaagaagaggaaattttaaggaaagagtttttgtttgaattggaatggagggtgttttcttaaaaa

SEQ ID NO: 113733 - DNA, 227 bp, Arabidopsis thaliana columbia
catcatactctataaacattaacctcacacaccattactccaatcatctacacatgaacccatataatatcatcataatatacatgtcacaacataaaccatcttccttcattcaaacccataatcacaactactcaccccatccaaaaacaattaaatcaaacctttatacccatcacaatacaaactaaccacatcccttctataataaacatcactaaatactt

SEQ ID NO: 113734 - DNA, 379 bp, Arabidopsis thaliana columbia
gaagaaactaattctggtcttctgtcatctcccgttgctacttctcagttaccggaagtatctaatggggtttcttcttattctgtcaaggaagagttacctctttcgaaacatgaagctaccagtgctacttcttcgcctaaagcttctaatacagttgtgcctagtacgtttaagaaacctattggtgctaaaaggacaggaaaaactggtggtcttggtgcaaggaagcttactactaagccaaaagacaatctctatgagcagaaaccggaagaagttgcaccggttattcccgctgtatcatcaacaaataacggggaaagcaaatcatcagctggttcatcatttgcctctcggtttgagtacaatgacgacc

SEQ ID NO: 113735 - DNA, 384 bp, Arabidopsis thaliana columbia
  unsure (1)..(384): unsure at all n locations
gtcagcggggccgtgcagcgttatgctgtcggagacgctctcnaccgccttggtgcatgacgtcgcgcacgcgggtcagcgcgaacggatcgacccggtactcacggaccagatgatggccgcggcgtgcgaccttctcggtcaggatcgagcgccgcatcagcagcactgtaacgccatgcgcgctgcagcaggctgcgatcagcggcagcagcacatgggtgttgccggtgagctcgacggctaagaaggtcgcggtcaatggcgagcgcatcgtgccgcccatcgtcgccggcatcgccagcagtgcccagaagcccgggctcgcggccggcaggtagccgctcagcgcggtgcccatcgcaccgcccatgatcaggagcg

SEQ ID NO: 113736 - DNA, 277 bp, Arabidopsis thaliana columbia
tgatatctgtgataccaaatgcttgtcagaaagtgcaccaatgagaaccacattactttttttccgagggcggcgttaagcgaaatgcagtgagagtcatgccccttctaatttatcattttacaagttacatcaaatgctcttgccttttcttgtgtcggtggcttttaggatttcccatattacttgatatactttcgttgatatataaaaataaatggattatctcattatactgtgaaagctctaagtctacctttttctctttttctaattt

SEQ ID NO: 113737 - DNA, 375 bp, Arabidopsis thaliana columbia
ggaaaatttgccgcctcatctcggtgcttctatgtatgcaatagcttctgttctctcatatgatagcctcgcacaatcttcagttcaaactgtagctgtgcaacctattacttcagtggtagatgcaacgagtcccagagatgacataccttccactaaccccaatgagcttcgggagcatgacccgaacactactccaatggggtcaaagctcgaattagccaacaagttgggtttgggtaatatggaagagagcttgccttcaaatttcgctgatgggaatgagcaacctgacccaaacacttctccagtggaagatgtttcggcggctacaaaacaaaagaagatgcagtcagagtccaaaaggtgcaagtc

SEQ ID NO: 113738 - DNA, 401 bp, Arabidopsis thaliana columbia
  unsure (1)..(401): unsure at all n locations
aaanncccggggcgactccacacatccgggcttctctcactctccatcgtttcttaatcgtctctccaagccccnatgtgactctaaaagttttttattcttcccaaaaacacctactctcttcctcagctgatttcgactccgatcaattttctaggtgtttgaaggcatttgaaaggatgagagacaatggcaaacattaaattatggacgaggcatctcaatgcgctggtgctatggttgagataaacataaagacgttggattctcaaacgtacaccttacgtgtaaataaatgtgcccctgttcccgcattgaatgaccaagttgcttccgttactggtgtcgttacagaacaacaacacttgatatgtcttcgaaaagatatcaaagatgatcaa

SEQ ID NO: 113739 - DNA, 339 bp, Arabidopsis thaliana columbia
cgttgatagcgtggtctttggctgattgcttgggcttcttctccaattcttttccttggtttcagagtataataatccccagcttctttgatcctctctctctctctcttcctctgttacatgatggctacgacggcgagtagtgccgctaattctgcatctcgcttctccattgattcctctatctcgcgatcacgtcacggcgattcctctccctggttgttaccttctgattcccatgatcatccgactcttttcctctcccaggacgatcccttctcagcgccttccgtcttcccgcccaccggaaataactcttccgactacgacaatgctgat

SEQ ID NO: 113740 - DNA, 383 bp, Arabidopsis thaliana columbia
gtgataattcaattgtgggcttaatatataaatcattttttaatgggcctcaagatagaaacaataaacaatcatccatcaaattaaatagcccaatactacacaaactctccaaatcatcatgaatcaaacagtagcagcaagaacatgtaccaattcatatgatttgggaactctaagcacaacatcaaaccattcagtcttaccgcaaatctcgtatatgtcgtgcctttcaatcgtaatctccgcacaccaaatcatcttgttcttagagctagaaggcacaaaagtatcccataaaaccgccatcttctcaccgtaagccgccaagttaacacggctatagcatagaaacttgattagccgttccaaccccatcaact

SEQ ID NO: 113741 - DNA, 331 bp, Arabidopsis thaliana columbia
gggacttggcccttttaaaacacctaatttcatgccttttcccgctgaacttgccactttctcctaaccaactcatttcttcatataaaaccaacaacatcacacaaaaagagccctcatttattcacctttcttttcccttaaatataatctttataaaaaaaattaaaaattaaaaattaaaaaaaggaagtaaattgaaaaaacaaaattggtcccctgtcttcttttgttcactggacccttttcttggcttcgctaaatcatactatctctatcttctcaccgacactttcttcttctttgatcatatcatatttatcttcactac

SEQ ID NO: 113742 - DNA, 372 bp, Arabidopsis thaliana columbia
gtgaaaagagtatgaacgttttgatttgtgttttaggtggatagtgcgaataaacatgggatacttctggaggttgttcaagttttgactgagcttaatctgactattaagaaagcttatatctcctctgatggtggctggtttatggatgttttcaatgttactgatcaagatgggaacaaagttaccgatgaaattgttcttgaatatatccgtaaagtaagtgaagtgatatgattgtctcttgttttctgtttgattttggttacttgactctttctgtggtgtgtgattgcagtctcttggtcctgatgagtcttcttgcttcagtccatcaatgagatcaaccattggggttaaacaatctgtcga

SEQ ID NO: 113743 - DNA, 369 bp, Arabidopsis thaliana columbia
caagactataggattacattacctgtgtgcttaacataacttttagataggctagagaattgatctattacaagataatcaataatttacagaagaaaacattcttttttttgttctatttccttcatgtaggtatgtagctgtatattatactatcttgtattttcgatatcgtgctggaactgtcacagatgcaatgctctcggtgccaaaatctccatttttaattgttggcatcttagaggctctagctgcagctgctggcatggcagccgcaggtaacgttcatctttatgcaaatgtcttatattgtctagcaaaaatgccttcatctcttacgaatcagtcttattgtgttttcattttctt

SEQ ID NO: 113744 - DNA, 374 bp, Arabidopsis thaliana columbia
atgagtcttttgacatgttgtcttcagtttactctctgatgctgtcttcacaaactaagtagggtttaagtgaatagttcttaaaagtttcttttatcatttgcagtttgttgttggattttgcatttcaatttcagcaccgaacaaggaaatattagctttatttgttagacattcgcttgtgcaagctcagcaggttctcctcttgtttgttgcaacttgtcgtctcacactgcccacgtactttcaaaggtccatcgagaacaatcaaattttataaagtctcctcatttagtaaatactaggattcaacctgcggttcaccgcggacatcagttttatgcgggtttctgttaagtatttaataatgtttt

SEQ ID NO: 113745 - DNA, 375 bp, Arabidopsis thaliana columbia
gtgtggacaagcaggggctgatcaatttgttatgaaaaacccgaataacaggggtggtttgataattggtcagggaggtgaaacaatcaaatatatgcaagctaagactggagctagaattcacgttattcctttacatttgccccctggagacccaacgccagaacggactttgcagatggatgggataacctaacagattgaacatgctaaacaattagttaatgaaatcatcagtggcgaggtatgttcgattgctgtgtctgtttatagattatgacaggcttctgctgtgtctatttttatacatgaatttgatattgtgacgtgattacattataaagttgtcattagctatacgtctatctagtctac

SEQ ID NO: 113746 - DNA, 378 bp, Arabidopsis thaliana columbia
  unsure (1)..(378): unsure at all n locations
acatttttgagacaagagactctctctctctgtcttctccanancacggtgtggttctcgtgattggcgttttgtgtgccattgtcaccgcaaggcaggtcaaagatttgtccacggagaccaaattaggggcctctcttccaaaaactactaccaaaggcattggagctcagctttctgcaactggcacaacttacannnncngnagngtngnnagctttgctaatggttttaacaatcccaaaagttcaggggccaatgcattcgaaagtgccaacacatttaccagcggacaagtcactgccaagggtcgcaaggcaagagtttcttctacaagtgcttctgccgctgaaggcgatgctgcagctgcagtgactc

SEQ ID NO: 113747 - DNA, 289 bp, Arabidopsis thaliana columbia
tcgcccagcgtcactatttcgcgataaacatgttatggcgagagttttacacatttgtcaagggaatcttaacttcatgcattcttttgtccaggatattaatcttgagtttcgaatacgctatgtagtaaactatggatcttaattagcatagcgacaatgcattagatgtttttttttattacattgttataaatcaagttggtaaactgaatgtttgaaacatgctgcgagaagcaaaagtacgggctcagacttaaaactgaaagctttggcaaaatatagcaat

SEQ ID NO: 113748 - DNA, 376 bp, Arabidopsis thaliana columbia
gtcaatatacattgaagaaaagttaacaactaacatgacgccaatgtagtgagttatacatacaagtcttttaactctacgagagaagcaatggcaatgggaattggtccaactaaaccacttgcttgaataaacctgaggtaaccataacattataattacttaaatcaagaatgtttaaaggaagtaacaatctcaaaccgtaaacaaagatcttacagtcgctcaagcttagtccatttttggatgaaatctggaattgttcctgacaactggttgtcacttacacgactatgtacaaaattatatgcattagcaaaaaatatcagaattgcatatatatagtagcaaataaaaaaaaaattctctatgaatc

SEQ ID NO: 113749 - DNA, 373 bp, Arabidopsis thaliana columbia
cggacgcgtgggtttaacttttgtacttgatcaattattttggaatattgttgatgttaatcatgattcatgattaatatgtgggctggataatcatgggtctctctatttttctagtctgtaaagtttgatcgaaactgagagcatattaaaatatttaaatcgagatatagaaataacttgtctcatatactactaatatcaaatgcctttgttcttattctacacacatctcaatcacttatgtggtgtatatgttgagcattgctaaatcttaaactattgttttccaaattaagcaataatgacaacaatcttaacataatttcacaagtacatgtaaattttcaactaaacaaacactaaaagtaaa

SEQ ID NO: 113750 - DNA, 377 bp, Arabidopsis thaliana columbia
ctggttttatacaaaccagtgacaacattgtttttggaggcaccattactcccatctcagcattcggaggcaaccaatttgagatcactgtatccatatggaaggttagtttgtttattatcaaaagaattttctatttatgtaacaaaatttacactttcaaataaatagttacatatcatttttaataaacaaattatgtaggatcaaaagcacagaaactggtggttgagtgtgggatccaacaattcattggttggatactggccagccgagattttcacaaatttagcttatggagacgaggcgcaatggggtggtgagatcgtgaactcacatagttgcggccgacatacgacaacccagatgggctccgg

SEQ ID NO: 113751 - DNA, 364 bp, Arabidopsis thaliana columbia
gtgagataccactctggttgagcaacatctgagaattgaaaacgcgcgggtcaaagatttgtggggccgagtctgagccttaaccggtaagtttcttggccggtctaatggttcacatcatataccggactcagcacttgttctcggcgttggtgttggttctggtggatgtaatgttggtggtggtttcactctctcttctccgctgttgcctcaagcttctcctagatttgagatttctaatggaaccggttctggtttggtggctacggttaaccgtcaacaaccggttagtgttagtgattttgatcagagatcgaggtatttggatttagctcttgcggctatggatgagcttgtgaag

SEQ ID NO: 113752 - DNA, 120 bp, Arabidopsis thaliana columbia
accatatataccttttgagatttcttgaacggtagcgggaacaaccaaggcggaataagaatcttcggcaacatagaaagggttggaggaaaactcttgatgcttgcctagccactgcac

SEQ ID NO: 113753 - DNA, 377 bp, Arabidopsis thaliana columbia
gccggtctcgctagaattcgaacgtatttatagttggaaattattcttggtatttaccatttattttcttagtacctactaataaaagaagaagaggtcaacttgacattattaagccgagagaagaagacgaagtcaagggaattatcacgtaacaaacataattagtcaatcggaaagaaacaatacacaacaaaatagtcaacgataagtatttaatgacagaaacaaatttaatggtatagttggatattttcttgtatttcagctagaaattccgttctagctaataatatctaatataaaaaaattgtgaacgaacattcacagccatatgttttcttataaaataaaataattattaacaaccataaatt

SEQ ID NO: 113754 - DNA, 381 bp, Arabidopsis thaliana columbia
gaaagaccctgaaatcttgcccagccttattctgaagatctgtcgactgtgaagaatccaaggtcttgagtaagaattcaaggagcacagatgaaatttctgcggagaaagaagggtataactcaacaaggctgcttacaatcttccttatccttttattagaacctgaaaatcacaaaaataaccttatatgaccatacgaattaacagatatgcgaagttaaacacgaaaatgcaacccaaaattatttccatctctaaagctggaaaaataatctagtgcagccaaaaccaatgtatcatgtcattataaacttcatcgaggtaaacaagcaagacaccgatgggatcattcccatttttttgcttggtgatactact

SEQ ID NO: 113755 - DNA, 363 bp, Arabidopsis thaliana columbia
actacttaaaatttatatttatgtacctttaactaagaaattatggggaaaaaacaagtgcacaaattatgaatcttggttgacattccatcaaaatctaggatcgaaccttgtattctcccagtggcgagagctatataggcagtgagccactttctttcatatcgaatgttggactactcggtcagcttgtagtgtccaaaactaaagtaacaattaaaagaaatgactttttcttaaaatatgtttcttctattttaaaattaatattttaatttttttgggttttgtttgtttgagggtaatcttctagggtaactaagccaaaccgaaaaaagttgatgtgtgtttttggctagtttg

SEQ ID NO: 113756 - DNA, 378 bp, Arabidopsis thaliana columbia
ccaaaatatcattattttgatcaaactcaaggggactcaaatttcaaggccaaaggagctcatctactcaatctctcaaggaaaacatgttaaaatttatgcttcaacaagtgctagaaggataaaccaagagcaatttggacattaacaaagtgtatgaagtttaaaacgattatgtgaaatcaattgaataacaagtgtctcaagccgcatcaacatctaagagttcaatggttataccagataaacatgtcttagtctaatggatcattgcaatgaaatcttttgtggcaatgggaaagatcaagatttaagagttctgagaagttggaggaagtcgcttgtgaaaaagaagaagaatcatataggataaaccac

SEQ ID NO: 113757 - DNA, 375 bp, Arabidopsis thaliana columbia
gtgatgggttcgatgcttattgggattttttctctaaatgacatgaatttaacttcatgtggatctcatctctgaaaaatataagacattcgaacttgaatttccagatattcaaaaaaaaaaagaaagaagcaaagtcgacgacaaatagtgatgtcgtgattttggtcttgtttgtttgcctgtcgctagcgactgaaatcagtgacaataacaaaaagttgttcatttatttgttgctagattcaagtgtatgtggtcacttatctgcaaatcaaggttaagcttttatgactaaatcacaccttcaagtgatgaaaatgcgaaggtatcgacttataccaaagaccatataagtttacatattaacccaac

SEQ ID NO: 113758 - DNA, 381 bp, Arabidopsis thaliana columbia
gactgtaatcatctcttctgtcaacagtggaacagttgaacgaatcattgaaacaactagagaaagaaaaagcagtcatgtttgatgattggacgaaacagttgaatgaattaaaagtggaggttgaatccagaagacgtgaacttgaaaccaggcaaacgaatgttgaatcagtagtagctatggtattgcttcctttctttcgaacatctaacaacgtgaatctgttgtgcacgatgctttatcatctccgtaagttttatttgtttatatatcaacaggttgatgacaatactgcgaagactaaccaggtgagacagtcaggagaagctaaagttaaaaaactagccgctaaatatgaagagatcgtgaagcaggttt

SEQ ID NO: 113759 - DNA, 374 bp, Arabidopsis thaliana columbia
atttataacttccagaaatgtattttcagattcattgtgagttacagattgtaatgaattgggttccagattaatcaaattcatgcctttcatagatttacacatatattcaaaaaaggaaacagaacagaacaaaattatcatcgtttatccttatgtctacatttcctcaaacttaagactacaattcatctttggcagacccatcctttggtttcaactcttcgttgataaaaacagccatgtccttcgcgctcaatttcgttgatagctttaactgcaaatgaaaaatgggtaagatacacactacggacaaagcttataagcaaaaacagaagtaatgatgtctaaaagggcttgagctagtgagctct

SEQ ID NO: 113760 - DNA, 383 bp, Arabidopsis thaliana columbia
aaaagcataagaataaagttaacatactctgtaacgccgaatatttccttgacgattaaggagttgtcttttgagcagaagtcaggaagctgttgaagagagaatggagttagaaaatctatcacacatcgaaaacattgtatgcatatttgacttcaggattagatcaacgaaaatgttgaaagagtaagcagattctctcaagtacaagtaatgtttccacattgattacctcagaaagatagtaaatctttccaaaaagcgcttgcacggcgagttttctcttgaatcctttttcggtaaagccttgcattttcatcactaccggacctgccaaaatcaaatatgtcaagagcaataaagaagagactgccacaatagag

SEQ ID NO: 113761 - DNA, 386 bp, Arabidopsis thaliana columbia
gtttttcacgtctgtctctacttgatttctgtttgtggtattagtattaccaaaagcttgaagagaaacaccaagcacttgaagctgaaaggatcgagctcgaacaaaggcaaaaggcaagaatctttttagtaactaaatcaataaaatgtattctgaaaatctaatataggaactcaattttgcaggaagaacaagaagcagctattaaacagcttcggaaaaaccttaagtttaaggctaatcctgttcctgacttctattaccaacgacctcccgtgaaaccagagctaaagaaggtattaaattgttttcaagaaaatttctcatatttgtaaggaattaagattatgtaacatatttcttgtgtgacaagcaaacttacg

SEQ ID NO: 113762 - DNA, 339 bp, Arabidopsis thaliana columbia
gaataaaatctttctttccgttcttttttttttggtgtgggccggaaaaaaagattttattgcgaaagggggggcggatccaaatgacccacgcttacatccgacgtcatacgacttttttagtgctctataaggtcacctaaagtccagtgagtgaccacggttttactacgaaaacactgggaaaacccatctttttcccctctaaagacattcgcctttcatcacctttcgtacaagcggagagacccgaaaaagacccgctccgaaacagcttcccaacatgtttgcatactgaaacgcgaattggacccgcccattaaccgcgcattaagcgcg

SEQ ID NO: 113763 - DNA, 387 bp, Arabidopsis thaliana columbia
gttactggagaatagtgaatgagggaaatctttgtaagtcacaaggcggtgagtcatctgaaggtgagatgtttgatgaagagtccaattatgtttaccctggtcatgacatggatgatacttttacatgggatacacaaggttgtggtggaagagatgcaacttactctccccattctggaaagtattttgagctagatatacctccaagagtatttgctcctgttgagactttctattatttactcttggatcaacgtgccaaaaagcaagtgcccattggaccacgtcatcaagccgagattcctgaatgggaaggcagtcagactgggaacatataaacctcaggcatgtcagttcaaaatcacattagtggatgtgctgatg

SEQ ID NO: 113764 - DNA, 389 bp, Arabidopsis thaliana columbia
atttgcaagaacataatgttattcacactgtggcagtcttcagacaattgcaacaatgtattcgataccactagcaatcgcggctgcagcaaggttagagctttagtcacactatgcagtacataaatactgaagcatattttctgctcatgacaaggaatcatatggtttcatattcataagcggatgtttatttcttgtgcagcacaagaatctcaaatgaattaggtgctggaaactctcgagcagcacatatcgtggtctatgcggcaatgtctcttgcagttattgatgcattgatagttagtatgtctctactaatcggcaggaatcttttcgggcacattttcagcagtgacaaggaaactatcgactatgttgcaaagatg

SEQ ID NO: 113765 - DNA, 349 bp, Arabidopsis thaliana columbia
ctcgtttttttttgggcagtacattcgagtaaatacgattgaagaaatgatgcatttttaggtgatcgaatacattgtatacgatgcttccatacaaattttggtttgtttgttaggtgacaaatttcaagtgtggagggttcgtgcttggactaggcatgaaccacaatatgttcgatggtatggcacccatggagttcctcaactcttgggccgagacggctcgtggacttcctctctccgttccacctttgttggaccggacacttctccgaccacgaaccccaccaaagatcgaattcccacacaacgagttcgaggacctcgaagacatctccggcaccggaaa

SEQ ID NO: 113766 - DNA, 265 bp, Arabidopsis thaliana columbia
atctttatctccagagtattgtttattgttggggtttttaatagggcgggcattgagtcgtggtcttactctcgactgctaaaattactatcaaacttttacaaataattttgaagattatcccaatattataccttaaaaaatctctagaaaaactccacctaaaaagtcggcgtatttactattaacataccacgtaaaccataagaaatctcccttacatatactctaaaccattgcaaatcaacttatcctctgtttcgaa

SEQ ID NO: 113767 - DNA, 388 bp, Arabidopsis thaliana columbia
gaaaagatgatttttcttctcatgtaatatacaaatacagtctactcactaattcttggtcttctggtatgaagatgaactctccgaggtgtttgtttggatccgcgagccttggagagattgctatattcgctggtggatgtgattcccagggaaagattcttgattttgcggaaatgtataattctgagcttcaaacttggataactcttccaaggatgaacaaaccgaggaagatgtgttcgggagtttttatggacgggaagttctatgtaattggaggaatcggtggtgctgattctaaaggcttgacctgcggtgaagaatatgatttggagaccaagaaatggactcaaatccctgacttgtcgcctccaagaagccgtgc

SEQ ID NO: 113768 - DNA, 389 bp, Arabidopsis thaliana columbia
caaaaaccaaataattatccgttcatgattttacaaaaagtagattttgtaaaaaataggaaaaccagattttaggagtttttacttatttcttcatagaatctaaaaaccaagttttatgggtttttaaaacaatttacatgacattttttttaatttactattattgtttaattatgctatttttaccatttacaaattcatccaaagataaaatatacaatttaaaaacgtttaaaaattaagattacgtagaaaaactaaaaattaaacaaatttccattcatgattttgctaaaactaaaatctacaacaaaaataaaaaactacaaaaatcaaaaaccaaaaactaaaaaccaattaaaaactacaaaacattcaggacaaaa

SEQ ID NO: 113769 - DNA, 360 bp, Arabidopsis thaliana columbia
aattaaatggtggtcaaattcgatgaccgagagcagtaagcttaaggtagtgaggccagaggctgctggcttcaagctaaggcatggtcaagaagaggaggcttcacggctatacgaggaaattgtgaaaaaccacaatagcacagatgctctggttggtcttgtgactacacttgctcgtgtcaatgtcgagaaagcagaaagttatgagaaacagcttaagcccctaccaggtttgaaggctgttgatgtggataacctagaaaagacctctggtgcaaaacccattggaggcgctgctggttcatcgagtcatgaagaagtgaagaaagaaaaggcgaagaggaagaggaagagaaa

SEQ ID NO: 113770 - DNA, 377 bp, Arabidopsis thaliana columbia
  unsure (1)..(377): unsure at all n locations
gaaaaagaagaagagtacaacaagtactaagaagacgaagaaggtttcaacaatagcttattcgcagcttttccgattctggtgagtgtttcgcactacattgctcttgctctactggagattgcggttgtgtgttacgagagctagagttgaattggctttggtcaacacaatggggacttgtggttgctgacttttgtgattttcagttttctacttggatttagatggatgtttcttccattgtgcgaaatacaaccctaactgatcaagatcctttgttaatggaccacggtaaccgcgagcacatcgttgacattacaagcaatgacgaggaggactcttcatcaagatcttctctcgatgagnctactcct

SEQ ID NO: 113771 - DNA, 378 bp, Arabidopsis thaliana columbia
ccaatatctatctcataaagattctgagttagatattggcccagtatttgcaagtgattttagtgtcaaagagatcccaaagatattaaaatgggaagactatatcgttcccacctccaaccaatggaaatggcaggtagcagtgtctgcattgtttgaagagcgacctgtgtggacaagagattccatagtccaacgactactcgataaaggtcttacatgcacacatcatatgttaaacaggtttcttcttagggctgcatattatttctcgggtggtccatttcttatgttctggattaaaagaggctatgatccacggaaagatcctgaatctcgtgtattccagagaatggaattcaaggttccacctgaatt

SEQ ID NO: 113772 - DNA, 374 bp, Arabidopsis thaliana columbia
tatttccatacgtttacatatttgcttacttttgtttttgttgattcatatttgcttacttgatgatcaagataaatatactttcacttcatatctatcaccaataaataaatgcattcaaaaaaaaagagggtgcttatagtcatgactcctctaaaactctttgttgtaagagttgatcatatttgtaatatatcactaatatttgataaattaaggaatggcaactattgctgtaaagataaaacgaatgaaaactatcaaacaaaaatatattttttttcaatcaattataactactaaataaaccatttaaatacctttgatcttttgaattaataagctaaaaattctagaaactagcacatcttaaa

SEQ ID NO: 113773 - DNA, 351 bp, Arabidopsis thaliana columbia
ctgacattacatccctccagcttctctattctgcgactcccaagacggggagctttatttctttgtgtgtcatacctcatagcacattcctagaccagcaccagcaggttctagatcatgtccattcactctcaaaaagtttcgaatctggagacgacacataatgaggaagacccgctgagcggtaaactgtgtccactctgcatgataccatataaatgtacagcggctaatagatactggaacaatctcccgtggtaaatatactccggcatataaaagagagcctaacactcagaccgtgaagaccttgcactacatgtacatgcatcactgtataccagatgaatt

SEQ ID NO: 113774 - DNA, 390 bp, Arabidopsis thaliana columbia
attttgttagaaattttggttctttagcaaataagtcaaatgatgcagataagaaaactccagcttgtaaagaagacaatttcaaggtaggagtgggcttcctcttactgggagactccatgaggcttcccaacgttctccatcggatagagaacagagatctcatgcataatttatcaatctttgttctgctatccgatggatgaagaaggcacagttgatgaggcccatcactaataataaagcatgtttcagatacaaaattttccgttaacttcctggtaaaatgcaggtttcatgacctacaatatacaaaaccatcgtggtttatactaatttcagaacggtgctcgaaattttttatcagcttggtcattgcaaagaagcgat

SEQ ID NO: 113775 - DNA, 508 bp, Arabidopsis thaliana columbia
  unsure (1)..(508): unsure at all n locations
gcgatcccatcgcagtccgaaacctcaatagagtgtagcagaatgaaatagtagtttcctttcatgagaatttccattaatgtgatgtcatgaatccaatagtgaagttagcatagtagtcttcccatagccatctnnnttgaaaggcgctagaaatatagaantnntaataatnnttctatataatacctnnttgaattatttcaatnnacatagtgaactatagagatatatatacncnnaaaatgataatacaatatccctttgatatcagtgcatgaaatattccaatctccatattagctttccatatattatagaaacatnntgaaaatagttgtgtatcaattattatgagaagaaaaatgatgaaactgaactgatctgaataagtnngtggaagacaagttataagataagaagaataatttatagaaccattatcgaaatttgccannttttcttctacttcaatagaacaaagttgcacacctgatacctatttaaa

SEQ ID NO: 113776 - DNA, 392 bp, Arabidopsis thaliana columbia
cttccattgtttatagcaatatcacttaacctttcatctttctctggtgtaaaaaattgatcacctccagctacatcatcaaagaaagaccctaattcagggtcaccaagaaggtttctggcacgttttaacgcctcagctgacactgacaatgattttccaccagcagtctgaaactttgttggaggcacctttaaagatggatttaagacttcagatctcttcccagatacataatcctcatattgtcctggagttcctgaatgatgcttaactactgtagcatcaaactcctcatgagtttttaatccggaccacccatgttgctgggaggaagaagacgactggttcacatggttaaatccattcaaatcatcttcttctagtcctaa

SEQ ID NO: 113777 - DNA, 393 bp, Arabidopsis thaliana columbia
  unsure (1)..(393): unsure at all n locations
gtccgaaaaggttatacaactgatgcaacgtcttatcattcgatattncatcatggccagaaagtagttattttttgtggtttcaatgccccactaagtacttcattattccactattttttcatgtataacaaagaaaaataataaagcctaaagcaaagaattacaaaacatgtttcacagttgaaaactaaaagtctacatgttcatctgttaacttttataaagaaaactgtagagcactgctcttctctctttgctttttgtaaattggttgataagatccgaaaaatggaccctatattgtaatgtaaccatcaagaactgaaagcgaaagtgaaagcaacagtttacccacaccaaagacatatgttctatcatttcatagtctac

SEQ ID NO: 113778 - DNA, 344 bp, Arabidopsis thaliana columbia
gcccgcaggtacccgagtccgagatattcccgggtgcgatcccatcgccgtccgtatagaaccgagtagaaaacatgtatttctatgctattctgctagatttagtttgtgcggagtgttatatatgagtgttgtgtccatttgggaccttaatagtttatatccagagagttagattaggtattggggaggtaataatcctttctagtagcccggagaggtgtccctatcaggatagctcatgtagtctattttgagcattataccaaaacatcaatacataggatcgaataccgatcccttcaacagagatgtgttgagaatggtgtgaaccaagctttggc

SEQ ID NO: 113779 - DNA, 371 bp, Arabidopsis thaliana columbia
aacagttcaaaccttctgtttttatcttgtcagctaagcaagaggatcagaggagccttatctgaatgatagagagagaagcttttacaccctactaaagcatatactgcaaacatcgagatccttcacctatagagtgaggtctaggattcaataataatccatgtattattgatatcttcaataccctttattgctctatccacttaattacaaatccaatttgtctgataccttccaggcgcgtcaaagcatatgttcttaatcaatatcaaacaaaagattgcaaccgctcaataaaatgtgggtgaaagttttatttgcgaacatcatattgctcacgctctgaatttcataatccataatgctaa

SEQ ID NO: 113780 - DNA, 387 bp, Arabidopsis thaliana columbia
caaagatatcacattttatgaaaatgcttaaaactccagaagtatcactagttatgttactaaagatataggaatgagtcctaactgatcttaagaacttaataaagcttgttttaattttgaggtgctttttagggtattttctaataaatttatttgtttgtgtcaaaaatgaattaaagctttgagaggaactggttgaggagagatttgaacgtggtaagatttgggctgatcggatggctagctccgtcgagcattccagcgataaatgggaagagcctgacgggtctcttcttcgatagcatcggaactgagctcgctcacttcccgactcctccagctctcacttcacagttctggttgtggttggttacgtggcactta

SEQ ID NO: 113781 - DNA, 396 bp, Arabidopsis thaliana columbia
tttacaatcgaaataatcaaataaatgattgtctttatttaggactacgatcaagaaccgaatgggcttttccaaaccaaaccgagatttgaattttatggtgcggattcggttaactggagaatagctatcaacaacaatttaaaatagatttagctagatcggtttggttcggttcgttttgtattctctgtcactcctcacaatcgcttatattttatattggatgtttaaaagtcaacattgaaatattgtacgttagtatgtcacttatcataatgtttattcgtaaacacaatttgaaaaggtcaaagaaagaggaaagatagttaatcaaacccttgttgtcaaaaataattattttatttactgtcatcgtaatgtttatcaatgcag

SEQ ID NO: 113782 - DNA, 224 bp, Arabidopsis thaliana columbia
tatctactctcatttaactaccacctttccttcaaacctagagtgatgtctttaatttttgtgggctactataacaaactagactgccattcttcttacaatcaaaattctttcacttatcaacccactatcccctatcgccttttaaaattttaaatactcctgtcaaatcaaccaattctttgctctctcccaaaaattcacctaattttaatactgacaac

SEQ ID NO: 113783 - DNA, 250 bp, Arabidopsis thaliana columbia
attacactcaaacatttttcttaatgcccgtcactacacccggctacattcatatttttttggatcacgacattaaacaaccagacgttcacccattcaacaagatactataaactctaacgagatatataatatatgctaatcttctcattcacgactagagctccaaacctaacgcgtattatatcaaccaagatcataataattcccacagaaacctaggactctagattaataaaaacaaacaatc

SEQ ID NO: 113784 - DNA, 210 bp, Arabidopsis thaliana columbia
aaccggttggttcaaaatggaggttcttaagccaacccaaaggaccttatttccgcaccctttgggttaattttttaaggaccacaaccaggacctccaacactcgacccttcaacataaggtagaggttttgttcatttaacccaccaaaaaccttatttggattaccatttcctattttttaggatggggttggggaatttaaaggag

SEQ ID NO: 113785 - DNA, 382 bp, Arabidopsis thaliana columbia
gagacaactgaatctctcacccttttcctctgtttctctttatttacaggcttacattgtgtacatgggagaggccactgagaattctcttgttgaagctgcagaaaaccatcataatcttctaatgacagtgatcggagagtaagaatcagttcttgctcaaattatcgtcatcggatttttattcgaaattatttacttttgcagcgagagcaaagcaagagaactgaaaatctatagctatgggaagaatatcaatggatttgtggcaagactgtttcctcatgaagcagagaagctatcacgtaagtaacaaaactgtcagaactgttttggcttttatcttgatgtgattgattattgaatggtttttctttgggga

SEQ ID NO: 113786 - DNA, 263 bp, Arabidopsis thaliana columbia
aaaatttttctgggaggaaccaaaaacacatggccgctttacaacatatgggtgaagcgacctccaaaaagagctggtcctggggctcaaccctcacatgccatgaccttcgatgacaacagacacaactgtatctgcggcgagctgaacccaactctccacctagctagcgatctttaccgggccaatattgcaactcaagaatgatcctacgcatctagcgcccgataagcaactaaaccatgcattggcgcctacaccgg

SEQ ID NO: 113787 - DNA, 325 bp, Arabidopsis thaliana columbia
gtccaattttaaacgtgaacgacatgatggtaacgttagttacattggagtctcagttaaattcaaaacatttgattatttataacccacacacgcataatatccattttaaacgtgatttatacatgatgatgacattagttacatagtagtgttcgttaattacaaaaaaaaaaaaaattggacgtttttcttgtttagaactcacaagcgtatattgtccagtctaaatttataaaatagtggtgacattagttacataatagtctttcgtcaaaaacaattttttgaccacttttatcattcataattcacacactcatat

SEQ ID NO: 113788 - DNA, 367 bp, Arabidopsis thaliana columbia
gagaaatagaaaaaacctacaataaacatgacagtaagcacagaatgcgcgtaactctaaatctattgcggctaatagtgcaggacaaaaggtccaaacaattccccccctgatgccatcatgttcttcctccacctaagagctttaatttagaactgctcatcaatgtttggattctaacctcacagagagaaaaatacttcaaaaacgaccataaaacctagaaaaagcttactatactgtaaatttagtagaatcgaattggtataacgatggctcactcttgagcataagtttaagttatgacctagcccactagcttatgaccccaatttcactaagtgacatccccaattcccaatcgaaa

SEQ ID NO: 113789 - DNA, 256 bp, Arabidopsis thaliana columbia
actcaaactcatccaccaaccttttctctcacaaagactcaaacataaaggggtgccccacaatgttatgtgttataggccaacaaaaaagagctgttcctaactctaccaacccacaaaccatctctgacattccgaccatagccaacacggttgcaatggctaacgacccaacactccatcttcataaccaactgaacatcccctaccttgctactcaacaatggataactctctcctatgaacggagaggctc

SEQ ID NO: 113790 - DNA, 330 bp, Arabidopsis thaliana columbia
ctctaacacaccagttgaaaaaaaaaacacagaccttcaaaagggaaaggaaaggtgtgttatgggttggaacatgaaaactgaatcatcagatttaccaaactcacctaagctttcttcaaagcttcacgtaactattccatcaccggtcaaaatcagacctgaaacatgtccgatctcatagccagcacctgctctttgctttgcttaccagctttacctacatctccctgagctaagaaagctctggtcatctcgtgattttcctcaatggacatcaaagccgattctcaaaccagctcttcaagctttggaaatcaggctcagatt

SEQ ID NO: 113791 - DNA, 220 bp, Arabidopsis thaliana columbia
ttttctcacacacaaaaagctctccttctctctctctctctctctctcggtctctgtctcactctctgtctttgtgctctctctccctctctcccacatctctctccttcatctttcgattcactaccatagataacaatattcttatgcatcatcacggatatataataagaaacccatccttatatacctctgctacacacatcataaattatcacac

SEQ ID NO: 113792 - DNA, 382 bp, Arabidopsis thaliana columbia
cccacgcgtccgggaaaccaaaaacaaaaacaagagaatagggtgattggttagccgccagcttgacctctttatcatatatatcgtctctctactcaaatacagtgcaattagggaaaattgtttggcttctttttgttatatgattcttactattatgtttttaatcaagatgcagattatatatatagacaagtattccataccttttaatgaattcttccttatgcaaattcaagtgaaaaattatacttgatcttcaattccaaacacaagaacatgagagagtattgaaaggaaacaaaaatagaaggctggcaacaattgcagttgcatgcaagacttatcacttgttaggtcaaattaaagcattgaccagtga

SEQ ID NO: 113793 - DNA, 285 bp, Arabidopsis thaliana columbia
gggtcccccatgcagtcaagttcgtcaaagcatatcagcatgccgccaggacagcaatcttcgtctcagcaacaagatcacttactatcccagcaatcacaacagaacaaccgcaaaagaaaagggccttcctcttctggtcctgctaacagcacagggacaggaaacactgttggcccatccaactcacagccatcgactccgtcaacgcatacccctgttgatggagttgctatagctggtaacatgcaccatgtgaatagcatgccaaaagggccaatgatg

SEQ ID NO: 113794 - DNA, 356 bp, Arabidopsis thaliana columbia
  unsure (1)..(356): unsure at all n locations
ccgnnccggaannccgggggcggccggcgcgtccgccaaaacgctagaacaataactttgatttttcttattcttctcttaaagcgnaagcgatgtcgtttgggcataggcatcaacaatcttcacctaatttgcatccagcagtggaggttgtagagagggaatcgttgatggacaagttatctgagaagatccatcacaaaggtgattcgtcgtcttcatcatcatcagatgacgaaaaccagaacaagtcttcgtcatcttcttcaaagtctttgaaatcgaaggtttatcgtttgttcggaagagagagacctgttcatatgttcttttcggcggaaaaccggcagatatat

SEQ ID NO: 113795 - DNA, 397 bp, Arabidopsis thaliana columbia
gctcaagggctttataacaatatggttttcagttagaataataatcgggggctgggtacaacgacattggttcattctagctaaagcacacatccttacgttgtcctgtaaaaatgcttcaaaccagaacattccaacaaaaatagagtctcgtctcttcttacggttagtacacagtaattgtttctattaattcaatggagttatgttcaacatatccactataccacatttggattcaaacccttatagtagaatatgttttttttttttttccaagtgcattcaacttgtccaaataataataatgtaaaaaaacaatttttaaattttttaaaatatatggatagtaaaaaaagagatctgagaatttacctttttttatggtagctgaaaa

SEQ ID NO: 113796 - DNA, 393 bp, Arabidopsis thaliana columbia
gtttggagatcggcctctattagagataccagcattcaaactggtcttgacgtttgtgctccgtacttttttagctgttgagggtgctgctcctctagccatcttcttagaaacaataggtttctcatctttatcagagggtctcccttcctcctcttctgaaacttgcttctcatcaactgttggaactactctagtctttttcttcaaagtttcagtgactgacgctggagatctaacagccaaggaactacgtttccgacaagctataataggcactgaaagtgttggtttaagagaagagactttgacttcctccttagacgtcaccaaggcatcctcttttggtggtggtaaggtttgtttaggaatcttgaaactcatctgtttctt

SEQ ID NO: 113797 - DNA, 362 bp, Arabidopsis thaliana columbia
ctaaaaccaaactattatactttcatgcttgacaaaaatagggtgtggaaaaagtatgggggccagattttagtagtttttacttattgctgaatagaatctaaaaaccaagttttactgtttttaaaacaaccacattacattggttctaattcactataattgcgtaattatgctagcttaaccatctacaaattcactcaatgatggaatatacaaaataaaaacgtgtaaaaatttagatttcttataataacttttacttacacagatttccatgttatgatcttgctaaaactaacctctacaacaaaaatttaaaactactaaaatcaaaaaccataactaaaaaccaattaaaa

SEQ ID NO: 113798 - DNA, 375 bp, Arabidopsis thaliana columbia
gaaaagtaaagtgaaagacgataaattctccatccttgagctatttcaaggttcaactagacaactatgatcttggttatataataaggaaccatgaagattaaaaattgagaatcggattagtacgatatctttggtgataagagtttatgtcctatattttaggagtttgtgtttatatcttgttgagttcattgtgaataaatactcattgtttgagaattaatgaaagcaagtcagttcaatatctaattctacagtataacattttacagcttgagaaagcggtgtgttcttgcggtttgaaatcgcttttctgtgagttatatcaatgttttgattagaatcttccgaggagatagtttaatctttcta

SEQ ID NO: 113799 - DNA, 348 bp, Arabidopsis thaliana columbia
  unsure (1)..(348): unsure at all n locations
ggggcggcgcgacgcgtccgcattaatcatcatctcttctttacagagttgaaaaaaaaaaaancncgggagattgtcaacctttttagtttctagcnctnccannaaaaacaagaatcgctctcaccgttatctccaccatgaccgataacgctcaacgtcctgactgaactatcaaccgccgattccaccaactcttcgatttccgtgctcctcccaatcctaaacccgacaacatcgtctccacctccgatttcgtcgtggatcaataccacgatctctggttccgattgtacactccacatgttttctacgataaaaaccccgtcgttgttttcttccacggcg

SEQ ID NO: 113800 - DNA, 389 bp, Arabidopsis thaliana columbia
aatgtaactgacaatcgtggtgaagtggtcgaccgtggtagtgaacaaggagatcagttaacattgtcttttcagggccaagtctacgtttttgacagtgtcttgcctgagaaggttcaagctgtgcttctattattgggtggtcgtgaattacctcaggcagcccctcctggcctaggatcacctcatcagaacaacagagtatcgagtttacctggtactcctcaaaggtttagtattccgcagcgattagcttctttggtcagatttcgagagaaacggaaaggaaggaattttgataagaagattcggtatacagtccgcaaggaggtagctttgaggatgcaacgcaataaaggtcaattcacatctggcaagtcaaacaatga

SEQ ID NO: 113801 - DNA, 304 bp, Arabidopsis thaliana columbia
attttatctgtggaagatatactccctattttggatcgttgggtcaaactgatgataaagtctgctctatatatatagacgaaataaatttctaattgaagacaaaattaaagtctgtatatagacaaaatctaatatgaaatatagaaaaaatctaatatgaaatataaacaaaatccaatatgaaatatagacaaaatctgaaatttcatgataataaatgtcataataatgaaaatatagacacaatctgagacttaaagtacattccaaataaagtggaaaagctgttgtttcatccgat

SEQ ID NO: 113802 - DNA, 397 bp, Arabidopsis thaliana columbia
gtttgtatacctttcgacacatcaatgtcgggactcagattggaaggcgaggatcgtgattataacaggcggagccagcgggattggagccgacgccgctaggctgttcacggaccacggagctaaggtggttatagttgacgtacaagaagaactaggccaaaacgtcgcagttttgatcgggaaagacaaagctagtttttaccgttgcgatgtgacaaatgagacggaagtcgaggacgcagttaagttcaccgtcgaaaaacacggaaagctagacgttctgtttagcaacgccggagtcttggaaccactggaaagcttcctcgactttgacctcgaacggtttgaccgcataatggctgttaacgttcgcggtgcagctgcgtttatcaaa

SEQ ID NO: 113803 - DNA, 379 bp, Arabidopsis thaliana columbia
gaggaacgtcagcggcttctgcaggaagtcccagaagttcatacagatccaagcatggatccaagtcatgcattatcagaagatgcagggttgggtacaaggaaacaagataatcacgtaaaggcacaaagtaaaggtccacagaataaaggggttaacttgatcaacgtgggaaataatgtgcagaaaaaatatgatgcaccaattttgcgaagcagaaataacgtacatgctgataaagatgattgttctaaggtccacaataactcatcaaatatccaggaaactggtaaagatgacgaggagagtgaaatatggcattatcgagatccaacaggaaagacccagggaccgttttctatggtgcagcttcgtagat

SEQ ID NO: 113804 - DNA, 378 bp, Arabidopsis thaliana columbia
caaaatagtatttaatcaagttgttgagattatgataaataccagcactaagaagtacaagatcttgatctgaaagccctttttctctaaattttgatttcaaagtatttatggaatcttgaacatctggcaagttcttagcatgatcaacatttgcaatcagaccgtctctccgaccggttggaacttcataaaatggtccttttgcctaataagttaatatttaatatcaaaggatcttatttaacccaacacatatacatcgtacgtgtattaaaaaaaaagttctataaagaagtattaaagtgttacctcagcaatagcgtctctagcagcaagagcaacgatgtcagcgcaagacacaacgcccggacaaaa

SEQ ID NO: 113805 - DNA, 394 bp, Arabidopsis thaliana columbia
  unsure (1)..(394): unsure at all n locations
naaaaaaaattccaatggctttttctactctaaccttccccaccactattggttgctaaatatgttgctgggctttcaaaaacctttatataaaaaaatanaataactacaaaacttattaaatataattggataaataatgggttccatcttttctatggttacttctaaaacctttaggttctctttatacaccttaacttcttcttttaattaatcaatactattggtaacttgtacaatttacattcttttgctctaccccataaattttcctaaaataagtttttcacaattatatctcctttatacaataacagtatttttatttttaaaatttattatgtcatttacccttttatacccttctttttttttcaaaaatgtatttttt

SEQ ID NO: 113806 - DNA, 393 bp, Arabidopsis thaliana columbia
ggataaagttggatccctccatgaaaatcccatcgccaccaacagctacggcggttcttgctatgcatggtattaattcgcgaaggccaccactagcaacacccccaccatctaactatataaacaaggtatgtttgagtttagaccaattctgatttagctttaaaacaccaagcattttcttaaattactcagagcatcgttctaatgaccataccttcttgcctgcaggttgttgtaatgaatgagttatatcagcaacctgaagccaataactaaattatattatacgagtgtcaaaacatcaaagtataaagccaaagccaagatataaactcccacaacaagaaaagaacaagaagcaatattaactcacaacgggacaatcagctt

SEQ ID NO: 113807 - DNA, 384 bp, Arabidopsis thaliana columbia
gcaatctccaaaagctgagatacacaacagaggaagtccacacctcttctttttcttttttcttttttagtctctatttagatttcttttgtcttgagcttgtttgtaattcttctagctgttagtcactctttgctctgtttcagtagctctctttgctccttgcatgaaacaaaacacgtttcatctatcagtcacaattttgagcaaacataacacaacaaggtcgaaacataagaacaaagacagaaaccatttaaacagacctttctctcctcattgctgctttcttgagcaaacacacaaaacccaacatttacaatgaacaagaatccaataaagagaccagctctggaccttcccttcacaattcccatattcttt

SEQ ID NO: 113808 - DNA, 324 bp, Arabidopsis thaliana columbia
  unsure (1)..(324): unsure at all n locations
acaacagaggaannccacggcacgagtttnacttttttggcttttggacncaactaaaataaccttatcacctcccaccaaaaacagcaatcctcctaactactaagacaccacatttcgctctaattacaactaactccccaccgcaccttacatgaaacaaaacacctttcatctatcacacacaaaattgagcaaacataacacaacaaggtccaaacataacaacaaacacataaaccctacaaacacacactactcttcccattgcttctttactaagcaaacacacaaaacccaacatttacaatgaacaaaaatcca

SEQ ID NO: 113809 - DNA, 269 bp, Arabidopsis thaliana columbia
  unsure (1)..(269): unsure at all n locations
aaatccaaacgncaccaaaaaggcaagtcaaacattcgttcaagaagaccaaattagacgcctgtcttccaaaaactactaccaaatgcattggagctcacttttttgaaactagcacaacttacagcacaaccagtgtacttagctatcctaatggttataacaattacaaaggttcaaggaccaattcattccaaagtgccaacacatttaccagaggacaagtcacttccaacgttccaaaagcaagagtatcttaatcaagagct

SEQ ID NO: 113810 - DNA, 298 bp, Arabidopsis thaliana columbia
gaaacccaaaccctcattccataaaatgttgtctcactctcaaaacccgtcctttgtcgccctcctagggcttgggtgtcaaagccacctcctatgcttgcgactgtacccctcctaaaccatcaccatcacctcacaaaccaccaaaacattcagacaaaccgactaaaccttcttccggcaaaccaccttaaccacccgcagtaaaaccacctactccaaaaccttccaccgtgaaaccccattctaaaccaccaaccgttaaaacccatgctaaaccaccaaccgtcaaacccca

SEQ ID NO: 113811 - DNA, 270 bp, Arabidopsis thaliana columbia
  unsure (1)..(270): unsure at all n locations
ctctggaaacaaaatttcttttttggtttcttgaaatcgcannnaacgggtcgtggggcattcttttgtgtacggtctccacacatcaacttttgttgatacgattgcttgaggattataatagctgcaactgtcatcaagcactttttgccttctcttcttcatatccggtctccatgtcaatctctctcaaccagtttgctatgtacttatttaaccactgtttaagaacacatacctaaaaattaaccgggtggttgcacaaacctt

SEQ ID NO: 113812 - DNA, 390 bp, Arabidopsis thaliana columbia
gtagacagtgttgtgcccaattacgtaaatgttgaagttacaaaaatagatgattttgaagatatttttacacaaaacccttagaaatatacattatactttcttttctctaaacagacacctataagatatgaaataccatttatttgtgtttagtcttcttatgtatatggtaagctatatctttcatatagtctaatcagtgcatgtccatcaataataccatgcatgagccttcctccaactattcacaacaggagctgaatattaaactggcaaattgatgttctaccatatatacctattatatcacaaccagcatagtctatagtggttttactatagctaatgtaattagtactaattaaagctagttgttagaaaaacatg

SEQ ID NO: 113813 - DNA, 343 bp, Arabidopsis thaliana columbia
cactttcattctcacttgtgttcgtacgtaatgttcttgatgcgcaaaagaagaaattgagtttaaaggagaagtgtgagaaggaagtttcaggaagatgggtgaagaaaagaggagaatttcaggaagatcagtttcacttccatcgatagacatattactagacgagaaaccaggttggccatttcttaaaagagcaagtttaaggacaccacaacaagttcacaaatggcacacacgaaaagtctcagtggtcaattgggtcatgagcttacctgaacggtttccaaatcatcaacagactctaaactatgagacaagcttgattaagaaacaaatccag

SEQ ID NO: 113814 - DNA, 315 bp, Arabidopsis thaliana columbia
cagctctacagaaatctctcgcttttctttacaaactaagcatatagccaccagatttggcgtgtaatagggagaggaaggaatggctgcttctgctctcaaaactcggaccttcagatgaactcactgagcaccaggctcggcgacttcacttggatcttgcctcatcctataactcgaacatggttgctctgcctaatgctggtaattaacccatgtgccactagacactgatgtgcgttcggttgattatgtttaatctggctttatgtagttatcacgatgggtttaggaacaaacatttctgttttatga

SEQ ID NO: 113815 - DNA, 328 bp, Arabidopsis thaliana columbia
atcagatttgtaaaacattgttgctatgttattatatgagttgataaagaaaattactttagttcgacttcttgatgtttgttgcttcttctgctcactcattgaggttggagtgatgggttcttgacacttggcagctccacaagtatccatcggttgcttgtcttgagggattggagcaagagaattgcttgtgagatcaaatccaaacaacctatagctacaattcgttggaggaggaggagtctcgggtttgaagctgttgtttgaggagtatccacctgaaattctctcaagtgatggatcttgaaacagtttaagggatgca

SEQ ID NO: 113816 - DNA, 388 bp, Arabidopsis thaliana columbia
agaatctcttcttcaacttctcaccgataacgaaaaatccgcaagaatcatagctaaagaaggtaacgttggttacttagtaactcttcttgatctccatcaccatcctctaatccgtgagcacgcactcgccgccgtctcgctgttaacttcatcgagcgccgactcgagaaagacggtgttcgaacaaggcggattaggtccattactacgattgctagaaaccggatctccaccgttgaaaacaagagcagcaatagcgattgaagctataaccgccgatccagcaaccgcttgggctatctcagcttacggaggcgtaaccgtattaatcgaagcttgtagatcaggatctaaacaagtacaagaacacatcgctggtgctata

SEQ ID NO: 113817 - DNA, 392 bp, Arabidopsis thaliana columbia
agaatctcatttccaactgcttaccgttagcgaacaatacgcaagaatggtatgtaaagaaggtatcgggggtgggacattaacactgattgacctccatcaccataactataatacgtgagcacgcactcaccgccgtctcgctggtaactttatagagcgccaactacagaaagacaagtgtttcaacaacgcggattatgtccattactacgatagctagaaaccggatctccaccgctcaaaacaagagcagtcctagcgattgaagctataaccgccgatccaccaaccacttgtgctatctaagattacatgaggcgtaaccgtattaatcgaagcttgtagattaggatctaaacaagtgcaagaacacatctcctggtgctata

SEQ ID NO: 113818 - DNA, 389 bp, Arabidopsis thaliana columbia
cacttttccttcagcttggaaagcctgagcagtagctttcaagtctcttttaaccagataatgatggatatagacatccaacctgttacattcaaaaatttgtctttaaaaccccaacaaagggcactcgccaaacaggggcttaacttcctacttaacaatgtcccataaacaaaccatccagttatgagcaaaaacaccaaaatcaggaaactttcttgaaggagcttaaagtcagatacttgcatacaaaaaggaagagagaaattgggacagtaacaaaagaaacatgatgccacaagagtcaaccagaattcgataaaccaaatatccaaaaaaataattacaagctccttgacagtgactgacaacacaaagaactaaacttt

SEQ ID NO: 113819 - DNA, 225 bp, Arabidopsis thaliana columbia
  unsure (1)..(225): unsure at all n locations
acgacccacgcgtacgcacttttccncnatttttattttacccaacaacagccacaaacgatgggtaaaaaatttttgggcttggacaaaaaaaccatanaccacatcaattccaaaaagtcaaccaccactacacacttgatctacaaaacatgtaaaacttcacaagacctccaaaaacaaaaaaacagaatgacccacctatgaataacaagacctacctca

SEQ ID NO: 113820 - DNA, 365 bp, Arabidopsis thaliana columbia
acggttttcggatatgaaactacaaacctgaggaaactagctgacaaggttgcaaaacctggattctacgccgtgaaacctgattaatgtcatgcaaaaactgataatttcctcaaccactagcgcatgttatctacactgcataaacatcattgaagaaaaagacttttttattgtgttgatctcttataattaagatccttttgcgtttaatttattaatctccaagcaaaaaaatggatatgagaagccatgaaatgattgagagtagaagagaagacaatggcaacaacaacggtggtgttgctattatgaacattattagtactaatattgatgataattgcaatggtcataacaacaac

SEQ ID NO: 113821 - DNA, 253 bp, Arabidopsis thaliana columbia
acgggtctattctgtcatctgtatatataataaatatttatggacaaacactatttaaaacaagatccagtgtttggtgtcctaaaaagaacaacatccttttcaattagttcatttttgacttgttggagattctagaaccaagagacagttgagataatcgtgtaaaggtcaaatttagctctttacatatagatagtattattattattttttgctaaaaaaaacatatagtaatatattttaaataaaa

SEQ ID NO: 113822 - DNA, 384 bp, Arabidopsis thaliana columbia
cggacgcgtgggcatttgcctcgtcctatcaaaatgcggaagaaacaagatgtgaagagccgttcagtgaggaaataaatgtggccagaactcaaaacattacaacaataagcaaagacagacctaaagcaaatcaacaacaaaccaagactacagacatctacctagcagcaaagactaaccacaagtagcagaaaagactcagaaattgaatatcctaagaaagttgaaacctttcctcttaagaaaacacaatcgcacaaagaaactctaacaaaacgttgttttttctcttccagagagctaatagcgttttcagatgacgatgagactcaaaaaggagaagactttcgtcggaaattagaagaacttactaagtacaga

SEQ ID NO: 113823 - DNA, 306 bp, Arabidopsis thaliana columbia
gtttcccctctttcatcttttttgctatgccctttaaattctactacaaaccgggccaacattaggttgttggatgatagacataatacaaggataagaaatcaagctcttttttgataaaccaatgcatgccatgatcattttaaatggtacgtagatgtactcggctttagcaccaagagggaatctagtctatccatgcattagcggggtgaactagaatgcaagcaagatgagcatatttacattctaatgtcaaatgtagtatatattcaagtagcgacagattaccttctaccataacgt

SEQ ID NO: 113824 - DNA, 312 bp, Arabidopsis thaliana columbia
acgcgtctattctgccatcagtatatataataaatatctgggctcaaacacggtcctatcgtcattctcaggatggacggtgaagatctctcggagtttgtccaccgccctggatatgaaatcgagagcatttctgttttctcagagctcttcagtagcaaggacgcatcgctccgtgattgtatcgtcaaagctctccaggctctttctgttgatcatggaatggctcctttcaacgacccatgggtgatgagcaacatcttataaccaaatgttgactcttgtcttgatgaacaaaataaaagagagaaa

SEQ ID NO: 113825 - DNA, 348 bp, Arabidopsis thaliana columbia
gggtcggttcctcagtctgcaactacactgtcatcttatctgccggatgggtttccaatgcaagggcggtaattattgcctgaatcgatctcaataattataacattcttggcttcctgtcttaagacatcatcctactctttaaccattctctcatgcatatgaatagcaatccaattgtgtggcatcacttactcgtatacgaaggcaatctatacttactctatcaacttgacctaagcaactacacttttataggtcctttaacctatgtcatcctagcaccacattctctaatgacacactctcattgttacaatgactgagatagctcgtaggctataaatc

SEQ ID NO: 113826 - DNA, 217 bp, Arabidopsis thaliana columbia
tgaccattgacttttactatgcttcttgacccaattgtatccttgtatgtccaacatattttcggacatttttctctaataattaaacaagtaactgtttctttccatttttcaaaatttgccaaaccgcctttaaagatataattaataccatttttctttagtattttttttgtccacctactttttactagttactaggcaaaaattggtcttt

SEQ ID NO: 113827 - DNA, 380 bp, Arabidopsis thaliana columbia
gacaaaaagagattgctttggcatcatactataaacctgccacattataggaaggtactaagatgaggcggggaggaggaaacacagccttaaatgtcaatgaggagccaaactaagccaaacaaaaaccatgatcatgattcatgaatcaaagcgtgatgaaaccgagagagcgcaggacacaaaccttagcaggccaagcagggaatcctttaactttagcaagaacgagatcacccaatctcatctctcctatcgccatagctttgttcgctcctcttttacgcccaggagccattggcgaaactgactacaaaccctaatcacagctcagatagaatcacaaatcccaagcaaaacccgagaatcaataagaaagt

SEQ ID NO: 113828 - DNA, 377 bp, Arabidopsis thaliana columbia
tcgtggtataccgcagttttcaagaaccattcccctgaagagatgaccggatagtcaaggctcgggaagagatcagtccatgtattgtcgagtttatctagatgaagctggactgcagctgatgagacaccatttgagtcttcaaagatatccgcttgaacaagaaaaggcgaccaaatgttggataccgtaaagttatacgaaggaaaatgccaacgcttcgatctatagttctcatcgtgatacacttctaccggtttttcaacctgaaacatcgaaaaaacaacatttgtcaatcacaaactcttattcttctcaagctgcaaatagctagcaagcaatagctaaaaaccttactgtagatagcatacaaagca

SEQ ID NO: 113829 - DNA, 405 bp, Arabidopsis thaliana columbia
cgaatcccgggggcggccgacccgtccggacaagtaaaatctagtctgattttttcactttctcttctttaccatggggtaggttattcttcatttgtaaaatcttctcacgagttgtattatacgctcccttcgatttatctttaaggctacccaattgcttctgtatctgatctccgtacttctcccacaactttggaaccgtcaagcccatcaccaaacctgtattagaaaatcaagaaacatgaatcacatctacttgaaaccatcttaaaaacacatagtcttatgtatttttaatgtagttctttcttcatgttaaaatatattgtacagtatagactatgatcttctgatgaaaatatgaatttatagcattaaaagcattctgactttattgcaatt

SEQ ID NO: 113830 - DNA, 382 bp, Arabidopsis thaliana columbia
ggacgaaagagaagaaagctgagacagggtagctgagaaagccattggagaggcgcccaagaattttttttttctgtgttcttggagtttcgggataagaccgcaatggtctccaagtctcaacggtctaaaacagacatcactgaacgaatcataaaatgccacgtaagtgcaaacaagtttcctctgctatacaactaggattatagtaatagataatgtatttcaagtttcaacaaagattatattcgtttttttttttgttttctgatgcttgaaagtttatgaattatacacacatacaagtgaaatcgtgtatgtcacatggaagatcatatacaaaatctttttacgtgtacttttaaattatatgttacattat

SEQ ID NO: 113831 - DNA, 375 bp, Arabidopsis thaliana columbia
aaagactctctttgctattactattcttagacaagatttctctgggggggttatctctttggttgtgactcttttgttgatcaagggtttgcattggatggctcaaaagagagtggagtatattgagactactccttctgtgactttgctctctcatgtccgtatagtttcttttatggttttcctccttatcttagattgtctccttacgtatagttctatacggcaattgattcagtcacgtaaagcttcaatgtcagtcttcttcacgtttgagtatatgattctggcaacaacaactgtttctattattgtgaagtatgccttctatgtcactgatatgctcaaggaaggtcaatgggaaggaaaaccagt

SEQ ID NO: 113832 - DNA, 384 bp, Arabidopsis thaliana columbia
cccgaatgatactttattataaagtctaaaattatagcccgagtaatgtacggtgggggtctatttgttgtaggctcgctaataaacaaaagaccactattctagctaggaaactgtaagacatcatttccttgattgtgtatagaagttaaggctcgtccatgagaggaccccctattttatttatcctttctcggaagtcctcaaatagaactctagtatgaaaacagttactaactactagctacatttgatgccttataatgtaaactgacatgttttggcctttgtatgacaattacattgagtgatttgcgaagtaatagagtttgatcctcccatagagagatatgatttcgtcaatcttgagatatgatttattga

SEQ ID NO: 113833 - DNA, 367 bp, Arabidopsis thaliana columbia
cttttatacgacatattactcttattattactattattacatggggcgggggcacaccatcagtgaggcgccttttacaaacacctgacatttcagccaaatcaacatcctagatcccactcaaacaaccaatgtcgaagcctcataaatcgaattatagaaccacattagcacctgagctaccatgcacccgtttaactggatgctctaattatcctttatcccaattgcattatcttgtctcttttctttaacccacctgccctctcttacttctaacaaggagaatgatatatagtgacaatctcttctgaatgatctgaaacttttacagaatttaaaagatcatatacaataggaggaacta

SEQ ID NO: 113834 - DNA, 378 bp, Arabidopsis thaliana columbia
cagcctccaatgcttgatttagtctatcctggctaatcttggtggtctgttgaagttttttctctgtctcaccgattttcatttccagtgaactcaccatactctgtaagaagagcaattcagacaaaaaagatcaatcgtttttcagtaaagtttgtcatctgaagagatctgtgtagttagtattctcaaatcttaagtatttttgctcttctcctctaagtaagctacaagttcagaaattttcacaaaccttcagcttttcattttcattcgtgatcttatccattaattcctgatcaaccacaggaatctccttaataatcggggcaatctcagcaaccttcttggcagcttcacgttctttaataagcaatg

SEQ ID NO: 113835 - DNA, 378 bp, Arabidopsis thaliana columbia
gttgtcggacattttgttgggtatggctgctggtctgaaacgtgatccgatcggcgatcctcaggatgggcggggaggatctctcggagtttgtccacggccctggatatgaaatcgagagcatttctgttttctcagagctctccagtagcaaggacgcatcgctccgtgattgtatcgtcaaagctctccagtctctttctgttgatcatggaatgcctccttccaacgacccatgggtgatgagcaacatcgtagaaccaattgttgactcttgtcttgatgaagaagataaaagagagaaaagcgcgtctcatgagagattcttggaagcattcaagagagtcgtgaagagtgtggctcatcgtctcaatgaac

SEQ ID NO: 113836 - DNA, 279 bp, Arabidopsis thaliana columbia
  unsure (1)..(279): unsure at all n locations
cacatnaccaaaccccaggcgcgttcaacccacgcgtccgaccactaaaacaacgtattatgacctccccccaaaaaaacgtgtgggcaacaggtttttgggaactaacacaacnacnacaacaatcaaccaaataaatcacaagaaacctacaacaaaataccgatcaaaccgctcacattactaccagaaacacaaacaaatacccaaagacgcatactgccaaatttacatgccctaataaaccaaaactccacaaataaacgctctcaaaaacat

SEQ ID NO: 113837 - DNA, 380 bp, Arabidopsis thaliana columbia
atcgcaccttctgttgtatggcttaccatcaatgacctaaacccaacacgaagggtaattcgttttagttttgaaaacagagagaacaaaaaaagggttttagttttacctcaggagccatgtatccaagagtaccggtttctcctgtcatgtcttttggattaagagcttccactcgtgctactccaaaatccgctattttcaaattcttctgagcatccaaaagcatgttctctgttttcacatcgcggtggacaatcttctctgagtgcaaatagcttagcctgcagtaagaacaacaataagatgtttgtttgcacaaatctgaaaaagattagcagtgtcaaaagactaattaattaccctctggcgagatcaag

SEQ ID NO: 113838 - DNA, 378 bp, Arabidopsis thaliana columbia
  unsure (1)..(378): unsure at all n locations
caacccacgacttgtcacgtgctgactcatgtgcgtacnagcgtgaatggacaaaaattctttggggtgtgacatagggttaaccttacaagcgcgctagaatctgcccatgacgaacattcaagtctttcatgagtctatttcccgttcacgctcccgctccagatcaagatcatcagcatcttcttcttattcttatccaatttgattaattagagattgtatttgataatttggttatcttatacgaagtggactcattacaataacacatttaaattgtcaaatcaatgctcgaatgttgttacatcgcttaaatccaatatcagagatgttccttatttccatatgtacaagcgatattggtgaaatcattca

SEQ ID NO: 113839 - DNA, 381 bp, Arabidopsis thaliana columbia
cgtcgggttgcgttaaaaatgttggtacctcgccgagtcactcatgggcgagcgccaaaatgttattgacccgtgaatctcaaccgttggccccagcgttagaaaacgaagatcctgttgacgactttgagtttctactcgaagatcccgtcacaatgctatccgccgacgagcttttctccgacggaaagcttgtcccgcttaagttttctggcgtaacttatccggaagagaagcctataacgtcggtggttcatacggcggtgaaaccatgccgaagattggaaatggagatctccggcgtcgtcgatccttatctcttctctccgagagctcctcgttgcaccgtgagatggcgtgagcttttaggtcttaagagac

SEQ ID NO: 113840 - DNA, 375 bp, Arabidopsis thaliana columbia
  unsure (1)..(375): unsure at all n locations
caactggtgtcgtggaaatacagttcaggtaccaactactttttggtggaccctttttcctgtttgattgttagnctttcatagatgagtaattgtctgataagctctaagtgttagtctggttcactaggcaatatgattagctaggcggtttgtagtagctgtgttaacagctcagcaacaatcttgttaatgtagtctctctgtgatgtgtaagttatttggtgaaatgaataaaagtgttcacggattcgattcctatgattgccactaagatgtactaatagaacatatgaattccataccaatatcaaacttgttgttgtggtgaatctacttgtaatgatccgttaccaaagatgaattcacaaatgg

SEQ ID NO: 113841 - DNA, 377 bp, Arabidopsis thaliana columbia
  unsure (1)..(377): unsure at all n locations
aaacaacaatcactatgataaaatcttatattactaacttactcttagggccgagaaaaacaaagtttcttagtcaaaaacaatgtacaaaactagttntaagaccgacttcacaactacttttaagttcgtatctactagaaatacaatttattaataatcgacagcaaataaatcaaatccatctctaggcataactacacaatatatggaaaatgctacagaagtaaatacataaataatccaatgacaggtgacaagcctctatctcagtttcgaaatcaagatatgtatagcagcaataatttgtgcactaactttatactcacattataaaataatttcctaatgccatcctatactgcaccaatctattc

SEQ ID NO: 113842 - DNA, 380 bp, Arabidopsis thaliana columbia
cttgtaatcagagaataaatgaatcggcatgcaaaacagcaataaacaggggattctgaaaagagatacacatgtaaaagatagatagattgcatataaatgttaaaagatgagagaaattaaagaagaagaaaagagatctaaacatgaatgcacaattaaacaggggaatatccaaaaaaaggaggaaactttaaaacgaggaatctccagccagatttgaaaggaagccggaaaaagaaaagccctaattaggtctctctctcgcaggtgtaatcaaaatcttacttggtgactgatctgagccgatgaatcaagaacacgcatcagacagagaggagagagaagaaatacaagaagaagagatctcgtgagtgttc

SEQ ID NO: 113843 - DNA, 331 bp, Arabidopsis thaliana columbia
gttctaaagacaacgaaaccatttccgctagctttaatcaattcggttgtatataagtaggatgactgcgtcatttatatcttaaccttcatcgatgacacaaaacatgttatagatacctacattgaggagccacagtcatcatgcacgtctgctcatcctacacattttatacagactcatcttgcacaaacacatgaacttttttatggcctataatattaataatcttcaactactcaatgtacaactgaaagaggccactttctacacatactcgaactactacgttttctttatcgctaacgccacagaagaggtggatgtgact

SEQ ID NO: 113844 - DNA, 378 bp, Arabidopsis thaliana columbia
  unsure (1)..(378): unsure at all n locations
gctgcagaagataaaagcagaggatgatgccagtttgagttacagaagaggatgtanagaaggtgttatgtggatcttgttcaatgaacattgacggtactaacactgtcgcatgtcttaaacccataaacccaaacacgtcgaagcccaccataattactccattgcctcacatgtacgtcatcaaagacctagtcgtcgacctcactaatttttaccaacaatacaagtaagtgaagctagctaccttctttaatcccatataaagtttctcacactttcaacattatggatgtcgaacaagtatatatgatggtttcatgcaaaattgaggaaaagaaacataaaacttgatttaagtgaatacttgcagcatag

SEQ ID NO: 113845 - DNA, 380 bp, Arabidopsis thaliana columbia
gagagatccttctatatctctctctaatcgattaacaaaatcggggcgaggaaaaaaattttgtgtctgttctcttccgtcaatcttaatcatttccgttgtgatttctcgccacaaagaacaagttgcattaggctccaatatcaaacctatgttcgattcagatctagccgaattactctcacgcttcttgatccgacggctattccatcatccaaataaataaagataataacaaaaaccgatccctcgatttttaacatcctcaccaactgtgtatacgacaaactgaacacacggtcaaaacttagacggatagactactatcagaaaaccaatacatgattcttaacttctacactgaaaacagatcactacaa

SEQ ID NO: 113846 - DNA, 280 bp, Arabidopsis thaliana columbia
  unsure (1)..(280): unsure at all n locations
aaagctctactttttttttattaactactatgactcattcgctcgaggcacaataactcgtggttttctcccnnaagaaactaaactatcgcgatgacgacaaccgtgaccccttggttttaaagaaattagcactgactgtgtatgatgcctacccttcatctgccatagcgaatatcctacattactttgtccaacacggattagtaaacatatccatcgaagcctactccaccttcaccgtcatcgaaccttttaccatgaggcggatgttcaccgg

SEQ ID NO: 113847 - DNA, 349 bp, Arabidopsis thaliana columbia
  unsure (1)..(349): unsure at all n locations
gaatgcgttaatgcatccacagggtcaacaccctctaacgcanactcatggaatgagtgcctctagagtttctgcggccatatatgatacgccctttcataatttatcctccccacatcaactcatatactatcagacataaacctcagatcattgcgccgatctcaaacttcaacctatatgcttttaatcttattgtttgcatggatagcactcagaagagagggaattgggtgatctcactatcgttatcattaatataagtgtaaatccaaaaaatgccattggtataaacaaccttacataatcagataagcgaattacattcaataaaacggatttggatatc

SEQ ID NO: 113848 - DNA, 371 bp, Arabidopsis thaliana columbia
ctttatttcaaatctttgctccttgtagaaatccatagcaatctgcaagggggaagctcaggttattgtattgacataagtctcgaattgccaggagctactaccagaatcttattttccttgtcttagtgcagtacctgaaacactgaactgttttgagatggaaacaatgaaagagccttcaaggaattactgttgcttttggtcactctctttccaccttcctgtaattaaaagaatatagagagatatgagaaaagggtctcaaagttgcacacaaatagaatgattgatttctatgtctgaggatagagaattttaccttgagatttacaaacacagcagtcccgtcatccattgctagatgctct

SEQ ID NO: 113849 - DNA, 350 bp, Arabidopsis thaliana columbia
aacatttattaaatttttttatctaaatattacaagttcttcaggtttgatagcttaatgttaagatggaagtatactacacagcggttgcatttatgagatctattgagattaactgactgttattcactgcttattctaagaataatgatggaacatttacagttggtctgaaaaaactgaaattgaatactaacaacctactcgcatcacgcattggttacaagcaagaagatgccttgaaatcttctattgcggcgtacaacaacaatcatgatggtgatactagcgatgctgatatttgtccgatcaataattacttatatgctcaccactattgtgagattgct

SEQ ID NO: 113850 - DNA, 384 bp, Arabidopsis thaliana columbia
acgcgcacggacgggaatgcagctgtgcggtctaaatactgctgaaaccagacgatcatcttttacagaatcgattccctacgagaatatctggagttcagtatgtctggaagcacaggagaacgttcttttgctgatattattaccagtattcgatactgggtcattcatagcattactataccttccctattcattgcgggctggttattcgtcagcaccggtttagcttacgatgtgttcgggagccctcgtccaaacgagtattttacagagagccgacaaggcattccattaataacaggccgttttgattctttggaacaactcgatgaatttagtagatctttttaggaggacccaatgactatagataggacctat

SEQ ID NO: 113851 - DNA, 378 bp, Arabidopsis thaliana columbia
gttgggagaccagacgatggttggatcaccaggaagttgtgcgaaccaaatgctcagtaagaatcggtcggttggcttaaaccgagtaaacccgattgcaaaagtaccgttagcagaaacccatgcccggttcggttcactagcttttagctttgaacccaaaccgatgtgcggttcagtggccaagctaactaagaagaagcaaaagaatgagaagagaccaacagaaggaaaataaaaatgaaatgaagacatagtagaatcttgtaacaaaagagaatgaggctaaaaaatcggtataccatgtggtttagtaatctttatatatcactcacttatataatttgaacgcatttagagagatggttcggtgggaga

SEQ ID NO: 113852 - DNA, 428 bp, Arabidopsis thaliana columbia
  unsure (1)..(428): unsure at all n locations
gggccggaaatcccggggcgcgtccaacgcgtcgcgtgtcatatagtgggagtactatgtcattgtggaaacggtaaattggaaagtgatggtcataggacgaggagacacgattaaaactaaagcanaaatgctcaaaatgtacatanaacgaacaaaccaaantcgatcctcacctttatgcccactatagctaataatataagatcatcctctgggagtacccactttgagagctcttcgcctgttgggaccttttcagcctcataggttctaaaggcgagtgcaacacatcgtaaggttcttccagccatatcattaatgccattcttgaaaaacgatgcctggtaaaatcaaagaaaatcgagtgagctgagcatcatgacagcccaaaggctaatcacagattcgaacaaatacagctgagt

SEQ ID NO: 113853 - DNA, 412 bp, Arabidopsis thaliana columbia
ggtacgggatcgccgggtcggcccacgcgtacgcgcaaggatgggaatgcagctggtggtctaaatactgctgtaaccagacgatatcagattactttcaggtttatcagtttgagcaactcttttccaaaaggaacactcccattgctcatgctgttggtttctgggactaccagtctttcattactgctgctgccctctttgagcctcttggttttggtaccactggaggaaagctcatgggacagaaagaaatggctgcctttctcggtcatgtagccagcaaaacgtcctgtggctatggagttgcaacaggagggcctttagcttggggtctgtgctacaacagggaaatgagcccaatgcaatcctactgtgacgagtcctggaaattcaagtacccctgcagccc

SEQ ID NO: 113854 - DNA, 375 bp, Arabidopsis thaliana columbia
agatagttgtggcttctgttgctactgcgtctgccaaagaatgggcgggggacatagaattgcgggtcggaaagaagatcgaaatgttatccaagataaaccacaagaattttgtcaaccttcttggttactgtgaagaagaagaacctttcactaggatcttggtctttgaatatgcatcaaacggaacagtctttgaacatttacactataaagaatcagaacacttggactgggtaatgcggctaagaatagccatgggcatagcttattgccttgaccatatgcacggactcaagccacctatagtccacagcaatcttctctcatcatcagttcaactcacagaggactatgcagtcaaaattgcggatt

SEQ ID NO: 113855 - DNA, 385 bp, Arabidopsis thaliana columbia
  unsure (1)..(385): unsure at all n locations
cttgggtatgtcccaaaacttgtcgctgctgtggcatatgaggggaggcgggaaacaatgtcttctggcgaagtgaaggctgaagaaattggctctgatggagtgaatgagtctactgatccctcaagtctacctgggcaaacccctcaagaacgtgtgcgccttagttgtttacgtgtgcttcatcaacttgcagctagtaccacatgtgctgaagcaatggctgcaactagtgctggaaatgcacaggtggttccacttctcatgaaagcaataggatggcttggtggaagcattttagcactcgagacacttaagcgtgttgttgttgctggaaatcgggccagagatgcgcttgttgcgcanggtctaaaggttggtctca

SEQ ID NO: 113856 - DNA, 239 bp, Arabidopsis thaliana columbia
gaccattaataaatcctccaagttcgctcatctattacttgaagaagggaatccatttactgttatactagtggaatagaaactttttcgttctaacattcttttttgttgcagataacaaaccagtcgaagttctcccatccagcgagccaccaagtggtttactgtcactacttcaacgcgcacgatttttgtagacatttgacacaaaaaaccattccgaccttccaaccaatttt

SEQ ID NO: 113857 - DNA, 380 bp, Arabidopsis thaliana columbia
ggttaggtgggtgccgattaataattagagacaaccgtggcaagcgtaaaaggacagtgaaatgatgtatagtgaaatatcgagctgcgtcaagtaaacaaatatgaagaacgttgatgttgtatggttaaatttgcgtaagtttgagaatttaggggtcctagtggacccatttctttaaagcccataataaaaccaacctcatattcttgtaggcccaaaactggtcctagcttattgattgttttcatctaccaacatatatgtgaacaagtgaaaagagaacacatttcattctattacttttttcattaccaggaactaatcccaacttttatagccaagactaatccttcaagtgagtgtaacggtcgagtagc

SEQ ID NO: 113858 - DNA, 307 bp, Arabidopsis thaliana columbia
cggacgcgtgggcaaagaaagagatcaaacgatgaaagagaagaggaggacgacgaagatgcgggagggatcggcgagtgggagagagcttatgttgacgaccgatcctgggaggagttgcaagaggatgagtctggacttttacggccaattgataacagtgccatttaccatgctcagtatcgccgccgtcttcgtatgctctccgccgctgctgctggtactcgtatccaaaagggacttattcgatctctacatcgtcattgacttctctcgggcagctgcggaaatggatttcagaccaagc

SEQ ID NO: 113859 - DNA, 384 bp, Arabidopsis thaliana columbia
gacgcatgtcaaatatcaaaaccattccattttgtagtccagcataaatatggtgagagcttttgagatcccacgagcaagaccaaggtgcagccggtagatcataagataagacagtgttgtggctctccaagcttataacagataatttttttcctagagacccaaatactgcaagcccattattgtgaggggaaaggtgaagatctttaattgctctagtggtacgaggcaacaaaatatcatcaatctcacaaggcgaatgtaggctcatctgcaatatattaaaaaaaaaggtcgtatagtgcatcattttactggtataagataaaaaagaaaaatgagaggcaaaacaaaaaagcttacttgcgtaagcacaaacgt

SEQ ID NO: 113860 - DNA, 311 bp, Arabidopsis thaliana columbia
accttccagaacaataacacgtgttaaatatggcctgttgggaaaaaggaatgggcaggcttaacattcctggttccagaaaaaatggggatatacctttgataccaagaaactattccgaaacaaggttcaatacagagtagattggaacaaaatttccacacaggggtaaaacttattgaggatatgcccctcgggtgagtaaacttgtgaatttcaagagaagggggtaaatgaaataacatggggggcacggggatatttattgaaaaaaaaaggatgtatactttacttttttgaagacgtttctt

SEQ ID NO: 113861 - DNA, 378 bp, Arabidopsis thaliana columbia
gtgaacaaatagtacttaacttttaataccaaatactagtttcgtggtgttataaataaaacaaatgttgagggtcatcatgtatacaactattcctgctcaaattgacggcatggaaaaagaaattgagaaatagtaccatttatacaaaaatgcaaagtatacaaaatcgtggaaataaatgtggatgatttgtataagggcaagttggttttggttactttcctcgtaagtcggaaaatattcgtgtgtcggtagaaggtaatgagatgaagccatgtgtaagatcgtgtagcatatggaagaagtgttgatcgatctttgtcgtattaaggacccacaacgcaccgactgatcaatcttaaagctgttccattc

SEQ ID NO: 113862 - DNA, 315 bp, Arabidopsis thaliana columbia
acaaactctagatgtcactgcgaaatgtgatgacagcatctttgttagtggatgtgaaccattttttcaagacttacggatagagggataattaaagaaaatatcaccttttatggcgtaaaattatgatctcgtttgcaagatatattaaaagcttgtcctacttcaaaactccatgaatcttgtcttttggttcgttatctaaggatcagtggttcaaatttttccatgaacaagaacccacgattaatcaagaaaatagcttggtctgccgaatgatataacttaaaaaaaagcgcaaaaccaaaattaaat

SEQ ID NO: 113863 - DNA, 367 bp, Arabidopsis thaliana columbia
ggtgtagtgagagaagttagatagagaaaaaaaatgggaggcgggggtgtgataattgttttggtgctttgcctttgggcactctctgcaacatctgaagcagtaacagaggctgagccaggtttgatgatgaacttctacaaggacacgtgtcctcaggccgaagacatcgtccgtgaacaagtcaaactcctctacaaacgccacaagaacaccgctttttcttggctccataacatcttccatgactgcgccgttgagtcatgtgatgcgtcacttttgctggattcgacaagaagagagcttggagagaaagaacacgacaggagcttcggacttaaaaactttaagtacatcgaggagatca

SEQ ID NO: 113864 - DNA, 425 bp, Arabidopsis thaliana columbia
  unsure (1)..(425): unsure at all n locations
aaaaccggggggcgttccacgcgtggcggagatgatgacttcttaacacgtctaactctgataccgaaattanncnnnctttgtttggtttaacattttttttgtttacgagcgaccgacccatnngatactcaaacacaaaactcttacctttggtcacatgtgatttttcgattccatttattcttctttttgaagcgaatctgagttttgttttcatgtccgcgaggatttcatttctgaaaaatcccgatccgtgcaatcacttatctgattataagcttagatatggtactgatggttacaaatctttcaataacttgttcagatgcttcaacgatgcaaggattaaaatcaaacttcaaggaatcgacatacccaaatgcaattattgttctgtttatcaaaagaaactctacatctgt

SEQ ID NO: 113865 - DNA, 462 bp, Arabidopsis thaliana columbia
  unsure (1)..(462): unsure at all n locations
attaggcgtttggcttcagacggcgccgttctacgtgtnntcgaccaatcgctcgaaaggcggtttagacgtttgggatcattcgcacgtnnctggtcgcaccagctttgatccacgagatctcatgctgcggtaacgatgggagcgcgatctcagctattctattctcgagagacctcttgaagggtattggattgattgtgtgcaaaccctttaaaacggcgggcgggaatgaaaaatcgtagaccgnnntactccccgnnaccgagttnntagaagagcannaccgctttgtgaccgcgcgaaatcttccaacgcgctcnnactgcgcnnacaagcnntagagagtactttcccgtttggtcaacccnngtcagaacctcattgtccaacgagaanatcgaaaaaactccaccgcttctcncgccgtcgctttgattcacgtgaggctgtgctggttta

SEQ ID NO: 113866 - DNA, 382 bp, Arabidopsis thaliana columbia
ttccctaacgtatccacctctgttacttcaatctcctggcctggtcctggaggatcattccttattgttgtctctgcctctcgagtttcctcttacaccaattctttcatattttcttctttgctgtatcccttttgttccttagaatgttgctcttccttctcttgaagctttattaagtttctgtcttcactatgtcttctcaccttagtatttcccccttcatttatcttgtcaacctcatctgcttctagtttatcagattcaaactcttcatcatttttctcagtttctgcaatttcatcatcaccaactacttgtgttctatcaatgtttggtctgaatccttctcccattgccccatcaacctcttctttgacat

SEQ ID NO: 113867 - DNA, 385 bp, Arabidopsis thaliana columbia
aaaacatagaatgaaaaaaactgaaaacaacataattaaagaaaatacacgaatttctatttaccattaagtcaggataagaaaaaaatgagcaaatgtagtagagctgactaatacatagctggaagtttgtatattgtgacttataaatttaattttctatatatacagtttgtttccttttctttgaatttgcaattattcatatatatatatatatatatacatatatatataataataatagagaaaataagtgaaaagaacatcctcccataaattagaatatataatattgtattacttagcttattaatagttttttttttttacatatcagttaatatgtttttgtcatataaattgctatatgaaataacatgga

SEQ ID NO: 113868 - DNA, 380 bp, Arabidopsis thaliana columbia
ggacaaagcaaaaaggatatcctgtcgtctcagccaaaataaaagatgggaaattggaactcgtgcagtctcgtttcttgtcaagtggttctcctggggaaggacaatggattgtaccagtgaccttgtgttgtggttcatatgaaaagcgcaaaaacttcttattagaatccaaatctggagcgtatgatttaaaggaattattgggctgctccattgccgatggtagcgacaaaattaatgggacatgttcttggataaaaatcaatgttgatcaggctggattctatagggtgaaatatgatgacagccttgcggctggactcagaaatgcaacagagagccaaagcttgacttctatcgatagatatggtattttg

SEQ ID NO: 113869 - DNA, 384 bp, Arabidopsis thaliana columbia
gctcatttatagttatagccacttagcatcttctaaactgtcattaggggatgtaattgcatgtgtacggatatcttttcagttttaatttctattagcctggtatcaaaagaagaagaagaagaagaaatcactgtcaactaaaaaagaagaaagaagaagaagaaatcagccctgatctttaagctcccacgtcacgactgatgggttcgattaaggagaaaaatatataatttgattatattatccactagcattcacaaaacgagaaaaatatatattctaaataccattatttactttctaaatagagttgaaaatatcattttaatcgcattcatgttacctttgcttataatcgttggaaaatataataaactttat

SEQ ID NO: 113870 - DNA, 346 bp, Arabidopsis thaliana columbia
cggacactggggaaaaaagcatgctaacttatgatacaaagcttaaacgacccggaacaaagagtaggggtggtggaaaatcaaaaagagagatcggacgcaaaacttgcctatatgggtcattcatttgatgtaaacacctctgatgagcacgcaatcatatgcttcggatgaacatttgcgtttatcactgaagaaaaagaggctacatatttacgatcacgtattgtgatatatcttctaaccacttactgtgcatatggtgggtacaagaatggtgatgtctaaattattgccaatgaccaatgataccgtattacaccttcatgacgaaggtttactgact

SEQ ID NO: 113871 - DNA, 389 bp, Arabidopsis thaliana columbia
  unsure (1)..(389): unsure at all n locations
aagcccggggcgtcccacgcgtgcgattacacacattgaaaaaattttgaaacctagaaagaaaacaggggtgggggctaaaaaatgtgtttttggctacacaaaancaaacgggcttcataaccctaaaaaacaaaaattctcttctcaacccagcgtcactactcgatcatccaacctcaatacaatacctcgaaaacctaacattctaatgaaaactataactccttcaacttcctcccgctacctatcactataataaacctatcccgtgctggtgtcatccaagtatctaaacgcatgaccccgactacaaagaaacatctaacgtcgttgcgaaaccaaatactaacacacactaactgccatacaaaccagaaggattcaaa

SEQ ID NO: 113872 - DNA, 351 bp, Arabidopsis thaliana columbia
ctgtactctgtgtacatctttggaaccaagacatctttgatgcgcaccatacaacttcctattcaagcatacagaatgttactttagggaatcccttatagaagatttaaccattagatgagctaataatgttgtagacaaaaatatcatgttttccagtaccaagcttacgcaaatcaattatttataatgaaactacaatgttagtcaaaaccataacaaatataggatatcaaacaagggtggaaaagactcaaaccttagcaggatttacctaaattttattccgttttgagcttcattcaagtaatccatctcctgcattcaatttgatttacctgtattcaatat

SEQ ID NO: 113873 - DNA, 240 bp, Arabidopsis thaliana columbia
gatccaaaaacaccgaatattttttccttagcttcaatagaatggggtgtataaaaatactgttgtttgcgccaacaaaagatgaaccttcatctgattacacaaaacaacatgatgaaaaccaactacgaggaatcaaaactctacatacaagtatacaaattctccccaatatctacataataattttgctcaaacatatcaacttctttatgctgcataacaataataatcctaaaa

SEQ ID NO: 113874 - DNA, 388 bp, Arabidopsis thaliana columbia
  unsure (1)..(388): unsure at all n locations
attgaattttgtagtgatctctctcctatataaacttcctcactcttcttccatttcaaatctctctctctggagtcaaaattagggtttatttattcataaggaagagcatttcgaattctgtagttcaaaattgaagatcatgtcggcgtcaacggtgtcaatcaccgctagtcctaggacaataaggcggacgccggttctctccggtgagaagaaatctaattttgatttcccgccgagcgaatctcatgccaatgcggcaattggagagtcgtctgctggtacgaacaaggatctgattcgcgccgaggctgccggtgagagatccaacacctacgacgtangtccggtgacaaggaaatcangatccaccgcgacggggact

SEQ ID NO: 113875 - DNA, 382 bp, Arabidopsis thaliana columbia
tcttatggttcagaaacccaaaattgattcttttgagctaataaaatgtcgtgacaggatctgaaatctgacgaagcagacgaagaggcatgtttatttgctcacttttgtagaaaaaagtgtagagaggagagatctatgagatgaagaatagaacagaacaaattattaaaatattattattattcgtttcttttattgcgataattgaaaaaagcggataagtggagtctgattatcgttgtacgaaagaaccaacttgcccgctaaggatgatgggtacttgcgacttttgtcttaaatctagcttttggataatgtgcaaacgtcgaatataatacagtgtggatatttttgtataaactattttaatatatgctct

SEQ ID NO: 113876 - DNA, 389 bp, Arabidopsis thaliana columbia
aaattaacaatcactatgataaaatttgatattactaacttactctttgtcccaaaaaaaacaaagtatcttactcaaaaactatgtacaaaactagttttaagaccgagtacaaaactacttttaagttgtatttactagaaatacaacttagtaataatcgacaggaaattaatcaaatccatcggtaggcgtgactgcacagaagaaggaaaatgctgcagaggtaaattcataaataatcaaatgacaggtgacaagtctttatctctgttttgaaatcaatatatgtatagctgccataatttgtggtctttgtttatactgccataatcaaaaagtttcctaatgccataatatctcgttccaatccatgctattatatttta

SEQ ID NO: 113877 - DNA, 411 bp, Arabidopsis thaliana columbia
ccggagggcaagtcccggatcgcccgacgcgtcccacgtaattatgaatatgacacgctctatgtatgcttatatatagactttgctcattacgtatacttcaaagttgccattttatctttctgttaattgttttccaaaaatggccgataaaatgttcaaagcattgttgtgggcttttgccacggcggttgtgatggccgaggctgttcgtggacaactagtcccttgctatttcgttttcggagactctgtcttcgacaatggtaacaacaatgagttggataccctggccaaagtcaactattcaccttacggtattgattttgctagaggtcctaccgggagggtcagcaatggtcgtaatattcccgactgtatctgttagtcccagttttggtttatctcttt

SEQ ID NO: 113878 - DNA, 380 bp, Arabidopsis thaliana columbia
ggctaatctgagatgggattaaagctgcccaaaactatcaaaagagtttgcagatcgtcgaagacatgatttggaatttcaggttggtggtaaagtgtttattaaaattcaacatatcaaaggcaagttccgaattcgatagtcacgaaagttaaagtcgctcaagttgtgaactttgaacttctataaagtcaagaagacatgagttacaaaaaatagccaattcacatattagacactagagtgaaagagttcaggagcaaaacttttaggacttgaatataagaggtgcgtaacttaagtgcataagaagaaacatggtagttgaaatcctctagaatctctgaattataagtcttgaaatgtatcacatctgcttc

SEQ ID NO: 113879 - DNA, 382 bp, Arabidopsis thaliana columbia
  unsure (1)..(382): unsure at all n locations
cacgaaacaaaattcatattgaacaaaacaaaaaggtcaaaccggagcgggggcattttattacactcgtctctcacaagacctctccttcaatcatttcaccgaccaacaccaacctccacctccggaaccggctgctcctccttcgcaacagcaacaacatttccaagaagcaccgcctactaattggttaaacacaacgcttgttcgctcctcaaataacaacaataactttctcaacctgcacacaggcaccgctgacaccacaaccgcaagcagctccgattctccttcctccgccgacggcgtcggcggtgctaaccaggggctatctcgctcctactttttnctgcaacgaaacaacaacaacaacaacgctttc

SEQ ID NO: 113880 - DNA, 383 bp, Arabidopsis thaliana columbia
ctaaccttaaatgattcaaacccatatatatcaaggatgcttatagatcgtcctgtacgtgatttaccgacttccaatgcaatgtttatttgctcaacaagccagtcaaaaaggtttgcataaataaattttgctattccatccctcatgtcagttgcctgtaagtgaaaacggttcagcaactcatacatcacctaatgatcgatgtatatgaaaacaagtagcaagaacgatgacactattaaacattacctgccgcaatgtcagttttttagcaatacaatccgtaccagcttgaagtttacgggtggacaaaaccaccataagctcttctgtgttgcagcccattaacatagcggcattggcgacagctgtaagaaata

SEQ ID NO: 113881 - DNA, 378 bp, Arabidopsis thaliana columbia
  unsure (1)..(378): unsure at all n locations
caccaaactgcgaataactcaataatccaaatccacttctgaaaaatggagaatgacgataaatgacttgggaataactctaccaaattttgttacctttgacaacgatttgataagccgaaactgtttcctcccaaaccctaacgattatggnccttctctttctctctctttttctccttttaaaacgaaaagtggctaactaaagccctaatttcgagtttccttcttttctaagcacactctagggtttacattaacctaactgattaaaccggacgatttaaaaataaaccctaaccgattttccggttcacgggcgttacaaatataatttgaagtgaacataaaattgaaaatttaaaatcacaattggaa

SEQ ID NO: 113882 - DNA, 371 bp, Arabidopsis thaliana columbia
aaacccggggcgtcccacgcgtccgcaccaaactaataataactctttaattcaaagccacttctgaaaaatggggaatgtccataattttttggttggtgacactaccaaattttgctaccatagacaacgattggataagccgaaactgtatgctccgaaaacctaaaaacaatctaccttatctctctctctgtcttacatcttacaaaacgataagaggctcactaaaaccctaattgcgaggtttcttcttttataggcacactctaaagtgtccattaacctaactgattaaacatgcccattttaaaataaatccttaacaaacttccacttcacacactgcacaaaactaattgacagcaaac

SEQ ID NO: 113883 - DNA, 392 bp, Arabidopsis thaliana columbia
ccacgcgtccgcgcttcccatcaatggcttctcctatgttttatatcaccagacactctcaccgggtgtttttaactacatctttggcctctcaaacgcaaattaccattcgtaaaacccaaattacccctttaatcgaaccaattccggagatttccgcatgcgtctgcattctacatccagtaaaactggcactaaggaacttatacattcctgcaattcttcaattgattcaaagttgaacacttttgaagctggatctaaaaacctcgagaaattggttgcaacgatattgatatttgctcaagtatggtctccattgcccttgattggtctagactctgcttacatttcacctgcagaggcagttctttactctacggacactaaag

SEQ ID NO: 113884 - DNA, 386 bp, Arabidopsis thaliana columbia
acgcggtcgtgctacttttcctatgtgacttggttcgtcgagggcaggttggtcagaggcgctgctcgagtttgggtgggggttaggggaaaagatgaaagttgtgtcgaagaaacgctggaaatctcttggtcctcttcatttgaaaagcaaatcagttgcacggttttgtttcttttcgaagttgaagtcaaacaaccatggtccaggccgtgcacctgtgtatctcaatgcttatgactcgactcctattaacggatatatctattgtgcatgccttggtatatttcactctggtgtagaaggtaagctctagtcgcgcgcttgtgtattcttgttgatatcgtctaagtattcggaagatttgcgtctgttgccgtatagct

SEQ ID NO: 113885 - DNA, 375 bp, Arabidopsis thaliana columbia
ttgactaaaacccaggtgggtttaatgcttagaggagattccggcaacgggagcacatatattgtgcgggcgtctggtgaaatatatgatgcgaatcgcactatggccccgctactagagatgttcccaaatttacaaactaaggagatgcttgcatcagaggaggaacttgctccatataagaatttctcttccagaatggctgcaatagattacacggtctgtctccacagtgaggtatttgtgaccacgcaaggtggaaactttcctcatttcctcatgggtcatcggagatatatgtttggaggacattccaagaccattagaccagacaagcgaaagttagcaatcctctttgacaatccaaacatcggg

SEQ ID NO: 113886 - DNA, 382 bp, Arabidopsis thaliana columbia
attaaatgtggattcatcattaaatgaaacaactcttcttctctgtacagttggtcttcacaccttcaccaaattctttgacttcaaaaatcttataaaatttatatatctccaaaaccataaaaccaaaacgagttttcacaaataaattacttagttgaaatttcaaatctcattcaattagggtacactctctcaacaatccacattaatgagggttgctgcttctgatggctagcagtaacagttttatcgcctccacttcttaatgccatctttttcctcttccctctccttctctatatatattttctgactctgcaaaaccttaattcatccatctctcaaacaccatttttggaaacaccatttcacattcctt

SEQ ID NO: 113887 - DNA, 381 bp, Arabidopsis thaliana columbia
  unsure (1)..(381): unsure at all n locations
tttttcgtcaccctagccactttactctcttgcgatatctctnaaaacggttggacagtcgccatccatgggggaanagaannnccacatcaacattgtngtcattgcccacctccatcctggaaagtcgaccaccactgaacactttatctacaacttgaacgaaatagacaaacggcgcaaacagagatgactgaatgctcaatgatgaattagcggaggctaccaaaattgcgaaacctagtctttcgtctaaagatggaggtgtgaccaaagacaagggatccaaccttaagaaactcgggtaccaaagtgcatcttataacgcaaagggttcatatgggaagggtgcctatgcttatgggtactatcccccagcat

SEQ ID NO: 113888 - DNA, 216 bp, Arabidopsis thaliana columbia
gggggagtcccacgcgtgcgaaaatatatatacaatgtgactttaaactttaaagtcttaaaaggcgtgtgaataaatacatgttattgagtaaagtgagttatacgtatcttttcaaatctcttatcaagcttttagataagcaaattttgtaaatactatgaaaaatgtttttgagtatcatagttcttgcaatatctcaaaatcaatttaaaa

SEQ ID NO: 113889 - DNA, 378 bp, Arabidopsis thaliana columbia
ggaactcaaaccaatggagaagcggaggcgggaagagattccggtggccggagaaaggcgactgatgagaggtacgtggcaagggcaaaagcataggaacatgagagaaacaactcgagaaacggttcagggtaatggcggagaatgtggatattttgagatggtgttttggaagtttgcaggaatttggtggacctcgtggattcgtcctcttcttcattgccgaagaggttgaattaaaacttgtgcttcttccatttgattgtgactggattgacacttgagctgcgcgtgcactccacgcgcctttcactttccatctcttcttcttatgaccataaaaagataaggaaaatgattttttttctttctttcaat

SEQ ID NO: 113890 - DNA, 380 bp, Arabidopsis thaliana columbia
gcaggttcctctctgctctgacatgctcaacctgcaaaatgtacggtcagtttagtcatattatggtagaagaaacagacatgtaggtaaactcagagacaagcataaatataatcagttttagctgtggcacatcattccaattgtttacgaattttacctgtcctctcatgaccatttcagatttctttaacttcttcatggcataaatatttccagactttctctcccgacataagcgaacctgtaaataagattaagttatttctaagattaaaagtaccatactcattaagaaaggacccagaaaccaatctcggtaaagttgtaaatgctcgagctgcaagaataagtgagaataaaagggagaggtagtaatc

SEQ ID NO: 113891 - DNA, 370 bp, Arabidopsis thaliana columbia
tttctttgttcattgcctttgtagttgctagatctgttgcttgttgtaagttgtgttcgtgggatgatatcgggttccttgaatatagttttcgtaatatgtgataagatatcaaatccgactgatgaagtttaatcaacttgaagtctcaaaactagatatgagttttgttttgtccccaataaaaagtgttaatctaatcccatcagacttaatactatggcaatctctgaattggggtatctttggttaagaatgagatcaaaatccaatacttgactggtttgccctgtgtttgaattgactacttcacatgtgtagtttatgtgtgataactaataatggatcaccttgaggaatgaattgtttt

SEQ ID NO: 113892 - DNA, 373 bp, Arabidopsis thaliana columbia
gttttcgtagtatcaatctaccaatttgaagatgtcaattagctaagtgacatccatgtgacctaaatgctatctccattttgtacattcgaaattagtgattgaagtcgccaatttagggtttcaatttgcgtattctaggtttcaactttacttttgctttctttctcatcatacaaacgtatgacatttccatagattagatttggacaactgattttatataatcaaattagaagaaaattgtattagcaaactaaaaataagtcacaaatattatacgaataagagatctaaataatacgatcaaacaaaaaccttaggattttataagaaaaggtgtgaatgcgtcagtaatctgaatattgtccac

SEQ ID NO: 113893 - DNA, 366 bp, Arabidopsis thaliana columbia
  unsure (1)..(366): unsure at all n locations
cacgcgtccgaaactctaaaattaataccttttttctcttaatccctatctnnccacaagtgtcttttcaaactttttggtgcacaacaacnnctctcctttatcattaaatttttaactctccatatcatccattataacattagacaccaaatatacttatttttttctctccaatactcaacgagagcttactttaaaccatcataagacagggtacttctaccctactactacccccataacgaatgtacattcaacctagtacaaaaggcaaccttgattctcacaattggtcatcgaactttgttgaaaatccattgactactaagctaccgtgcgctggattatgactgaacacctcta

SEQ ID NO: 113894 - DNA, 388 bp, Arabidopsis thaliana columbia
ctcatggagaatcaaggatctagctatagtaattgtcgaatgctggtataagggcggtaatcacaatacgttgggttgacccccgacatcccacacggtaaagctaatgttcttgtattccacagtctccacattgaaacctagcaagaacaggtattgtcaatacgacagatctaaaaaattcaagcactcattctatgaatcatacacaaaccatgaatcaaagatgaatgaatgcccttgagcaagtagaagtacaccgcatgcaaaccaaatgaaaaaacttgcaactatatattcaagttccaatctaatctatgaatccaaccatgatacgaaaaattcaacctaagcccttgagatgattgcataacaatgtgtcaatttc

SEQ ID NO: 113895 - DNA, 385 bp, Arabidopsis thaliana columbia
cttcttctctctcgctttgctctctcggaaatttttgcagaaacctctgtcatgtgaactcagagagtggtcgagttcgtatatctcctccgtttgagcaatggcttaggtcatccacacttacaagggaaacaaaggtgccaattaagcacttattgctgcagagtatgcggatgtgaatatcgaggagtccgcaaactttcagatgggcgtcactaacaagtcacctgagttccttaagatgaatcctattggaaaggctcccgcacttgagactactgggcgtcccatatttgagagccatgctatcgcccgcttccttagcccatagtatgttttctactctgtgaactgatcctaccttattgaatacgctcacattgag

SEQ ID NO: 113896 - DNA, 350 bp, Arabidopsis thaliana columbia
ataaaatggaaaattaaacatgttgaaatttagacccgccgtacatcatgtcttaatgaaatgtttgtggtcgtatttatgattatacaaatgtagcctaaaatatcattatcgtaaaatataaatattttaaaaaacttacttcaagtgtttatatatgatacatagtcataaaattttgaaatttgtaatcgtcttcgatgtactgtggggtcaatcccaagttaattattattttgttttcaggatcatgttttgtatattttggtttgtccatttagtaatccatatataaatttttttaaaaattatcgtaatccataaataaataaaatttagaaattaaattt

SEQ ID NO: 113897 - DNA, 267 bp, Arabidopsis thaliana columbia
aaattaccttatataccggttggcttaaaacaaatcaccttatataggggaagtgaatcactagaatcggctccgataatcacaaactcgaaaagaacaaataagctttccattatagattaggacattgaattagaacactaaagtaaaaggttagctataaatgcatacaatctatttaataatacattttaccggcttataaatgatgaattcccacatttctttattcttcttcgtccttcaagatttaacaaaacacacaac

SEQ ID NO: 113898 - DNA, 418 bp, Arabidopsis thaliana columbia
  unsure (1)..(418): unsure at all n locations
cgtaccggaccggaaggcccggggcaccccaccccatcaatggccattagtcctacaaggaaaagaccaaaccttatttttnaccacttgtgctataacaagtgttttcggtatctaaaataatggctcaaaataacccaactggtcattccatatttgtgcattactcctgctgatcgaagtaaggatgcaagaaacaaactccttcaagggacaacggagtctgcatctcaattaaccgcgacgcctgcaccgatcaacataattaaccaaagtagttttttggatgaaaagaatattaggaactgagaaatgacttacggctcgagcaaaagcaaacatttcctcttcaccagaaagcattgatacgatcgaagaaagcgagccaactgcacttatgctaccttctgcaagcaca

SEQ ID NO: 113899 - DNA, 386 bp, Arabidopsis thaliana columbia
gtttttcctcacacattctcaagcttttaaacacctaaatcaagatctttgggaatgaaaaacatatgggttataatctacgtatgtagatatacataatatttcttttaacgaaaagaaatcaaagacaccagcgctcgcatagatgatttgttttttagaggattaataatcttgtttttgtttgtttggtatataaaaatatacacttatctctggtcccttacaccaatacataccatatataaaaagtaaagtacatacaacaataaataaatataaacatacaatacgaataattgtaatagcttatgaaactcgaagtttatattctgcattccaaataaccgattgatgcactatataaattatgtcgtaatgtaacc

SEQ ID NO: 113900 - DNA, 380 bp, Arabidopsis thaliana columbia
gggctgtcaagaacgtagaggaggtaggatggtcagttggtcagggctggtatggatctttcttggacggtagttggagtcggcggctctcctagggttccctcgtctgggattgatccctggggaagaggatcaagttggcccttgcgaacagcttgatgcactatctcccttcaaccctttgagcgaaatgcggcaaaaggaaggaaaatccatggaccgaccccatcgtctccaccccgtaggaactacgagatcaccccaaggacgccttcggtatccaggggtcgcggaccgaccatagaaccctgttcaataagtggaatgcattagctgtccgctcgcaggttgggcagtaagggtcggagaagggcaatcac

SEQ ID NO: 113901 - DNA, 375 bp, Arabidopsis thaliana columbia
aaaaagcaaaaaatctcttaacaccttctccaccttctcccccccaccaccactggtcgtctgagaattttatgaacaaccaccatgaaatactgtgaaaaccactgccactctcgccagaaactaataaggcgaatattttaatcattaatcttcctcctcttcatcatattactaacaatcctccccatttgtgcaattatccaaccttcaaagccactcttcatccttcaagacgccaccatctactaattaaacatttacgtcaatacacacaacatcctcacctccaacttccaaatcactctctcttacctgaacccttacaacaaaatcggcttttactacgaccggcttaacatctactctacttac

SEQ ID NO: 113902 - DNA, 378 bp, Arabidopsis thaliana columbia
atcgatctctcaaagtctcaacacttttaatttttttgatgactggttggaatatataatacatgtatgtatgttttttatgtgtctgtctgagtttactaattaaccatgtttttttttcgttgttattgttttatttttgggagttcttttttacgaatgatttgattaccttccaatatttatttgttacttttcgattgaacagatacatgcatgatgtagtgaaaaaccctactctaaaataaatttaaatcatttacatgcatagtgaaatttatgacagtttgagaaagctacatatgtaacatataatgtgaattatagtttgaggtaaatgactcaaactgaaataagcaaaagacaacaaataaaatc

SEQ ID NO: 113903 - DNA, 379 bp, Arabidopsis thaliana columbia
cggacgcgtgggttaaaacttaaaagtctactttacaaaagtaagtgatgaacaatatatgagatatttaaaggattaatttgagtttgcttgagaaaaatatagtttaatacgcaaatttttaaaaaatattcatttaatacataaattttgaatataatcatttaatatatagaaaaaaagttattttacactaatttaatgttatctaatttttttacggcggtataaattttggctgataaacaattaagtttgtgtaaaatgaccggtcaataatttttacatatattaaatgtttatatataaaatttacgtattaaataacaattttttgataattcatgtagtaaacgacatatttccgactctatatttc

SEQ ID NO: 113904 - DNA, 349 bp, Arabidopsis thaliana columbia
  unsure (1)..(349): unsure at all n locations
attccggggcgtcgacgcgtgcgtcctcctccaacgttttgaagtttgctagcatgaaatcccattnanggcggaagtcatcatctttgttggaatccctaacaatatctggagttgcatcctcaaacacagtccggctgcgataaataacaggacctgtcagataaaccatacaacctatcaggctacaaacacaatttgatcaaatgtttctatcatccagtatttaagaattccccatttcattatagcaagaacacagtttcaagtaaaatgtcacaaaaatgccacacaaaggggtaaatgcaacaacgcatcacatcgtgcccaaaaagaaccaaagctaaaa

SEQ ID NO: 113905 - DNA, 381 bp, Arabidopsis thaliana columbia
  unsure (1)..(381): unsure at all n locations
atacatcatgggcctctgttttttttgggtcaaaatatcattgggcctcatgggttaaaaatgcgtatgaaaacttcaactgaaacccaaatcaactcaaattattgaatgtcgtgatctcattgttatcttgagattgaagcangggcggagggagtgaangggggaaggggtccattgaccccataacttttatgatttttaaggtaagtctcataatatttgatctcacatagctttactgagaacctccaaaaaaattgcacttattacttataatctgcaaggcattgtatagtttaggaattgaaatcttatgcatgacgtgaaacgatgaaagtataaacatcaattttcactattaacatcaatttttgtaga

SEQ ID NO: 113906 - DNA, 381 bp, Arabidopsis thaliana columbia
cggacgcgtgggctggcttggtcacttaagagcatcttaaattaggctgaaatgtgtcccccaaagggcggcaaacttctccttggcacacgcgtgaagtcatcttctattactactttctttaccatatttatcaccaagatcctctttgtctccaccaaccaacattaataactggtcttataaataaataattatttaaacaaatcaaaagttggttcgatatatcatagagaaagcttcgtaaagattttaactttatgagctttgcggtgtaatacgtatatgatactccgcaaaagcttttgactcgcatataaaatgcttcatggacctctttcgctatattgggtcaccggtctgcgtcattttagctggaaa

SEQ ID NO: 113907 - DNA, 378 bp, Arabidopsis thaliana columbia
gtttctttatgaggggagtccatgaaacgtcattattgatgtttacgatgttagctctgatttttttagggttcttgatattgatatagattggcatgaactgtttagtcacaatagcgtgtctttgaagggaaatacttacttttttggtcgaaagggaccacgtttgcctatgctgtttaaacctccatctcgtcgttttgaatatttgactctatcttgtgttagaaatgagaaactcgctgtgttatacagccacctcaacagatttggcacaatagagatttgtatttcgactaagattgatcccagtgcagtatcatggaccacttttttgagaattgatatgacactaatcaatggtttaccggataactt

SEQ ID NO: 113908 - DNA, 383 bp, Arabidopsis thaliana columbia
ggaagaaaatcgcatcgcaaaagattgatctcgatgtcatcagagacatggatctctacagaatagaacgcatgggatctacaaggttacttaccgaacaccgtgagatattttactttggttaaggttttattgattatcaccttaaattttaaatgttacagaacaatgtcgaatcggttatgaggaacaaaatgaatggtatttttttagtcacaaggacaagaaatatccaacggggacaagaactaatagagcgaccatggctggattttggaaagccacgggaagagacaaagctgtttacgacaaaacaaaactaattggtatgaggaaaacacttgtgttctacaaaggacgtgcacctaatggcaagaaatccg

SEQ ID NO: 113909 - DNA, 375 bp, Arabidopsis thaliana columbia
aaatttgttgacaccgaatgcatatgttcagaacccttaacaccgcataatcatgtaaactcaaaaattgggcgtggaaacccaaaaggttgattcatcagcacacaaaactcaatgctgttaatttaaaagtaacgaaataaacgaattgcaaaattataggggtcatgcacaactccacctatatcatgactgatgaagcccacctaaattacatgaatcttgctggtggagagatcaaaactctacttgttcgaggccttgttagacagcttcttcaccggtttcatgcttcttcttgtcagaatctgcctcgagtttgcgacaggggaagtagaataactgaatgagaataagaaaatctataacagaaca

SEQ ID NO: 113910 - DNA, 156 bp, Arabidopsis thaliana columbia
tccgttaatcctttcgcttctagttatatccaacaggttttaattctatcactatgtagatccaaacatttattgcgtctgcataacaataaatctctaaaatacagcaaaaaaaataaatactattaatgtaaatccaatcaagtttcttgtttg

SEQ ID NO: 113911 - DNA, 385 bp, Arabidopsis thaliana columbia
caagcctttcctcggatctataagaaaaaaaaacatgataatagaacagattaggctacaaagatgaggataaaatgatcaagacaagactctaacaatatagttcaatataccgtatgctgcatacaactcttcagcgcaagaaactctttcaaacatatatctctttcaacctcatgaactttagatgcaacacagctcccgtagtctttggcctgtaacaagtttactttctagtcaataacaaggactggatcttcaagacacaatgcacacgtaaaagaattatcgcttcacaattgacataatataatttcacacattctttaaaattgatgtcgtaatataacaactagcaaaactatcacaaattcattacgaaacc

SEQ ID NO: 113912 - DNA, 378 bp, Arabidopsis thaliana columbia
aaaaaaaagaaaaagggaagtaagaagccagctagggtttgactgcgagggatttctgatctgcgtgggggtctcaaagagaggaatcgatcatcgattccgtggatttcgtttccctccctttttatttttatttttcgagaagccatctcaaaggatctgagtttataccgttgcatcccccgcgactttcgttttccgatttcccccaaattcgatgcaaatctaagaagagagagaaatagaaaggtgtgtgcgcttcaaccgactcagtgtctctctctctctctctctgttgctatttgaggttttttcctttgcctcgggggctctcgctgtccgaattcttttggagggatttattggtgactgtcagat

SEQ ID NO: 113913 - DNA, 333 bp, Arabidopsis thaliana columbia
aaccaacatcaccagtttttaacttttccaccgcaacaagaccatgatcggcgttcattgcgatgggtgggtaatccatgaacttggcttcactgatttgttcaatcaacttctccccaccatgccttggaacacactcatggaccgtatgatgaaggagcttcatgatcaaggcaaaaccattgaggagatcaaacaagtcttgagaacaatcccaattcatccacgtgtcgtccctgccatcaaatctgcacatgattgaaggtgtgagcttatcacaattctcactccactcctgcatctaagtctgatcctcccactcagaccgtgaag

SEQ ID NO: 113914 - DNA, 385 bp, Arabidopsis thaliana columbia
ccaagtcctcgcatattttaaaaacacccatcagattccggaagaaatcatgctgcagcaagggaaaaggtagagtaaggaggtttccagaatataattctaaagacatgataaactataataataacagtatataaagtaacgagcttacactgaaatcacaaacccttaagtaccttaaaggaccttaaagataaaaatacaaagaaaatagggctcaatttttcaataataatggttttgctagaacttgtttgtaaacatgaaaaacctaactctactgacagcatcaaagaagaccctgagaatggtataagattttccagcgagcgcaaagatagagttatttttacattaaactgaacaggaaaggacaagaacagtc

SEQ ID NO: 113915 - DNA, 377 bp, Arabidopsis thaliana columbia
  unsure (1)..(377): unsure at all n locations
aacaacaacaacattgtcgttgttttcgacttcgacaagaccatcatcgacgttgatagcgataattgggtaatcgatgaacttggcttcactgatttgttcaatcaacttctccccaccatgccttggaacacactcatggaccgtatgatgaaggagcttcatgatcaaggcaaaaccattgaggagatcaaacaagtcttgagaacaatcccaattcatccacgtgtcgtccctgccatcaaatctgcacatgatttanggtgtgagcttaggatagtgagcgatgcaaacatgtttttcatcgagaccatcgttgaacatctcggaattagcgaactcttctctgagatcaactcgaacccaggatatgtcga

SEQ ID NO: 113916 - DNA, 396 bp, Arabidopsis thaliana columbia
  unsure (1)..(396): unsure at all n locations
gtaggagggaacccaatccacagaaccttacttggctggacatctccttgaaagtcttcatatgagtgaggatactgtaagaatataacaaaacgtcaaaaccagtaacctatacatatcactagtaacaagagacatactttcaacattcaagactaacctgcggtttatgattcatattgccatttctgttatcgtaagagccagcccattgttcctgaagataacacaaaggtaacttgatttcagacttaagaagttgagcctactctacaatgaaatagagacgagtaaatactgctcctaggggcacaagacagagctcagccctatcagtttgacgcanattatgaaactaaacaaaatgtttactggagcgttttcaaaagtaaaaat

SEQ ID NO: 113917 - DNA, 387 bp, Arabidopsis thaliana columbia
acccattttaaatgcctatagtccatcacaaacacccacgatgatgtaatgaatgcggttgaagtatccaattggtaagcatacatgggatcttctgaccagagaatcaaagtatcgaggaaaaaattcaatgaggacttgtgacaagctactttcccgtactagatctaaggtcacatataacttgttctttgaagttgaacaaaattctccttaatatgtccaaaataaacttatgtttcaacagatggcatcatcgtaatatgaaaagaatcaatactaattatacaaaatattcaaagtgaactccaagagaagtgatataatattcttttcaatctcttacagatcaatgttacatggaagggtttggacattatttacaac

SEQ ID NO: 113918 - DNA, 397 bp, Arabidopsis thaliana columbia
tttctccttaatttgcttcgaaaaagaaaacaaaaaaaaaataacaaatggaagaaagcacatcgaagtttagtcttcgtgctacgctcgtttgtcgtcagtcgtctgatccatctcagccgatacacttcctatctagacaatatggtgaaaaattgtctaaatgcttaaactgcagatacacgaaacaacgtactgcgtatcatctctattgtgaaacctgtgattacggtattcacaggcattgttattacttaccaagatgtcgtttatcggatataacaaggcctcacaccctccaagagagttatcagtatttctctagttgcttcgcatgtggagacgagggcatcggacatgatctgaactattaatgtgctacttgtggtttgttttc

SEQ ID NO: 113919 - DNA, 390 bp, Arabidopsis thaliana columbia
gttcccttttcatcggcgaaatggacttcgtatgttggaagaacattggaggtttctcaagttctttagggttcacttatgcctcttttttccatgtcaaggccatgagtgtgtctcggctgcctcttaagtttgtaatagtatctgaggctttatgttttatatttatgcttgtgttggttagctcaacaatgttaacgtaacgtttagtattttcagttcttctgtttctgtataagctttgatttgtctttttggtttcctacgacgaaaaagagaagcttcaatcggaatacatcttttggtatcaagcttgttcattaataatgtttttggattcttaacatatcaaaaaaagctttccatttataatgatgtcagtcacatcta

SEQ ID NO: 113920 - DNA, 395 bp, Arabidopsis thaliana columbia
attcaatctgaaagttgtgtgtgtttttagatacaattgaaaaaaacatgaatctggacttatgtgatactaaaaaacttcctcatcattttgttctgcaaccatttttacaagttggagcttataactgaaaacttgattcaaagaatcaaactaagtgagttgaatattttctaaacatgttaaatatattggtacaagtttgtccaatcattttgctagtttcctattttaatgttttctccactttaggagatgaactttcaagtgcaaggaaaggatttaagaccaagaaactttaactcattaaatatgtgcagctgaagcatacaaaatttaagcttgtgcaatttaaagcttctggagagatgcttacgttaattcgagaagattag

SEQ ID NO: 113921 - DNA, 392 bp, Arabidopsis thaliana columbia
ctgcacaataatgtacacaagcgggacgactggagaacccaaaggtgtggtcttaaacaacgcgggagggtcggtccagggtttatccatagacaaaatgcttgaagtcactgatcgatcgtgtgacacgagcgatgtgttcttcttgtacttgccattagcacattgctatgatcaagtcatggagatttactttttatctagaggctgctctgttggatactggcgtggcgacattcggtacctgatggatgatgttcaagctcttaaacctactgtgttttgccgagatccaccagtttaccacaaactatatgccggtataatgcagataatatcagctactggcttgatacacaagaaactgtttgattgtgcttataactacaaat

SEQ ID NO: 113922 - DNA, 399 bp, Arabidopsis thaliana columbia
gctttctcgaggccaaaaaaatattttggcagtccaagatctttaaagcgaagggaagtagtaaattattattctttaaatatgactctgcgttgtaggtaacacaagtcttcgacccaaataataatgtaaacttctcggccacctcaaataataaatggaagattggttcggcgcaataaatataaattcattttcttaacaaagaaaagacgaattaagtttaagataaataaaagtgagtgacaaacagaagagcttcatgcaaataaagaagcctacaagtagctaggcaacattaatacattctaaccacttaaatatgctgcttttatgttatttggtaatggtatacatcatcaggtctctgctcttctctaaaaatcttctgtcactatt

SEQ ID NO: 113923 - DNA, 370 bp, Arabidopsis thaliana columbia
actttctaaaataaatttatattaaaaaatgcaaaatatacccgggttatacaatattgtggtgtgcctatatacacttttctttaaataacgtccttgcaaacccaatccttcaaacccaaccaagtgaaaaaaaccttttttccctgcatataaaaatttattatcataataaatattctactttttaacattagagtctatgtctaataaacaactttttataaaaaataactctctaaatctttttcaatttttacatatatttaccttaactcatctttaacacattcccttactttcgtttccataattataatgaacccttacaatctttttatttcaaaaagaatcttctgcttatattctc

SEQ ID NO: 113924 - DNA, 363 bp, Arabidopsis thaliana columbia
  unsure (1)..(363): unsure at all n locations
gaccaaagcatcttgcacggtaaaagttttttttttttgatgttctgtangaaaatccaataatgtaataatgtttcttctgtcaaagagagaaaaaaaaaacaatgtttcatttcacttcttttatacttgttgatagacagaaaattcctttggaaaataaagtttcttttaagcgtctcctaaattttttctaattggaataaaaacatttactaatgatttatcaattatcatgaattctatatcactatcgcagctctaggcattaacagcccaaaaaaaaaaaaaccatagcccaaaaaatcatagctgaattctcttgttttctggtttaactntgaatttgcgttgtaaagtttg

SEQ ID NO: 113925 - DNA, 395 bp, Arabidopsis thaliana columbia
caatattctacctactcgtaataagaattgggttattgatcaaatttttggcgggcgaattgattaaaaataaagatatatatatatatatatatatatatatatatataaaccggagatcaaattaatagttcggatatacttccatggatgcaaaaataaagtatcaaacttcatttatcatgtagaatatatattaaaggatatgtaagatacaatcatttataatttgtttcggtttcacacttaatacagttgagccgcgttaatcattgttctcacttctcactgtttttttgtttcccccaaagaaaacttctcactgatttacacgtacgctatgtataaatccacgaatttgtttttttttatttaactataccaattattgacag

SEQ ID NO: 113926 - DNA, 397 bp, Arabidopsis thaliana columbia
  unsure (1)..(397): unsure at all n locations
acggttttgagcaagcctacgaagagtctatggatcaaaatataangaaacaaaaagagattataaattggctgaataaaaacagtgatcttatctacagagatggacatgtcaccttttgatccatctttcccttcgatcggtcactcgaatcagaagcagcagtattcactagtgctccctccgactgcattaaaattaacaccagaatttttgtttggtccataaaaaatcacactattttgaagaatataagtgataaaatctagccagattatgagctaaccccaagatcaggatgatctgtgtcgtcatctgttgagacatcagttctcggactggtatcagccatattactttctcaccacttttctgtactaacacttgataacaaaga

SEQ ID NO: 113927 - DNA, 401 bp, Arabidopsis thaliana columbia
ctcaagtaaacaaatgcaattttcccaaaatcaataatcaaagctgaatcatgaagaagacctgagtcgataacactgataatgctgcactagagaaatgctgaagtgctcgaaactgtgtgtacctaagatatccttcgttgacactatagagaagaagtaaagaaagaaacttggttaaaacacatgctttaaggctaaagcctagagactctctaaaaacaaaagttccaaactttgagttcacctgtatggataaccagaaggaaagaacttgttaaggaaagattcaaccatcttctgaggaacaggtcttgcatcatcaacaactttcatctaaaacgtgataattcacataatgattctacaagttgagagcaatggcataagagagacaagaa

SEQ ID NO: 113928 - DNA, 387 bp, Arabidopsis thaliana columbia
ggctgctacatccagatttcctcatcctctattagggaagaagaaccaaaaccctaatcctatcttctcctcttataaatcgcttcaacaacagtttctttctcttctgatttgatccatgatttctcatctggaaccctagtttatacatccatcgggtgttactgttctttatctgggcaatcagtggttagtcaaaagtataggattttcatttaaagatttgattttgcgttgaaatcgaacgaacccagatttcatattttgtctctgttttggcttttttatctttttaggtgtttttgttccttttgtatatctgtcgagacttctaggtgtgaaatcaaagcttgtttggtttatatcgatcttggttttagctgaatc

SEQ ID NO: 113929 - DNA, 374 bp, Arabidopsis thaliana columbia
cttatgtaagactggagcttttgaaatgggatcctcttcatcaagatggggatttctttgacatgaaatggcatgggttgctttttgattacgggaagccagaagatggggatgattttgcaccagatgatactgatgccaaccttgtccctgagctagtagaaaaggttgcaattccaattttgcaccatcagatagttcgttgctgggatatacttagcacccgggagacaagaaatgctgttgctgctacaagcttggtgacaaattatgtttctgcttcgagtgaggccttagcagaactatttgctgctattcgtgctcgccttgttgaagccattgcagctattagtgttccgacatgggatcctctg

SEQ ID NO: 113930 - DNA, 398 bp, Arabidopsis thaliana columbia
gagtcaggtaaccgttttaagtgatcaatacctttgaagtaatgctgggcattggaatattgataaagtgtggcccagcctcggttgctacagcttttgccagcattgtcttccccgtaccaggcggtccaaacaatagtataccctttgtaggctgcatgaaaaaaaaaacagttataattcagtttccatagaatattgaatgaaacaacgatttgattttaaaaagcaagaaaggtacctttgtaagttgacctttgccaaacaattcgggtctttgaagaggaagcatcaccaactccttcaaggtatctttcacattttccaaagccccaatatcactgaaagaaacaccgatatcacttggaggaatgacgtctgatagtagttttttctcg

SEQ ID NO: 113931 - DNA, 224 bp, Arabidopsis thaliana columbia
caggttcaaagctgattatggggctaaatccaccatttggagtcggtgcgtctcttgcaaacaagtttattaccaaagctcttgaattccccccaaagattctcattctcattggtccttcccagactggaagggtagattaaaagaaatcatcatatttgcctatattggaaggttaaaccgtcctatcttgaaattcattttacctgcctggttctgtcaat

SEQ ID NO: 113932 - DNA, 392 bp, Arabidopsis thaliana columbia
atcgaacccacggccacgtggttaaaagccacgcgctctaccactgagcgaagacggcttcatgttatcaattcttattttactatattaataaagttcgagttatattcataagaccaataactcttgcctcctttacataatctggtctgaaacacctcttcaatcttcattatcatatctattgaacgattcagagtcttttctttgcaaattgagtatagtaatttagagtctttcgaattccgtttttcattcgcaaaacttggtgaatgatcaactcttgtttcttacattccagtcacaagtttgttttcttgtccgctttgctttgatacaaagttcactaaaggaagcaagatcttaaacacattccaacattgctcctcttg

SEQ ID NO: 113933 - DNA, 219 bp, Arabidopsis thaliana columbia
cggggggacccaacccttccgagcttacttggtttacttcattggacccaaaaattttaagggctaaggtatttaacggaggcgccagaaccttaaaacctcttttttaaatggtaataaccggaccttcttttaatccggggaaggtttttgttaacaaaacctggaatattaaaaattaaaaatgctgccttaagtaacattaaatccttggaaaaa

SEQ ID NO: 113934 - DNA, 358 bp, Arabidopsis thaliana columbia
  unsure (1)..(358): unsure at all n locations
cccacncntgggcgggcgcttgggcgggcgggtgggctgacncgtgggttgcaagtggagaacattagtatagattaccaaaaaaaatcaaaataaataaataaatgaagtatagatatataatgattaatgaaccacctataatcccttcttctttatcggtgtagtcgcatgagcatcatcggactgtaattagttttgtaaaccgtgtatgtattaagaccatctccatcggtaaaactaagtaaaggttctcaaaaaaaaaagatttataatattttaatcaaaacaaatatattaattattatttaataggtgaactaagtattatgacaaccgtccaaattggatgagaata

SEQ ID NO: 113935 - DNA, 399 bp, Arabidopsis thaliana columbia
cggacacgtgggttttttttggttttcaaaataagaaaattatttcgttggtcgcgttaaaaccattctaggattgtgcaaaattacgtgatgattagtttgatgttagacatcttaaaatactaaatttattgtttcagaaatatgttaaggaagattgatgtcatctatctcattttacacaatcacgatatacataatttgattttgtagtattgtcaatattttcattttcttggaccatttttactgaacgtgacatgaacagtgatgcttgatcaaaataaacgtcacctttgtgcatagtttatgtggatatctcttaaaaaatctaaatctttgtttgttggtggaatataccctagaaatggcatcaatgcatataattggatatttttt

SEQ ID NO: 113936 - DNA, 399 bp, Arabidopsis thaliana columbia
cggacgcgtgggcgccaaagcataaacatcgtgactgattttgatactattgtttgttcttttcatgaattcaatgtttgatactaaaggtgttttcagtgtaagacatattagcataccttcctggaaattgtattttatggcttccactgataaacctaaaagaatgagaaaaacatattgagacaagaccttggatttatatatccaaacacatgcataaatcgacagttttgttttgaaaatttacctttacaaatcgaggatacagaggatcctaagtatgcgactcttctttttagatcccatatcagttctgttgggacgtcgatagggtttatgctagagccatggtcagcaaaaacctgcacaagtatagtccaaatcgagctttgacga

SEQ ID NO: 113937 - DNA, 391 bp, Arabidopsis thaliana columbia
aacattaagagctttgatgcccattgacatgatcattatcgaggcccaggtaacatatttgtggaggtctcttcatcttaaagttttgtcaaatccaatctatttgatgattttttacactgcacgactagttgaggactccatcctagcaggtagcgacatctttaggttggtttgatagttatcattttcgaggtctgatggaaagcttatcacgggtttcatttgaggatattagtctcttactctctttaagaatttttgccttgtgaacccaatatcgtttcgctagtgatgtgatttatatcactgccttgttttgtctgtgtcttatgtggcgtatactttatccaccgagtttaagtacaaccatcacacaatcgcctacgcc

SEQ ID NO: 113938 - DNA, 279 bp, Arabidopsis thaliana columbia
gtgaaccaagctcaggttttgtcttctatttgatcataccttggtcaggaatataaattttagggtgtatcccctataaaagagattgctctttaaccaacaaaccaccatatattctgtttcaacaagacaaacacgaatatcgttcctctttctcacgaaacccatcatcttctatcttatttgataaataggtcacaagattttggagaatcattaagatcgagcgacggttggatacaccataagctctgaagattgtgacttttttatctaaac

SEQ ID NO: 113939 - DNA, 377 bp, Arabidopsis thaliana columbia
tgcacagtaactatcatattatactctctcttaatttcatctaccatctgctgcgattttattttaggagtagtctcagtctttcttcatacaactgagaaatagttccgctcttcaacagctttgtgtaaccagatcttacacaaacatgcttattccggaatgtgcttattacaagcttgcttttactcttctgaaaagaacaatacaccatccatgaacacttttcttcgatgtgttgtgtgcactttgccccaagtctattagatgatgacttaaacattttgatatcatattcggttttaagagaattctgaggagtgcatacttaaattcatctgcattggtgaatgtcttatgcaatgctaatagatcat

SEQ ID NO: 113940 - DNA, 368 bp, Arabidopsis thaliana columbia
ctcactcttatcccattttcttcctcctcgtgcaactaaatactgagaggattaatataaaggtgttctcgaatcacaatcattatgatctcaaaaattaacactaaccccacaaaaataaggctaactatgcttaaaaaactcacctttaccgtaacacagcataaataaagacccaactctccccaatgacttgcctttcaacgaacaagaacttaatgcccttcaagttctacgtgcccctactctctacgatatttaacagaataaataagcccgcaaataaagggccaaaaaaacgaaacttggtttggtttatgattaggataccaagacataatgagagaccatataagacttacctaaaa

SEQ ID NO: 113941 - DNA, 391 bp, Arabidopsis thaliana columbia
ggtctttcccatcaaaggagacccaagcggagcttctgctgttgaatggcacttggactctcactgtcacgtgttccggtaatattagtgggcggaatgatagagaatgcggacagataggcgtgaataagatcccaggaacctgcaaaacattaagttacaatataatccattatctgttattgtataatgtatataacaccaaagctattgtgcaatctctcaaattcttcaatggcatatgaatttggagctttaacattttcgactttgttactaatatttgaattgtgaatcaaagaaccagcctcgcttgttgctacagatgtaaagatcattttggaatatttacctgaggatggaccattgaccctccagcagcaagtgaata

SEQ ID NO: 113942 - DNA, 378 bp, Arabidopsis thaliana columbia
aatatgtcgctcaagttcaaggcagaacatgtatcgtttttcttgtggccgttatttccttgtcaagttctcaagaaggaagaggaggagaagaaagccagagtaggcaccggacgcaaaatcaccattggtaattaacattagagcccagaaaatttgtttcatttatgaattggtagcttaatgttcggtctccttgtgtaaaggtaaagttgatggtccagatttgacaagctttgttcgccaatttccaccagattcaaaaggtattacattttctctgccaatagattaattgagtcaccatagatgctgatgactaacttcttaggaatcccttgtgtaaatttgatagagattatgatggatatgcgttta

SEQ ID NO: 113943 - DNA, 298 bp, Arabidopsis thaliana columbia
  unsure (1)..(298): unsure at all n locations
tcgcatttgcgtaatttgtattcttttttttagtcaattacatcttggggctgatgctttttgttcagttgtaacagtcacaatcttgntcgggagnaattgctggttcattatcttacaggtgttcataaccatttttcggaattcatcaaagacttcagtttaaggtccgtcactgttgattcatataacaattcaatccagtagagacacatcctcttctcatgtgatcctagtcaaggtaaacataacttactattcatattaaattatatcttaatgaatggtgagccaacac

SEQ ID NO: 113944 - DNA, 380 bp, Arabidopsis thaliana columbia
catcgatggtcttgatctttcccaattatcctggctggtttgatataaatcgtgggagttggataccttgaacgcataatgggagcttaatcaccgtgtttaaacattgtgattaggcgaataagtcttgttggatagattttgacgtgtgaccccaaaagttagacacgtatcggatatagtagatggacatgttgataatggcaatcatgatgatggtgaatggggcatgaccatgggaaacaaatctttggaagagaatcgatttaaaattgccatgtcgttgccaccacaaacccaactgctcattatttcacgttttgctgaatattgttttctccatttacgtattaaatttaattggagcaaaaaaacaagta

SEQ ID NO: 113945 - DNA, 389 bp, Arabidopsis thaliana columbia
  unsure (1)..(389): unsure at all n locations
aaacaatnccgcatcaaaaccacgcgccggtcttcatatattgttgttgacgatccaaccaaacctgacctattccaaccgccgctannatcgctctaacccagccnnngtctgatggaaatgaaccggatgtaccttggctttcttgcggtcaagatcaactaacaacggaaactatatatcacttannatacgaatgtttcgtattaggaagaaaattgttctgggcattaagctaaaagaaatgatnctggtagtgacataattctctgataatggtaaaagatgatccaaatcaccagacaagaatccattatcatcaggatcagctgaaccagatatcattcagcggcgaaaagaatgcatcgactcccatgaatggtaaagat

SEQ ID NO: 113946 - DNA, 367 bp, Arabidopsis thaliana columbia
  unsure (1)..(367): unsure at all n locations
tactttccacaacttagaatgtgtttcgtttctgccaccagccggtnacaaaacaatttgtcgggaccaaccatncgnattcttcnaaagatggaccctaataatcagatacaggcaccagttgaaaattatgcaaacccaatgacatgtcttttccaaaaactcttcaagggtgctgcgttggcgttttacattctctctgctctcttcttcaacagctttgtcatcatctttgtagtcactgttcttcttgctgctcttgacttctgggtggttaagaatgtcagtgggcgtatactggttggtctcaggtggtggaacgagatcaatgacttgggagaaagtgtctggaaattcgagtctcttg

SEQ ID NO: 113947 - DNA, 413 bp, Arabidopsis thaliana columbia
ggaaaacccggcgcgacccacgcgtccgctctgttgaaaatgaaagaacttggtctaaatccgactacgagtacttacaacggtttgattaaagggtatgggattgcaggtaagcctgagagatcatctgagttactggatcttatgttggaagagggcaacgtcgatgttggaccgaatataaggacgtttaatgtgttggtgcaagcctggtgcaagaagaagaaggtggaggaggcgtgggaagtggtgaagaagatggaggagtgtggagttaggccggatacggtgacttataacacgattgcaacttgttatgtgcagaaaggagagaccgtgagagctgagagtgaggtggttgagaagatggttatgaaggagaaggcgaaaccgaacggaagaacgtgtgggat

SEQ ID NO: 113948 - DNA, 364 bp, Arabidopsis thaliana columbia
  unsure (1)..(364): unsure at all n locations
ctcacttttttttcctctttaaacccacaaacgcgcggactataaaatattttttgctctnaaaaaaccnctactatgttctcacataaagacttgaactgtattatctagattcttctagtaacaaaatcatctttaagctcatcatctatcaacatagaagattcaatctcagatgcaacaatttaaaaaacagacctcaccatgttcttcaacagagtgatttaaacaacccttttcatcaccagaatttgtaatactccttctgacgctttttcaaaatgctaaagacccatttttttataactaagattatattcacacagatagaaacttagagtctttgaaagttttgaaacactaa

SEQ ID NO: 113949 - DNA, 260 bp, Arabidopsis thaliana columbia
taacatccctcccaaaaacaaccatctcctaaggctaataatctactttttattaacccatttacaaaaactccatccattactatccctataatccacatactaattaaccctaataacaacatacctcataacattcttaacaatcattatcctccttctacttcagctgctccttctggttttattccttgttaccatgcaaataggatgcctagcttctatgctcctggaaggtgtggtgaagttagagatgctat

SEQ ID NO: 113950 - DNA, 398 bp, Arabidopsis thaliana columbia
cggggcgttccacgcgtgcggggggaaaaaatcacactaacatttctgttcgagagaaaaaaatcggcgcgtggtcttttgctgtgtctagtacccaaaatcattttgttggctttagcatcttcgtttgtatattgttacgacccatctcctcttcaagactactgtgttgccaccaacgaaactaatggagtttatgtaaatggagagttctgcaaagatccaaaacgtgtaacaaccaatgatttttatacttccggcctaaacgtccccggaaacaccatcatcgggcccggcgctagaaacaccgtcgtggatgtcgaaagactgcctggtctcaacactcttggggtcgacattgcccgctatgactttgccccgggcggtctagacccacc

SEQ ID NO: 113951 - DNA, 271 bp, Arabidopsis thaliana columbia
atacaacattcacccaacgctcctcctctcgccggcgcgacccattttttcttatctctcgaaacaaacaacacagctaccacaatagtgtattccattgcccctacttcctctaaaccggacactacctgagccacggaataagctttcccaccaatacctacataaacacacaccaccccttccccttcaccatacacacctctatcccaccctactgcacccttacccgaccccctcccaccaataaccaactctccctcgccccccc

SEQ ID NO: 113952 - DNA, 405 bp, Arabidopsis thaliana columbia
  unsure (1)..(405): unsure at all n locations
aagacccggggcgttcaacacgtgcgctataatgtcttcatcatcatttatatcaaatcacaagannccaaacgcggtaatttaaaaaagtgtcgcgtaccaaaaaaacctaattcaaactaattcanctntcantatcanttccaattccaactcccacttctcaagattctttttacatctaanctcaccaacatcaaaaaccaaacaaggntttcttgcaaccgtccaagatagtatgaaccatgctctcttggctcgttctcttgctttcaacctcactctttctcatcgaaccgtacaaacccacacgttcgatcccatccacgactgcctcgagctgctcgacgacacacttgacatgttatctcgcatccatgcggataatgatgaacaagatgtcca

SEQ ID NO: 113953 - DNA, 398 bp, Arabidopsis thaliana columbia
gggcgtctccacgcatgcgatttgccgatacattttccatctccggtggctcaacttccatctccggcgggcggctcaaaggtcctatgtagaaagctggctctttaggcaaagaaagagcgttgtttccatcaccgtatatcatggacacaacgtctaacatacttggtctatcgtctgcgttttgttctacacacaacagagcaacttgaacgcatctcaacacttgagggttctcaactgcagaatctcccaaagatggatcaatcacctcgcgaactcggttctctttaaacagattccacacctgaaaaaaacagagtttcagagatgcatggacaaaagaaggcaagctgagaatattaacatatgagagcattacatggactatgagattc

SEQ ID NO: 113954 - DNA, 383 bp, Arabidopsis thaliana columbia
ggttgtgtttttatgtatgtcggcatacgtgtattttagagagaaggttgtgattgtaattgattgatgacagtaaaaaataaaaataataataagaaaactattagaaacataaaaagatatctatatcagaataaaatactacgatgacaattaatttgcttcatttacaagcttgtattaggaattctctatgccaaccactccactacgtttgtgagtagagcttgcttgatcaatacaaacaacaaaaagatgaatttataattatatattatactatataataaaatacaagtcacaaaagcatatgtttggaataaattattgttatgaacttggatagtttcattctttttgacggcaaatagttatcattcatt

SEQ ID NO: 113955 - DNA, 306 bp, Arabidopsis thaliana columbia
  unsure (1)..(306): unsure at all n locations
aaaaaaanaaaaanaanaataaaaaaactattanaaacataaaaacatatctatatcccaataaaatacttttttttcaattaatttcctaaaaaaacaaccttctattaccaattctctatcccaaccactccactacctctgtcagtacaccttccttcatcaatacaaacaacaaaaacatcaatttataattatatattatactatataataaaatacaattcacaaaatcatatcttctgaataaaacattcttatcaacttacatattctcattctttctcacctcaaatacttatcatt

SEQ ID NO: 113956 - DNA, 287 bp, Arabidopsis thaliana columbia
  unsure (1)..(287): unsure at all n locations
ctatanntcaacctttttttacacattgangctaaaacanagattgctgctgatcagagttcattttcttaccgtctcgtgaaacctaaaattttaaactcatatagaggatccaatcaatctattcaatcttnnggngagagttctataactcatggttccacaaacctatctactactaaatctatggatggtaagaaaacctaagaataaaaagcaactgaacaactccatgttcattatcaacaagaacctctcatccaattctttgaatgtcctatattcca

SEQ ID NO: 113957 - DNA, 417 bp, Arabidopsis thaliana columbia
  unsure (1)..(417): unsure at all n locations
gggcccgaaanncccggggggacccattcgtccgtaaagaccgataaaccatctccaacacctatatcacgtacaattctccaagggggcatgcatcaactgtggcggcgaaactgactacatattatattatgcttgataaatttaaactttatgaattaataagcccaatgatgaagcaagcacatgcctaaatctcactaactctcatatatgtcataaagaactttgaagtttttaaactaagtaattgtttatacaaaaccaagtagacataatgttatgtctaaactgaatgggttttcttaattgaagcatgcaaagcattaaacaattaactaaaggctcttagtcaatactaatctactccttttttcttctagaccactgcaataatatgcattcatatcaactcaa

SEQ ID NO: 113958 - DNA, 381 bp, Arabidopsis thaliana columbia
attcaagaaaagactactcaaatcttgctagagttgataagaccgggggggatttacgcaacggttgatgctgttaacttgcctaaagaagatagtcatcagttattgaaggggtctacagtttccatgaaactgaaagggaagatttttggtggatatcttgatctgtttcctaatcaagatcactcccacaatagaggaggagtaaggctgcagtctctagaaagctcaaaggatactcaagaagatggaccgagaaaaaatgaatcatcggcagagactaataccttagaaatggatagacttcagactatacatctttccggctccatttcttcgtcatcaactaagggaaaaggaataaaaggctactcagccatt

SEQ ID NO: 113959 - DNA, 296 bp, Arabidopsis thaliana columbia
  unsure (1)..(296): unsure at all n locations
aacaanncnacnnnctttnaatcttnntcttaacctcaatattatcactggtgaccaacttttttttttttannaaactaaaaaaaaacattcaatcctaacaaacatctatccatcttactctcttcttcntacacacaaatacncaaacctcncatccattcctntttaccaattcattcaaaaggctgatggagttgccggagtcttcccacagcacaaatacgaaattgtgaaaaagttccacgagaggaatcatattgttggaatgactggtgatggtgtcaatgatgccc

SEQ ID NO: 113960 - DNA, 413 bp, Arabidopsis thaliana columbia
tgggaaaaccggcggggaccaacgcatccgcagtgatcaagctcgaatcgctgttgatcgaactgctctagctgagtgggttgggaaggaatactttagtgtgcctgtgctactttccgaaaaagaatttcccaagacaagtggggaagtacgttacatcgtgtttaaagattttaagaatcctctaatctacgaagagaaggatcttgatattgcttctgtagttaaagctcttgacagcctcctcactcaagatactgagaaatccaagtctgtcagacttttcacgaacacttggtcaaaacaagcagaggctatcaaggaatcacattttccttctttctttcaggatttgttactttactttccaggttgtatctctgcagacgaagttggagaccgtctgtttcttt

SEQ ID NO: 113961 - DNA, 215 bp, Arabidopsis thaliana columbia
  unsure (1)..(215): unsure at all n locations
ccccaaaaancaanncnntccttcttcaaccctacctctcaaaacattnatttcatcaacgcccatttctcttttttcactatancacacaacaaaaaaccactactcanaanccttaactaatccatatacaacaaatctttcctttcaactaaacaatcaacaaatctattactcccaaaaatctttatctcntaccccaccaagccaaatac

SEQ ID NO: 113962 - DNA, 201 bp, Arabidopsis thaliana columbia
accacctcacttttccgccaggtccaaatttttttctcctcttctaataaaaaaaaaacaattcaaaccaatcttccaaaccaacattgtacatattacaacccatcaaatccccaatttattcttttcaataataccttacaatatacattccataacgttccgagccaaacacaactatcctccctctacttctacaac

SEQ ID NO: 113963 - DNA, 396 bp, Arabidopsis thaliana columbia
  unsure (1)..(396): unsure at all n locations
ggaaanccgggggcgacccacgcatgcgagccactctcgttgcaatctccttcttgtgcaactctctctgcttccaccggggggggactattgagtgaggctgctccacnaattctccattactcctcttcccgccgttaacttcactctccgacgatcgattcctcagattcttgctttcgctaattcctcctactatccatcatcttcctctctcgaagctggtgagaacaatgagctaaatgctgtttcagcttttagtgagattgttcctgatactgtcgttctccatgactttgagaggtttccgccgactgcatctactgttagctctgctcttcttctgagtatctgtggtctacctgataccattttccgcaatgctgtggacatgac

SEQ ID NO: 113964 - DNA, 382 bp, Arabidopsis thaliana columbia
tccgaatttttcgactttggttttcatttttgaacatatcggaatgaccagcggcgggctttaaacgacttatggcgttatcacaccaatcccttcgtctcttcacacttatctctgcaattttgtgttgtctaagacgtttgtggtatacgttgagttcgaacttggtggttaacaattgtaattttttgtttggcataagcattactgtgcatttaaaagaattgccactctgattaacagcaaatcatttcatttctatgaaactcattctttctcattaccttaaaaaatagtcgtttcctcgagaaaaaagatagaactaaaaaaacatatctcaaatgcaattatccgactgaacagttttcacatttgatgtaca

SEQ ID NO: 113965 - DNA, 379 bp, Arabidopsis thaliana columbia
tccttttttaaggttttagtttggtaccaataagtcaaacaacactaactgcaaaagtaagggtaaagatgtttactcttataagcttcaagctgctgaagtaaaatttctagtttagtgatttgtcacggtctactcgaaacttaatcctttaaatttgttaatgatttgacttttttgcgtaaaagaattaacctatattggtttaatcatacttcatccgtttcctaatagtgaatatataaaaggttaaagaatttcatcgtacgtagtgatagtgaactataagctatgctatatttttgtacgaaacttacataaacaagtttaattttgaagcgatattgttcgtgtactaaagcatatgtacgtaaatttc

SEQ ID NO: 113966 - DNA, 378 bp, Arabidopsis thaliana columbia
tcctttattaaggttctagttttataccaataagtcaaacaacacgcgcggcaaaactaatgttgtgggtgctcaccccaataagcttcaagctgctgaagtaaaatttctagtttagtgatttgtcacggtctactcgaaacttaatcctttaaatttgttaatgatttgacttttttgcgtaaaagaattaacctatattggtttaatcatacttcatccgtttcctaatagtgaatatataaaaggttaaagaatttcatcgtacgtagtgatagtgaactataaactatgctatatttttgtacgaaacttacataaacaagtttaattttgaagcgatattgctcgtgtactaaagcatatttacgttaatta

SEQ ID NO: 113967 - DNA, 373 bp, Arabidopsis thaliana columbia
  unsure (1)..(373): unsure at all n locations
aaagatcgatgtctgatttattttgagagcggattgagaaaccgcggacggttcatgagaatgtagcgggtaacgataaanatgaanagttaaggaaagtgattagagagagttttcttaggcagaatcttggttcacaaacaactactatagagactaagaaacgagttgttagaagtgattttgcttcctcttctggagctgtgtcgtcgtcaactagctcgagccaatcttcaatggtttctggctctactaagtcctctgcttcgtctgatgttccacagagagctccaagtttgattgctaggcttatgggtttggatgtatcaactcaagaaccgaggaaaagctcggtgaatcatatcgataagcc

SEQ ID NO: 113968 - DNA, 357 bp, Arabidopsis thaliana columbia
  unsure (1)..(357): unsure at all n locations
aaatanatctttatctattttgaaaccaccatcaacccaccccgcggcnncttaaaaagttgggggccccaaaaaccnnnctnaatcatttctaaaaactctcaaacgaaccaactttatcaacacgcgctgcaactgtttttttatcttctccctcaacaaaaaaccaccccaaacaacaccaacagaaccacagctaacaaactacatcgccatgtacctatccaacaacttctgtcttactaactttcttccttactcactaaccgccgagtcagttctagattgaacaccaatgcatctaccaccgctaatactcccactctccatcacgttactaccactcaaacctcctcc

SEQ ID NO: 113969 - DNA, 281 bp, Arabidopsis thaliana columbia
ttatcattgactccaccactttacgctttaaggcgggtatctctaatcattttcagacccgagaacacacacttcttgctttcaccctcggtgtcaagcagatcatttgctgtcgtaacaagatcgatgccaccacccccaaatactccaaggctacgaaccatcaaatcatcaaggaggtgcctacatacctcaaaaacgtggcatacaacccagacaaaatcccatatcaaccaatcacccgattccaaccacacaacatcatttacaggtcacccaac

SEQ ID NO: 113970 - DNA, 378 bp, Arabidopsis thaliana columbia
atccgtacaaacgttgtgtggctgaagccttcaatggtttcactccatccgctgtgcatctagttgtgggacttctcactatagaccctgctgatcgaggaacttctacctcggcattgaatagtgaattctttactactgaaccgttaccttgtgatccttcaagtttaccaaagtatccaccttccaaagaactgaatgtaaagctgagggacgaagagttaagaaggcaaaagggtcttgctggaaaaggtagtggtattgatggagctagaagaataaggtatcgaggggatcgcactgggcgagctattccagccccagaagctaatgccgagagtcaagcaaacttagatagatggagatcgatatcacaaa

SEQ ID NO: 113971 - DNA, 362 bp, Arabidopsis thaliana columbia
  unsure (1)..(362): unsure at all n locations
cttcatctgantctgatttaagcaaatccgagcttctaaaagggcgggggcaaaaatagtcgggggctataaaanaananaatatggctaaagaagcttatgcagagaaagagcacttggtgaagagatggttgaagcaagcttcatagctttttgggtataagcaatggttacaactgcttcagctagaagcactttacctccaaatcaagaacaaggagattgacaataaaaacaacgacgatccagggatttccatcccttgggggagcaatggcaaaacaagaaaagaggggagaaagagaaaaaaccaaaagggttaacccaaaggaacaaaataccccggtgggttaacaatgggg

SEQ ID NO: 113972 - DNA, 369 bp, Arabidopsis thaliana columbia
  unsure (1)..(369): unsure at all n locations
tccgtttttggatggttgatatgattttattagagaatcatctaagacaagccgcgaggcttaaaaacatctggtttgccgaaaaganagagatcattgaaaattctcttgaagaagaacacgctcctctcaacaaacgatccaagctattgattcaatggaacaagtgtctaaaagattagtctacttgaggagccaagtcctttgggtttgagtttaaaaaagagcccatcttttcaagaactgattgagatgaaactttctcaaagtggtgatgactcaaattcggttaagaaagaaagttttggttttggtggtgtacgaaccgttgagaagcttaaagcttctaactttcctgctactgttctc

SEQ ID NO: 113973 - DNA, 153 bp, Arabidopsis thaliana columbia
  unsure (1)..(153): unsure at all n locations
cattanaccaactttaactgaatttctctccacttttgtcggcggctttgcaacttttttctctatcctctctaaaaaaaaaatgtattgggaacatgccgctcatgcggggacaaacacaccaagagggctgattttaataacattggctca

SEQ ID NO: 113974 - DNA, 372 bp, Arabidopsis thaliana columbia
ctacaacccctgaattctaccattacttgcactctcatcaaactcgatcagacgctctcttatttttcagtgcttaatcataataacacgagcaattagctatctcggtctttcctcaacaaccaattcattaataaagcaggcctctttattccgagatggatcctgagcgatgataattagactctcaccaatcacttactaaactaatgaacctccagagttacagacacaatcattactcacaatttaaagaatccagcagctgactacttctctcccaccagattacatactgattacactacaaaaacaattagcaaggcatgctttcttcgcttgaatctcgttctccgcacagacctggaacta

SEQ ID NO: 113975 - DNA, 376 bp, Arabidopsis thaliana columbia
ataaaaacgaacgtcgcatagactacatattttttatttatgccaatctcgtcccaaagagaatataaccgtggttagtttctttcttgaggttttttttttttttttttaggaatttcttaaacttcttaataacttcagttcatatatttcattgcttagtaagtcaaaaccaaaaattcaatttatggttaacatatatatgtatattcttttttataattactcgtatttcttctctctatctaataaaataatatagttcactttgtaatgcagggtctagaagtgttaagataaaattaatagatacattcaagcttttacttgtgagaaaacgactctatgttggacctatatatagatgagacttttt

SEQ ID NO: 113976 - DNA, 369 bp, Arabidopsis thaliana columbia
gctttatactctagagcggctgcttatccggtctaagtgcaataccggtgtttttactggttatgttgggagaaaagatgcaacattcacagcaggcctgaaaaaactgaaattggatcctaacaaccgactcgcaacacactcttactccaagcaagaagaggccttgagatcttattcgcatacgtacaacaacaatcttggaagtcattcttgagatgctgatattgtccctctcaagaactactagcatactcatctctatagagagattgctattggtactccaccgaataagttgactgacatttttgataccagaagctctaacctatgggtgccatcaggaaaatactttttctcgctgtc

SEQ ID NO: 113977 - DNA, 300 bp, Arabidopsis thaliana columbia
  unsure (1)..(300): unsure at all n locations
cggggggacccacacgtccgccaaactngcctctccaccaccacttcctctacctatctaannccgaancgtgaaatagaaaggtggttgagccccaaacaacnatnaanntnnntcataagatcaaatccctgaccgatcaaggccaaacagctttctccttccactttttcccaccgaaaacagaaaataccgtcgagaatctctttcaacgaatggatcgattggtctcttatggacctacctactacgatatcacttggggtcgctgctggatccacaactgatctcactctcgag

SEQ ID NO: 113978 - DNA, 369 bp, Arabidopsis thaliana columbia
  unsure (1)..(369): unsure at all n locations
gatcccatcaataaaaagatctgcttgctcgaagccattgtanacaaggccgggncttgttgacgtgtaggcaaancananaagcgcaagagaagatcaaagccaaatatagtctacaagccattgctaaggaaggagagagactgaattctaagaaaataatttttcattctggtaacaagcaatctctagagctaataaaacaaagtctagtagtaacttagaggccaagaagtcaaactcaattttcaacgttccatatcctccacttttcctagcatttgctaaagaatgttgtcagccaatgcaattatattcccaaattggcatcaccaagttgacttcatgattatataacaaatatgacct

SEQ ID NO: 113979 - DNA, 107 bp, Arabidopsis thaliana columbia
tttatctaatctttagctaaaaaaggcccgaccttctaaaagatgcaagggtacccactcttgtagtcgacgtcatacctcttctatagcgtcacctaaattcaact

SEQ ID NO: 113980 - DNA, 337 bp, Arabidopsis thaliana columbia
ctaaaccagccattattattgattccgatgccaaccataacggctgttagaaatcagggaggcaccgaaacgtcacgaaatccccagcgcttcggggatgccctacgacaggaacatgtactcggtgttactatcacccccaaaaaaccaaactctgttacgtaaagttgccagagtacgattaacctcggattgaaatcactgttatatacctggattggccataattaaagaacatttgagtcttagtaagagggggaagggttaagatttacccgggtgagatatcacattgttcgagaaccctagatgctgcggagaaaggatcgtaacaagg

SEQ ID NO: 113981 - DNA, 370 bp, Arabidopsis thaliana columbia
  unsure (1)..(370): unsure at all n locations
caaagtttgaacttcttaaccttgcttcaggaattccttcttcttcccgaatggagatgttactggaggtgcgccangaggccttccaattccgatcaatgcaacaacttttgccaacaaaagccagggaataggttttagaacgattgcaataatggggtggccagggttgtgcccaatctggggttggggggggccatttctataatcgcgaaaagggagaaaattgggaagtgatctaatgctgttggtgcggctttggctccatcgattaacaaaaggcctggtaattttcaccctctgacttcttaacgcttctatagctttaaaagaacctgtttctgaaaaatttatacgccttgcaggtgct

SEQ ID NO: 113982 - DNA, 341 bp, Arabidopsis thaliana columbia
cggacgcgtgggttgcgacggcccctcaagattggtagttacaaacgtacgaatcatagagattaggtgtgatgtctaacaaaaaacaaaagtaattcttgaaaaaataaaaataaattgtaagtagcatataataccaagaatgttatgagtgatagtatgagaaccagcctgtgactgttgtcattgattcaagcgatcggaaatttcactttatttatcaataatatatataacattcatatttttcaaaataactatatcttaatagaagtctcacgattcgatacttcgatcgaccacaaccagacgtagtctcgtgtgattgtgtgactaacttt

SEQ ID NO: 113983 - DNA, 386 bp, Arabidopsis thaliana columbia
  unsure (1)..(386): unsure at all n locations
ccacgcgtccgnttatctaatctttaccttaaaatttcccgaccctctaaaacaacgtagtgtttcctacattttttgttcgggccaaaacacnncnatannntcacctaaatacaactcactatcacctcatcttacaactataatgactacgaaaatcttttttctttacccaactaaaaaacctttcactacatccacctttctccaccttacttaataccaaataatccctcaccaatctcccttaccaacattttcacaaccataactccaaattaaacgcaccctatcgcttcgcatcaaacaccacccacatccatactactcacatcgtaacccctacactatccatcaccctaacaccctctcctttccctaacttc

SEQ ID NO: 113984 - DNA, 370 bp, Arabidopsis thaliana columbia
gttctgctgttcccggccaatgaagattctcgtcgccgttaaacgtgtctgcgactacgccggttttatgcgagtcaaacccgataagactggtgtagaaacccaaaatgtgaagatgtcaatgaatccattttgtgagatcgcactttatgaagcgcttcgaatcaaagaagctggttttgctaaagaggttattgcagtgagtattggaccttcacaatgtgtggatacacttcgtactggtttagctatgggtgctgatcgaggaatccatgttgagaccaattctagttttcttcctttgacgattgctaagatcttgaagagtttagctgatgttgagaatcctggattgattttcttagggaaa

SEQ ID NO: 113985 - DNA, 370 bp, Arabidopsis thaliana columbia
  unsure (1)..(370): unsure at all n locations
gattgtcacgagtgtttacacgacaaccttgacaaactggcttccaaatcgtgaaaagttgatggtgttggtcatcanatacatcattancctcntnaattttcctncaaaaagaacacattttttaaacaaaaagatgctagctttgttaaaagctaatattcaagaaggtgggtttttgtttatcgtaccggagaatctgagaagaagaatcaacagcgtctggtctttgtctcttgtttttgtttcgggtgttaggtctactcattgtgtcaccaccaccagaaatttccccagtaacaatcgaaaaccctagaaataacgaaaacacagcaacattgttaacacaattttgattccgattaacgaa

SEQ ID NO: 113986 - DNA, 372 bp, Arabidopsis thaliana columbia
tagagatcatcctggaatgatacaggtgttcttaggccatagtgggggtgtgggtaccgatggaagtgagctgcctagactcatctatgtttctcgtgaaaagcggcctggatttcaacaccacaaaaaggctggagctatgaatgcattgatccgtgtatctgctgttcttaccaatggagcatatcttttgaacgtggattgtgatcattactttaataacagtaaggctattaaagaagctatgtgtttcatgatggacccggctattggaaagaagtgctgctatgtccagttccctcaacgttttgacggtattgatttgcacgatcgatatgccaacaggaatatagtctttttcgatattaacat

SEQ ID NO: 113987 - DNA, 393 bp, Arabidopsis thaliana columbia
  unsure (1)..(393): unsure at all n locations
ccggggcggccgactcgtccgatgacttcttagatctctagtctctactacttaattaggttcgcatctccaaatggtcagtaataagttcttcgagaattaggaaaaaaccatcaaacaagattccatatatctatttgatgtcgtcgcgtaaaatcaactgaataaaaagtccgttttgttgtaaaattgagtaaactctcacaacggtggcggtgaacgtatataagtcatgtgacacggcacctgagaagatggaacggcgaataaacggccgtagaaaaaggaggagacagccactttgaaaggcgagagagagcttcatcaagagtgacgtanggttcggtgacctcatcttaccttgatggcgtgacgtcatggatagttgaatta

SEQ ID NO: 113988 - DNA, 372 bp, Arabidopsis thaliana columbia
  unsure (1)..(372): unsure at all n locations
agaatttgcacatggctgcaaatcaagggatggaaggaacatnngggagtgtaaatcttgtatgcggggggccgctctatgacataaacgagcttcgctccattgctccagtagatcacaaacagcaatttgatgtgcggtctattattgcccggattgttgatggaagtgaatttgacgagttcaagaaacaatacggcactacgcttgtgactggttttgctagaatttatggtcagacggtgggtattatcgggaacaatggcatactgttcaatgaatctgcactaaaaggagctcacttcatcgaattatgttctcaacgtaaaattcctcttgttttcctccaaaacatcacaggctttatggtgg

SEQ ID NO: 113989 - DNA, 374 bp, Arabidopsis thaliana columbia
gtccctttggagatgttggattgcgctctggtatgcatcggtattccaatgtgtggtttgtttggttgtcgtcgtgtctcatatcccgtggaggctgcaggggtgtttctcatgctctgcctaatgtagtcgtggaagtatttggagccgatggtgatgatgacgaagacactgtcactggggattatgttgagacattgtacttgtatcgatcccttgatggcccaaggaaggatgctccaaagtttgtaacaattttatgagaaaaactttggtgcaaatgaggccatgattggggaaaagcaaaactagcaagcagaagataatgtgtttgtaaactgtaagtgcttcaggtacactgcatgatttgtttt

SEQ ID NO: 113990 - DNA, 376 bp, Arabidopsis thaliana columbia
  unsure (1)..(376): unsure at all n locations
gtcctaccacccctgttcaaaaatgctttggatggcatactncaaaccatgtgtgtgtaaaaattagttggttcgggccaccnancccaatcactccccaacggcatggctcaatctcgttcaaatactaaagatgatgtttcgttcattcttcttaaaggatacgacataactttgcataggtatacctataagacaaaaagctaaaattttaactaagttctcaactataagttaataacgagacagccatcatctagactccataataagtattcaaatgaataacttttttttcaatttcaaccattcctttcacgaagatacaattcaagattcaaaaatatcaataaacctctctttcttccaccaataa

SEQ ID NO: 113991 - DNA, 376 bp, Arabidopsis thaliana columbia
gacatacaaaattctatcaagaccagctaaccctaacggctagtagggggtgggggattattctcactagtgtggtgcgtactcagtttccctaacggcaagtaggtgcgaatatggtttcaaaatacaagatcaaagtattaagttcatattcgattctagtccgtaagtccctatcactcagcgggcgtgcaacggttaaagtttcttagataaccgttgagctagttaaggcaaatatacaagattctgcgaagtataaaatacctaagctcatgtactacgtggcattccggacatacatgcattacgattaaactcaactaaaaagaatagtgtaaacgatcaaacaaaaccatataaaccaccaacgtat

SEQ ID NO: 113992 - DNA, 369 bp, Arabidopsis thaliana columbia
  unsure (1)..(369): unsure at all n locations
aaaatatattaaaaaaaattaactcgatatgaatcataacccctgagagggttacatatcaaagtgttggggccaaacaagacngataatcatgcaatcataaccttcacctatggaagcacatcattccatggatacatcttctctacttctatccaaacttgatcatatttcttcctctcatcttcgtcataatatttcttcatcttatcatggttatcattattatccaccatttatgactctgacttacattcaacatattcagttcatttgggattcgcctacaacaacacacataatcataatctagatcctacattaattgattttttctgactcatcgaaatcaaactgacctaaccaggc

SEQ ID NO: 113993 - DNA, 371 bp, Arabidopsis thaliana columbia
agattattcagttcttggataacatcttccatggatggtctttggtttgtggattcatgagtgcagagaagaccaagtctagcgagctgagccgcttctacttccgggaagttctttcgaagatttggatccatgaagtcttcattcagtcttcctgactctacagcttgtaagatcatcaaatggctgattttgcttttaccactcagtatctgcaacagaatcataccaaatgcataaacatcgctcttatcagtgaacctccctgtagttatgtactcaggagctaagtatcccattgccgcacttgctttgagcttcgagaaaacgatatcatctgtgaaaagcttgtgaagaccggaatctgcaag

SEQ ID NO: 113994 - DNA, 375 bp, Arabidopsis thaliana columbia
atagccacaagttcaagggcttaatgggtgacatgaagaggtctgtaccattgtgggagaagtttcagacgatccggaatgagtaagtttttgtgtatgttgtcttcattaaacagtgatcgatgatgattttctattccaaaaaagggtacagcgaaagaaaaaaaaagactcgataacttaaatttctcaatcggcgaagaagaatttttttaatatatgctttcttcattggacctttgtttgtttgttgttgccgtctcgctgttttatttttgaggggttttagccttttgttttgcctttcgatgattttttgagttttgaatatgtttcgtacatcttaaaattgagtacaaacggcatgcagtcgtc

SEQ ID NO: 113995 - DNA, 369 bp, Arabidopsis thaliana columbia
gttttctattttgtcgttcccggtaaattttgccggcgaagattgagactgttcctaacgatgctggcagcggcgaatcttccgacgatatggaatctgtcgcttcgtgggtcatcctctaaagtccatatagtgaaccctaggcatcgaaagtctcacgcgcttcattgtttgaggttttgagtttcgtctccttcgtgagatttctctttctgctctgttcgatccgaattcttcaggttgatagtaatattagtgtagcattttacagaatttagttaatttcatgaaatcattgcttatctagagtgaacctttctcaatctttctggtttgtgtagaagaatattttgtgttgcaagaattgat

SEQ ID NO: 113996 - DNA, 368 bp, Arabidopsis thaliana columbia
aaactatatactctcgttttgttttgacgacttttttttcaatactggtttgtactataccttccgggagctcattctccttagaactctatttcaaatattttcgtggatttcttccaatccccttatttttttatgtcattctaaattgtataaagacaactcctatttaatagagctatttgtgcaagtattttccgattaagaagtaattgcttcttgtatagatagtgtatgaattcattataactatagaatacccccatttcgtgaattactgcatttattcgagtgatccataaacggcgaaaatctctttttattttacccctatcccgatgagccgaaactaaagctcttattctctg

SEQ ID NO: 113997 - DNA, 367 bp, Arabidopsis thaliana columbia
  unsure (1)..(367): unsure at all n locations
atcttttacagaaacacgatcaagtncagaatcnnncngtgtctgtggaccttaagggtgagggtcacccaacntntncaaatctacatttctttnccattgttggaatctccccctcgatcgttgcttatcaaatgatcttttattcgatttttactaacaatcgtttcaaagcatggtctaatgatgatcctgatctccgactgatccaataacggttaagcaacgctgtttttgatcccccattgttgtttgccatcgatcaacactcataaataacttgcagttttgttcataaagaatggcgttcaatacagctatggcgtctacatctccaacggcggcaaatgacgttttaagagaacat

SEQ ID NO: 113998 - DNA, 371 bp, Arabidopsis thaliana columbia
caagtccacggctaacagttggaacgtcatttgaatctttaagatcatgtggtttgaaccaagccggtctgtgtgcgattccaattttcccacctttaacctacaaaatgtccattaacacaacacaaaacaaattatattcatatccaaaacctgatagttaattttgatatatatatctaatgtaaattaccttttggcggaaaacttcaacagcttctgcatgagcgttgaggaggttgtgactaactagataagcctcataacctgatcgtccatctcggtcttcacaacctttaaggtagcgagaacaacgtcctggcgccttcttgcctacgtcgtaacctgcatgagcgaagacccatggctcg

SEQ ID NO: 113999 - DNA, 380 bp, Arabidopsis thaliana columbia
atttcggatgttttctctacactggagacttccggtgggattctgatgcggcaggcgaaactagaaccagtctcgttgctgctattgacgagtttccagtcgacattctctatctggataacacttactgcaatccaatttacagttttccttcccgtcaagtcgctgttcaattggttcgacctaaaccctaatccaaaagccttaaaccctgaatcatgtttctctttgttatattcctcatctcctttacttgcaggttgctgatataattgcttctcatccttcacatgatatcatcatagcagttgactctttgggaaaagaagacctccttgttcatgtttcccgcattctcaatatcaaggtttcttatagta

SEQ ID NO: 114000 - DNA, 378 bp, Arabidopsis thaliana columbia
ccagactatatattcaaagttgaggtatttatttaaatatatagggaactggtgacttaacttatttcaagtactaaaagaaaaaatattcaaatatacttacatgttagattctagattagctaaataaccttgaaattttattatttagataaataacaacgcggaaatattctaattgaagagtatttatatgtttcaacgctttgactaaagtagtttttataatcatgatattttattagttacgacattgagagataaatgatagaacttacgtgcgtgccatttcattcgatgaataaactagtagtatgctcaaatgtttgaaactaataacgtgttattttcaaaaaaatcccatgcgtaatttattgg

SEQ ID NO: 114001 - DNA, 381 bp, Arabidopsis thaliana columbia
  unsure (1)..(381): unsure at all n locations
tccgccanactatatatccaaattctttataaaaatttaaataaaacgttaacatgtgacttaaaatagtgcgagttctaaaaaaaaaaatcttcaaatatacttacatntaaaatactatatcaactaaataacctttaaattttattatttatataaataacaacacaaaaatattctaattcaanaatatctatatattacaactctttcactaaactaatttttataatcattatattttattacttactacattnatacataaatnatataacttaccttcctaccattacattctataaataaactaacattatcctcaaatcttacaaactaataacttcttattttcaaaaaaatcccatccttaatttattt

SEQ ID NO: 114002 - DNA, 371 bp, Arabidopsis thaliana columbia
  unsure (1)..(371): unsure at all n locations
aaaacacannacaaacttaattaacaagnnagatatnaaaacattttgtgtttcaaagaaagtggtctgcccatnaaaaacccaacnnnnnanattcctcccacaaagcttcttttatcttccaagagttttccttctgattcttctttccctcgctcgccgaataaacataactggaacaaaagcaacaagattacatctgaacatgaataatacaactaagacaacaacagagagaataaagagtactgttatgattctcactctgatgatccttacgcaagtgatcatttccggatgttcgaattcaagatccgtcgttgcactcatagccgaagccacgattggactgattgtcctttttctcatcc

SEQ ID NO: 114003 - DNA, 370 bp, Arabidopsis thaliana columbia
gcaaaaactcggttcaagctgaaatcgaaactcgaaccggaccggggtggttgtttacgatggcggggggcgagtgaagctcaacgtcggcggcgagatcttcgaaaccaacgcgtcgaccattcaatcatcttgcccagactctctcctcgcagctctatcgacttcaacctcccatggatcgaatccggttttcatcgatcgtgacccggagattttcgccgtcattctcaatctcctccgtactggtcgactcccagctaattcctccggcgttttttccaagcaagagctactagatgaggctatgtattacggcgtcgaatcactcctcagattggcgatgttaccgccgccgctgctaggtttc

SEQ ID NO: 114004 - DNA, 370 bp, Arabidopsis thaliana columbia
ccaaaacacatcacaaacaaaaaaaacaagttagatattatatcatgatgggtgtcgtttgtacggggcaggaaatgaggaagccaacggtggagattcctccgagaaagcttcttttatcttccaagagttttccttctgattcttcttcccctcgctcgccgcgtaaacataactggaacaaaagcaacaagattacatctgaacatgaagaagacaacgaagacaacaacagagagaataaagagtactgttatgattctgactctgatgatccttacgcaagtgatcatttccggatgttcgaattcaagatccgtcgttgcactcgtagccgaagccacgattggactgattgtccttttgctca

SEQ ID NO: 114005 - DNA, 373 bp, Arabidopsis thaliana columbia
tgcctatatgactgactgacaacacttcactatatatgagaatttgacatgtatggtaagaaaattgaacgtaaaaaaacaagaaatactgccgttaccccatatttaggaaaggagaagtctgatgagcgatcatgtaaaaatgggggtgttgaaatggttgtggctgtggtacatcgtcgacgctgcggttcagctgctcacattgggtttgttttgtccttaggatgttttccctctcctttatctataccgattacacacgccaagaaaattatataagcattatctttatatagattctcatttgcaactaatcagctatttgcatttattcaagaaacttcaattttttattcttatactttttttt

SEQ ID NO: 114006 - DNA, 379 bp, Arabidopsis thaliana columbia
gcggacaaagttaaaaactaaagattttcctataaatatgatatgataggggggttggaaaccacttaaaagggaaaataaaaaaaaatagatatttaaaactaatttcaatcttcacaaacccagaaaaaaatcaatatgaagaactcttctatcatgttcgtactaattgtcgtttttcttatttcttcatcaggtactatattattaattatttaatatattaattttcatcatttaacctgcaaaaatcggattgacatatgttgttgtgttcttggttggaactgataaaaagtaaactaaaatataaaattaagagaaaaaataaaatatgttaatacaatgatttaaatcttgttttgatatatagagaacc

SEQ ID NO: 114007 - DNA, 369 bp, Arabidopsis thaliana columbia
  unsure (1)..(369): unsure at all n locations
tcaaggggaggataaaaaagcatcacgaactccttctcttaaggaaaacatctaagggaatgtttattaataatttgtctaggtcaaacaacnnnnccancttaanacactcaantctcacatctntccctttttacttccacttcncttcttttttctttttttaaactctctctatatctctctttcttcttcacactttnttattaatttcaantntttaatcataatnncaacatcanctcntanancatactttttcnntatatcctatnantctacacacccttactccattanancaactttatctnattttctctccacttttatcttcntcttttcatctaaaaactctatcctctctct

SEQ ID NO: 114008 - DNA, 263 bp, Arabidopsis thaliana columbia
  unsure (1)..(263): unsure at all n locations
tatnnaaaactaatttcaatcttcacaaacccaaaaaaaaatcaatatcaagaactcttctatcattttcatactaacaaacaaaactcttatttcttcatcaagtactatattattaattatttaatatattaattctcatcatttaacctgcaaaaatccgatttacatattttcctatttccttcattgtaactcataaaaaataaactaaaatataaaattaacacaaaaaattaaatatttcaaaacaataatttaaa

SEQ ID NO: 114009 - DNA, 376 bp, Arabidopsis thaliana columbia
  unsure (1)..(376): unsure at all n locations
gcgattttgaaagctgcatctttttaagtatctaatgtttctgtgagggaatggaagctctttgctgggttcgatgggatcttccnggccttctctttttctcggcatacacgctgcttgtgctgttctgggcagagatatatcaccaggtacctaaaaagaaatttttgatgtgtgttgactgtcttttaaacctgccaacaagctctgagtatatattttgttgccactaatgagcaggctagaagcttacctacagataagctgcggataacctatatttctgtcaacgtggctgtatatttggctcaggttcatatctgatttttagcttttttttttttttaattcccgtttatgttgtagttgctgagtt

SEQ ID NO: 114010 - DNA, 365 bp, Arabidopsis thaliana columbia
  unsure (1)..(365): unsure at all n locations
gggtaccctcctcccccgccgtttacattttactctcctcccccgccgagtacagtgtactctacttttattccgaccaccnccncctcccccaactttctcaccttccccatcaatacctccaccaccncctcatacatattctcccttccctccacctccacctcctacaactcaaacatactatccacctcaaccatctccatcacaaccccctcaatctccaatttactacactccccctccttcccctataccttacttnccatcacccccttaatttatattcctaccaccaccatccccttactaatacatctaaccaccacctcaacctccaccttcaacattacattataatcctc

SEQ ID NO: 114011 - DNA, 383 bp, Arabidopsis thaliana columbia
  unsure (1)..(383): unsure at all n locations
gcttgatctgttctttgggttttgatcctgtgtggtaaagaangacacggaatggtgaataatgtggtggttggggaccaaaaccaccnanaatttaaagaccagagaataaagatacaaaccatggtctgagcagaagaagccttgccggcatctggagcaagagtcttatgttgctgcattggcatctggagatgaagtaggagccgcaacaggatgttttggaaccgatttggccagaactggtttctcagttgtgtgtttacctgttttacatcttcattgcaagaaacatcttcagtgtttgcaatcaactacaatatgtaccatgaaagacagaggaattattatgagggggtacaaggatattagttaccctggaa

SEQ ID NO: 114012 - DNA, 343 bp, Arabidopsis thaliana columbia
  unsure (1)..(343): unsure at all n locations
gggggttggactcaagcggagagaccaaatgaaaagcatgtttaaactctgtctcgttctcnncnaggtttgggcanaaaattcgtgtgcgggcaaaaccanntcttgtanttgctccaggaatatatcatcgagcgatgtcgatcgagttcatttcgcgatgaacttgtatttcaccgaggcaaaaaacttcttgaaaggggctaccggaaaaggacttgatgcctataacgcgacacttgctaaaggcggaccaccgccggtaggggccaagaaagccaaccttgatcctataactaaccgaatcatctaagagtatggttatcaagaaatcagtcatctt

SEQ ID NO: 114013 - DNA, 338 bp, Arabidopsis thaliana columbia
  unsure (1)..(338): unsure at all n locations
aactcattanacatttgctataccaatgaacanattangaggaaagttcaaatcaaaagaaggaggccaaaaaacnanccnctnnaaaccactaacaaatccagataataattatacttcaactctgccacataacaaaattcttctaaatggggatacaaaaacaaatgctactaaccaaactgcctcaggacacttatataacacaccaacaatattacctaatacgaaccaactgcaaataaaagttcctcaaaaaacaaagccacatcaaagtttaccaactaacaaaaaaaaaaattcaccacatatatttctatacttacaaaatctaaacc

SEQ ID NO: 114014 - DNA, 354 bp, Arabidopsis thaliana columbia
  unsure (1)..(354): unsure at all n locations
taattacggggccggcgcactcgaaggaactaacngaattttntttttttattcatgaatatcggcngcaaangggggcaggttgaacttaagttggtaaggccgacacnnnaancnacnaatcatatcataacaacaatacataaaccaaatttcggagacgaacctacaaatcttttcaccgcccggattaacaaacccttactccaacagcctaaacccattcgcgaacaatcctatatctcaaaccttctaacttcctaaccctatcacaccaaaccaagactacatatctacgatcgaaagtaaaaacaaaaccccttataaaaaatgaaactcaaaaccccaaaatca

SEQ ID NO: 114015 - DNA, 316 bp, Arabidopsis thaliana columbia
  unsure (1)..(316): unsure at all n locations
agggaattaaattaatacagcttttattttcgaatcttcaggnnccccattaatggtancaggtatttagtctgtccaaaaactcaatnaattaacctcccatacancttcttcttcttcatcatcatcttcaacatctccccactttttcttctccttcntnncctcaaacttctctnctctaataaatacttcaacttaaaattattaatataactcaacaactnttttaactctctctaccttatcctccataactatatccaacaaataaacaatcaaattataaacccaaattcatcttaacttctccatt

SEQ ID NO: 114016 - DNA, 378 bp, Arabidopsis thaliana columbia
gaaaaaaaaaactaaaccgcttcatcccggtttaggatgggttacatacagatagggtttcagggttttgcggggtcaatcatctggttttgatgctaaacgacgtcgtatagagtaagatgtctttctttctctctcagaaaaactcgacagtcatttcttcgacggcacgtttctcttatgaattaaccctaaaaacgccgtcttagtctctcttcgagcctactttcaaattcgaaactttcgttcatctgttctctacgtaagtctttgctttcttcttttccctgctgttgttgattctttacggtttttcttctcaatgattatggacaatcttacgctcactgtctccatggatgatcaacacatacttat

SEQ ID NO: 114017 - DNA, 371 bp, Arabidopsis thaliana columbia
  unsure (1)..(371): unsure at all n locations
taaaatttactatactttatttaaataaacacacaaaaanaaacgacggaccntaagataagtggaggatccaaaaaancnnntatttncntnnccactacaattntaagtttanccatatatcttggtgcaaatacatttaacactcttcaaaattgtataaaaactcatacttattgataatctctacctcttgaatctatcttgagcctggatatacctcaaattttgcccaatgatgaacaaaaaagaagcaagcatttcttcaactgaaacattcattgtatctcttaaacccatcttcacttgaaatatactgcataatttcatgaattcttctagatacatactatacaaatgtcgaaaatgat

SEQ ID NO: 114018 - DNA, 396 bp, Arabidopsis thaliana columbia
  unsure (1)..(396): unsure at all n locations
gggggaggcactcaagcgaagacttcaataaataacaaaattattcttctcatcagatctcgagccaggatgtttcaaagactgtaggggggcaaaccaaanaacatatattacctttacgacgcgggtcaccttttagacatttcacatggaggttgaaaacaatgttgttcttttcatttggctaatcgttttctatgacacaaagattaacaacaacaaaattaagcgtgacacaaagagtttatatgcttaatgagatggatcacattccacataatatttcttaccagataaatattcaaagagtctcagatctgcggcaattgtattaagacccaacctgtgagcaagaacttcgtcttgaataacctatgtcttgttagctacatacac

SEQ ID NO: 114019 - DNA, 383 bp, Arabidopsis thaliana columbia
ccagctccattttgcaagaccttcacccagagatcaataagagagcatagagagggtagcaaaactatgtgacgtgtttaaatcaccacttggtgtgctgtggaaatacaaaagaaaacgaaacttacatcctcaaacaagcgagtttctttgggggaattagtttcagagacttctgcatagttgctaaatgggctttcttttgtggtttcctcgggtgaaatgtcttcaaaggctgcatccaaaagtaaatcagcttccaagttagaagcttggaaaatgagaaaggaagaaagtcaaaattgagaatacaaatgaaaagacgttgatttctgaaacagaaaaagaatctaccatagttcttttcttctttcttctctttg

SEQ ID NO: 114020 - DNA, 383 bp, Arabidopsis thaliana columbia
cgcgtccgaccaggtcgtctcaaccagtaataaaaatgggaaattaagaaacgactgcgtggcatataaacaatgtttgacggttgtaaggaagaacaaatctaaagattcaagataaacagtctgatactaatgcctggccaaaggggtagcctttgaatgggtagcatactaacgttgcgagagaaggaatcaattgggaatttaaacccaagtaaatccaggagccaaaataaaaagaactaaattcatattcgagaaatactaaatggaacaactaaaatgagaactcacaggaggcccatatatgagaatatgtccaggtgatggaatcttgaacttgctaaaccacattccagctgcaggagacaacaacacggtca

SEQ ID NO: 114021 - DNA, 334 bp, Arabidopsis thaliana columbia
  unsure (1)..(334): unsure at all n locations
gttattaatttattatgaactcttgtattattaatgtttagaacaagntgttcacatgtattatggttcgtctaataaananctttttggttttgttaaaaaaaaataaattaaataataaataactaaaaaggaataataattttttaaataaaaataataaggacttccaatcaataagatccaagattactccaacttacatacaacaaaataactctaatataaaagaaaccaaaatacaaataaactggccgtccttttacaaaggatccaacttgaaaaacccttgcattacacaacttaattctcttatagaacaacccaatttcaa

SEQ ID NO: 114022 - DNA, 272 bp, Arabidopsis thaliana columbia
cctcaaaaattttccacaacttctcaaatcaaaataagattatgcaatcctaactcttttttactactctatagactaatcatactatttttaatcatcttcaattaaaatccttcatctcctccattcactccttcccttacctcttcttttctcacattataattttcctcttctatacataacttactttatatttacacattattaccactcttttattatacattattcctttttatccctcataactaataatcttcctattctaa

SEQ ID NO: 114023 - DNA, 217 bp, Arabidopsis thaliana columbia
aacctcaaaccctcctccttcatctctcattctccacctctcttctctccctttccatcaccatctccaccttttttctctcctctccaccaataactctcttctaaaccataattcccaattatttctcaaaaaatcatccctaactatgtctcttctttaccttttctctccgtctttaattttctccaatgctttcatgaattcacactatttc

SEQ ID NO: 114024 - DNA, 340 bp, Arabidopsis thaliana columbia
  unsure (1)..(340): unsure at all n locations
cgggggggtctccactcgtgcgcttacaatgttttccagttgttttctatctatgaacacagannancagttcatgtctnnaagtggtgtggtaagncaangaccagtggggcgttgagctaggaaaagttctggctactcaggtcaggaaacagcttcattcatcactcactcaaggaaccgctcccgagggattcaattacagtaccaccacacttttgaaacgatatctcgagacaagttccgagccccagatgtgatgaccaagcccaagtttctctccttcgaccaaacgtgaaccatttgagcatttttcacccttggtctttctttttttcac

SEQ ID NO: 114025 - DNA, 178 bp, Arabidopsis thaliana columbia
aataaattctcttcttttctttcgtattctcacttttttttctttccccaaagcaacaaactcattatttatattgtccctttttactaaataattcacttctcatctagagacaattctccttcttacccataaattccattattcacatttctaatctccttttatttcaccatca

SEQ ID NO: 114026 - DNA, 306 bp, Arabidopsis thaliana columbia
  unsure (1)..(306): unsure at all n locations
ctcccacctatcaccttcttttaatggaatcgccgnacactgtacgtccttaaaaggaaagttgcaggcccaacaacnncctcatactcaaccatcaccccaagttccattaatagccaattcttcaaatcctatcaagaatcctttctttcaagctgataaaaacaactaccacatcaatataatcttatccaaaagaaacacattataagttaaaacatatgcttaaacaaaaaaacattcatctacacactgaggtaacattatgtcaaaaaagatatattcaacaaattcctgattatacct

SEQ ID NO: 114027 - DNA, 340 bp, Arabidopsis thaliana columbia
  unsure (1)..(340): unsure at all n locations
actacantaatnnaaaatgatgttttttgatcaacggctgaaatnngaggtcataccctatcagagttgttggganccaaaancnnnnatcaccccaaaatccctctcacttcttctctttctctctctacttcttctaattctaccacctttcctaccnccacttccaccacctcctncnacactcctcctccttcctctactcctcattattctcctcattttcttaactttttctccttctaataaacccancctctccattaaacctctcaacccctaatatcttcaacttccttttcaaaccatccatacatacataatatacattacacaaata

SEQ ID NO: 114028 - DNA, 320 bp, Arabidopsis thaliana columbia
  unsure (1)..(320): unsure at all n locations
aaaggangagactnngtttatttaagaaaacattcaaancnnnccgtgtctcttcnaaatattttcgttggtccaaaaannnnnnnctnnctttcccaacaataccaacctttcaatctccttaactactggaaaaacaacaatatttcttttactttccttcctaaaaccaccaaatcttcttcttcttctctttcccaatactcctccttttaatccatcataaccaccaccattatcacctcttttacctaaacttatcactaacaacctcatgacaactactactaaagaccattcttcaacctttactttcctct

SEQ ID NO: 114029 - DNA, 378 bp, Arabidopsis thaliana columbia
gagcagtctttgaaagttcaacgaatttgtagttggttttttttttttcggtttgttttttggggacaggtgtgctaaaaactggatattttatccacacgttatcgttctatgagtttggtatcagtggtttgtaatcagttcctaccttgcccatgtctccaaaaacaatgattattagatgtagagaaagatggtaaaggttgttatttctcattaaaggataaaaatgatttacagtttatatactaaataagattacaaatattaaactatattgtatatgtatatgaactatacactatactctaatacccttccctcaattcgaattattcaagaaggaagaaaaagacttgaaaaaacatatcgagacat

SEQ ID NO: 114030 - DNA, 371 bp, Arabidopsis thaliana columbia
  unsure (1)..(371): unsure at all n locations
ttcgagtttgcgtttagaaattgaagttgactcttctgttcttgagtctggctccgatcggtgtggtaggtcgcantaccaggagattgatcactccttcgacattgctctttgaattcgtcctcaagggaattaatgagctcgtagaagctaccagaaatggcgtccatgagctctggtgatgaaagccttcgactttgcatgtttgatttgaggagaggtcaaactgaaggacaagagttagagaaaattttgttcttttatcctgccgatttagacttctcgacgcagttatcagtgatcgggctcagtgaagggcttattacttttactagacttttctctccggaagcggcttgtgaagtgatcga

SEQ ID NO: 114031 - DNA, 370 bp, Arabidopsis thaliana columbia
  unsure (1)..(370): unsure at all n locations
aacccaaaccctcatttttttatacggcgnctcgctcccaaaatgtctgcttnataaaactttgtccgctccccaaaannnccnnctcctatccttaccactatacccctcctaaaccatcaccatcacctcacaaaccaccaattcatccantcaaaccaactaaacctccttccntcaaaccacctaaaccacctncantaaaaccacctactccaaaacctcccaccntnaaaccccatcctaaaccaccaaccttcaaaccccatcctaaaccaccaaccatcaaaccccaccctaaaccacccaccttcaaaccaccccaccctaaaccacccaccaaaactcacccccacccaaaacctcccat

SEQ ID NO: 114032 - DNA, 381 bp, Arabidopsis thaliana columbia
ctcttcctctttgaaaaaccttttctttacgatttctccatagcagacacgtattgatactctgtgtttggctgaaggtagaagaagcagattcacgatcccaattcccctattaacggccattgaagatggtcgggagcaacaacaacgccaagtcatcgacgaacaagcctccagcaacttccatccccaccgctgcagcttcatcttcacagaaccataaacctcgtgtgaattcaactaacaacgatggtggaatcagtaacaacaacaacaacaacaagaaagaaagcaagccgatgatgataggtgtccagaaaaccgccgataagaaaccactgaagcctaatccatctcctaagctagctccgatcccgaaac

SEQ ID NO: 114033 - DNA, 372 bp, Arabidopsis thaliana columbia
atttacgcgcatgtgtttcactgtcaaagttttacctgcatacgcgaaaggggatcggcacatgcgcttggttgtgacctattgtttgagaaattttgtcgagcctgatcaacctcagagagttccgctggagagcctgcgttggcatcaaactcccatatctgccttcccaagaagttgttggtggtgcacaagtgagggtcatctcctgccttagctccgatcctcagcctccacattttgtaataactctcctagaaagaacaaacatattttgtgttaataatgtctatttccttgcacttatgtataccaggttatattccctaccacacacggggagagaaatttgattgttaaaaatacttcatt

SEQ ID NO: 114034 - DNA, 244 bp, Arabidopsis thaliana columbia
  unsure (1)..(244): unsure at all n locations
actccctaatattaacttttttttnacaacaanaccaataaattcaattacaccattcctaaaccaattctataaacacccaatcatacatatcataattcaactaaaataaacttatccaatacatatcttattatctccccatcaaccctcaacactcttttccttttnatcctntaanaataatcaaaacaccaaacacctttcctattattaaaaacccaattttactaaaaaccataac

SEQ ID NO: 114035 - DNA, 375 bp, Arabidopsis thaliana columbia
  unsure (1)..(375): unsure at all n locations
gtttttattcgtgattttttcatagacaaaaaatttanagngaatgtttgtgatagaaactattggatggctcaaaaaacanccaacccatgcgaataaagattgaagttttgactacggacaatatcagaataatttgtcatgtatgtcataatattttgttaaaaatacatcaattttgttttaaataatcacaagtcttaatgatatattatacatgcacttatttattttaaaaataaatcacagtttcgtgttgtatcaaagacttgttgttacgtaaaacaatttaataatcactacaaaatggatcaccaatacgattatacttgactgtattcattcattttagaaattaaaaacaactttcaattg

SEQ ID NO: 114036 - DNA, 370 bp, Arabidopsis thaliana columbia
atgaaatggaaggttaacgtcatttatactaaaggtttatgactaacgtgtgtgtttagagccaggtttgtcagatgacgtcttataagctgacttaatatcagaatttatgaaagtaacgtcggtttaaaagcaacacaaaatttttatagaccatttctactaaatttttatataatttgtttttatcaaatctaaataaaatttgctgtcaacaaaagaaatcttttacctaaattagaaagacaatcgaccgaaatgatgatatttatattgtttgaatatactaattttacataaagcataactttgtccttgatatgtggaactgttgtattcaaagccacttcacgaagtctttataagctga

SEQ ID NO: 114037 - DNA, 377 bp, Arabidopsis thaliana columbia
aacaaagtttcacttcacgctcacgatatctctggttttttttaacagagtgtgggacttggctactttgtttgtgcctccagcaagaacgcggctacccgcaagcgctccagaaacaattggagcgggtgttttgtgggatgaagagttcgtacaatgattaaagaatcgtacatagtataaacagaatttatttgagatgccatgtaatagtagagaagcagatttctgtttatgtccttacctttacttgttaaattcataggtagaaagaaagaacctctaaccaaagcttccatgtcataagcaaagtttttgtgattttcgattttgttctttatcagtatttaaacaatcggtcaattggtgatttcaca

SEQ ID NO: 114038 - DNA, 391 bp, Arabidopsis thaliana columbia
  unsure (1)..(391): unsure at all n locations
gggcgttccacgcgtccggtcacgcgccgtgctagaacaattgaggttagttcaagatatanatgacgtgctcctactaagtctgggggacgnccttcacctattgtcaccaggactgcgccttcttcatcacctgaatcgttcttgaaaagagcggtttcagcgtttaggaaccgtggtccttcaacaccaactacgccggttagtgatgtattggtagatttaccggtttcttctaggagactatctactggtcgtttacctgaaagcttatggccttctactatgagaagcctcagtgtttcttttcagtctgattcagtgtcagttcctgttagtaagaaggagaaaccgcttgttacttcttcgactgatcggacattgagaccgt

SEQ ID NO: 114039 - DNA, 381 bp, Arabidopsis thaliana columbia
gctaaaccaagacaaaactaaacaagtggaatcaacaaagacaaaactaagcacggtcatcattagaaacgaaggtcattgcatcaaaatcaaagctttagggatacaaaaaacagagaccgttaaagagtcaagctagaaaaaatgcaatatgaaaacagaggatagctaaaccaagacaaaatagttaaacaccatcctaaccaccatgaatgagttaaatttcgttttcttacaattcaactttcgttattgggctcttaatcttttgtctaaggcctgttaacttttttctttccttatgcaatttaaataaatgaatgttaaccaaaacataaaaataaaaacaattcctgaatgcttttttcctttcactaattg

SEQ ID NO: 114040 - DNA, 378 bp, Arabidopsis thaliana columbia
  unsure (1)..(378): unsure at all n locations
tatttatctcgtaataaattttgcccaagtttatgtttcttaataacacgtgtgtgtattactattttggagggatactncatattacggaataattcttcttatattttcattaaatccgagagtgtgcaacaacaatacatatatactcacgggccaaacatatgaattaatttgttattcatttttttattattaaaagatgaattaattatcttatcttataatactaaatcgaggaaagttctaaatttataatagactgataactaaataaaagttatgttgagaaaaaaaaaacaaatcatcgatattttattcaatacgagaaatgaacaaattatttgcgatacaacaaaaagtaaacaacacaaaccc

SEQ ID NO: 114041 - DNA, 196 bp, Arabidopsis thaliana columbia
acatggtgatgatattatgtttatctcagaaacaacgacaaattttgagtgatgtggatgccaggatgcggaaccaatttcatagatattttttcttggagataactggacctttcaaaatcttatttcacagtcaaacaaaacaaaaatgaaaatcaagtaaattctcacttttgttttgtttgactgtgaaata

SEQ ID NO: 114042 - DNA, 400 bp, Arabidopsis thaliana columbia
  unsure (1)..(400): unsure at all n locations
aaaggccgggggcgttccacacntccnacaaaactaatttaccattgatttttttcttcttccttcnnncacagccgtttttctactatgtttttggtccaaaaaacnncaatcatanntcttccatttaagattcgtttacatcgccgtttttgagctcggttggtgaatacatattcttgaaaacagaaaacttgtactgaagcatggctcttcggctaccagcttctaaagcagctgaagttgcgattggatctattggctgtggttatgatctagctattgatttaccgttgaagtattgcaaaggaagttccaaagattctagattacttgacattaaagaaggtgatgataattgtgagattgttttacctggtggaatctccattcctaatgt

SEQ ID NO: 114043 - DNA, 390 bp, Arabidopsis thaliana columbia
  unsure (1)..(390): unsure at all n locations
gggcgactccacgcgtccggtgaacaaaaaaaagaagaatattaataaaagaaaacgnncgacggtgggggtctcaaggtggtgcggccggncataactnctccaccgccaccgcctccgcttccgccgcatcaaccggcggcggaaagatcactaccttttcctgtctcattctcttcctttaacaccaatcatcaacctcagcatatgttgagcttggatagccgtaagatcattcaccatcatcatcatcatcatcaccatgacatcaaagatggtggtgctactactggtgagtggataggtcagacggatcatgatgatagcgataatcatcatcaacatcatcatcatcatccatggtgtagtgatgaagttcttgctcttctt

SEQ ID NO: 114044 - DNA, 400 bp, Arabidopsis thaliana columbia
  unsure (1)..(400): unsure at all n locations
caaaaggcccggtgcgttccacgcgtccgaaaccttttctctcttcttgagttaaactgcggaagcaacccntactggtttttcaaaggtatttggtgtcgagcaacnaacnnncatnncacctcccttctgcttcttctaactatcataataacatgtggagagccactgaagtatccttttaccccaacatcatcacacagaagagcatttatcgactgccaacatctctccagcccattgaacctgacattaggcggaccttctcataattggactgacactattcccatcggtaatggccgtctcggagccactatctggtgcggctactcctctaacattctcaacatcaatgaagacacaatttccactggagtaccagcagactacacaaacc

SEQ ID NO: 114045 - DNA, 405 bp, Arabidopsis thaliana columbia
  unsure (1)..(405): unsure at all n locations
ggaaaacccggggcgatgcattcgtccgcagactcctagcctaactcgtgtttcttctcacaagaatcanacacaagggggatgtttttcggtggttgtgggggccnncaagncactttcagattcttggttttcttcatgctatgcttatcttctcagctgagtgccgcaaaacccatttgctgaacgataatgatgtagaatctagcgacaagagtgcaaaaggcacacgatgggctagtttagttgctggatcaaatgaatattataactacaggcatcaggctgacatatgccacgcgtatcagatactccgaaaaggccgtttaaaagatgaaaacatcattgtgtctatgtatgatgatatcgcgttttcctcggagaatcctaggcctggagttatca

SEQ ID NO: 114046 - DNA, 379 bp, Arabidopsis thaliana columbia
  unsure (1)..(379): unsure at all n locations
gttcataagcctcgtcccattttttttgagactttgactatcacccaagtgcttgtcttcatgttgttgtgcagccgnctgatgcanttcaaggtcaaagatctgatgatcgacaagcggcggctggtcgaagttcctgataatgccactctaggggacgccttgaacactatggtggcaaaccgagttagagctgtaccggtggctgccaaaccaggccaatggctgggagccgggggatcaatgatagtagagttggacaaacagagcggaagtgcaagaaaacagtacataggaatggtgaccatgctcgacgttgtggctcacatcgccggcgatgacggcgagagtgggcttgataagaaaatggctgcccctg

SEQ ID NO: 114047 - DNA, 379 bp, Arabidopsis thaliana columbia
gtaaaagcaaagaatcttgcaaagcaagaagaagatcaaatccgacggctgtcgggatcattgatggagaagcagctacataaactagaagcaaagctatctatcttcaatgaagctgaaagcttgacaatgagggtaagagagcaattagaaaggtcaaggcaacggctatatcatgaaagggctcagatcatagcagctcgactaggtgtcccaccttcaatgtcctcaaaagcatcgttaccaacaaacagaatcgctgcaaattttgctaatgtagctcaaaggcctccaatgggcatggcctttccacgcccaccaatgccaaggcccccaggtttccctgttcctggttcttttgtagctgctacaacaatga

SEQ ID NO: 114048 - DNA, 245 bp, Arabidopsis thaliana columbia
tacatcttcatcatgctcccctaatctaaccacctgagtcccgcaaaaccttttttctgaacgagaatgaacatacaatctagcgacaacgagcgcaaaaagcacacaatgggctactctagctgcccgatcaaaccaatactataactacaggcatcaggctgacatatgccacgcgtgtcagatgctccgaaaaggcggttaaaaagatgaaaacatcattgtggtgataccatgatgcacat

SEQ ID NO: 114049 - DNA, 412 bp, Arabidopsis thaliana columbia
  unsure (1)..(412): unsure at all n locations
aaccggaanacccggggggatcgacgcgtccgcgatcaggtccatttaagcaacgtacattgaaaaaagatgattgatccaggggggtgaacgggtttttgtgtcgcgctctgnncaagaagatttcaatcgccgtcgtagccttcaatcaatctccgccgtcttacctgaaggagctcctgaagttgacccgagaaccaaccgtctcaagaaacccgcagctccagtacccgccggatctccaccagctcttccgatccaatccgctatggcccctggtccgtcgctagctccggcaccagctccgggacctggaggcaagcagcaccacttcgacggtgaggctcaagtcaaagatttcatccatacactgttacattacggcggttacaacgagatggcagatattctc

SEQ ID NO: 114050 - DNA, 392 bp, Arabidopsis thaliana columbia
  unsure (1)..(392): unsure at all n locations
ggggcgactccacgcgtccgcagccatatggctgtatcatgctttattattcgcgactcacgggtggagtgtcagtgagatgtgtgtaggaaagnncatgctanaagaaggtgctgagatgcaatggaaggaagagagagaagtacctgcaaatggtggaccgctagatgaatttgcaaagatgattgtggcaggagcttgtaggggagatgcatatgtgaagtttccaaactggtacgatgtctttctcctctatcgagtcttcacaccgaatgtactgagatggacattcaagttgttactgtctactgagggtacacgtagaagctcccttgttggggtcgggtcaggtatgcctgtggatgaatcctcttcacaaatgaaacttatgc

SEQ ID NO: 114051 - DNA, 304 bp, Arabidopsis thaliana columbia
  unsure (1)..(304): unsure at all n locations
gggaaggcaannacaangctactccataagacaaagcattacatcatggctgataaaactggagcaagtgatttatgtattgcgaaagctggacaccaacggctccaactgactcgctattatctgaatgagagaagtaaaaagtatggaaacttgctagtgaaatgaccaacataacatgtgatgcatcttcctcgaggaactgtagctggagactttctcgatactctaactagccaaatgaatatgcttataaagatgtatggacatgctcacaaggggaaaaaacacatgtgtctcatca

SEQ ID NO: 114052 - DNA, 383 bp, Arabidopsis thaliana columbia
cgaagatttggctcatcttttctccaatgagttgattaaacaagaagcagcgacgtgagaggtttattgggatcgctgaagaagttcttgaaatctataagctttggcgtccaactcctctaatcagagcaaagagattagagaagcttcttcaaacaccggcaaggatttacttcaagtatgaaggtggtagcccagctggttcacacaaaccaaacacagcggttccacaagcttattacaatgcgaaagaaggcgtcaagaacgttgtgacggaaaccggtgctggtcaatggggaagttctttagcctttgcttctagtctatttggtctcgactgcgaagtatggcaagtagccaactcgtaccatacaaagccatat

SEQ ID NO: 114053 - DNA, 376 bp, Arabidopsis thaliana columbia
gacccatgtagctagctacattttctgatgaacttgaaccgagagttcttgtcgataaagtggtagtgagtgattgctgtaagttgtccatcccttgagacaaagcatcttctgcttgctgagaagactgttgcaagttatttatgtctagcgattgttgttctgtcaagggctccaactgactcgctataagctgtagtagagaagtaaaaagtttggaaacttgctagtgaagagaccaaataaaccgaacctggtcgtgtgttttttaccttgagaagttctgatgaacggaaaccgccgagccacaagaaacatctctcagctggggttttccacatccctgataataaatggaagacatcactcttagctg

SEQ ID NO: 114054 - DNA, 367 bp, Arabidopsis thaliana columbia
  unsure (1)..(367): unsure at all n locations
tccncnacttggcgttttttttacaaccatccatgaanncggtgttctttttttcaaagtttttcgctcncacaacnccncnatctncnaattcatcccccanaanaaacttnaanacttttctttacccctttcnccccattttctctnccaaaatccctatacctccnataaatccaaannatcctttcctctccacactcncttctattaccncaaattctccnnaaaancttctcaatctnccttttaaccctaatataccaccatatcttaacatctttnactcccctcanctcatntcttctccttcacannttaaaaaatcantnncttataactaccacctaccnaaaactcctccacc

SEQ ID NO: 114055 - DNA, 375 bp, Arabidopsis thaliana columbia
ccaatcggagcctatatttttgtgtttgctttagtttttgcttgtagttatagaatgcaattattcttcactttttgaggatatgtaaaacatctatccatttccaatgttgcttttgagagagattgcaaggagttgattcaagttttggacattctggatgagtggtcggcatttgcttcagaattagaagatttcaatattttaatccttggttttcctcatttctttttattttgtattctacttttaaacaatgtctgtacagattgtctcgctaagaagacaagatcacgtgattctatatttttctatgtaaactcttttacaccaaactggttttctttagaagaaaactgccggtttctatcttaa

SEQ ID NO: 114056 - DNA, 376 bp, Arabidopsis thaliana columbia
tacacttgtcttaaaaaaaaaaagccaacgcttagcgtaccacacagattatagacttctgaattttttgttggcatgaagttgctctgccaaaaaagggtcatcacccttctagcaaacaatataatctcaatctctttactgaccaagcctcccatttgtgatgatggggtcatccaggatgacaaaaagtgtttggctgagatcttatcaatcaattgaccaataagcatagtttctatttcacattttttcaatctggttattcccatatccgcctgctttttgtaacttatgaataaaagtattaaaccaaaaaaattctgatttctaaacctacatttgattttatctaatctcctttccacatcacaaa

SEQ ID NO: 114057 - DNA, 385 bp, Arabidopsis thaliana columbia
agacgttatatatagagagagagatttcaataacttgaattggaaaaatctcgtaggttaccgagagagactgaaccgggtttacttcgagataagaatgcatcaaagaagctcatagatttggggttaaagttcatttccatggaggaaatcatcaaggaaggtgtggagagtcttaaaagcaaaggatttatctcttaatacctacctctgtaactctgtttgattgagcaattaacacaatctcgaggcagcagaaacatttcatatgatatacgattttgcacttttgtaataaataagctggcctatggtatggtatgaacatccaattaatatttattaatctggcctctctgagatttttctttaaagtttgaacatg

SEQ ID NO: 114058 - DNA, 380 bp, Arabidopsis thaliana columbia
cgtctctctcacagcttcttcttccttcaaatacttccattttccttctctggaccgatctatctgtgattccccaaacttctccttcaccaaatcccttatcctcaatccaaaccacctctccttcaaatccaccttaaattctctttcaccgtctcagtctcagctctacgaggaagaagacgacgaagaagaagaagaagaagacgaagatgatgatgacgaagctgctgacgaatacgacaatatctccgatgaaattcggaatagcgatgacgacgacgacgatgaagaaaccgaattctccgtggatttgccgacggaatcagctcgggaacgagtggagttccggtggcagagagtggagaagcttcgtagtc

SEQ ID NO: 114059 - DNA, 354 bp, Arabidopsis thaliana columbia
tgagaagcttgtggatgttttaagatatatacaacagacaaaaggggtgctgaaaacaaattttgggggtctaaacaaacaacgacacaacagaacacaacaacaacgcacataccgacaagctatgtgatcacatatccaacactatactaaagacttgcctcaaacacgaccatgcaaacaaactatcttgtaagactcaccccaatactaacatgaccatgatcattggacaaatcaccaccaccgctaacacatattacaagaccatcgatcgtacaccatgccaacagataagattcccatctgcttgacgatgaactacatgctaacaattataaagttctccttaac

SEQ ID NO: 114060 - DNA, 380 bp, Arabidopsis thaliana columbia
gtgtcataaaaaaaaatcgaaaggctttggatcatagaacagttaccatttcaactggggattgacagagtgtgtcaggaagtttatgagatggaaagataaatatagaagctaaataccttagcaagaatataacgaggtctggtcgatatctggctcactacttcaaccagagcggagctcactttgctgttaatatcaagactttccgaagatgctgtcaaaatgaatatagacccgttaatgatgatattcctcagtcatgattttataccaacgacacaaatatataaagatttgagatagagaacaactttttcccgtgatgagttcacgactgctcataattagagtctccctgccagcccgaaggaaagcat

SEQ ID NO: 114061 - DNA, 99 bp, Arabidopsis thaliana columbia
aacaattgaatccgtatggcgaagaatgggtagatccccatccggggcacctttctcaatagaggaggcaactcattaacattgaatatatcataaact

SEQ ID NO: 114062 - DNA, 369 bp, Arabidopsis thaliana columbia
ctcgtgtcacactcacacaaaacacaatcttcctcaaaaaaaattttgtgcaatcagaaaaatttcaaacctcatctgatttgattttcactgtctttctaagtttcgaaacggtggattttgtccgtacgtggttttgattctcgtagatgtcgaaactctgacgtaagattagagtttcgatttctaggtttcttataactatggcggtggaatatgaatgctgcgggaccagcttcttcatacacatcgctgtgatagtgttactagtcttgttcgctggactaatgtctggtcttactttgggtcttatgtctatgagtctcgttgatcttgaggttcttgctaaatccggtactcccagagatc

SEQ ID NO: 114063 - DNA, 344 bp, Arabidopsis thaliana columbia
aaaaccggcggcgggccacgcaagcgaaccagagaagctcttataaatttttttcaaaaaaaaatgacaaaggctggttgaacacgtgtccttgcgttgctgatattgatctcgctaatggcggtgacactgaacctttttcccacggtagaggcaaagaagcggagtagagatgctcctatagtgaaaggtctctcatggaacttttaccagaaagcatgtccgaaagtcgaaaacatcatcagaaaagagctcaagaaagtcttcaagagagatattggtttagccgcagccatccttcgtatacatttccatgattgctttgttcagggatgtgaagcatt

SEQ ID NO: 114064 - DNA, 331 bp, Arabidopsis thaliana columbia
gtagattttttttcaatactcgtttttctttctattccaatcaaaatcggcgggaaaaaaaataatttttgtggattctcaccatctctgtaataagtaaatgcctctttttctccggaagttgtcggaatcactcgtaataacatatcgcctacaattgcaaaggttttatcaataaaatttccatttatacgcgaccttggcatacgtagtaatccattctctaactctctttatccccttaacctattattttgcgaaaacattttgagccatacctaaaagcccattctggcaatcctgtataaaagcggacttactaaaccaaacc

SEQ ID NO: 114065 - DNA, 393 bp, Arabidopsis thaliana columbia
  unsure (1)..(393): unsure at all n locations
cccacgcaggcgattcgtacatcatccttcaaagtgcttctagttccgaaaagactaggcgggttcaactaacattatctggttgttaaanagaatgtcaatccaacctgaattactctatcgttcggcaactttcatgaccgttctcctagaaggctagatagttttgtacgtctcattgtctattctaaatcgattctctaattttcttgctccttttcattccttcctcttatttttttccgtaaatcattctaaattatggctccgtacacaaaaaagcacaagaagagaaagtggaatatataccacatttaataaaagaaaaagttcacattttgagttgttgttacactataaattaataatgttagaccttgaaatttattaatt

SEQ ID NO: 114066 - DNA, 374 bp, Arabidopsis thaliana columbia
cgaaaaaatgccggcggcgaataggactcccaaggttaaccgtaaccctgacctaatcaggggagttggtgggtattcgaggtctcaaatgtaccacaagagacgttagtgggctatcaacgccatgaccgtggtgctagaacgctagataatgctgaaccaatgattgactattctaaatcgaagctctaattgtcttgctcctttgcattccttcctcttatttttttccgcaaatcattctaaattatggctccgtacacaaaaaagcacatgaagagacagtggaatatataccacatttaataaaagaaaaagttcacattttgagttgttgttacactataaattaataatgttagaccttgaaattt

SEQ ID NO: 114067 - DNA, 375 bp, Arabidopsis thaliana columbia
gtcaaccattatatagaattgtgattttcttctctaaacaagtcctttggtgtgaaatggtttccaaagctttgtgcattctggtgagaatactctccatagtctttctcatagactgaatctcattctctgtgtgctttatctttctttccctcgactctatcttcttccttcttcccacaactgtcttcctctgttgctcaccttctaactccattgcctgtatagtatattacagaattggctaattcggtaaatcatatattcataataaaatggaatcaagaaatccgggtagacctgaatctggtcgcgtaagttcttggtagaaggtaacgatttacacagagaggctgtagatggcgcattaacaaa

SEQ ID NO: 114068 - DNA, 377 bp, Arabidopsis thaliana columbia
aattaaagttgctcgcaaagagaattgatgatggagcatgaattgaagctttcttgtaatttatctcaatgtcttccacctaaaccaaatcttatttgtctaattactgtgaaaaagaaagaaaaagcctatcttgaccatgtttaatgaatgttaattacttattaaattaaacagggagaatagttagttgccacatgaaagaatacaagaagtgggcaatgatgcaagcatctatactatgtaacacataaacattatattcataagtctaatcttcaaaacaagatcttgggcaaatcttcataaagcatgagaagacaatattgtatacagaatgaacactgatgttaaagaaaggtatagattattctatt

SEQ ID NO: 114069 - DNA, 297 bp, Arabidopsis thaliana columbia
  unsure (1)..(297): unsure at all n locations
acccacgcatgcgntgacacatgganttttctctggtttttttangccccacaaaccaacggcggtaacgtcggatatgtggggtccctgaactatccaaccttcgatacttcggttgatctcatgagtattatcgagattgggtcaaagcaaacgtttgatgtataatggattcgacgtaacttggtctggatgaaaaactataaacactaatacttcaaagctgtaagatacagaagtagactgataaacacgacgaaacaaataacacaaaaaataggagggatacatggataa

SEQ ID NO: 114070 - DNA, 376 bp, Arabidopsis thaliana columbia
gttggatcacggttcaatgccggtttggtattggtttaaacaaaagatgaaatcagtttcagattaacagaaggatcagaagactattgcctgattagagggtttgactttgtctctgttataaatagtctatttattactttgatagttgactaagaaaattattatttgactactatttctttgtcacgcgatctaacacattgtgtcttagggctaatgaaacattaatatatttagagctttaagatcttgagctattccacatctatacttatacctacatgtaaaagcgtgatgatgtcgtatatgaataacatcttcttgtgcttgcctgacacatatgtttggtttgatctgtgcacatatatcatgt

SEQ ID NO: 114071 - DNA, 368 bp, Arabidopsis thaliana columbia
gggaaaggagaaactttttcgccacagcaactacaagaagctcatgatgattatgaaaacgagacgactttatttgttttccgtttaaaatccctgaaacaagggcaaacacgtagtcttttgactcaggcagcaaggcaccatgcagcacagttatgcttcttcaagaaggctcttagttcccttgaagaagtggacccacatgtacagatggtaaccgagtcacagcatattgattaccatttcagcggattagaagatgatgacggggatgatgaaattgaaaacaatgagaacgatggttctgaggtgcatgatgatggagagttgagttttgaatatacagttaatgacaaggaccaagatgc

SEQ ID NO: 114072 - DNA, 374 bp, Arabidopsis thaliana columbia
gaaactgatacgggcttttaataggctagtgtgtcggtataggcccattagtgaacagaagaagctgttgatcaatcctcttgcggagaaactttgggaagagccgaagagaagtcgaggtctctctatctctctctttcgtacacttcgcgcttctcttcctgtaatctctaattccacactcactacatttatgtacttttttctgtatctatacgctttgtgtatgatgttttgtatattgttgcttctcttgctttacttgcttggttggggatttcttctctgttttttcttggtgaattttgcgtatcgcttaaaaatgagtgaaattgatttggtgaaattaggtcagaggcgtatctcatggctcc

SEQ ID NO: 114073 - DNA, 380 bp, Arabidopsis thaliana columbia
gagaagaatcggctcgttggatctgatcgaagctgcaggaactttgtgtgtgtgtttgaagatagatggattttggagtcgcaaccgcaggttgttggagtttggtgaatttttacagaaatcattaccgctcggagtatgcaatgcaacttgcatttacctttacacagattatatttgttttcacaagaattaataattattatttttaatggattttgatttttaaaaaccaatctgactatgcaatgtcaataaacaataatattatttacatgggctgacggtcttaaggttcaaaattaacgtatgacatccttcaacggattaggtgtcatatagtgttacctaaatccaattcacttcgctgcgttttataa

SEQ ID NO: 114074 - DNA, 378 bp, Arabidopsis thaliana columbia
gttaaacaatttattcaacacccccattactcatagtaaggtaaaatattttttttttccttaaaactttagtcaaggtcataagatcgaatgtaattaaatcacatctcagcaacctcttaattttgtagatcaaacaacaacacattttactaaacgaaatattaatagactaccattttattatcttggttttaaacaaaatctgtcttattgaaaataagtctctaatttatttaaagttttttgatattggtcgaatcccatttatacattaacctaaaggttccagcagcattatttcgtacataaattccatcttcttgcgcttgccagaaacatatgttaggttttctccctccacatatatcatgtata

SEQ ID NO: 114075 - DNA, 378 bp, Arabidopsis thaliana columbia
gaagaaagttggctttggaaggaataccaacaagggattgaataaacccggattaccaaatggcctggggccgttggaagcttcaatcttaacttttaaaccgcgctgaaaaaagcttggaattctggtaccaacctccagtttggtgaagcatggctgaaaacatatttggggacaagaaacggatggattttttatgatggattccgcttcttttatgcttgaggagtataacatactcaggcaggaaagagaagaagaacaccggtcgcaacgggatcagaaaaagcttcaaggacagctcatagcagaacaagaggcactttacgggtccaaacccagcccatctaaaccccttggtggtaaaaaggctccaag

SEQ ID NO: 114076 - DNA, 320 bp, Arabidopsis thaliana columbia
ttacatttaagattcacattctggtgaaagatctcggagagataaagataaggaaatggtttatgttaccaaaagaacttattggatctttagatatattatcttggattctcttaatttacattagggtctatacatctttactaaataattttggcgtgtaaatttacttttcatctaatctaaacaaatttacacaagagcgcgcacaaatatataaaagtcacgcacacaagcaatcccaatcacaaaacacctccattgctttgataagacaggactgttaatgttcatcaatgcaggttcacttcatagaaata

SEQ ID NO: 114077 - DNA, 173 bp, Arabidopsis thaliana columbia
tttatttccccttactcaagaattttcatttctcttttaacttatattgggggattatattttatctgtgtgactagataaaatccacttaaataggcgggcgtaagaaataaataaaaaatttcttataatatgtgaattctaatagtgatccaaacctttttcattttata

SEQ ID NO: 114078 - DNA, 200 bp, Arabidopsis thaliana columbia
gttgctacttagattccacacaaaccggcaccatgtctggaacaattacaagggttttacatatatcatgactacttggtagcagaattgtgtttttgtcaacttattattcaattaacaatgcagagtgagcattattaaagaaactaaaatatgataatagttttcacaaaataatatttttctgtgtgaaaacaagg

SEQ ID NO: 114079 - DNA, 369 bp, Arabidopsis thaliana columbia
  unsure (1)..(369): unsure at all n locations
acccacgcgtccggtcattccccctaactcaaaaatttttattcctcttttaacacatatgcggtggttatatataatttgtttgtctaaanaaaatccacttaaataggcgaacgtaagaaataaataaaaaatttcttataatatttgaattctaatagtaatccaatctttgttcattattactcttcatttcaaatctaatcaaattttcacaagagagcgatcaagaataaaatttaattatttacgtcatgacaacaaactgaatattaattctatatattttatcttaatggataagagcctcaaaaaaataaattctacatattccatcttcttaaagatatcaagtttgtctggaaaaca

SEQ ID NO: 114080 - DNA, 380 bp, Arabidopsis thaliana columbia
  unsure (1)..(380): unsure at all n locations
gagaaagagacacaaaacttttttttttcaaaaaaaaaaaactaacacggtgttaaaaatactattgtgcggtttttcattctcaatcactatanaaaatgggagtcatgatcaatcaccatttcctcgcttttatcttccacatcttactaaacgtaatatccttccttatattcctccctccaatgccaactttttatataatatacaatagaaaatctacagacagtttccagtctctaccgtaccaactctctctatttaactgcatgctatggctctactacacattcattaagaaaaacacttacctcctaattaccatcaactcctttctctacctcttcgagactctctacataaccattttcttcccttac

SEQ ID NO: 114081 - DNA, 290 bp, Arabidopsis thaliana columbia
cgaaaatttaacatggatggtatatataactaggaatgggagacacaatggagtttgcggcaggggtttatgaagcattgggtcggaggagacaaatagagacagaaaacggtattgacaaagaacaactcaagctgttttgggaatgacatgatcaagaaagacctcgattgtcgtcttcagatcttcttcgacatgtaatttcactcaatcttatatgttttcatatatacacaaatgcggttatttatttttatttttaaatgcggttatttagtttaaccattgtt

SEQ ID NO: 114082 - DNA, 297 bp, Arabidopsis thaliana columbia
  unsure (1)..(297): unsure at all n locations
tccaaaactaaaaattttaacaaggttggtatatataactagaaataaaacgcgccaggtaaaaaattttggtgttttatcaaacaatancccggangagaccaataaccacacacaaccccattgacaaataacaactcaagcactattggacagacatgatcaacaaagacctccattcacgccaagagagcttatccgacaccaaataacactccaacggataggtctttggctatacacaaacccggttaatgaaaaaacaccacaccagcgacaattcactgaaaccaaaaa

SEQ ID NO: 114083 - DNA, 376 bp, Arabidopsis thaliana columbia
ggctgttgtattggacaaggagcaggttatagcaacagtgcagtcagagcgcaaagactgatttgaaatgagcttttctatacttctggagttcctctgtcatctgtgctgttcttttgtctgtatatgttgtagttcatatgctgcactgtgagcccagcaaaatccaagggtttgaattctatgggcttgatttgcctgatagttttggagagctattcagtagtggaatacttgttcttcttctggagcgtgtttacataatgactgtgcacttcgtacaagctagattacatcgaggaagagatcagggagtcaaagcaaatggtaaggggtggattctgacaatcgctttaattaatggcccaaatttcgc

SEQ ID NO: 114084 - DNA, 383 bp, Arabidopsis thaliana columbia
atcaccacctctgtcatctgtttcatcggaaccatcggaatctcccttggcgtctacctcattctcaggcacactatcatcgtcccccgaacttctgctttcaccaccaacatttccactctcgacatcactccccagatattcgtactcgagattatctgggtcactctcatacactaacccttcatcgaaagacattgaataaagaccccaacacacccaaattagaatcgagaacccaaaacccccaaaattcggccaaccctacaaataatacttcaagttttaaatatcgtttttaagattgtcactttacaaacataatttatctttattccttagttatttttgatattttattaacagatggatttttcaaagaa

SEQ ID NO: 114085 - DNA, 316 bp, Arabidopsis thaliana columbia
  unsure (1)..(316): unsure at all n locations
aaaacgcctagattctattattacaacacgcaatacgcacccccgctgcgcaaaaaaaactcttggcgttccnacaacattaaaaaaccatctcaaaaatcttaatgcgcctaaacattacatgcttgacaaacttacacctccatttgacccaaacaccaattaactaccacaaaatttaagccattgccttcccctaatacttatcataaccaacaacttaacaatattctcttacctaccactaaatcaactcaatcttcatgctaaatcatattcaactttattgaaaaattaaaacctacaagacctaccc

SEQ ID NO: 114086 - DNA, 367 bp, Arabidopsis thaliana columbia
cacgaggcgagtaggagttttttaagagcgagaggtgccttagtgggactttggctagagggttcacgagtgtagccgaagaggaggtcttatcaacagatgttgaggaagagcctgaggtagatgaattgttgaaggagatgaagaaagagaagaagagagaaagtcatcgttcgtggcggatgaagaagcaagaccaatttggaatgggtcgtaccaagttccagaatttatggagaagacaagttaagatcgagactgaagaatgggaaagagctgctgcagagtacatggaacttttgacagatatgtgtgagcaaaagcttgcgcctaatctgccttatgtgaagtctttatttctgggttg

SEQ ID NO: 114087 - DNA, 369 bp, Arabidopsis thaliana columbia
catagctgtaaagttgcatcacgatcaacacagcaagagattcccagacattatccagcaatggggctttagagttgtaacccaaataaaagtagagatcaatgaatccagataaccaaagctgcaagctgacaaagctacttaagcagtagataaacataaacaccaaaactgcatatgctttcaaagggaaccacaagcgtctcttagtttcttcaaacagttgtcttccagtaatccagagcaagagaaggaaaatatatccaaatgatacataattgggtttgaccaggtatacacttatgagaatagtgatgaaagcaatgtatgttccacacgatcggtacatagacagaaacttttgcccaa

SEQ ID NO: 114088 - DNA, 287 bp, Arabidopsis thaliana columbia
accagaactcacttctactatctagtttgatcagaaggataaggaataacaagttctccatgagggtttgtggaagccaaacaactactacccatgtagctaatcatctatatacaacaagggtttgctcaaaaaaccacatatgctaccaaattgacgagattctcagagattactaaactcatatatggatagagactcacgttcacctctctacatatacaaaagcctacattagtagctctaacaattacgggtgttatacaaacacaagtgtttcacctgtt

SEQ ID NO: 114089 - DNA, 360 bp, Arabidopsis thaliana columbia
atcatttcatcatcaccattcccacacatgtttcaactatataacaaattttaacttttgactcgttaatgatgccaaatccgcacgctcagagcaacataagcaacgacttcttgtggtaatactattttattatcatcagattttgttttttttccgggagtttaagacatctttattaggtgtaatatataatattttcttgtataatggatcttccatcgtccggattatcactaacatcggctgacaatatcagtactagcatgaatattacttccactacaagtccttttttctttcacaataagatatagaatgattgttggtgttaatttgatacataaataaccaatatta

SEQ ID NO: 114090 - DNA, 308 bp, Arabidopsis thaliana columbia
  unsure (1)..(308): unsure at all n locations
aaacatttcattttcaccattttttacacaccccccaactatanaacaagtgtaacttaaagcgtgntgtgtttccaaanccncacnctcaaaacaacataancaacnacttcttgtnntaatactattgtattatcatcagatttttttttttttccgggaataaaacacatctttattaggtgtaatatataatattttcttgtataatggatcttccatcgtccggattatcactaacatctgctgacaatatcaatactagcatgaatattacttccactacaaaaaccttttttctttcacca

SEQ ID NO: 114091 - DNA, 349 bp, Arabidopsis thaliana columbia
  unsure (1)..(349): unsure at all n locations
gtgagtctttaattgttggaagagaaactgaatcttatctaggctgcatgagtgtattaatattgcgcatatctttgntaactttggtcatatggaacagatttaacttcactagattgcctgagatcattctgctgcagactcttgtgcacgtttttgaacttctcttaatctctgagttagattgtgtttcactagttaggttagaacatggcatagaacatttttgacacaatccaaccgcaaaattttaaagctatgtttggttattatgacattgaagatttgcatgtgtacctaaaaacatttttttaactctttttcttttgagtaattgtttgagctagat

SEQ ID NO: 114092 - DNA, 357 bp, Arabidopsis thaliana columbia
gtcctcaccggaacgcgcctactctctttccacatcgtacgtttcgtctctctaaattcttcaacgttaaaggtgataagaattgaatctttcccacaacccacaagaaaattcgaatcctttctctctttctatctcttagtcacgctttcgatcagcaatctcctcgaattctggttggttccgtctctgttttctgtacacaaagccctgctgctgttgatacacgtgagccgccattaatgcccctttgttttcttcttccagctgatttaggaagttggtgatcaaattacatctagtgtttgtttccgccagctgaagtgaatcaaaatgtttagttttggccgagcaaga

SEQ ID NO: 114093 - DNA, 363 bp, Arabidopsis thaliana columbia
cacgtcccttttatttatgagaagaaagagccattacaagtgaggtgggggagacacatattgttttagtgttctttcaaaacgtaaagtccactgaaataaacaaacacatcatactaactctaccatagctgctgatgcagcagctgacgtatgattaagccttgggtactctgttatctgcaaaacctcaagcatgtcagtgtgcaatgtcattgcttaagatgtttccttagaatttttaagagcagtcagctttaatttgctaggcagaaagcgatcgtgcatgtctctgtagttactattgaaaccaggtaaggccaatcacagaattgcacacaatactacgcaacccaaaagtga

SEQ ID NO: 114094 - DNA, 261 bp, Arabidopsis thaliana columbia
ggggccacacacactctcttaatgcccgtacattgagatttatattaccctatcacagaccaaaggccgtggctataaacatgtgtgtgtccatcaaaccccaaacccaaaaccctatccaatctccatgactagtctcccctcttcggactgtcaaaacttatcttactaaaacatccaagtaccaaaaacaactaacaacaacctataccccacataaccacaccaaaccaaaacctacatttccatcttaagcaaaaa

SEQ ID NO: 114095 - DNA, 361 bp, Arabidopsis thaliana columbia
gggaagcctttgacggacacaaaagatgataaaagcttaccagtctgctggaaaggcaaaaaacctttgaaatcacttgatgaggttaagaaatacttcaagacgattactttacgatttgggaatcaaaagaatggtcagctatttcaggttccacctgagtcgtatctcataatcaccgtaagtcacacatatactggcctagatatgacttgtatctccataaaaatctatagctgagaagtctgtttcttctggtttgttttctcaggaaaaaggaagagtatgtttgggtattctgaatggaactgaaatcggtctcgagggctacaatatcattggaggtacgtatatatatact

SEQ ID NO: 114096 - DNA, 365 bp, Arabidopsis thaliana columbia
ctctaagtttggtaagcgttcttcaagtggtaccaaccactgtccagaggaattaacttcactagccatagctctttactacttacttgctctattccgtattcttatttaatgaccctctttgcttctgcttccttcttatcattcactcacgacactaaccatgaccaaattctccgagccaatcagagactcccacgtggcagttctcgcgtttttccccgttggcgctcatgccggtcctctcttagccgtcactcgccgtctcgccgccgcttctccctccaccatcttttctttcttcaacaccgcaagatcaaacgcgtcgttgttctcctctgatcatcccgagaacatcaaggtcc

SEQ ID NO: 114097 - DNA, 358 bp, Arabidopsis thaliana columbia
ggccggtgtatgaaatcttgggaagatgagccgccgtagttaaggtcgaggttctggagctgctccatgagctgcgaacgtctttccttgaagaaatcaagacgtgttgttaactctaccagagctgctgatgcagcagctgacggatgattaagccttgggtactctgttatctgcaaaacctcaagcatgttagtgtgcaatgtcattgcttaagatgtttccttagaatttttaagagcagtcagctttaatttgctaggcagaaagcgatcgtgcatgtctctgtagttactattgaaaccaggtaaggccaatcacagaattgcacacaatactacgcaacccaaaagtgaag
